United States Patent Application Publication US 2024/0327476 A1 - sequence listing, part 84

SEQ ID NO: 160794 - DNA, 3312 bp, synthetic construct
  misc_feature 1..3312: note = Description of Artificial Sequence: Synthetic coding sequence
  source 1..3312: mol_type = other DNA
ggcaccaaggccggcagccctgtgaatggccagaagcagggccacgcccaggccacccccaagatccccctgaacctgcacctgcaccacgaccccttccgcagcctgcaggagcccaggcaccagccccccaccatgggcagcaaggagcgcttccactggcagagccacaacgtgaagcagagcggcgtggatgacatggtgctgctgccccagatcacagaagatgccatcgccgccaacctgaggaagcgcttcatggatgactacatcttcacctacatcggctctgtgctgatctctgtgaaccccttcaagcagatgccctacttcacagaccgggagattgacctgtaccagggcgccgcccagtatgagaaccccccccacatctatgccctgacagacaacatgtacagaaacatgctgattgactgtgagaaccagtgtgtgatcatcagcggggagagcggggccggcaagacagtggccgccaagtacatcatgggctacatcagcaaggtgtctgggggcggggagaaggtgcagcacgtgaaggacatcatcctgcagagcaaccccctgctggaggcctttggaaatgccaagacagtgaggaacaacaacagcagcagatttgggaagtactttgagatccagttcagccggggcggggagccagatggcggcaagatcagcaacttcctgctggagaagagccgggtggtgatgcagaatgaaaatgaaagaaacttccacatctactaccagctgctggagggcgccagccaggagcagaggcagaacctgggcctgatgaccccagactactactactacctgaaccagagcgacacctaccaggtggatggaacagatgacagaagtgactttggagagaccctgagcgccatgcaggtgattggcatccccccatccatccagcagctggtgctgcagctggtggccggcatcctgcacctgggcaacatctccttctgtgaagatggcaactatgcccgggtggagagcgtggacctgctggccttccctgcctacctgctgggcattgattctggccgcctgcaggagaagctgaccagcaggaagatggacagccgctggggcggccgctctgagagcatcaacgtgaccctgaatgtggagcaggccgcctacaccagagatgccctggccaagggcctgtatgcccggctgtttgacttcctggtggaggccatcaacagagccatgcagaagccccaggaggagtacagcattggagtgctggacatctacggctttgagatcttccagaagaatggatttgagcagttctgcatcaactttgtgaatgagaagctgcagcagatcttcatcgagctgaccctgaaggccgagcaggaggagtatgtgcaggagggcatccgctggacccccatccagtacttcaacaacaaggtggtgtgtgacctgattgagaacaagctgagccccccaggcatcatgtctgtgctggatgatgtgtgtgccaccatgcacgccaccggcggcggcgctgaccagaccctgctgcagaagctgcaggccgctgtgggcacccatgagcacttcaacagctggagcgctggctttgtgatccaccactacgccggcaaggtgtcctatgatgtgtctggcttctgtgagaggaacagagatgtgctcttcagtgacctgattgagctgatgcagaccagcgagcaggccttcctgaggatgctgtttcctgagaagctggatggagacaagaagggccggcccagcacagctggcagcaagatcaagaagcaggccaatgacctggtggccaccctgatgcgctgcaccccccactacatccgctgcatcaagcccaatgagaccaagaggccccgggactgggaggagaacagagtgaagcaccaggtggagtacctgggcctgaaggagaacatccgggtgcggcgggccggctttgcctaccgccggcagtttgccaagttcctgcagagatatgccatcctgaccccagagacctggccccgctggagaggagatgagcggcagggcgtgcagcacctgctgcgggctgtgaacatggagccagaccagtaccagatgggcagcaccaaggtgtttgtgaagaaccctgagagcctcttcctgctggaggaggtgcgggagaggaagtttgatggctttgcccggaccatccagaaggcctggaggagacatgtggccgtgaggaaatatgaggagatgagggaggaggccagcaacatcctgctgaacaagaaggagaggagaagaaattccatcaacagaaactttgtgggggactacctgggcctggaggagaggcctgagctgcggcagttcctgggcaagcgggagcgggtggactttgctgacagcgtgaccaagtatgaccggcgcttcaagcccatcaagagggacctgatcctgacccccaagtgtgtgtatgtgattggccgggagaaggtgaagaagggccctgagaagggccaggtgtgtgaggtgctgaagaagaaggtggacatccaggccctgcggggcgtgtccctgagcacccggcaggatgacttcttcatcctgcaggaggatgctgctgacagcttcctggagagcgtcttcaagacagaatttgtgtccctgctgtgcaagagatttgaggaggccacccggcggcccctgcccctgaccttcagtgacaccctgcagttccgggtgaagaaggagggctggggcggcggcggcaccaggtctgtgaccttcagccggggctttggagacctggccgtgctgaaggtgggcggccgcaccctgactgtgtctgtgggagatggcctgcccaagagcagcaagcccaccaggaagggcatggccaagggcaagcccaggaggagcagccaggcccccacccgggccgccccagccccaccccggggcatggacagaaatggagtgccccccagcgcccggggcggccccctgcccggggaccacgtgtggaggggccacccccaggccagccctggcctgcggccccacccctgggagccagcagatgatcctggccacgtgcggccccagagcaccacccagaacagcagcacctgcctgacccgggcctggccagcctgccggggcagcgctgcctggggcaatggccagtgcctggtgtgggccgaccccagccccagcctgggccacatggtgcctggggccggcccctacaccagcacctgggccaagatgtggaccagctag

SEQ ID NO: 160795 - DNA, 3297 bp, synthetic construct
  misc_feature 1..3297: note = Description of Artificial Sequence: Synthetic coding sequence
  source 1..3297: mol_type = other DNA
atgggcagcaaggagcgcttccactggcagagccacaacgtgaagcagagcggcgtggatgacatggtgctgctgccccagatcacagaagatgccatcgccgccaacctgaggaagcgcttcatggatgactacatcttcacctacatcggctctgtgctgatctctgtgaaccccttcaagcagatgccctacttcacagaccgggagattgacctgtaccagggcgccgcccagtatgaaaatccaccccacatctatgccctgacagacaacatgtacagaaacatgctgattgactgtgagaaccagtgtgtgatcatctctggagagagcggggccggcaagacagtggccgccaagtacatcatgggctacatcagcaaggtgtctgggggcggggagaaggtgcagcacgtgaaggacatcatcctgcagagcaaccccctgctggaggcctttggaaatgccaagacagtgaggaacaacaacagcagcagatttgggaagtactttgagatccagttcagcagaggaggagagccagatggcggcaagatcagcaacttcctgctggagaagagccgggtggtgatgcagaatgaaaatgaaagaaacttccacatctactaccagctgctggagggcgccagccaggagcagaggcagaacctgggcctgatgaccccagactactactactacctgaaccagagcgacacctaccaggtggatggaacagatgacagaagtgactttggagagaccctgagcgccatgcaggtgattggcatcccccccagcatccagcagctggtgctgcagctggtggccggcatcctgcacctgggcaacatctccttctgtgaagatggcaactatgcccgggtggagagcgtggacctgctggccttccctgcctacctgctgggcatcgacagcggccgcctgcaggagaagctgaccagcaggaagatggacagccgctggggcggccgctctgagagcatcaacgtgaccctgaatgtggagcaggccgcctacaccagagatgccctggccaagggcctgtatgcccggctgtttgacttcctggtggaggccatcaacagagccatgcagaagccccaggaggagtacagcattggagtgctggacatctacggctttgagatcttccagaagaatggatttgagcagttctgcatcaactttgtgaatgagaagctgcagcagatcttcatcgagctgaccctgaaggccgagcaggaggagtatgtgcaggagggcatccgctggacccccatccagtacttcaacaacaaggtggtgtgtgacctgattgagaacaagctgagccccccaggcatcatgtctgtgctggatgatgtgtgtgccaccatgcacgccactggaggcggcgctgaccagaccctgctgcagaagctgcaggccgctgtgggcacccatgagcacttcaacagctggagcgctggcttcgtcatccaccactacgccggcaaggtgtcctatgatgtgtctggcttctgtgaaagaaacagagatgtgctcttcagtgacctgattgagctgatgcagaccagcgagcaggccttcctgaggatgctgtttcctgagaagctggatggagacaagaagggccggcccagcacagctggcagcaagatcaagaagcaggccaatgacctggtggccaccctgatgcgctgcaccccccactacatccgctgcatcaagcccaatgagaccaagaggccccgggactgggaggagaacagagtgaagcaccaggtggagtacctgggcctgaaggagaacatccgggtgagaagagctggctttgcctaccgccggcagtttgccaagttcctgcagagatatgccatcctgaccccagagacctggccccgctggagaggagatgagcggcagggcgtgcagcacctgctgcgggctgtgaacatggagccagaccagtaccagatgggcagcaccaaggtgtttgtgaagaaccctgagagcctcttcctgctggaggaggtgcgggagaggaagtttgatggctttgcccggaccatccagaaggcctggaggagacatgtggccgtgaggaaatatgaggagatgagggaggaggccagcaacatcctgctgaacaagaaggagaggagaagaaacagcatcaacagaaactttgtgggggactacctgggcctggaggagaggcctgagctgcggcagttcctgggcaagcgggagcgggtggactttgctgacagcgtgaccaagtatgaccggcgcttcaagcccatcaagagggacctgatcctgacccccaagtgtgtgtatgtgattggccgggagaaggtgaagaagggccctgagaagggccaggtgtgtgaggtgctgaagaagaaggtggacatccaggccctgcggggcgtgtccctgagcacccggcaggatgacttcttcatcctgcaggaggatgctgctgacagcttcctggagagcgtcttcaagacagaatttgtgtccctgctgtgcaagagatttgaggaggccacccggcggcccctgcccctgaccttcagtgacaccctgcagttccgggtgaagaaggagggctggggcggcggcggcaccaggtctgtgaccttcagccggggctttggagacctggccgtgctgaaggtgggcggccgcaccctgactgtgtctgtgggagatggcctgcccaagagcagcaagcccaccaggaagggcatggccaagggcaagccccggcgcagcagccaggcccccaccagggctgccccagccccaccccggggcatggacagaaatggagtgcccccatctgcccggggcggccccctgcccctggagatcatgtctgggggcggcacccaccggcccccccggggcccccccagcaccagcctgggcgccagcagaagaccccgggcccggcccccatctgagcacaacacagagttcctgaatgtgcctgaccagggcatggccggcatgcagaggaagaggtctgtgggccagaggcctgtgcctggggtgggccggcccaagccccagcccaggacccacggcccccgctgccgggccctgtaccagtatgtgggccaggatgtggatgagctgtccttcaacgtgaatgaagtcatcgagatcctgatggaggaccccagcggctggtggaagggccgcctgcacggccaggagggcctcttccctggcaactacgtggagaagatctag

SEQ ID NO: 160796 - DNA, 3057 bp, synthetic construct
  misc_feature 1..3057: note = Description of Artificial Sequence: Synthetic coding sequence
  source 1..3057: mol_type = other DNA
atggaggatgaggagggcccagaatatggcaagccagactttgtgctgctggaccaggtgaccatggaggacttcatgaggaacctgcagctgcgctttgagaagggccgcatctacacctacatcggggaggtgctggtgtctgtgaacccctaccaggagctgcccctgtatggccctgaggccatcgcccgctaccagggccgggagctgtatgaaagaccaccccacctgtatgctgtggccaatgctgcctacaaggccatgaagcacaggagccgggacacctgcatcgtcatctctggagagagcggggccggcaagacagaggccagcaagcacatcatgcagtacatcgctgctgtgaccaaccccagccagagagctgaggtggagcgggtgaaggatgtgctgctgaagagcacctgtgtgctggaggcctttggaaatgcccggaccaacagaaaccacaacagcagcagatttgggaagtacatggacatcaactttgacttcaagggggaccccatcggcggccacatccacagctacctgctggagaagagccgggtgctgaagcagcacgtgggggagaggaacttccacgccttctaccagctgctgcggggcagcgaggacaagcagctgcacgagctgcacctggagagaaatcctgctgtgtacaacttcacccaccagggcgccggcctgaacatgacagtgcacagcgccctggacagtgatgagcagagccaccaggccgtgacagaggccatgagggtcatcggcttcagccctgaggaggtggagagcgtgcaccgcatcctggccgccatcctgcacctgggcaacattgaatttgtggagacagaggagggcggcctgcagaaggagggcctggccgtggccgaggaggccctggtggaccacgtggccgagctgacagccaccccccgggacctggtgctgcggagcctgctggccaggacagtggccagcggcggccgggagctgattgagaagggccacacagctgctgaggccagctatgccagagatgcctgtgccaaggctgtgtaccagaggctgtttgagtgggtggtgaaccgcatcaacagcgtgatggagccccggggccgggaccccaggagagatggcaaggacacagtgattggagtgctggacatctacggctttgaggtgtttcctgtgaacagctttgagcagttctgcatcaactactgcaatgagaagctgcagcagctgttcatccagctgatcctgaagcaggagcaggaggagtatgagcgggagggcatcacctggcagagcgtggagtacttcaacaatgccaccatcgtggacctggtggagcggccccaccggggcatcctggccgtgctggatgaggcctgcagcagcgctggcaccatcacagaccgcatcttcctgcagaccctggacatgcaccaccgccaccacctgcactacaccagccggcagctgtgccccacagacaagaccatggagtttggccgggacttccgcatcaagcactatgctggagatgtgacctacagcgtggagggcttcatcgacaagaacagagacttcctgttccaggacttcaagaggctgctgtacaacagcacagaccccaccctgcgggccatgtggccagatggccagcaggacatcacagaggtgaccaagaggcccctgacagctggcaccctcttcaagaacagcatggtggccctggtggagaacctggccagcaaggagcccttctacgtgcgctgcatcaagcccaatgaagacaaggtggccggcaagctggatgagaaccactgccgccaccaggtggcctacctgggcctgctggagaatgtgcgggtgcggcgggccggctttgccagccggcagccctacagccgcttcctgctgcgctacaagatgacctgtgagtacacctggcccaaccacctgctgggcagtgacaaggctgctgtgtctgccctgctggagcagcacggcctgcagggagatgtggccttcggccacagcaagctgttcatccgcagccccaggaccctggtgaccctggagcagagccgggcccggctcatccccatcatcgtgctgctgctgcagaaggcctggaggggcaccctggcccgctggcgctgccggcggctgcgggccatctacaccatcatgcgctggttccgccgccacaaggtgcgggcccacctggccgagctgcagaggcgcttccaggccgcccggcagccccccctgtatggccgggacctggtgtggcccctgcccccagctgtgctgcagcccttccaggacacctgccacgccctcttctgccgctggagggcccggcagctggtgaagaacatccccccaagtgacatgccccagatcaaggccaaggtggccgccatgggcgccctgcagggcctgcggcaggactggggctgccggcgggcctgggcccgggactacctgagcagcgccacagacaaccccacagccagcagcctgtttgcccagaggctgaagaccctgcaggacaaggatggctttggagctgtgctcttcagcagccacgtgaggaaggtgaaccgcttccacaagatccggaacagagccctgctgctgacagaccagcacctgtacaagctggaccctgaccggcagtacagagtgatgagagctgtgcccctggaggccgtgacaggcctgtctgtgaccagcggcggggaccagctggtggtgctgcacgcccggggccaggatgacctggtggtgtgcctgcacaggagccggccccccctggacaacagagtgggggagctggtgggcgtgctggccgcccactgccagggcgagggccgcaccctggaggtgcgggtgtctgactgcatccccctgagccaccggggcgtgcggcggctcatctctgtggagcccaggcctgagcagcctgagccagacttccgctgtgcccggggcagcttcaccctgctgtggcccagcaggtag

SEQ ID NO: 160797 - DNA, 4851 bp, synthetic construct
  misc_feature 1..4851: note = Description of Artificial Sequence: Synthetic coding sequence
  source 1..4851: mol_type = other DNA
atgttccccctgattggcaagaccatcatctttgacaacttcccagaccccagcgacacctgggagatcacagagaccatcggcaagggcacctacggcaaggtgttcaaggtgctgaacaagaagaatggccagaaggctgctgtgaagatcctggaccccatccatgacattgatgaggagattgaggccgagtacaacatcctgaaggccctgagtgaccaccccaacgtggtgcgcttctacggcatctacttcaagaaggacaaggtgaatggagacaagctgtggctggtgctggagctgtgcagcggcggctctgtgacagacctggtgaagggcttcctgaagagaggagagaggatgtctgagcccctgattgcctacatcctgcacgaggccctgatgggcctgcagcacctgcacaacaacaagaccatccacagagatgtgaagggcaacaacatcctgctgaccacagagggcggcgtgaagctggtggactttggagtgtctgcccagctgaccagcaccaggcacagaagaaacacctctgtgggcacccccttctggatggcccctgaggtgattgcctgtgagcagcagctggacaccacctatgatgcccgctgtgacacctggagcctgggcatcacagccatcgagctgggagatggagacccccccctggccgacctgcaccccatgagggccctcttcaagatccccaggaaccccccacccaagctgcggcagcctgagctgtggagcgctgagttcaatgacttcatcagcaagtgcctgaccaaggactatgagaagaggcccaccgtgtctgagctgctgcagcacaagttcatcacccagatcgagggcaaggatgtgatgctgcagaagcagctgacagagttcatcggcatccaccagtgcatgggcggcacagagaaggcccggcgggagcgcatccacaccaagaagggcaacttcaaccggcccctcatcagcaacctgaaggatgtggatgacctggccaccctggagatcctggatgaaaatacagtgtctgagcagctggagaagtgctacagccgggaccagatctacgtgtatgtgggggacatcctgattgccctgaaccccttccagagcctgggcctgtacagcaccaagcacagcaagctgtacatcggcagcaagaggacagccagccccccccacatctttgccatggctgacctgggctaccagagcatgatcacctacaacagcgaccagtgcatcgtcatcagcggggagagcggggccggcaagacagaaaatgcccacctgctggtgcagcagctgactgtgctgggcaaggccaacaacagaaccctgcaggagaagatcctgcaggtgaacaacctggtggaggcctttggaaatgcctgcaccatcatcaatgacaacagcagcagatttgggaagtacctggagatgaagttcaccagcagcggggctgtggtgggcgcccagatcagcgagtacctgctggagaagagcagggtcatccaccaggccatcggggagaagaacttccacatcttctactacatctatgccggcctggccgagaagaagaagctggcccactacaagctgcctgagaacaagccaccccgctacctgcagaatgaccacctgaggacagtgcaggacatcatgaacaacagcttctacaagagccagtatgagctgattgagcagtgcttcaaggtgattggcttcaccatggagcagctgggcagcatctacagcatcctggccgccatcctgaatgtgggcaacatcgagttcagctctgtggccacagagcaccagattgacaagagccacatcagcaaccacacagccctggagaactgtgccagcctgctgtgcatccgggcagatgagctgcaggaggccctgaccagccactgtgtggtgaccagaggagagaccatcatccggcccaacacagtggagaaggccacagatgtgagagatgccatggccaagaccctgtatggccgcctcttctcctggatcgtgaactgcatcaacagcctgctgaagcatgacagcagccccagcggaaatggagatgagctgagcatcggcatcctggacatctttggatttgagaacttcaagaagaacagctttgagcagctgtgcatcaacatcgccaatgagcagatccagtactactacaaccagcacgtgtttgcctgggagcagaatgagtacctgaatgaagatgtggatgcccgggtgattgaatatgaggacaactggcccctgctggacatgttcctgcagaagcccatgggcctgctgagcctgctggatgaggagagccgcttccccaaggccacagaccagaccctggtggagaagtttgagggcaacctgaagagccagtacttctggaggcccaagaggatggagctgagctttggcatccaccactacgccggcaaggtgctgtacaatgccagcggcttcctggccaagaacagagacaccctgcccacagacatcgtgctgctgctgcggagcagtgacaacagcgtcatccggcagctggtgaaccaccccctgaccaagacaggcaacctgccccacagcaagaccaagaatgtcatcaactaccagatgaggaccagcgagaagctgatcaacctggccaagggggacaccggggaggccaccaggcatgcccgggagaccaccaacatgaagacccagacagtggccagctacttccgctacagcctgatggacctgctgagcaagatggtggtgggccagccccactttgtgcgctgcatcaagcccaacagcgagcggcaggccaggaaatatgacaaggagaaggtgctgctgcagctgcgctacacaggcatcctggagacagcccgcatccggcggctgggcttcagccaccgcatcctgtttgccaacttcatcaagcgctactacctgctgtgctacaagagcagcgaggagcccaggatgagcccagacacctgtgccaccatcctggagaaggccggcctggacaactgggccctgggcaagaccaaggtgttcctgaagtactaccacgtggagcagctgaacctgatgaggaaggaggccatcgacaagctgatcctgatccaggcctgtgtgcgggccttcctgtgcagccgccgctaccagaagatccaggagaagaggaaggagagcgccatcatcatccagagcgctgcccggggccacctggtgaggaagcagaggaaggagatcgtggacatgaagaacacagctgtgaccaccatccagaccagtgaccaggagtttgactacaagaagaactttgagaacacccgggagagctttgtgaagaagcaggccgagaatgccatcagcgccaatgaacgcttcatcagcgcccccaacaacaagggctctgtgtctgtggtgaagaccagcaccttcaagccagaggaggagaccaccaatgctgtggagagcaacaacagagtgtaccagacccccaagaagatgaacaacgtgtatgaggaggaggtgaagcaggagttctacctggtgggccctgaggtgagccccaagcagaagtctgtgaaggacctggaggagaacagcaacctgaggaaggtggagaaggaggaggccatgatccagagctactaccagcgctacacagaggagaggaactgtgaggagagcaaggccgcctacctggagaggaaggccatcagcgagcggcccagctaccctgtgccctggctggccgagaatgagaccagcttcaagaagaccctggagcccaccctgagccagaggagcatctaccagaatgccaacagcatggagaaggagaagaagacctctgtggtgacccagagggcccccatctgcagccaggaggagggccggggccgcctgcggcatgagaccgtgaaggagcggcaggtggagcctgtgacccaggcccaggaggaggaggacaaggctgctgtgttcatccagagcaagtaccggggctacaagaggcggcagcagctgaggaaggacaagatgagcagcttcaagcaccagagaattgtgaccacccccacagaggtggccaggaacacccacaacctgtacagctaccccaccaagcatgaggagatcaacaacatcaagaagaaggacaacaaggacagcaaggccaccagcgagcgggaggcctgtggcctggccatcttcagcaagcagatcagcaagctgtctgaggagtacttcatcctgcagaagaagctgaatgagatgatcctgagccagcagctgaagagcctgtacctgggcgtgagccaccacaagcccatcaacagaagagtgagcagccagcagtgcctgtctggagtgtgcaagggggaggagcccaagatcctgcggcccccccggcggcccaggaagcccaagaccctgaacaaccctgaggacagcacctactactacctgctgcacaagagcatccaggaggagaagagaagacccaggaaggacagccagggcaagctgctggacctggaggacttctactacaaggagttcctgcccagccgcagcggccccaaggagcacagccccagcctgcgggagcggcggccccagcaggagctgcagaaccagtgcatcaaggccaatgaacgctgctgggccgctgagagccctgagaaggaggaggagcgggagcctgctgccaacccctatgacttccggcggctgctgaggaagaccagccagaggcggcggctggtgcagcagagctag

SEQ ID NO: 160798 - DNA, 594 bp, synthetic construct
  misc_feature 1..594: note = Description of Artificial Sequence: Synthetic coding sequence
  source 1..594: mol_type = other DNA
atgttccccctgattggcaagaccatcatctttgacaacttcccagaccccagcgacacctgggagatcacagagaccatcggcaagggcacctacggcaaggtgttcaaggtgctgaacaagaagaatggccagaaggctgctgtgaagatcctggaccccatccatgacattgatgaggagattgaggccgagtacaacatcctgaaggccctgagtgaccaccccaacgtggtgcgcttctacggcatctacttcaagaaggacaaggtgaatggagacaagctgtggctggtgctggagctgtgcagcggcggctctgtgacagacctggtgaagggcttcctgaagagaggagagaggatgtctgagcccctgattgcctacatcctgcacgaggccctgatgggcctgcagcacctgcacaacaacaagaccatccacagagatgtgaagggcaacaacatcctgctgaccacagagggcggcgtgaagctggtggactttggagtgtctgcccagctgaccagcaccaggcacagaagaaacacctctgtgggcacccccttctggatggcccctgaggtgaggtag

SEQ ID NO: 160799 - DNA, 744 bp, synthetic construct
  misc_feature 1..744: note = Description of Artificial Sequence: Synthetic coding sequence
  source 1..744: mol_type = other DNA
atgttccccctgattggcaagaccatcatctttgacaacttcccagaccccagcgacacctgggagatcacagagaccatcggcaagggcacctacggcaaggtgttcaaggtgctgaacaagaagaatggccagaaggctgctgtgaagatcctggaccccatccatgacattgatgaggagattgaggccgagtacaacatcctgaaggccctgagtgaccaccccaacgtggtgcgcttctacggcatctacttcaagaaggacaaggtgaatggagacaagctgtggctggtgctggagctgtgcagcggcggctctgtgacagacctggtgaagggcttcctgaagagaggagagaggatgtctgagcccctgattgcctacatcctgcacgaggccctgatgggcctgcagcacctgcacaacaacaagaccatccacagagatgtgaagggcaacaacatcctgctgaccacagagggcggcgtgaagctggtggactttggagtgtctgcccagctgaccagcaccaggcacagaagaaacacctctgtgggcacccccttctggatggcccctgaggtgattgcctgtgagcagcagctggacaccacctatgatgcccgctgtgacacctggagcctgggcatcacagccatcgagctgggagatggagacccccccctggccgacctgcaccccatgagggccctcttcaagatccccaggagtgatgactag

SEQ ID NO: 160800 - DNA, 1995 bp, synthetic construct
  misc_feature 1..1995: note = Description of Artificial Sequence: Synthetic coding sequence
  source 1..1995: mol_type = other DNA
atgttccccctgattggcaagaccatcatctttgacaacttcccagaccccagcgacacctgggagatcacagagaccatcggcaagggcacctacggcaaggtgttcaaggtgctgaacaagaagaatggccagaaggctgctgtgaagatcctggaccccatccatgacattgatgaggagattgaggccgagtacaacatcctgaaggccctgagtgaccaccccaacgtggtgcgcttctacggcatctacttcaagaaggacaaggtgaatggagacaagctgtggctggtgctggagctgtgcagcggcggctctgtgacagacctggtgaagggcttcctgaagagaggagagaggatgtctgagcccctgattgcctacatcctgcacgaggccctgatgggcctgcagcacctgcacaacaacaagaccatccacagagatgtgaagggcaacaacatcctgctgaccacagagggcggcgtgaagctggtggactttggagtgtctgcccagctgaccagcaccaggcacagaagaaacacctctgtgggcacccccttctggatggcccctgaggtgattgcctgtgagcagcagctggacaccacctatgatgcccgctgtgacacctggagcctgggcatcacagccatcgagctgggagatggagacccccccctggccgacctgcaccccatgagggccctcttcaagatccccaggaaccccccacccaagctgcggcagcctgagctgtggagcgctgagttcaatgacttcatcagcaagtgcctgaccaaggactatgagaagaggcccaccgtgtctgagctgctgcagcacaagttcatcacccagatcgagggcaaggatgtgatgctgcagaagcagctgacagagttcatcggcatccaccagtgcatgggcggcacagagaaggcccggcgggagcgcatccacaccaagaagggcaacttcaaccggcccctcatcagcaacctgaaggatgtggatgacctggccaccctggagatcctggatgaaaatacagtgtctgagcagctggagaagtgctacagccgggaccagatctacgtgtatgtgggggacatcctgattgccctgaaccccttccagagcctgggcctgtacagcaccaagcacagcaagctgtacatcggcagcaagaggacagccagccccccccacatctttgccatggctgacctgggctaccagagcatgatcacctacaacagcgaccagtgcatcgtcatcagcggggagagcggggccggcaagacagaaaatgcccacctgctggtgcagcagctgactgtgctgggcaaggccaacaacagaaccctgcaggagaagatcctgcaggtgaacaacctggtggaggcctttggaaatgcctgcaccatcatcaatgacaacagcagcagatttgggaagtacctggagatgaagttcaccagcagcggggctgtggtgggcgcccagatcagcgagtacctgctggagaagagcagggtcatccaccaggccatcggggagaagaacttccacatcttctactacatctatgccggcctggccgagaagaagaagctggcccactacaagctgcctgagaacaagccaccccgctacctgcagaatgaccacctgaggacagtgcaggacatcatgaacaacagcttctacaagagccagtatgagctgattgagcagtgcttcaaggtgattggcttcaccatggaggtgctgggcggcggggagccccgggagggcggcggggagcgggccagcagccagcccctgcggctgcaggaggccccagcccagaacctgcctgccccagcccccaggcctgctgtgctgactgtgcagaggggcagccacagaagaaggaaggccctggagcccgccggccagcagggccccagccgccacagcggggccggcaccagccgccactag

SEQ ID NO: 160801 - DNA, 3834 bp, synthetic construct
  misc_feature 1..3834: note = Description of Artificial Sequence: Synthetic coding sequence
  source 1..3834: mol_type = other DNA
aagcacctgtatggcctcttccactacaaccccatgatgctgggcctggagagcctgcctgaccccacagacacctgggagatcatcgagaccatcggcaagggcacctacggcaaggtgtacaaggtgaccaacaagagagatggcagcctggccgctgtgaagatcctggaccctgtgtctgacatggatgaggagattgaagctgagtacaacatcctgcagttcctgcccaaccaccccaacgtggtgaagttctacggcatgttctacaaggctgaccactgtgtgggcggccagctgtggctggtgctggagctgtgcaatggaggctctgtgacagagctggtgaagggcctgctgcgctgtggccagaggctggatgaggccatgatctcctacatcctgtatggagccctgctgggcctgcagcacctgcacaacaaccgcatcatccacagagatgtgaagggcaacaacatcctgctgaccacagaaggaggagtgaagctggtggactttggagtgtctgcccagctgaccagcacccggctgcggaggaacacctctgtgggcacccccttctggatggcccctgaggtgattgcctgtgagcagcagtatgacagcagctatgatgcccgctgtgatgtgtggagcctgggcatcacagccatcgagctgggagatggagacccccccctgtttgacatgcaccctgtgaagaccctcttcaagatccccagaaatcctccacccaccctgctgcaccctgagaagtggtgtgaggagttcaaccacttcatcagccagtgcctgatcaaggactttgaaagaagacccagcgtgacccacctgctggaccaccccttcatcaagggcgtgcacggcaaggtgctcttcctgcagaagcagctggccaaggtgctgcaggaccagaagcaccagaaccctgtggccaagaccaggcatgagaggatgcacacccggcggccctaccacgtggaggatgctgagaagtactgcctggaggatgacctggtgaacctggaggtgctggatgaggacaccatcatccaccagctgcagaagagatatgctgacctgctgatctacacctacgtgggggacatcctgattgccctgaaccccttccagaacctgagcatctacagcccccagttcagccggctgtaccacggcgtgaagagggccagcaaccccccccacatctttgccagcgcagatgctgcctaccagtgcatggtgaccctgagcaaggaccagtgcatcgtcatcagcggggagagcggcagcggcaagacagagagcgcccacctgattgtgcagcacctgaccttcctgggcaaggccaacaaccagaccctgcgggagaagatcctgcaggtgaacagcctggtggaggcctttggaaacagctgcacagccatcaatgacaacagcagcagatttgggaagtacctggagatgatgttcacccccaccggggtggtgatgggcgcccgcatcagcgagtacctgctggagaagagcagggtcatcaagcaggccgcccgggagaagaacttccacatcttctactacatctatgccggcctgcaccaccagaagaagctgagtgacttccggctgcctgaggagaagccaccccgctacatcgcagatgagaccggccgggtgatgcatgacatcaccagcaaggagagctaccgccggcagtttgaggccatccagcactgcttccgcatcatcggcttcacagacaaggaggtgcacagcgtgtaccgcatcctggccggcatcctgaacatcggcaacatcgagtttgctgccatcagcagccagcaccagacagacaagtctgaggtgcccaatgctgaggccctgcagaatgctgcctctgtgctgtgcatcagccctgaggagctgcaggaggccctgaccagccactgtgtggtgaccagaggagagaccatcatccgggccaacacagtggacagagctgctgatgtgagagatgccatgagcaaggccctgtatggccgcctcttctcctggatcgtgaaccgcatcaacaccctgctgcagccagatgagaacatctgcagcgctgggggcggcatgaatgtgggcatcctggacatctttggatttgagaacttccagaggaacagctttgagcagctgtgcatcaacatcgccaatgagcagatccagtactacttcaaccagcacgtgtttgccctggagcagatggagtaccagaatgaaggaattgatgctgtgcctgtggagtatgaggacaaccggcccctgctggacatgttcctgcagaagcccctgggcctgctggccctgctggatgaggagagccgcttcccccaggccacagaccagaccctggtggacaagtttgaggacaacctgcgctgcaagtacttctggaggcccaagggcgtggagctgtgcttcggcatccagcactacgccggcaaggtgctgtatgatgccagcggcgtgctggagaagaacagagacaccctgcctgcagatgtggtggtggtgctgcggaccagcgagaacaagctgctgcagcagctgttcagcatccccctgaccaagacaggcaacctggcccagacccgggcccgcatcaccgtggccagcagcagcctgcccccccacttctctgctgggaaggccaaggtggacaccctggaggtgatccgccaccctgaggagaccaccaacatgaagaggcagacagtggccagctacttccgctacagcctgatggacctgctgagcaagatggtggtgggccagccccactttgtgcgctgcatcaagcccaatgatgaccgggaggccctgcagttcagccgggagcgggtgctggcccagctgcggagcacaggcatcctggagaccgtgtccatccggcggcagggctacagccaccgcatcctgtttgaggagtttgtgaagcgctactactacctggccttcaccgcccaccagacccccctggccagcaaggagagctgtgtggccatcctggagaagagccggctggaccactgggtgctgggcaagaccaaggtgttcctgaagtactaccacgtggagcagctgaacctgctgctgcgggaggtgattggccgggtggtggtgctgcaggcctacaccaagggctggctgggcgcccggcgctacaagagggtgcgggagaagcgggagaagggggccatcgccatccagagcgcctggaggggctatgatgcccggaggaagttcaagaagatcagcaacagaagaaatgaatctgctgcccacaaccaggccggggacaccagcaaccagagcagcggcccccacagccctgtggccgccggcacccggggcagcgctgaggtgcaggactgcagcgagcccggggaccacaaggtgctgcggggctctgtgcaccggcgcagccacagccaggccgagagcaacaacggccgcacccagaccagcagcaacagccctgctgtgacagagaagaatggccacagccaggcccagagcagccccaagggctgtgacatctttgctggccacgccaacaagcacagcgtgtctggaacagacctgctgagcagccgcatctgccacccagccccagaccagcagggcctgagcctgtggggcgccccccagaagccagccttcccccactacggctgcaacttctacggcttcaggaagtggagctgcacagaggccagcaacaccagccccaccatgtctgctgcccagaatgctgagtag

SEQ ID NO: 160802 - DNA, 4053 bp, synthetic construct
  misc_feature 1..4053: note = Description of Artificial Sequence: Synthetic coding sequence
  source 1..4053: mol_type = other DNA
atgctgcagagcgccctgctgagcaccaggaagcacctgtatggcctcttccactacaaccccatgatgctgggcctggagagcctgcctgaccccacagacacctgggagatcatcgagaccatcggcaagggcacctacggcaaggtgtacaaggtgaccaacaagagagatggcagcctggccgctgtgaagatcctggaccctgtgtctgacatggatgaggagattgaagctgagtacaacatcctgcagttcctgcccaaccaccccaacgtggtgaagttctacggcatgttctacaaggctgaccactgtgtgggcggccagctgtggctggtgctggagctgtgcaatggaggctctgtgacagagctggtgaagggcctgctgcgctgtggccagaggctggatgaggccatgatctcctacatcctgtatggagccctgctgggcctgcagcacctgcacaacaaccgcatcatccacagagatgtgaagggcaacaacatcctgctgaccacagaaggaggagtgaagctggtggactttggagtgtctgcccagctgaccagcacccggctgcggaggaacacctctgtgggcacccccttctggatggcccctgaggtgattgcctgtgagcagcagtatgacagcagctatgatgcccgctgtgatgtgtggagcctgggcatcacagccatcgagctgggagatggagacccccccctgtttgacatgcaccctgtgaagaccctcttcaagatccccagaaatcctccacccaccctgctgcaccctgagaagtggtgtgaggagttcaaccacttcatcagccagtgcctgatcaaggactttgaaagaagacccagcgtgacccacctgctggaccaccccttcatcaagggcgtgcacggcaaggtgctcttcctgcagaagcagctggccaaggtgctgcaggaccagaagcaccagaaccctgtggccaagaccaggcatgagaggatgcacacccggcggccctaccacgtggaggatgctgagaagtactgcctggaggatgacctggtgaacctggaggtgctggatgaggacaccatcatccaccagctgcagaagagatatgctgacctgctgatctacacctacgtgggggacatcctgattgccctgaaccccttccagaacctgagcatctacagcccccagttcagccggctgtaccacggcgtgaagagggccagcaaccccccccacatctttgccagcgcagatgctgcctaccagtgcatggtgaccctgagcaaggaccagtgcatcgtcatcagcggggagagcggcagcggcaagacagagagcgcccacctgattgtgcagcacctgaccttcctgggcaaggccaacaaccagaccctgcgggagaagatcctgcaggtgaacagcctggtggaggcctttggaaacagctgcacagccatcaatgacaacagcagcagatttgggaagtacctggagatgatgttcacccccaccggggtggtgatgggcgcccgcatcagcgagtacctgctggagaagagcagggtcatcaagcaggccgcccgggagaagaacttccacatcttctactacatctatgccggcctgcaccaccagaagaagctgagtgacttccggctgcctgaggagaagccaccccgctacatcgcagatgagaccggccgggtgatgcatgacatcaccagcaaggagagctaccgccggcagtttgaggccatccagcactgcttccgcatcatcggcttcacagacaaggaggtgcacagcgtgtaccgcatcctggccggcatcctgaacatcggcaacatcgagtttgctgccatcagcagccagcaccagacagacaagtctgaggtgcccaatgctgaggccctgcagaatgctgcctctgtgctgtgcatcagccctgaggagctgcaggaggccctgaccagccactgtgtggtgaccagaggagagaccatcatccgggccaacacagtggacagagctgctgatgtgagagatgccatgagcaaggccctgtatggccgcctcttctcctggatcgtgaaccgcatcaacaccctgctgcagccagatgagaacatctgcagcgctgggggcggcatgaatgtgggcatcctggacatctttggatttgagaacttccagaggaacagctttgagcagctgtgcatcaacatcgccaatgagcagatccagtactacttcaaccagcacgtgtttgccctggagcagatggagtaccagaatgaaggaattgatgctgtgcctgtggagtatgaggacaaccggcccctgctggacatgttcctgcagaagcccctgggcctgctggccctgctggatgaggagagccgcttcccccaggccacagaccagaccctggtggacaagtttgaggacaacctgcgctgcaagtacttctggaggcccaagggcgtggagctgtgcttcggcatccagcactacgccggcaaggtgctgtatgatgccagcggcgtgctggagaagaacagagacaccctgcctgcagatgtggtggtggtgctgcggaccagcgagaacaagctgctgcagcagctgttcagcatccccctgaccaagacaggcaacctggcccagacccgggcccgcatcaccgtggccagcagcagcctgcccccccacttctctgctgggaaggccaaggtggacaccctggaggtgatccgccaccctgaggagaccaccaacatgaagaggcagacagtggccagctacttccgctacagcctgatggacctgctgagcaagatggtggtgggccagccccactttgtgcgctgcatcaagcccaatgatgaccgggaggccctgcagttcagccgggagcgggtgctggcccagctgcggagcacaggcatcctggagaccgtgtccatccggcggcagggctacagccaccgcatcctgtttgaggagtttgtgaagcgctactactacctggccttcaccgcccaccagacccccctggccagcaaggagagctgtgtggccatcctggagaagagccggctggaccactgggtgctgggcaagaccaaggtgttcctgaagtactaccacgtggagcagctgaacctgctgctgcgggaggtgattggccgggtggtggtgctgcaggcctacaccaagggctggctgggcgcccggcgctacaagagggtgcgggagaagcgggagaagggggccatcgccatccagagcgcctggaggggctatgatgcccggaggaagttcaagaagatcagcaacagaagaaatgaatctgctgcccacaaccaggccggggacaccagcaaccagagcagcggcccccacagccctgtggccgccggcacccggggcagcgctgaggtgcaggactgcagcgagcccggggaccacaaggtgctgcggggctctgtgcaccggcgcagccacagccaggccgagagcaacaacggccgcacccagaccagcagcaacagccctgctgtgacagagaagaatggccacagccaggcccagagcagccccaagggctgtgacatctttgctggccacgccaacaagcacagcgtgtctggaacagacctgctgagcagccgcatctgccacccagccccagaccagcagggcctgagcctgtggggcgccccccagaagccaggctctgaaaatggcctggcccagaagcacaggaccccaagaagacgctgccagcagcccaagatgctgagcagccctgaggacaccatgtactacaaccagctgaatggcaccctggagtaccagggcagcaagaggaagcccaggaagctgggccagatcaaggtgctggatggagaagatgagtactacaagagcctgagccctgtggactgcatccctgaggagaacaacagcgcccaccccagcttcttcagcagcagcagcaaaggagacagctttgcccagcactag

SEQ ID NO: 160803 - DNA, 4026 bp, synthetic construct
  misc_feature 1..4026: note = Description of Artificial Sequence: Synthetic coding sequence
  source 1..4026: mol_type = other DNA
atgaagcacctgtatggcctcttccactacaaccccatgatgctgggcctggagagcctgcctgaccccacagacacctgggagatcatcgagaccatcggcaagggcacctacggcaaggtgtacaaggtgaccaacaagagagatggcagcctggccgctgtgaagatcctggaccctgtgtctgacatggatgaggagattgaggccgagtacaacatcctgcagttcctgcccaaccaccccaacgtggtgaagttctacggcatgttctacaaggctgaccactgtgtgggcggccagctgtggctggtgctggagctgtgcaatggaggctctgtgacagagctggtgaagggcctgctgcgctgtggccagaggctggatgaggccatgatctcctacatcctgtatggagccctgctgggcctgcagcacctgcacaacaaccgcatcatccacagagatgtgaagggcaacaacatcctgctgaccacagagggcggcgtgaagctggtggactttggagtgtctgcccagctgaccagcacccggctgcggaggaacacctctgtgggcacccccttctggatggcccctgaggtgattgcctgtgagcagcagtatgacagcagctatgatgcccgctgtgatgtgtggagcctgggcatcacagccatcgagctgggagatggagacccccccctgtttgacatgcaccctgtgaagaccctcttcaagatccccaggaaccccccacccaccctgctgcaccctgagaagtggtgtgaggagttcaaccacttcatcagccagtgcctgatcaaggactttgagcggcggcccagcgtgacccacctgctggaccaccccttcatcaagggcgtgcacggcaaggtgctcttcctgcagaagcagctggccaaggtgctgcaggaccagaagcaccagaaccctgtggccaagaccaggcatgagaggatgcacacccggcggccctaccacgtggaggatgctgagaagtactgcctggaggatgacctggtgaacctggaggtgctggatgaggacaccatcatccaccagctgcagaagagatatgctgacctgctgatctacacctacgtgggggacatcctgattgccctgaaccccttccagaacctgagcatctacagcccccagttcagccggctgtaccatggagtgaagagggccagcaaccccccccacatctttgccagcgcagatgctgcctaccagtgcatggtgaccctgagcaaggaccagtgcatcgtcatctctggagagagcggcagcggcaagacagaaagtgcccacctgattgtgcagcacctgaccttcctgggcaaggccaacaaccagaccctgcgggagaagatcctgcaggtgaacagcctggtggaggccttcggcaacagctgcacagccatcaatgacaacagcagcagatttgggaagtacctggagatgatgttcacccccactggagtggtgatgggcgcccgcatcagcgagtacctgctggagaagagcagggtcatcaagcaggccgcccgggagaagaacttccacatcttctactacatctatgccggcctgcaccaccagaagaagctgagtgacttccggctgcctgaggagaagcccccacgctacatcgcagatgaaacaggccgggtgatgcatgacatcaccagcaaggagagctaccgccggcagtttgaggccatccagcactgcttccgcatcatcggcttcacagacaaggaggtgcacagcgtgtaccgcatcctggccggcatcctgaacatcggcaacattgaatttgctgccatcagcagccagcaccagacagacaagtctgaggtgcccaatgctgaggccctgcagaatgctgcctctgtgctgtgcatcagccctgaggagctgcaggaggccctgaccagccactgtgtggtgaccagaggagagaccatcatccgggccaacacagtggacagagctgctgatgtgagagatgccatgagcaaggccctgtatggccgcctcttctcctggatcgtgaaccgcatcaacaccctgctgcagccagatgagaacatctgcagcgctgggggcggcatgaatgtgggcatcctggacatcttcggctttgagaacttccagagaaattcctttgagcagctgtgcatcaacatcgccaatgagcagatccagtactacttcaaccagcacgtgtttgccctggagcagatggagtaccagaatgaaggaattgatgctgtgcctgtggagtatgaggacaaccggcccctgctggacatgttcctgcagaagcccctgggcctgctggccctgctggatgaggagagccgcttcccccaggccacagaccagaccctggtggacaagtttgaggacaacctgcgctgcaagtacttctggaggcccaagggcgtggagctgtgcttcggcatccagcactacgccggcaaggtgctgtatgatgccagcggcgtgctggagaagaacagagacaccctgcctgcagatgtggtggtggtgctgcggaccagcgagaacaagctgctgcagcagctgttcagcatccccctgaccaagacaggcaacctggcccagacccgggcccgcatcaccgtggccagcagcagcctgcccccccacttctctgctgggaaggccaaggtggacaccctggaggtgatccgccaccctgaggagaccaccaacatgaagaggcagacagtggccagctacttccgctacagcctgatggacctgctgagcaagatggtggtgggccagccccactttgtgcgctgcatcaagcccaatgatgaccgggaggccctgcagttcagccgggagcgggtgctggcccagctgcggagcacaggcatcctggagaccgtgtccatccggcggcagggctacagccaccgcatcctgtttgaggagtttgtgaagcgctactactacctggccttcaccgcccaccagacccccctggccagcaaggagagctgtgtggccatcctggagaagagccggctggaccactgggtgctgggcaagaccaaggtgttcctgaagtactaccacgtggagcagctgaacctgctgctgcgggaggtgattggccgggtggtggtgctgcaggcctacaccaagggctggctgggcgcccggcgctacaagagggtgcgggagaagcgggagaagggggccatcgccatccagagcgcctggaggggctatgatgcccggaggaagttcaagaagatcagcaacagaagaaatgaatctgctgcccacaaccaggccggggacaccagcaaccagagcagcggcccccacagccctgtggccgccggcacccggggcagcgctgaggtgcaggactgcagcgagcccggggaccacaaggtgctgcggggctctgtgcacagaagaagccacagccaggccgagagcaacaatggaagaacccagaccagcagcaacagccctgctgtgacagagaagaatggccacagccaggcccagagcagccccaagggctgtgacatctttgctggccacgccaacaagcacagcgtgtctggaacagacctgctgagcagccgcatctgccacccagccccagaccagcagggcctgagcctgtggggcgccccccagaagccaggctctgaaaatggcctggcccagaagcacaggaccccccggcggcgctgccagcagcccaagatgctgagcagccctgaggacaccatgtactacaaccagctgaatggcaccctggagtaccagggcagcaagaggaagcccaggaagctgggccagatcaaggtgctggatggagaagatgagtactacaagagcctgagccctgtggactgcatccctgaggagaacaacagcgcccaccccagcttcttcagcagcagcagcaagggggacagctttgcccagcactag

SEQ ID NO: 160804 - DNA, 3945 bp, synthetic construct
  misc_feature 1..3945: note = Description of Artificial Sequence: Synthetic coding sequence
  source 1..3945: mol_type = other DNA
atgaagcacctgtatggcctcttccactacaaccccatgatgctgggcctggagagcctgcctgaccccacagacacctgggagatcatcgagaccatcggcaagggcacctacggcaaggtgtacaaggtgaccaacaagagagatggcagcctggccgctgtgaagatcctggaccctgtgtctgacatggatgaggagattgaggccgagtacaacatcctgcagttcctgcccaaccaccccaacgtggtgaagttctacggcatgttctacaaggctgaccactgtgtgggcggccagctgtggctggtgctggagctgtgcaatggaggctctgtgacagagctggtgaagggcctgctgcgctgtggccagaggctggatgaggccatgatctcctacatcctgtatggagccctgctgggcctgcagcacctgcacaacaaccgcatcatccacagagatgtgaagggcaacaacatcctgctgaccacagagggcggcgtgaagctggtggactttggagtgtctgcccagctgaccagcacccggctgcggaggaacacctctgtgggcacccccttctggatggcccctgaggtgattgcctgtgagcagcagtatgacagcagctatgatgcccgctgtgatgtgtggagcctgggcatcacagccatcgagctgggagatggagacccccccctgtttgacatgcaccctgtgaagaccctcttcaagatccccaggaaccccccacccaccctgctgcaccctgagaagtggtgtgaggagttcaaccacttcatcagccagtgcctgatcaaggactttgagcggcggcccagcgtgacccacctgctggaccaccccttcatcaagggcgtgcacggcaaggtgctcttcctgcagaagcagctggccaaggtgctgcaggaccagaagcaccagaaccctgtggccaagaccaggcatgagaggatgcacacccggcggccctaccacgtggaggatgctgagaagtactgcctggaggatgacctggtgaacctggaggtgctggatgaggacaccatcatccaccagctgcagaagagatatgctgacctgctgatctacacctacgtgggggacatcctgattgccctgaaccccttccagaacctgagcatctacagcccccagttcagccggctgtaccatggagtgaagagggccagcaaccccccccacatctttgccagcgcagatgctgcctaccagtgcatggtgaccctgagcaaggaccagtgcatcgtcatctctggagagagcggcagcggcaagacagaaagtgcccacctgattgtgcagcacctgaccttcctgggcaaggccaacaaccagaccctgcgggagaagatcctgcaggtgaacagcctggtggaggccttcggcaacagctgcacagccatcaatgacaacagcagcagatttgggaagtacctggagatgatgttcacccccactggagtggtgatgggcgcccgcatcagcgagtacctgctggagaagagcagggtcatcaagcaggccgcccgggagaagaacttccacatcttctactacatctatgccggcctgcaccaccagaagaagctgagtgacttccggctgcctgaggagaagcccccacgctacatcgcagatgaaacaggccgggtgatgcatgacatcaccagcaaggagagctaccgccggcagtttgaggccatccagcactgcttccgcatcatcggcttcacagacaaggaggtgcacagcgtgtaccgcatcctggccggcatcctgaacatcggcaacattgaatttgctgccatcagcagccagcaccagacagacaagtctgaggtgcccaatgctgaggccctgcagaatgctgcctctgtgctgtgcatcagccctgaggagctgcaggaggccctgaccagccactgtgtggtgaccagaggagagaccatcatccgggccaacacagtggacagagctgctgatgtgagagatgccatgagcaaggccctgtatggccgcctcttctcctggatcgtgaaccgcatcaacaccctgctgcagccagatgagaacatctgcagcgctgggggcggcatgaatgtgggcatcctggacatcttcggctttgagaacttccagagaaattcctttgagcagctgtgcatcaacatcgccaatgagcagatccagtactacttcaaccagcacgtgtttgccctggagcagatggagtaccagaatgaaggaattgatgctgtgcctgtggagtatgaggacaaccggcccctgctggacatgttcctgcagaagcccctgggcctgctggccctgctggatgaggagagccgcttcccccaggccacagaccagaccctggtggacaagtttgaggacaacctgcgctgcaagtacttctggaggcccaagggcgtggagctgtgcttcggcatccagcactacgccggcaaggtgctgtatgatgccagcggcgtgctggagaagaacagagacaccctgcctgcagatgtggtggtggtgctgcggaccagcgagaacaagctgctgcagcagctgttcagcatccccctgaccaagacaggcaacctggcccagacccgggcccgcatcaccgtggccagcagcagcctgcccccccacttctctgctgggaaggccaaggtggacaccctggaggtgatccgccaccctgaggagaccaccaacatgaagaggcagacagtggccagctacttccgctacagcctgatggacctgctgagcaagatggtggtgggccagccccactttgtgcgctgcatcaagcccaatgatgaccgggaggccctgcagttcagccgggagcgggtgctggcccagctgcggagcacaggcatcctggagaccgtgtccatccggcggcagggctacagccaccgcatcctgtttgaggagtttgtgaagcgctactactacctggccttcaccgcccaccagacccccctggccagcaaggagagctgtgtggccatcctggagaagagccggctggaccactgggtgctgggcaagaccaaggtgttcctgaagtactaccacgtggagcagctgaacctgctgctgcgggaggtgattggccgggtggtggtgctgcaggcctacaccaagggctggctgggcgcccggcgctacaagagggtgcgggagaagcgggagaagggggccatcgccatccagagcggggacaccagcaaccagagcagcggcccccacagccctgtggccgccggcacccggggcagcgctgaggtgcaggactgcagcgagcccggggaccacaaggtgctgcggggctctgtgcaccggcgcagccacagccaggccgagagcaacaacggccgcacccagaccagcagcaacagccctgctgtgacagagaagaatggccacagccaggcccagagcagccccaagggctgtgacatctttgctggccacgccaacaagcacagcgtgtctggaacagacctgctgagcagccgcatctgccacccagccccagaccagcagggcctgagcctgtggggcgccccccagaagccaggctctgaaaatggcctggcccagaagcacaggaccccaagaagacgctgccagcagcccaagatgctgagcagccctgaggacaccatgtactacaaccagctgaatggcaccctggagtaccagggcagcaagaggaagcccaggaagctgggccagatcaaggtgctggatggagaagatgagtactacaagagcctgagccctgtggactgcatccctgaggagaacaacagcgcccaccccagcttcttcagcagcagcagcaaaggagacagctttgcccagcactag

SEQ ID NO: 160805 - DNA, 3390 bp, synthetic construct
  misc_feature 1..3390: note = Description of Artificial Sequence: Synthetic coding sequence
  source 1..3390: mol_type = other DNA
atgaacatcaatgatggcggcagaagaagatttgaggacaatgagcacaccctgcgcatctacccaggggccatcagcgagggcaccatctactgccccatcccagccaggaagaacagcacagctgctgaggtgattgagagcctcatcaacaagctgcacctggacaagaccaagtgctacgtgctggccgaggtgaaggagtttggaggagaggagtggatcctgaaccccacagactgccctgtgcagaggatgatgctgtggcccaggatggccctggagaaccggctgtctggagaggactaccgcttcctgctgcgggagaagaacctggatggcagcatccactacggcagcctgcagagctggctgcgggtgacagaggagaggaggaggatgatggagcggggcttcctgccccagccccagcagaaggactttgatgacctgtgcagcctgcctgacctgaatgagaagaccctgctggagaacctgaggaaccgcttcaagcatgagaagatctacacctacgtgggcagcatcctgattgtcatcaaccccttcaagttcctgcccatctacaaccccaagtatgtgaagatgtatgacaaccaccagctgggcaagctggagccccacatctatgctgtggctgatgtggcctaccacgccatgctgcagaggaagaagaaccagtgcatcgtcatcagcggggagagcggcagcggcaagacccagagcaccaacttcctgatccaccacctgacagccctgagccagaagggctttgccagcggcgtggagcagatcatcctgggcgccggccctgtgctggaggcctttggaaatgccaagacagcccacaacaacaacagcagcagatttgggaagttcatccaggtgaactaccaggagactggaacagtgctgggcgcctacgtggagaagtacctgctggagaagagccggctggtgtaccaggagcacaatgaaagaaactaccacgtgttctactacctgctggccggggcctctgaagatgagaggtctgccttccacctgaagcagcctgaggagtaccactacctgaaccaggactgcttcaccgtggagggggaggacctgcggcatgactttgagcggctgcagctggccatggagatggtgggcttcctgcccaagacccggcggcagatcttcagcctgctgagcgccatcctgcacctgggcaacatctgctacaagaagaagacctacagagatgacagcattgacatctgcaaccctgaggtgctgcccatcgtgtctgagctgctggaggtgaaggaggagatgctgtttgaggccctggtgaccaggaagacagtgacagtgggggagaagctgatcctgccctacaagctggccgaggccgtgacagtgaggaacagcatggccaagagcctgtacagcgccctgtttgactggatcgtgttccgcatcaaccacgccctgctgaacagcaaggacctggagcacaacaccaagaccctgagcattggagtgctggacatcttcggctttgaagattatgagaacaacagctttgagcagttctgcatcaactttgccaatgaaaggctgcagcactacttcaaccagcacatcttcaagctggagcaggaggagtacagaacagagggcatctcctggcacaacatcgactacatcgacaacacctgctgcatcaacctgatcagcaagaagcccaccggcctgctgcacctgctggatgaggagagcaacttcccccaggccaccaaccagaccctgctggacaagttcaagcaccagcacgaggacaacagctacatcgagttccctgctgtgatggagcccgccttcatcatcaagcactacgccggcaaggtgaagtatggagtgaaggacttccgggagaagaacacagaccacatgaggccagacatcgtggccctgctgcggagcagcaagaatgccttcatcagcggcatgattggaattgatcctgtggccgtgttccgctgggccatcctgcgggccttcttccgggccatggtggccttccgggaggccggcaagaggaacatccacaggaagacaggccatgatgacacagccccctgtgccatcctgaagtccatggacagcttctccttcctgcagcaccctgtgcaccagaggagcctggagatcctgcagcgctgcaaggaggagaagtacagcatcaccaggaagaaccccaggacccccctgagtgacctgcagggcatgaatgccctgaatgagaagaaccagcacgacacctttgatattgcctggaatggccgcacaggcatccggcagagccggctgagcagcggcaccagcctgctggacaaggatggcatctttgccaacagcaccagcagcaagctgctggagcgggcccacggcatcctgaccaggaacaagaacttcaagagcaagccagccctgcccaagcacctgctggaggtgaacagcctgaagcacctgacccggctgaccctgcaggaccgcatcaccaagagcctgctgcacctgcacaagaagaagaagccacccagcatcagcgcccagttccaggccagcctgagcaagctgatggagaccctgggccaggccgagccctactttgtgaagtgcatccgcagcaatgctgagaagctgcccctgcgcttcagtgatgtgctggtgctgcggcagctgcgctacacaggcatgctggagaccgtgcgcatccggcagagcggctacagcagcaagtacagcttccaggactttgtgagccacttccacgtgctgctgcccaggaacatcatccccagcaagttcaacatccaggacttcttcaggaagatcaacctgaacccagacaactaccaggtgggcaagaccatggtgttcctgaaggagcaggagcggcagcacctgcaggacctgctgcaccaggaggtgctgcggcgcatcatcctgctgcagcgctggttccgggtgctgctgtgccggcagcacttcctgcacctgcggcaggccagcgtcatcatccagcgcttctggaggaactacctgaaccagaagcaggtgagagatgctgctgtgcagaaggatgcctttgtgatggccagcgctgctgccctgctgcaggcctcctggagggcccacctggagcggcagcgctacctggagctgcgggctgctgccatcgtcatccagcagaagtggagggactactacagaagaagacacatggccgccatctgcatccaggcccgctggaaggcctaccgggagagcaagcgctaccaggagcagaggaagaactacccctttgccatcaacatgtag

SEQ ID NO: 160806 - DNA, 7647 bp, synthetic construct
  misc_feature 1..7647: note = Description of Artificial Sequence: Synthetic coding sequence
  source 1..7647: mol_type = other DNA
atgaacatcaatgatggcggcagaagaagatttgaggacaatgagcacaccctgcgcatctacccaggggccatcagcgagggcaccatctactgccccatcccagccaggaagaacagcacagctgctgaggtgattgagagcctcatcaacaagctgcacctggacaagaccaagtgctacgtgctggccgaggtgaaggagtttggaggagaggagtggatcctgaaccccacagactgccctgtgcagaggatgatgctgtggcccaggatggccctggagaaccggctgtctggagaggactaccgcttcctgctgcgggagaagaacctggatggcagcatccactacggcagcctgcagagctggctgcgggtgacagaggagaggaggaggatgatggagcggggcttcctgccccagccccagcagaaggactttgatgacctgtgcagcctgcctgacctgaatgagaagaccctgctggagaacctgaggaaccgcttcaagcatgagaagatctacacctacgtgggcagcatcctgattgtcatcaaccccttcaagttcctgcccatctacaaccccaagtatgtgaagatgtatgacaaccaccagctgggcaagctggagccccacatctatgctgtggctgatgtggcctaccacgccatgctgcagaggaagaagaaccagtgcatcgtcatcagcggggagagcggcagcggcaagacccagagcaccaacttcctgatccaccacctgacagccctgagccagaagggctttgccagcggcgtggagcagatcatcctgggcgccggccctgtgctggaggcctttggaaatgccaagacagcccacaacaacaacagcagcagatttgggaagttcatccaggtgaactaccaggagactggaacagtgctgggcgcctacgtggagaagtacctgctggagaagagccggctggtgtaccaggagcacaatgaaagaaactaccacgtgttctactacctgctggccggggcctctgaagatgagaggtctgccttccacctgaagcagcctgaggagtaccactacctgaaccagatcaccaagaagcccctgcggcagagctgggatgactactgctatgattctgagccagactgcttcaccgtggagggggaggacctgcggcatgactttgagcggctgcagctggccatggagatggtgggcttcctgcccaagacccggcggcagatcttcagcctgctgagcgccatcctgcacctgggcaacatctgctacaagaagaagacctacagagatgacagcattgacatctgcaaccctgaggtgctgcccatcgtgtctgagctgctggaggtgaaggaggagatgctgtttgaggccctggtgaccaggaagacagtgacagtgggggagaagctgatcctgccctacaagctggccgaggccgtgacagtgagaaattccatggccaagagcctgtacagcgccctgtttgactggatcgtgttccgcatcaaccacgccctgctgaacagcaaggacctggagcacaacaccaagaccctgagcattggagtgctggacatctttggatttgaggactatgagaacaacagctttgagcagttctgcatcaactttgccaatgaaaggctgcagcactacttcaaccagcacatcttcaagctggagcaggaggagtacagaacagagggcatctcctggcacaacatcgactacatcgacaacacctgctgcatcaacctgatcagcaagaagcccaccggcctgctgcacctgctggatgaggagagcaacttcccccaggccaccaaccagaccctgctggacaagttcaagcaccagcacgaggacaacagctacatcgagttccctgctgtgatggagcccgccttcatcatcaagcactacgccggcaaggtgaagtatggagtgaaggacttccgggagaagaacacagaccacatgaggccagacatcgtggccctgctgcggagcagcaagaatgccttcatcagcggcatgattggcatcgaccctgtggccgtgttccgctgggccatcctgcgggccttcttccgggccatggtggccttccgggaggccggcaagaggaacatccacaggaagacaggccatgatgacacagccccctgtgccatcctgaagtccatggacagcttctccttcctgcagcaccctgtgcaccagaggagcctggagatcctgcagcgctgcaaggaggagaagtacagcatcaccaggaagaaccccaggacccccctgagtgacctgcagggcatgaatgccctgaatgagaagaaccagcacgacacctttgacatcgcctggaatggaagaacaggcatccggcagagccggctgagcagcggcaccagcctgctggacaaggatggcatctttgccaacagcaccagcagcaagctgctggagcgggcccacggcatcctgaccaggaacaagaacttcaagagcaagccagccctgcccaagcacctgctggaggtgaacagcctgaagcacctgacccggctgaccctgcaggaccgcatcaccaagagcctgctgcacctgcacaagaagaagaagcccccatccatcagcgcccagttccaggccagcctgagcaagctgatggagaccctgggccaggccgagccctactttgtgaagtgcatccgcagcaatgctgagaagctgcccctgcgcttcagtgatgtgctggtgctgcggcagctgcgctacacaggcatgctggagaccgtgcgcatccggcagagcggctacagcagcaagtacagcttccaggactttgtgagccacttccacgtgctgctgcccaggaacatcatccccagcaagttcaacatccaggacttcttcaggaagatcaacctgaacccagacaactaccaggtgggcaagaccatggtgttcctgaaggagcaggagcggcagcacctgcaggacctgctgcaccaggaggtgctgcggcgcatcatcctgctgcagcgctggttccgggtgctgctgtgccggcagcacttcctgcacctgcggcaggccagcgtcatcatccagcgcttctggaggaactacctgaaccagaagcaggtgagagatgctgctgtgcagaaggatgcctttgtgatggccagcgctgctgccctgctgcaggcctcctggagggcccacctggagcggcagcgctacctggagctgcgggccgccgccatcgtcatccagcagaagtggagggactactacagaagaagacacatggccgccatctgcatccaggcccgctggaaggcctaccgggagagcaagcgctaccaggagcagaggaagaagatcatcctgctgcagagcacctgccggggcttccgggcccggcagcgcttcaaggccctgaaggagcagaggctgcgggagaccaagccagaggtgggcctggtgaacatcaagggctacggcagcctggagatccagggcagtgaccccagcggctgggaggactgcagctttgacaaccgcatcaaggccatcgaggagtgcaagtctgtgattgagagcaaccgcatcagccgggagagctctgtggactgcctgaaggagagccccaacaagcagcaggagcgggcccagagccagagcggcgtggacctgcaggaggatgtgctggtgcgggagcggcccaggagcctggaggacctgcaccagaagaaggtgggccgggccaagcgggagagcaggaggatgagggagctggagcaggccatcttcagcctggagctgctgaaggtgcgcagcctgggcggcatcagccccagcgaggaccggcgctggagcacagagctggtgcctgagggcctgcagagcccccggggcaccccagacagcgagagcagccagggcagcctggagctgctgtcctatgaggagagccagaagagcaagctggagagcgtcatcagtgatgaaggagacctgcagttccccagccccaagatcagcagcagccccaagtttgacagccgggacaatgccctgagcgccagcaatgagaccagcagcgctgagcacctgaaggatggcaccatgaaggagatggtggtgtgcagcagcgagagcatcacctgcaagccccagctgaaggacagcttcatcagcaacagcctgcccaccttcttctacatcccccagcaggaccccctgaagaccaacagccagctggacaccagcatccagaggaacaagctgctggagaatgaagacacagctggggaggccctgaccctggacatcaaccgggagacccggcgctaccactgcagcggcaaggaccagatcgtgcccagcctgaacacagagagcagcaaccctgtgctgaagaagctggagaagctgaacacagagaaggaggagcggcagaagcagctgcagcagcagaatgagaaggagatgatggagcagatccggcagcagacagacatcctggagaaggagaggaaggccttcaagaccatcgagaagccccgcatcggggagtgcctggtggcccccagcagctaccagagcaagcagagggtggagcggcccagcagcctgctgagcctgaacaccagcaacaagggggagctgaatgtgctgggcagcctgagcctgaaggatgctgccctggcccagaaggacagcagcagcgcccacctgccccccaaggacaggcctgtgaccgtcttctttgagaggaagggcagcccctgccagagcagcacagtgaaggagctgagcaagacagacaggatgggcacccagctgaatgtggcctgcaagctgagcaacaaccgcatcagcaagcgggagcacttccggcccacccagagctacagccacaacagtgatgacctgagccgggagggcaatgcccggcccatcttcttcacccccaaggacaacatgagcatccccctggtgtccaaggaggccctgaacagcaagaacccccagctgcacaaggaggatgagcccgcctggaagcctgtgaagctggccggccctggccagcgggagaccagccagcgcttcagctctgtggatgagcaggccaagctgcacaagaccatgagccagggcgagatcaccaagctggccgtgcggcagaaggccagtgacagcgacatccggccccagagggccaagatgaggttctgggccaagggcaagcagggcgagaagaagaccaccagggtgaagcccaccacccagagcgaggtgagccccctgtttgctggaacagatgtgatcccagcccaccagttcccagatgagctggccgcctaccaccccaccccacccctgagccctgagctgcccggcagctgcaggaaggagttcaaggagaacaaggagcccagccccaaggccaagaggaagaggtctgtgaagatcagcaatgtggccctggacagcatgcactggcagaatgacagcgtgcagatcatcgcctctgtgtctgacctgaagtccatggatgagttcctgctgaagaaggtgaatgacctggacaatgaagacagcaagaaggacaccctggtggatgtggtgttcaagaaggccctgaaggagttccggcagaacatcttctccttctacagcagcgccctggccatggatgatggcaagagcatccgctacaaggacctgtatgccctgtttgagcagatcctggagaagaccatgaggctggagcagagggacagcctgggggagagccctgtgcgggtgtgggtgaacaccttcaaggtgttcctggatgagtacatgaatgagttcaagaccagtgactgcacagccaccaaggtgcccaagacagagaggaagaagaggaggaagaaggagacagacctggtggaggagcacaacggccacatcttcaaggccacccagtacagcatccccacctactgtgagtactgcagcagcctcatctggatcatggaccgggcctctgtgtgcaagctgtgcaagtatgcctgccacaagaagtgctgcctgaagaccacagccaagtgcagcaagaagtatgaccctgagctgagcagccggcagtttggagtggagctgagccggctgaccagcgaggacagaacagtgcccctggtggtggagaagctgatcaactacatcgagatgcacggcctgtacacagagggcatctacaggaagagcggcagcaccaacaagatcaaggagctgcggcagggcctggacacagatgctgagagcgtgaacctggatgactacaacatccacgtgattgccagcgtcttcaagcagtggctgcgggacctgcccaaccccctgatgacctttgagctgtatgaggagttcctgcgggccatgggcctgcaggagaggaaggagaccatccggggcgtgtacagcgtcatcgaccagctgagcaggacccacctgaacaccctggagcggctcatcttccacctggtgagaattgccctgcaggaggacaccaacaggatgtctgccaatgccctggccatcgtgtttgccccctgcatcctgcgctgcccagacaccacagaccccctgcagagcgtgcaggacatcagcaagaccaccacctgtgtggagctgattgtggtggagcagatgaacaagtacaaggcccggctgaaggacatcagcagcctggagtttgctgagaacaaggccaagacccggctgagcctcatccgccgctccatgggcaagggccgcatcagaagaggcaactacccaggccccagcagccctgtggtggtgcggctgcccagcgtgtctgatgtgtctgaggagaccctgaccagcgaggccgccatggagacagacatcacagagcagcagcaggccgccatgcagcaggaggagcgggtgctgacagagcagatcgagaacctgcagaaggagaaggaggagctgacctttgagatgctggtgctggagccccgggccagtgatgatgagaccctggagagcgaggccagcattggaacagctgacagcagcgagaacctgaacatggagagtgaatatgccatcagcgagaagtctgagaggagcctggccctgagcagcctgaagacagctgggaagtctgagcccagcagcaagctgaggaagcagctgaagaagcagcaggacagcctggatgtggtggacagctctgtgagcagcctgtgcctgagcaacacagccagcagccacggcaccaggaagctgttccagatctacagcaagagccccttctaccgggccgccagcggaaatgaggccctgggcatggagggccccctgggccagaccaagttcctggaggacaagccccagttcatcagccggggcaccttcaaccctgagaagggcaagcagaagctgaagaatgtgaagaacagcccccagaagaccaaggagaccccagagggcaccgtgatgagcggccgcaggaagacagtggaccctgactgcaccagcaaccagcagctggccctgtttggaaataatgagttcatggtgtag

SEQ ID NO: 160807 - DNA, 7860 bp, synthetic construct
  misc_feature 1..7860: note = Description of Artificial Sequence: Synthetic coding sequence
  source 1..7860: mol_type = other DNA
atgaacatcaatgatggcggcagaagaagatttgaggacaatgagcacaccctgcgcatctacccaggggccatcagcgagggcaccatctactgccccatcccagccaggaagaacagcacagctgctgaggtgattgagagcctcatcaacaagctgcacctggacaagaccaagtgctacgtgctggccgaggtgaaggagtttggaggagaggagtggatcctgaaccccacagactgccctgtgcagaggatgatgctgtggcccaggatggccctggagaaccggctgtctggagaggactaccgcttcctgctgcgggagaagaacctggatggcagcatccactacggcagcctgcagagctggctgcgggtgacagaggagaggaggaggatgatggagcggggcttcctgccccagccccagcagaaggactttgatgacctgtgcagcctgcctgacctgaatgagaagaccctgctggagaacctgaggaaccgcttcaagcatgagaagatctacacctacgtgggcagcatcctgattgtcatcaaccccttcaagttcctgcccatctacaaccccaagtatgtgaagatgtatgacaaccaccagctgggcaagctggagccccacatctatgctgtggctgatgtggcctaccacgccatgctgcagaggaagaagaaccagtgcatcgtcatcagcggggagagcggcagcggcaagacccagagcaccaacttcctgatccaccacctgacagccctgagccagaagggctttgccagcggcgtggagcagatcatcctgggcgccggccctgtgctggaggcctttggaaatgccaagacagcccacaacaacaacagcagcagatttgggaagttcatccaggtgaactaccaggagactggaacagtgctgggcgcctacgtggagaagtacctgctggagaagagccggctggtgtaccaggagcacaatgaaagaaactaccacgtgttctactacctgctggccggggcctctgaagatgagaggtctgccttccacctgaagcagcctgaggagtaccactacctgaaccagatcaccaagaagcccctgcggcagagctgggatgactactgctatgattctgagccagactgcttcaccgtggagggggaggacctgcggcatgactttgagcggctgcagctggccatggagatggtgggcttcctgcccaagacccggcggcagatcttcagcctgctgagcgccatcctgcacctgggcaacatctgctacaagaagaagacctacagagatgacagcattgacatctgcaaccctgaggtgctgcccatcgtgtctgagctgctggaggtgaaggaggagatgctgtttgaggccctggtgaccaggaagacagtgacagtgggggagaagctgatcctgccctacaagctggccgaggccgtgacagtgagaaattccatggccaagagcctgtacagcgccctgtttgactggatcgtgttccgcatcaaccacgccctgctgaacagcaaggacctggagcacaacaccaagaccctgagcattggagtgctggacatctttggatttgaggactatgagaacaacagctttgagcagttctgcatcaactttgccaatgaaaggctgcagcactacttcaaccagcacatcttcaagctggagcaggaggagtacagaacagagggcatctcctggcacaacatcgactacatcgacaacacctgctgcatcaacctgatcagcaagaagcccaccggcctgctgcacctgctggatgaggagagcaacttcccccaggccaccaaccagaccctgctggacaagttcaagcaccagcacgaggacaacagctacatcgagttccctgctgtgatggagcccgccttcatcatcaagcactacgccggcaaggtgaagtatggagtgaaggacttccgggagaagaacacagaccacatgaggccagacatcgtggccctgctgcggagcagcaagaatgccttcatcagcggcatgattggcatcgaccctgtggccgtgttccgctgggccatcctgcgggccttcttccgggccatggtggccttccgggaggccggcaagaggaacatccacaggaagacaggccatgatgacacagccccctgtgccatcctgaagtccatggacagcttctccttcctgcagcaccctgtgcaccagaggagcctggagatcctgcagcgctgcaaggaggagaagtacagcatcaccaggaagaaccccaggacccccctgagtgacctgcagggcatgaatgccctgaatgagaagaaccagcacgacacctttgacatcgcctggaatggaagaacaggcatccggcagagccggctgagcagcggcaccagcctgctggacaaggatggcatctttgccaacagcaccagcagcaagctgctggagcgggcccacggcatcctgaccaggaacaagaacttcaagagcaagccagccctgcccaagcacctgctggaggtgaacagcctgaagcacctgacccggctgaccctgcaggaccgcatcaccaagagcctgctgcacctgcacaagaagaagaagcccccatccatcagcgcccagttccaggccagcctgagcaagctgatggagaccctgggccaggccgagccctactttgtgaagtgcatccgcagcaatgctgagaagctgcccctgcgcttcagtgatgtgctggtgctgcggcagctgcgctacacaggcatgctggagaccgtgcgcatccggcagagcggctacagcagcaagtacagcttccaggactttgtgagccacttccacgtgctgctgcccaggaacatcatccccagcaagttcaacatccaggacttcttcaggaagatcaacctgaacccagacaactaccaggtgggcaagaccatggtgttcctgaaggagcaggagcggcagcacctgcaggacctgctgcaccaggaggtgctgcggcgcatcatcctgctgcagcgctggttccgggtgctgctgtgccggcagcacttcctgcacctgcggcaggccagcgtcatcatccagcgcttctggaggaactacctgaaccagaagcaggtgagagatgctgctgtgcagaaggatgcctttgtgatggccagcgctgctgccctgctgcaggcctcctggagggcccacctggagcggcagcgctacctggagctgcgggccgccgccatcgtcatccagcagaagtggagggactactacagaagaagacacatggccgccatctgcatccaggcccgctggaaggcctaccgggagagcaagcgctaccaggagcagaggaagaagatcatcctgctgcagagcacctgccggggcttccgggcccggcagcgcttcaaggccctgaaggagcagaggctgcgggagaccaagccagaggtgggcctggtgaacatcaagggctacggcagcctggagatccagggcagtgaccccagcggctgggaggactgcagctttgacaaccgcatcaaggccatcgaggagtgcaagtctgtgattgagagcaaccgcatcagccgggagagctctgtggactgcctgaaggagagccccaacaagcagcaggagcgggcccagagccagagcggcgtggacctgcaggaggatgtgctggtgcgggagcggcccaggagcctggaggacctgcaccagaagaaggtgggccgggccaagcgggagagcaggaggatgagggagctggagcaggccatcttcagcctggagctgctgaaggtgcgcagcctgggcggcatcagccccagcgaggaccggcgctggagcacagagctggtgcctgagggcctgcagagcccccggggcaccccagacagcgagagcagccagggcagcctggagctgctgtcctatgaggagagccagaagagcaagctggagagcgtcatcagtgatgaaggagacctgcagttccccagccccaagatcagcagcagccccaagtttgacagccgggacaatgccctgagcgccagcaatgagaccagcagcgctgagcacctgaaggatggcaccatgaaggagatggtggtgtgcagcagcgagagcatcacctgcaagccccagctgaaggacagcttcatcagcaacagcctgcccaccttcttctacatcccccagcaggaccccctgaagaccaacagccagctggacaccagcatccagaggaacaagctgctggagaatgaagacacagctggggaggccctgaccctggacatcaaccgggagacccggcgctaccactgcagcggcaaggaccagatcgtgcccagcctgaacacagagagcagcaaccctgtgctgaagaagctggagaagctgaacacagagaaggaggagcggcagaagcagctgcagcagcagaatgagaaggagatgatggagcagatccggcagcagacagacatcctggagaaggagaggaaggccttcaagaccatcgagaagccccgcatcggggagtgcctggtggcccccagcagctaccagagcaagcagagggtggagcggcccagcagcctgctgagcctgaacaccagcaacaagggggagctgaatgtgctgggcagcctgagcctgaaggatgctgccctggcccagaaggacagcagcagcgcccacctgccccccaaggacaggcctgtgaccgtcttctttgagaggaagggcagcccctgccagagcagcacagtgaaggagctgagcaagacagacaggatgggcacccagctgaatgtggcctgcaagctgagcaacaaccgcatcagcaagcgggagcacttccggcccacccagagctacagccacaacagtgatgacctgagccgggagggcaatgcccggcccatcttcttcacccccaaggacaacatgagcatccccctggtgtccaaggaggccctgaacagcaagaacccccagctgcacaaggaggatgagcccgcctggaagcctgtgaagctggccggccctggccagcgggaggtggcccggcctgcccacaagaagaaggccaggatggcccggaccaggagtgacttcctgacccggggcacctttgctgatggagagggggacacagaggaggatgattatgatgacatcatcgagcccctgctgagcctggaccaggccagccactgtgagctgggccctgcccccagcctgggccaggccagccacagcgacagcgagatgaccagccagcgcttcagctctgtggatgagcaggccaagctgcacaagaccatgagccagggcgagatcaccaagctggccgtgcggcagaaggccagtgacagcgacatccggccccagagggccaagatgaggttctgggccaagggcaagcagggcgagaagaagaccaccagggtgaagcccaccacccagagcgaggtgagccccctgtttgctggaacagatgtgatcccagcccaccagttcccagatgagctggccgcctaccaccccaccccacccctgagccctgagctgcccggcagctgcaggaaggagttcaaggagaacaaggagcccagccccaaggccaagaggaagaggtctgtgaagatcagcaatgtggccctggacagcatgcactggcagaatgattctgtgcagatcatcgcctctgtgtctgacctgaagtccatggatgagttcctgctgaagaaggtgaatgacctggacaatgaagacagcaagaaggacaccctggtggatgtggtgttcaagaaggccctgaaggagttccggcagaacatcttctccttctacagcagcgccctggccatggatgatggcaagagcatccgctacaaggacctgtatgccctgtttgagcagatcctggagaagaccatgaggctggagcagagggacagcctgggggagagccctgtgcgggtgtgggtgaacaccttcaaggtgttcctggatgagtacatgaatgagttcaagaccagtgactgcacagccaccaaggtgcccaagacagagaggaagaagaggaggaagaaggagacagacctggtggaggagcacaacggccacatcttcaaggccacccagtacagcatccccacctactgtgagtactgcagcagcctcatctggatcatggaccgggcctctgtgtgcaagctgtgcaagtatgcctgccacaagaagtgctgcctgaagaccacagccaagtgcagcaagaagtatgaccctgagctgagcagccggcagtttggagtggagctgagccggctgaccagcgaggacagaacagtgcccctggtggtggagaagctgatcaactacatcgagatgcacggcctgtacacagagggcatctacaggaagagcggcagcaccaacaagatcaaggagctgcggcagggcctggacacagatgctgagagcgtgaacctggatgactacaacatccacgtgattgcctctgtgttcaagcagtggctgcgggacctgcccaaccccctgatgacctttgagctgtatgaggagttcctgcgggccatgggcctgcaggagaggaaggagaccatccggggcgtgtacagcgtgattgaccagctgagcaggacccacctgaacaccctggagcggctcatcttccacctggtgcgcatcgccctgcaggaggacaccaacaggatgtctgccaatgccctggccatcgtgtttgccccctgcatcctgcgctgcccagacaccacagaccccctgcagagcgtgcaggacatcagcaagaccaccacctgtgtggagctgattgtggtggagcagatgaacaagtacaaggcccggctgaaggacatcagcagcctggagtttgctgagaacaaggccaagacccggctgagcctcatcagaagatccatgggcaagggccgcatccggcggggcaactacccaggccccagcagccctgtggtggtgcggctgcccagcgtgtctgatgtgtctgaggagaccctgaccagcgaggccgccatggagacagacatcacagagcagcagcaggccgccatgcagcaggaggagcgggtgctgacagagcagatcgagaacctgcagaaggagaaggaggagctgacctttgagatgctggtgctggagccccgggccagtgatgatgagaccctggagagcgaggccagcatcggcacagctgacagcagcgagaacctgaacatggagagtgaatatgccatcagcgagaagtctgagaggagcctggccctgagcagcctgaagacagctgggaagtctgagcccagcagcaagctgaggaagcagctgaagaagcagcaggacagcctggatgtggtggacagctctgtgagcagcctgtgcctgagcaacacagccagcagccacggcaccaggaagctgttccagatctacagcaagagccccttctacagagctgccagcggaaatgaggccctgggcatggagggccccctgggccagaccaagttcctggaggacaagccccagttcatcagccggggcaccttcaaccctgagaagggcaagcagaagctgaagaatgtgaagaacagcccccagaagaccaaggagaccccagagggcaccgtgatgtctggaagaaggaagacagtggaccctgactgcaccagcaaccagcagctggccctgtttggaaataatgagttcatggtgtag

SEQ ID NO: 160808 - DNA, 7590 bp, synthetic construct
  misc_feature 1..7590: note = Description of Artificial Sequence: Synthetic coding sequence
  source 1..7590: mol_type = other DNA
atgaacatcaatgatggcggcagaagaagatttgaggacaatgagcacaccctgcgcatctacccaggggccatcagcgagggcaccatctactgccccatcccagccaggaagaacagcacagctgctgaggtgattgagagcctcatcaacaagctgcacctggacaagaccaagtgctacgtgctggccgaggtgaaggagtttggaggagaggagtggatcctgaaccccacagactgccctgtgcagaggatgatgctgtggcccaggatggccctggagaaccggctgtctggagaggactaccgcttcctgctgcgggagaagaacctggatggcagcatccactacggcagcctgcagagctggctgcgggtgacagaggagaggaggaggatgatggagcggggcttcctgccccagccccagcagaaggactttgatgacctgtgcagcctgcctgacctgaatgagaagaccctgctggagaacctgaggaaccgcttcaagcatgagaagatctacacctacgtgggcagcatcctgattgtcatcaaccccttcaagttcctgcccatctacaaccccaagtatgtgaagatgtatgacaaccaccagctgggcaagctggagccccacatctatgctgtggctgatgtggcctaccacgccatgctgcagaggaagaagaaccagtgcatcgtcatcagcggggagagcggcagcggcaagacccagagcaccaacttcctgatccaccacctgacagccctgagccagaagggctttgccagcggcgtggagcagatcatcctgggcgccggccctgtgctggaggcctttggaaatgccaagacagcccacaacaacaacagcagcagatttgggaagttcatccaggtgaactaccaggagactggaacagtgctgggcgcctacgtggagaagtacctgctggagaagagccggctggtgtaccaggagcacaatgaaagaaactaccacgtgttctactacctgctggccggggcctctgaagatgagaggtctgccttccacctgaagcagcctgaggagtaccactacctgaaccaggactgcttcaccgtggagggggaggacctgcggcatgactttgagcggctgcagctggccatggagatggtgggcttcctgcccaagacccggcggcagatcttcagcctgctgagcgccatcctgcacctgggcaacatctgctacaagaagaagacctacagagatgacagcattgacatctgcaaccctgaggtgctgcccatcgtgtctgagctgctggaggtgaaggaggagatgctgtttgaggccctggtgaccaggaagacagtgacagtgggggagaagctgatcctgccctacaagctggccgaggccgtgacagtgaggaacagcatggccaagagcctgtacagcgccctgtttgactggatcgtgttccgcatcaaccacgccctgctgaacagcaaggacctggagcacaacaccaagaccctgagcattggagtgctggacatcttcggctttgaagattatgagaacaacagctttgagcagttctgcatcaactttgccaatgaaaggctgcagcactacttcaaccagcacatcttcaagctggagcaggaggagtacagaacagagggcatctcctggcacaacatcgactacatcgacaacacctgctgcatcaacctgatcagcaagaagcccaccggcctgctgcacctgctggatgaggagagcaacttcccccaggccaccaaccagaccctgctggacaagttcaagcaccagcacgaggacaacagctacatcgagttccctgctgtgatggagcccgccttcatcatcaagcactacgccggcaaggtgaagtatggagtgaaggacttccgggagaagaacacagaccacatgaggccagacatcgtggccctgctgcggagcagcaagaatgccttcatcagcggcatgattggaattgatcctgtggccgtgttccgctgggccatcctgcgggccttcttccgggccatggtggccttccgggaggccggcaagaggaacatccacaggaagacaggccatgatgacacagccccctgtgccatcctgaagtccatggacagcttctccttcctgcagcaccctgtgcaccagaggagcctggagatcctgcagcgctgcaaggaggagaagtacagcatcaccaggaagaaccccaggacccccctgagtgacctgcagggcatgaatgccctgaatgagaagaaccagcacgacacctttgatattgcctggaatggccgcacaggcatccggcagagccggctgagcagcggcaccagcctgctggacaaggatggcatctttgccaacagcaccagcagcaagctgctggagcgggcccacggcatcctgaccaggaacaagaacttcaagagcaagccagccctgcccaagcacctgctggaggtgaacagcctgaagcacctgacccggctgaccctgcaggaccgcatcaccaagagcctgctgcacctgcacaagaagaagaagccacccagcatcagcgcccagttccaggccagcctgagcaagctgatggagaccctgggccaggccgagccctactttgtgaagtgcatccgcagcaatgctgagaagctgcccctgcgcttcagtgatgtgctggtgctgcggcagctgcgctacacaggcatgctggagaccgtgcgcatccggcagagcggctacagcagcaagtacagcttccaggactttgtgagccacttccacgtgctgctgcccaggaacatcatccccagcaagttcaacatccaggacttcttcaggaagatcaacctgaacccagacaactaccaggtgggcaagaccatggtgttcctgaaggagcaggagcggcagcacctgcaggacctgctgcaccaggaggtgctgcggcgcatcatcctgctgcagcgctggttccgggtgctgctgtgccggcagcacttcctgcacctgcggcaggccagcgtcatcatccagcgcttctggaggaactacctgaaccagaagcaggtgagagatgctgctgtgcagaaggatgcctttgtgatggccagcgctgctgccctgctgcaggcctcctggagggcccacctggagcggcagcgctacctggagctgcgggctgctgccatcgtcatccagcagaagtggagggactactacagaagaagacacatggccgccatctgcatccaggcccgctggaaggcctaccgggagagcaagcgctaccaggagcagaggaagaagatcatcctgctgcagagcacctgccggggcttccgggcccggcagcgcttcaaggccctgaaggagcagaggctgcgggagaccaagccagaggtgggcctggtgaacatcaagggctacggcagcctggagatccagggcagtgaccccagcggctgggaggactgcagctttgacaaccgcatcaaggccatcgaggagtgcaagagcgtcatcgagagcaaccgcatcagccgggagagctctgtggactgcctgaaggagagccccaacaagcagcaggagcgggcccagagccagagcggcgtggacctgcaggaggatgtgctggtgcgggagcggcccaggagcctggaggacctgcaccagaagaaggtgggccgggccaagcgggagagcaggaggatgagggagctggagcaggccatcttcagcctggagctgctgaaggtgcgcagcctgggcggcatcagccccagtgaagatcggcgctggagcacagagctggtgcctgagggcctgcagagcccccggggcaccccagattctgagagcagccagggcagcctggagctgctgtcctatgaggagagccagaagagcaagctggagagcgtcatcagtgatgaaggagacctgcagttccccagccccaagatcagcagcagccccaagtttgacagccgggacaatgccctgagcgccagcaatgagaccagcagcgctgagcacctgaaggatggcaccatgaaggagatggtggtgtgcagcagcgagagcatcacctgcaagccccagctgaaggacagcttcatcagcaacagcctgcccaccttcttctacatcccccagcaggaccccctgaagaccaacagccagctggacaccagcatccagaggaacaagctgctggagaatgaagacacagctggggaggccctgaccctggacatcaaccgggagacccggcgctaccactgcagcggcaaggaccagatcgtgcccagcctgaacacagagagcagcaaccctgtgctgaagaagctggagaagctgaacacagagaaggaggagcggcagaagcagctgcagcagcagaatgagaaggagatgatggagcagatccggcagcagacagacatcctggagaaggagaggaaggccttcaagaccatcgagaagcccagaattggagaatgtctggtggcccccagcagctaccagagcaagcagagggtggagcggcccagcagcctgctgagcctgaacaccagcaacaagggggagctgaatgtgctgggcagcctgagcctgaaggatgctgccctggcccagaaggacagcagcagcgcccacctgccccccaaggacaggcctgtgacagtgttctttgagaggaagggcagcccctgccagagcagcacagtgaaggagctgagcaagacagacaggatgggcacccagctgaatgtggcctgcaagctgagcaacaaccgcatcagcaagcgggagcacttccggcccacccagagctacagccacaacagtgatgacctgagccgggagggcaatgcccggcccatcttcttcacccccaaggacaacatgagcatccccctggtgtccaaggaggccctgaacagcaagaacccccagctgcacaaggaggatgagcccgcctggaagcctgtgaagctggccggccctggccagcgggagaccagccagcgcttcagctctgtggatgagcaggccaagctgcacaagaccatgagccagggcgagatcaccaagctggccgtgcggcagaaggccagtgacagcgacatccggccccagagggccaagatgaggttctgggccaagggcaagcagggcgagaagaagaccaccagggtgaagcccaccacccagagcgaggtgagccccctgtttgctggaacagatgtgatcccagcccaccagttcccagatgagctggccgcctaccaccccaccccacccctgagccctgagctgcccggcagctgcaggaaggagttcaaggagaacaaggagcccagccccaaggccaagaggaagaggtctgtgaagatcagcaatgtggccctggacagcatgcactggcagaatgattctgtgcagatcatcgcctctgtgtctgacctgaagtccatggatgagttcctgctgaagaaggtgaatgacctggacaatgaagacagcaagaaggacaccctggtggatgtggtgttcaagaaggccctgaaggagttccggcagaacatcttctccttctacagcagcgccctggccatggatgatggcaagagcatccgctacaaggacctgtatgccctgtttgagcagatcctggagaagaccatgaggctggagcagagggacagcctgggggagagccctgtgcgggtgtgggtgaacaccttcaaggtgttcctggatgagtacatgaatgagttcaagaccagtgactgcacagccaccaaggtgcccaagacagagaggaagaagaggaggaagaaggagacagacctggtggaggagcacaacggccacatcttcaaggccacccagtacagcatccccacctactgtgagtactgcagcagcctcatctggatcatggaccgggcctctgtgtgcaagctgtgcaagtatgcctgccacaagaagtgctgcctgaagaccacagccaagtgcagcaagaagtatgaccctgagctgagcagccggcagtttggagtggagctgagccggctgaccagcgaggacagaacagtgcccctggtggtggagaagctgatcaactacatcgagatgcacggcctgtacacagagggcatctacaggaagagcggcagcaccaacaagatcaaggagctgcggcagggcctggacacagatgctgagagcgtgaacctggatgactacaacatccacgtgattgcctctgtgttcaagcagtggctgcgggacctgcccaaccccctgatgacctttgagctgtatgaggagttcctgcgggccatgggcctgcaggagaggaaggagaccatccggggcgtgtacagcgtgattgaccagctgagcaggacccacctgaacaccctggagcggctcatcttccacctggtgcgcatcgccctgcaggaggacaccaacaggatgtctgccaatgccctggccatcgtgtttgccccctgcatcctgcgctgcccagacaccacagaccccctgcagagcgtgcaggacatcagcaagaccaccacctgtgtggagctgattgtggtggagcagatgaacaagtacaaggcccggctgaaggacatcagcagcctggagtttgctgagaacaaggccaagacccggctgagcctcatcagaagatccatgggcaagggccgcatccggcggggcaactacccaggccccagcagccctgtggtggtgcggctgcccagcgtgtctgatgtgtctgaggagaccctgaccagcgaggccgccatggagacagacatcacagagcagcagcaggccgccatgcagcaggaggagcgggtgctgacagagcagatcgagaacctgcagaaggagaaggaggagctgacctttgagatgctggtgctggagccccgggccagtgatgatgagaccctggagagcgaggccagcatcggcacagctgacagcagcgagaacctgaacatggagagtgaatatgccatcagcgagaagtctgagaggagcctggccctgagcagcctgaagacagctgggaagtctgagcccagcagcaagctgaggaagcagctgaagaagcagcaggacagcctggatgtggtggacagctctgtgagcagcctgtgcctgagcaacacagccagcagccacggcaccaggaagctgttccagatctacagcaagagccccttctacagagctgccagcggaaatgaggccctgggcatggagggccccctgggccagaccaagttcctggaggacaagccccagttcatcagccggggcaccttcaaccctgagaagggcaagcagaagctgaagaatgtgaagaacagcccccagaagaccaaggagaccccagagggcaccgtgatgtctggaagaaggaagacagtggaccctgactgcaccagcaaccagcagctggccctgtttggaaataatgagttcatggtgtag

SEQ ID NO: 160809 - DNA, 2190 bp, synthetic construct
  misc_feature 1..2190: note = Description of Artificial Sequence: Synthetic coding sequence
  source 1..2190: mol_type = other DNA
atgaacatcaatgatggcggcagaagaagatttgaggacaatgagcacaccctgcgcatctacccaggggccatcagcgagggcaccatctactgccccatcccagccaggaagaacagcacagctgctgaggtgattgagagcctcatcaacaagctgcacctggacaagaccaagtgctacgtgctggccgaggtgaaggagtttggaggagaggagtggatcctgaaccccacagactgccctgtgcagaggatgatgctgtggcccaggatggccctggagaaccggctgtctggagaggactaccgcttcctgctgcgggagaagaacctggatggcagcatccactacggcagcctgcagagctggctgcgggtgacagaggagaggaggaggatgatggagcggggcttcctgccccagccccagcagaaggactttgatgacctgtgcagcctgcctgacctgaatgagaagaccctgctggagaacctgaggaaccgcttcaagcatgagaagatctacacctacgtgggcagcatcctgattgtcatcaaccccttcaagttcctgcccatctacaaccccaagtatgtgaagatgtatgacaaccaccagctgggcaagctggagccccacatctatgctgtggctgatgtggcctaccacgccatgctgcagaggaagaagaaccagtgcatcgtcatcagcggggagagcggcagcggcaagacccagagcaccaacttcctgatccaccacctgacagccctgagccagaagggctttgccagcggcgtggagcagatcatcctgggcgccggccctgtgctggaggcctttggaaatgccaagacagcccacaacaacaacagcagcagatttgggaagttcatccaggtgaactaccaggagactggaacagtgctgggcgcctacgtggagaagtacctgctggagaagagccggctggtgtaccaggagcacaatgaaagaaactaccacgtgttctactacctgctggccggggcctctgaagatgagaggtctgccttccacctgaagcagcctgaggagtaccactacctgaaccagatcaccaagaagcccctgcggcagagctgggatgactactgctatgattctgagccagactgcttcaccgtggagggggaggacctgcggcatgactttgagcggctgcagctggccatggagatggtgggcttcctgcccaagacccggcggcagatcttcagcctgctgagcgccatcctgcacctgggcaacatctgctacaagaagaagacctacagagatgacagcattgacatctgcaaccctgaggtgctgcccatcgtgtctgagctgctggaggtgaaggaggagatgctgtttgaggccctggtgaccaggaagacagtgacagtgggggagaagctgatcctgccctacaagctggccgaggccgtgacagtgagaaattccatggccaagagcctgtacagcgccctgtttgactggatcgtgttccgcatcaaccacgccctgctgaacagcaaggacctggagcacaacaccaagaccctgagcattggagtgctggacatctttggatttgaggactatgagaacaacagctttgagcagttctgcatcaactttgccaatgaaaggctgcagcactacttcaaccagcacatcttcaagctggagcaggaggagtacagaacagagggcatctcctggcacaacatcgactacatcgacaacacctgctgcatcaacctgatcagcaagaagcccaccggcctgctgcacctgctggatgaggagagcaacttcccccaggccaccaaccagaccctgctggacaagttcaagcaccagcacgaggacaacagctacatcgagttccctgctgtgatggagcccgccttcatcatcaagcactacgccggcaaggtgaagtatggagtgaaggacttccgggagaagaacacagaccacatgaggccagacatcgtggccctgctgcggagcagcaagaatgccttcatcagcggcatgattggcatcgaccctgtggccgtgttccgctgggccatcctgcgggccttcttccgggccatggtggccttccgggaggccggcaagaggaacatccacaggaagacaggcaagtag

SEQ ID NO: 160810 - DNA, 1509 bp, synthetic construct
  misc_feature 1..1509: note = Description of Artificial Sequence: Synthetic coding sequence
  source 1..1509: mol_type = other DNA
atggacaaggccctgctgtgcagcgtgtgcaagatgacctgccacaagaagtgtgtgcacaagatccagagccactgcagctacacctacggcaggaaaggagagcccggggtggagcccggccactttggagtgtgtgtggacagcctgaccagtgacaaggcctctgtgcccatcgtgctggagaagctgctggagcacgtggagatgcacggcctgtacacagagggcctgtacaggaagagcggggccgccaacagaacccgggagctgcggcaggccctgcagacagatcctgctgctgtgaagctggagaacttccccatccacgccatcactggagtgctgaagcagtggctgcgggagctgcctgagcccctgatgacctttgcccagtatggagacttcctgcgggctgtggagctgcctgagaagcaggagcagctggccgccatctatgctgtgctggagcacctgcctgaggccaaccacaacagcctggagcggctcatcttccacctgctggccgtggccctgctggaggatgtgaacaggatgagccctggggccctggccatcatctttgccccctgcctgctgcgctgcccagacaacagcgaccccctgacctccatgaaggatgtgctgaagatcaccacctgtgtggagatgctgatcaaggagcagatgaggaagtacaaggtgaagatggaggagatcagccagctggaggccgctgagagcatcgccttccggcggctgagcctgctgcggcagaatgccccctggcccctgaagctgggcttcagcagcccctatgaaggagtgctgaacaagagccccaagacccgggacatccaggaggaggagctggaggtgctgctggaggaggaggccgctggaggagatgaggaccgggagaaggagatcctgattgaaagaatccagagcatcaaggaggagaagcaggacatcacctaccgcctgcctgagctggacccccggggcagtgatgaggagaacctggacagcgagaccagcgccagcacagagagcctgctggaggagcgggccggccgcggggccagcgagggccccccagccccagccctgccctgccctggggcccccacccccagccccctgcccaccgtggccgccccacccaggagaagacccagcagctttgtgacagtgcgggtgaagacccccaggaggacccccatcatgcccacagccaacatcaagctgcccccaggcctgcccagccacctgccccgctgggcccctggggcccgggaggccgccgcccctgtgagaagaagagagcccccagcccggcggccagaccagatccacagcgtgtacatcaccccaggagctgacctgcctgtgcagggcgccctggagcccctggaggaggatggccagcccccaggggccaagaggcgctacagcgacccccccacctactgcctgcccccagccagcggccagaccaatggatag

SEQ ID NO: 160811 - DNA, 6069 bp, synthetic construct
  misc_feature 1..6069: note = Description of Artificial Sequence: Synthetic coding sequence
  source 1..6069: mol_type = other DNA
atgtctgtgaaggaggccggcagcagtggaagaagagagcaggccgcctaccacctgcacatctacccccagctgagcaccacagagagccaggccagctgccgggtgacagccaccaaggacagcaccaccagtgatgtgatcaaggatgccatcgccagcctgcggctggatggcaccaagtgctacgtgctggtggaggtgaaggagagcggcggggaggagtgggtgctggatgccaatgacagccctgtgcaccgggtgctgctgtggccccggcgggcccaggatgagcacccccaggaggatggctactacttcctgctgcaggagagaaatgctgatggcaccatcaagtatgtgcacatgcagctggtggcccaggccacagccacccggcggctggtggagcggggcctgctgccccggcagcaggccgactttgatgacctgtgcaacctgcctgagctgacagagggcaacctgctgaagaacctgaagcaccgcttcctgcagcagaagatctacacctacgccggcagcatcctggtggccatcaaccccttcaagttcctgcccatctacaaccccaagtatgtgaagatgtatgagaaccagcagctgggcaagctggagccccacgtgtttgccctggctgatgtggcctactacaccatgctgaggaagagggtgaaccagtgcatcgtcatcagcggggagagcggcagcggcaagacccagagcaccaacttcctgatccactgcctgacagccctgagccagaagggctacgccagcggcgtggagaggaccatcctgggcgccggccctgtgctggaggcctttggaaatgccaagacagcccacaacaacaacagcagcagatttgggaagttcatccaggtgtcctacctggagagcggcatcgtgagaggagctgtggtggagaagtacctgctggagaagagccggctggtgtcccaggagaaggatgaaagaaactaccacgtgttctactacctgctgctgggcgtgtctgaggaggagcggcaggagttccagctgaagcagcctgaggactacttctacctgaaccagcacaacctgaagattgaagatggagaggacctgaagcatgactttgagcggctgaagcaggccatggagatggtgggcttcctgcctgccaccaagaagcagatctttgctgtgctgagcgccatcctgtacctgggcaatgtgacctacaagaagagggccaccggccgggaggagggcctggaggtgggccccccagaggtgctggacaccctgagccagctgctgaaggtgaagcgggagatcctggtggaggtgctgaccaagaggaagacagtgacagtgaatgacaagctgatcctgccctacagcctgtctgaggccatcacagcccgggacagcatggccaagagcctgtacagcgccctgtttgactggatcgtgctgcgcatcaaccacgccctgctgaacaagaaggatgtggaggaggccgtgtcctgcctgagcattggagtgctggacatcttcggctttgaagattttgaaagaaattcctttgagcagttctgcatcaactatgccaatgagcagctgcagtactacttcaaccagcacatcttcaagctggagcaggaggagtaccagggcgagggcatcacctggcacaacatcggctacacagacaacgtgggctgcatccacctgatcagcaagaagcccaccggcctcttctacctgctggatgaggagagcaacttcccccacgccaccagccagaccctgctggccaagttcaagcagcagcacgaggacaacaagtacttcctgggcacccctgtgatggagcccgccttcatcatccagcactttgctgggaaggtgaagtaccagatcaaggacttccgggagaagaacatggactacatgaggccagacatcgtggccctgctgcggggcagtgacagcagctatgtgcgggagctgattggcatggaccctgtggccgtgttccgctgggccgtgctgcgggccgccatccgggccatggctgtgctgcgggaggccggccgcctgcgggcagagagagctgagaaggctgctggcatgagcagccctggggcccagagccaccctgaggagctgcccaggggggccagcaccccatctgagaagctgtacagagacctgcacaaccagatgatcaagagcatcaagggcctgccctggcagggcgaggaccccaggagcctgctgcagagcctgagccggctgcagaagccccgggccttcatcctgaagagcaagggcatcaagcagaagcagatcatccccaagaacctgctggacagcaagagcctgaagctgatcatctccatgaccctgcatgacaggaccaccaagagcctgctgcacctgcacaagaagaagaagccacccagcatcagcgcccagttccagaccagcctgaacaagctgctggaggccctgggcaaggccgagcccttcttcatccgctgcatccgcagcaatgctgagaagaaggagctgtgctttgatgatgagctggtgctgcagcagctgcgctacacaggcatgctggagaccgtgcgcatcagaagaagtggctacagcgccaagtacaccttccaggacttcacagagcagttccaggtgctgctgcccaaggatgcccagccctgccgggaggtgatcagcaccctgctggagaagatgaagattgacaagaggaactaccagatcggcaagaccaaggtgttcctgaaggagacagagcggcaggccctgcaggagaccctgcaccgggaggtggtgaggaagatcctgctgctgcagagctggttcaggatggtgctggagaggaggcacttcctgcagatgaagagagctgctgtgaccatccaggcctgctggaggagctacagagtgcggcgggccctggagaggacccaggccgctgtgtacctgcaggcctcctggaggggctactggcagaggaagctgtaccgccaccagaagcagagcatcatccggctgcagagcctgtgccggggccacctgcagaggaagagcttcagccagatgatcagcgagaagcagaaggccgaggagaaggagcgggaggccctggaggccgcccgggccggggctgaggagggcggccagggccaggccgccggcggccagcaggtggccgagcagggccctgagccagcagaagatggcggccacctggccagcgagcctgaggtgcagcccagcgacaggagccccctggagcacagcagccctgagaaggaggcccccagccctgagaagaccctgcccccccagaagacagtggccgctgagagccatgagaaggtgcccagcagccgggagaagcgggagagccggcggcagaggggcctggagcacgtgaagttccagaacaagcacatccagagctgcaaggaggagagcgccctgcgggagcccagccggcgggtgacccaggagcagggcgtgtccctgctggaggacaagaaggagagcagagaagatgagaccctgctggtggtggagacagaagctgagaacaccagccagaagcagcccacagagcagccccaggccatggctgtgggcaaggtgtctgaggagacagagaagaccctgcccagcggcagccccaggcctggccagctggagcggcccaccagcctggccctggacagccgggtgagccccccagcccctggcagcgcccctgagaccccagaggacaagagcaagccctgtggcagcccccgggtgcaggagaagccagacagccctgggggcagcacccagatccagcgctacctggatgctgagcggctggccagcgctgtggagctgtggaggggcaagaagctggtggccgccgccagccccagcgccatgctgagccagagcctggacctgagtgacagacaccgggccactggagctgccctgacccccacagaggagaggaggaccagcttcagcaccagtgatgtgtccaagctgctgcccagcctggccaaggcccagcctgctgctgagaccacagatggagagaggtctgccaagaagccagctgtgcagaagaagaagccaggagatgccagcagcctgcctgatgctggcctgagccctggcagccaggtggacagcaagagcaccttcaagaggctcttcctgcacaagaccaaggacaagaagtacagcctggagggcgctgaggagctggagaatgctgtgtctggccacgtggtgctggaggccaccaccatgaagaagggcctggaggcccccagcggccagcagcacagacatgctgctggggagaagaggaccaaggagcccggcggcaagggcaagaagaacagaaatgtgaagattggcaagatcaccgtgtctgagaagtggagggagagcgtcttccggcagatcaccaatgccaatgagctgaagtacctggatgagttcctgctgaacaagatcaatgacctgcggagccagaagacccccatcgagagcctcttcatcgaggccacagagaagttccgcagcaacatcaagaccatgtacagcgtgcccaacgggaagatccacgtgggctacaaggacctgatggagaactaccagatcgtggtgagcaacctggccacagagcggggccagaaggacaccaacctggtgctgaacctcttccagagcctgctggatgagttcacccggggctacaccaagaatgactttgagcctgtgaagcagagcaaggcccagaagaagaagaggaagcaggagagagctgtgcaggagcacaatggacatgtgtttgccagctaccaggtgtccatcccccagagctgtgagcagtgcctgagctacatctggctgatggacaaggccctgctgtgcagcgtgtgcaagatgacctgccacaagaagtgtgtgcacaagatccagagccactgcagctacacctacggcaggaagggggagcccggggtggagcccggccactttggagtgtgtgtggacagcctgaccagtgacaaggcctctgtgcccatcgtgctggagaagctgctggagcacgtggagatgcacggcctgtacacagagggcctgtacaggaagtctggagctgccaacagaacccgggagctgcggcaggccctgcagacagatcctgctgctgtgaagctggagaacttccccatccacgccatcaccggggtgctgaagcagtggctgcgggagctgcctgagcccctgatgacctttgcccagtacggggacttcctgcgggctgtggagctgcctgagaagcaggagcagctggccgccatctatgctgtgctggagcacctgcctgaggccaaccacaacagcctggagcggctcatcttccacctggtgaaggtggccctgctggaggatgtgaacaggatgagccctggggccctggccatcatctttgccccctgcctgctgcgctgcccagacaacagcgaccccctgacctccatgaaggatgtgctgaagatcaccacctgtgtggagatgctgatcaaggagcagatgaggaagtacaaggtgaagatggaggagatcagccagctggaggccgctgagagcatcgccttccggcggctgagcctgctgcggcagaatgccccctggcccctgaagctgggcttcagcagcccctatgagggcgtgctgaacaagagccccaagacccgggacatccaggaggaggagctggaggtgctgctggaggaggaggccgctggaggagatgaagatcgggagaaggagatcctgattgagcgcatccagagcatcaaggaggagaaggaggacatcacctaccgcctgcctgagctggacccccggggcagtgatgaggagaacctggacagcgagaccagcgccagcacagagagcctgctggaggagagagctggccgcggggccagcgagggccagtactag

SEQ ID NO: 160812 - DNA, 6069 bp, synthetic construct; identical to SEQ ID NO: 160811
  misc_feature 1..6069: note = Description of Artificial Sequence: Synthetic coding sequence
  source 1..6069: mol_type = other DNA

SEQ ID NO: 160813 - DNA, 519 bp, synthetic construct
  misc_feature 1..519: note = Description of Artificial Sequence: Synthetic coding sequence
  source 1..519: mol_type = other DNA
atgagcagcaagaaggccaagaccaagaccaccaagaagaggccccagagggccaccagcaatgtgtttgccatgtttgaccagagccagatccaggagttcaaggaggccttcaacatgattgaccagaacagagatggcttcatcgacaaggaggacctgcatgacatgctggccagcctgggcaagaaccccacagatgcctacctggatgccatgatgaatgaggcccctggccccatcaacttcaccatgttcctgaccatgtttggagagaagctgaatggaacagatcctgaagatgtgatcagaaatgcctttgcctgctttgatgaggaggccaccggcaccatccaggaggactacctgcgggagctgctgaccaccatgggagaccgcttcacagatgaggaggtggatgagctgtaccgggaggcccccatcgacaagaagggcaacttcaactacatcgagttcacccgcatcctgaagcatggagccaaggacaaggatgactag

SEQ ID NO: 160814 - DNA, 1791 bp, synthetic construct
  misc_feature 1..1791: note = Description of Artificial Sequence: Synthetic coding sequence
  source 1..1791: mol_type = other DNA
atggccacagaaaatggagctgtggagctgggcatccagaaccccagcacagacaaggcccccaagggccccactggagagcggcccctggccgccggcaaggaccccggccccccagaccccaagaaggccccagacccccccaccctgaagaaggatgccaaggccccagccagcgagaagggagatggcaccctggcccagcccagcaccagcagccagggccccaagggggagggggacagaggaggcggccctgctgagggcagcgctggccccccagctgccctgccccagcagacagccaccccagagacctctgtgaagaagcccaaggccgagcagggcgccagcggcagccaggaccccgggaagccccgggtgggcaagaaggctgctgagggccaggccgccgcccggcggggcagccctgccttcctgcacagccccagctgcccagccatcatcagcagcagcgagaagctgctggccaagaagcccccatctgaggccagcgagctgacctttgagggcgtgcccatgacccacagccccacagaccccaggcctgccaaggccgaggagggcaagaacatcctggccgagagccagaaggaggtgggggagaagaccccaggccaggccggccaggccaagatgcagggcgacaccagccggggcatcgagttccaggccgtgcccagcgagaagtctgaggtgggccaggccctgtgcctgacagcccgggaggaggactgcttccagatcctggatgactgccccccacctccagcccccttcccccacaggatggtggagctgaggactggaaatgtgtcctctgagttctccatgaacagcaaggaggccctgggcggcggcaagtttggagctgtgtgcacctgcatggagaaggccaccggcctgaagctggccgccaaggtgatcaagaagcagacccccaaggacaaggagatggtgctgctggagattgaggtgatgaaccagctgaaccacaggaacctgatccagctgtatgctgccatcgagacccctcatgaaattgtgctcttcatggagtacatcgagggcggggagctgtttgaaagaattgtggatgaggactaccacctgacagaggtggacaccatggtgtttgtgcggcagatctgtgatggcatcctcttcatgcacaagatgagggtgctgcacctggacctgaagccagagaacatcctgtgtgtgaacaccaccggccacctggtgaagatcatcgactttggcctggcccggcgctacaaccccaatgagaagctgaaggtgaactttggcaccccagagttcctgagccctgaggtggtgaactatgaccagatcagtgacaagacagacatgtggagcatgggcgtcatcacctacatgctgctgagcggcctgagccccttcctgggagatgatgacacagagaccctgaacaacgtgctgagcggcaactggtactttgatgaggagacctttgaggccgtgtctgatgaggccaaggactttgtgagcaacctgattgtgaaggaccagagggccaggatgaatgctgcccagtgcctggcccacccctggctgaacaacctggccgagaaggccaagcgctgcaacagaaggctgaagagccagatcctgctgaagaagtacctgatgaagaggcgctggaagaagaacttcatcgctgtgtctgctgccaaccgcttcaagaagatcagcagcagcggggccctgatggccctgggcgtgtag

SEQ ID NO: 160815 - DNA, 1791 bp, synthetic construct; identical to SEQ ID NO: 160814
  misc_feature 1..1791: note = Description of Artificial Sequence: Synthetic coding sequence
  source 1..1791: mol_type = other DNA

SEQ ID NO: 160816 - DNA, 2460 bp, synthetic construct
  misc_feature 1..2460: note = Description of Artificial Sequence: Synthetic coding sequence
  source 1..2460: mol_type = other DNA
atgagcggcaccagcaaggagagcctgggccatggaggcctgcccggcctgggcaagacctgcctgaccaccatggacaccaagctgaacatgctgaatgagaaggtggaccagctgctgcacttccaggaggatgtgacagagaagctgcagagcatgtgccgggacatgggccacctggagcggggcctgcaccggctggaggccagccgggcccctggccctggaggagcagatggagtgccccacatcgacacccaggccggctggccagaggtgctggagctggtgcgggccatgcagcaggatgctgcccagcacggggcccggctggaggccctcttcaggatggtggccgctgtggaccgggccatcgccctggtgggcgccaccttccagaagagcaaggtggccgacttcctgatgcagggccgggtgccctggaggcggggcagccctggggacagccctgaggagaacaaggagcgggtggaggaggagggcggcaagcccaagcacgtgctgagcaccagcggcgtgcagagtgatgcccgggagcctggagaggagagccagaaggcagatgtgctggagggcacagctgagcggctgccccccatccgggccagcggcctgggcgctgaccctgcccaggccgtggtgtccccaggccagggagatggagtgcccggccctgcccaggccttccctggccacctgcccctgcccaccaaggtggaggccaaggcccctgagaccccatctgagaacctgaggacaggcctggagctggccccagcccctggccgggtgaatgtggtgagccccagcctggaggtggcccctggggccggccagggcgccagcagcagcaggccagaccctgagcccctggaggagggcacccggctgaccccaggccctggcccccagtgccccggccccccaggcctgcctgcccaggcccgggccacccacagcggcggggagaccccaccccgcatcagcatccacatccaggagatggacaccccaggagagatgctgatgacaggccggggcagcctgggccccaccctgaccacagaggccccagctgctgcccagcccgggaagcagggccccccaggcaccggccgctgcctgcaggcccctggaacagagcctggagagcagaccccagagggcgcccgggagctgagccccctgcaggagagcagcagccctggaggagtgaaggccgaggaggagcagagagctggagctgagcccggcacccggcccagcctggcccggagtgatgacaatgaccacgaggtgggcgccctgggcctgcagcagggcaagagccctggagctggcaaccctgagcctgagcaggactgtgccgcccgggcccctgtgcgggcagaggccgtgcggaggatgcctcctggagctgaggccggctctgtggtgctggatgacagccctgcccccccagccccctttgagcaccgggtggtgtctgtgaaggagaccagcatctctgctggctatgaggtgtgccagcacgaggtgctgggcggcggccgcttcggccaggtgcaccgctgcacagagaagagcacaggcctgcccctggccgccaagatcatcaaggtgaagagcgccaaggacagagaagatgtgaagaatgagatcaacatcatgaaccagctgagccacgtgaacctgatccagctgtatgatgcctttgagagcaagcacagctgcaccctggtgatggagtatgtggatggaggagagctgtttgaccgcatcacagatgagaagtaccacctgacagagctggatgtggtgctcttcacccggcagatctgtgaaggagtgcactacctgcaccagcactacatcctgcacctggacctgaagccagagaacatcctgtgtgtgaaccagacaggccaccagatcaagatcatcgactttggcctggcccggcgctacaagccccgggagaagctgaaggtgaactttggcaccccagagttcctggcccctgaggtggtgaactatgaatttgtgtccttccccacagacatgtggagcgtgggcgtcatcacctacatgctgctgagcggcctgagccccttcctgggggagacagatgctgagaccatgaacttcatcgtgaactgctcctgggactttgatgctgacacctttgagggcctgtctgaggaggccaaggactttgtgtcccggctgctggtgaaggagaagagctgcaggatgtctgccacccagtgcctgaagcatgagtggctgaacaacctgcctgccaaggccagccgcagcaagacccggctgaagagccagctgctgctgcagaagtacatcgcccagaggaagtggaagaagcacttctacgtggtgacagctgccaaccggctgaggaagttccccaccagcccctag

SEQ ID NO: 160817 - DNA, 1437 bp, synthetic construct
  misc_feature 1..1437: note = Description of Artificial Sequence: Synthetic coding sequence
  source 1..1437: mol_type = other DNA
atggacaccccaggagagatgctgatgacaggccggggcagcctgggccccaccctgaccacagaggccccagctgctgcccagcccgggaagcagggccccccaggcaccggccgctgcctgcaggcccctggaacagagcccggggagcagaccccagagggcgcccgggagctgagccccctgcaggagagcagcagccctgggggcgtgaaggccgaggaggagcagagagctggagctgagcccggcacccggcccagcctggcccggagtgatgacaatgaccacgaggtgggcgccctgggcctgcagcagggcaagagccctggggccggcaaccctgagcctgagcaggactgtgccgcccgggcccctgtgcgggcagaggccgtgcggaggatgcctcctggagctgaggccggctctgtggtgctggatgacagccctgcccccccagccccctttgagcaccgggtggtgtctgtgaaggagaccagcatctctgctggctatgaggtgtgccagcacgaggtgctgggcggcggccgcttcggccaggtgcaccgctgcacagagaagagcacaggcctgcccctggccgccaagatcatcaaggtgaagagcgccaaggaccgggaggatgtgaagaatgagatcaacatcatgaaccagctgagccacgtgaacctgatccagctgtatgatgcctttgagagcaagcacagctgcaccctggtgatggagtatgtggatggaggagagctgtttgaccgcatcacagatgagaagtaccacctgacagagctggatgtggtgctcttcacccggcagatctgtgagggcgtgcactacctgcaccagcactacatcctgcacctggacctgaagccagagaacatcctgtgtgtgaaccagacaggccaccagatcaagatcatcgactttggcctggcccggcgctacaagccccgggagaagctgaaggtgaactttggcaccccagagttcctggcccctgaggtggtgaactatgaatttgtgtccttccccacagacatgtggagcgtgggcgtcatcacctacatgctgctgagcggcctgagccccttcctgggggagacagatgctgagaccatgaacttcatcgtgaactgctcctgggactttgatgctgacacctttgagggcctgtctgaggaggccaaggactttgtgtcccggctgctggtgaaggagaagagctgcaggatgtctgccacccagtgcctgaagcatgagtggctgaacaacctgcctgccaaggccagccgcagcaagacccggctgaagagccagctgctgctgcagaagtacatcgcccagaggaagtggaagaagcacttctacgtggtgacagctgccaaccggctgaggaagttccccaccagcccctag

SEQ ID NO: 160818 - DNA, 4212 bp, synthetic construct
  misc_feature 1..4212: note = Description of Artificial Sequence: Synthetic coding sequence
  source 1..4212: mol_type = other DNA
tgactgctgctggagagctgtgagaaggagaagcaggccctgctgcagaacctgaaggaggtggaggacaaggccagcgcctatgaggaccagctgcagggccaggcccagcaggtggagaccctgcagaaggagaagctgagcgccacctttgagggcagcgagcaggtgcaccagctggaggagcagctggaggcccgggaggcctctgtgcggcggctggccgagcacgtgcagagcctgtgtgatgagcgggacctgctgcggcagcgcttccaggagctgacagagcgggtggccaccagtgatgaagatgtggccgagctgcgggagaagctgcggcggcgggaggccgacaaccagagcctggagcacagctaccagagggtgagcagccagctgcagagcatgcacaccctgctgcgggagaaggaggaggagctggagcgcatcaaggaggcccacgagaaggtgctggagaagaaggagcaggacctgaatgaggccctggtgaagatggtggccctgggcagcagcctggaggagacagagatcaagctgcaggccaaggaggagatcctgaggaagtttgccagcgagagccccaaggacatggaggagcccaggagcaccccagaggagacagaaagagatggcaccctgctgcccggccagcctgtgcaggccacccgggcccccctgggcctgccccacacccggctggaggatgaagatgaggacctgggcgcccctcctggagaggagtatggagatggcagccccagccgggaggacagcatggtgccccccaagtctgtggaggtgctggaccgggagggccaccagcagggcacagccaagctggaccagggcgcccctggggtgaagaggcagaggatccgcttcagcaccatccagtgccagcgctacatccaccctgagggcagcgagaagacctggaccagcagcaccagcagtgacaccagccaggacaggagccccagcgaggagagcatgagcagcgagcccgcccccagcgtgctgcctgccactggagacagcgacacctacctgagcatcatccacagcctggagaccaagctgtatgtgacagaggagaagctgaaggatgtgacagtgcggctggagagccagcagggccagagccgggaggccctgctggccctgcaccaccagtgggccggcacagaggcccagctgcgggagcagctgcgggccagcctgctgcaggtgggcgccctggccagccagctggagcaggagcggcaggagcgggcccggcgggtggagggccacgtgggggagctgggggacttccaggtgaagaacagccaggccctgatgtgcctggagaactgccgggagcagctgcggagcctgccccgggccagccaggaggatgagcaggatgcccgggccgccagcctggcctctgtggagagcgccctggtgtctgccatccaggccctgcagcactggccagccccagcccatggaggagcccgggcccagctggagaccggcggcacagaagaaaatggcaagccagccagcctgcagcagtgcagccagagcgagctgacagagcaggagcaggtgcggctgctgagtgaccagatcgccctggaggccagcctcatcagccagattgctgacagcctgaagaacaccaccagtgatgtgtccaggatgctgcacgagatctcctggagcggccagccccccatggagagcgctggggcccctgtggacacctgggccaggaaggtgctggtggatggagagttctggagccaggtggagagcctgaggaagcacctgggcaccctgggcggggaggccgtgggcgccagcggagatggccagcagagcatcccccagggcctggcccccatcctggccaatgccacctgggtgcgggcagagctgagctttgccacccagagcgtgcgggagagcttccaccggcggctgcagagcatccaggagaccctgcggggcacccagacagccctgcggcagcacaagtgcctgctgcgggagatcctgggcgcctaccagaccccagactttgagcgggtgatgcagcaggtgctggaggccctgcggctgcctgctggccatgaagatggagtgcagctgtcctgggacctgagccccctgggggaggtgctgggccgggacagcgacagcagccaggagccctttgatgtgtctgaccagagccctggggcctttgtggccatccaggaggagctggcccagcagctgaaggagaaggccagcctgctggaggagattgctgctgccctgcccagcctgccccctgtggagagcctgcgggactgccagaagctgctgcaggtgtcccagagcctgagctacaacacctgcctgggcggcctgggccagtacagcagcctgctggtgcaggatgccatcatccaggcccaggtgtgctacgccagctgccgcatccggctggagtatgagaaggagctgcagctgtgcaaggagagctggcagacccgggagcccagctgcagcgagcaggcccaggccgcccgggccctgcgggaggagtatgaggagctgctgaggaagcagaagtctgagtacctggatgtgattgccatcgtggagcgggagaatgctgagctgaaggccaaggccgcccagctggaccaccagcagcagtgcctggaggatgctgagagcaagcacagcatgtccatgttcaccctgcggggccgctatgaggaggagatccgctgtgtggtggagcagctgaccaggacagagagcaccctgcaggccgagaggagccgggtgctgagccagctggatgcctctgtgcgggaccggcaggacatggagcggcaccacggggagcagatccagaccctggaggaccgcttccagctgaaggtgcgggagctgcagaccatccacgaggaggagctgcggaccctgcaggagcactacagccagagcctgcgctgcctgcaggacaccctgtgcctgcaccagggcccccaccccaaggccctgcctgccccagcccccaactggcaggccacccagggcgaggccgacagcatgacaggcctgcgggagcgcatccaggagctggaggcccagatggatgtgatgagggaggagctgggccacaaggacctggagggagatgctgccaccctgcgggagaagtaccagagggacctggagagcctgaaggccacctgtgagcggggctttgctgccatggaggagacccaccagaagaagattgaggacctgcagaggcagcaccagcgggagctggagaagctgcgggaggagaaggaccggctgctggccgaggagacagctgccaccatcagcgccatcgaggccatgaagaatgcccaccgggaggagatggagcgggagctggagaagagccagaggagccagatcagctctgtgaacagtgatgtggaggccctgcggcggcagtacctggaggagctgcagagcgtgcagcgggagctggaggtgctgtctgagcagtacagccagaagtgcctggagaatgcccacctggcccaggccctggaggccgagcggcaggccctgcggcagtgccagcgggagaaccaggagctgaatgcccacaaccaggagctgaacaaccggctggccgctgagatcacccggctgcggaccctgctgactggagatggcggcggggaggccaccggcagccccctggcccagggcaaggatgcctatgagctggaggtgctgctgcgggtgaaggagagcgagatccagtacctgaagcaggagatcagcagcctgaaggatgagctgcagacagccctgcgggacaagaagtatgccagtgacaagtacaaggacatctacacagagctgagcatcgccaaggccaaggctgactgtgacatcagccggctgaaggagcagctgaaggccgccacagaggccctgggggagaagagcccagattctgccaccgtgtctggctatgacatcatgaagagcaagagcaacccagacttcctgaagaaggacaggagctgtgtgacccggcagctgaggaacatccgcagcaagagcctgaaggagggcctgactgtgcaggagcggctgaagctgtttgagagccgggacctgaagaaggactag

SEQ ID NO: 160819 - DNA, 3078 bp, synthetic construct
  misc_feature 1..3078: note = Description of Artificial Sequence: Synthetic coding sequence
  source 1..3078: mol_type = other DNA
atgtctgctgccaaggagaacccctgcaggaagttccaggccaacatcttcaacaagagcaagtgccagaactgcttcaagccccgggagagccacctgctgaatgatgaggacctgacccaggccaagcccatctacggcggctggctgctgctggccccagatggaacagactttgacaaccctgtgcacaggagcaggaagtggcagaggcgcttcttcatcctgtatgaacatggcctgctgcgctatgccctggatgagatgcccaccaccctgccccagggcaccatcaacatgaaccagtgcacagatgtggtggatggagagggccgcacaggccagaagttcagcctgtgcatcctgaccccagagaaggagcacttcatccgggcagagaccaaggagatcgtgtctggctggctggagatgctgatggtgtaccccaggaccaacaagcagaaccagaagaagaagaggaaggtggagccccccaccccccaggagcccggccctgccaaggtggccgtgaccagcagcagcagcagcagcagcagcagcagcagcatccccagcgctgagaaggtgcccaccaccaagagcaccctgtggcaggaggagatgaggaccaaggaccagccagatggcagcagcctgagccctgcccagagccccagccagagccagcccccagctgccagcagcctgcgggagcccggcctggagagcaaggaggaggagagcgccatgagcagtgacaggatggactgtggcaggaaggtgcgggtggagagcggctacttcagcctggagaagaccaagcaggacctgaaggccgaggagcagcagctgcccccacccctgagcccccccagccccagcacccccaaccacagaagaagccaggtgattgagaagtttgaggccctggacatcgagaaggccgagcacatggagaccaatgctgtgggccccagccccagcagtgacacccggcagggccgctctgagaagagggccttccccaggaagagggacttcaccaatgaggcccccccagcccccctgcctgatgccagcgccagccccctgagcccccaccggcgggccaagagcctggacagaagaagcacagagcccagcgtgaccccagacctgctgaacttcaagaagggctggctgaccaagcagtatgaagatggccagtggaagaagcactggtttgtgctggccgaccagagcctgcgctactacagagattctgtggccgaggaggccgctgacctggatggagaaattgacctgagcgcctgctatgatgtgacagagtaccctgtgcagaggaactacggcttccagatccacaccaaggagggggagttcaccctgagcgccatgaccagcggcatcagaagaaactggatccagaccatcatgaagcacgtgcaccccaccacagccccagatgtgaccagcagcctgcctgaggagaagaacaagagcagctgcagctttgagacctgcccccggcccacagagaagcaggaggccgagctgggggagccagaccctgagcagaagaggagccgggcccgggagaggagaagagagggccgcagcaagacctttgactgggccgagttccggcccatccagcaggccctggcccaggagcgggtgggcggcgtgggccctgctgacacccatgagcccctgcggcctgaggccgagcccggggagctggagcgggagcgggcccggcggcgggaggagaggaggaagcgcttcggcatgctggatgccacagatggccctggaacagaagatgctgccctgaggatggaggtggacaggagccctggcctgcccatgtctgacctgaagacccacaacgtgcacgtggagattgagcagcgctggcaccaggtggagaccacccccctgcgggaggagaagcaggtgcccatcgcccctgtgcacctgagcagtgaagatggaggagaccggctgagcacccatgagctgaccagcctgctggagaaggagctggagcagagccagaaggaggccagtgacctgctggagcagaaccggctgctgcaggaccagctgcgggtggccctgggccgggagcagagcgcccgggagggctacgtgctgcaggccacctgtgagcggggctttgctgccatggaggagacccaccagaagaagattgaggacctgcagaggcagcaccagcgggagctggagaagctgcgggaggagaaggaccggctgctggccgaggagacagctgccaccatcagcgccatcgaggccatgaagaatgcccaccgggaggagatggagcgggagctggagaagagccagaggagccagatcagctctgtgaacagtgatgtggaggccctgcggcggcagtacctggaggagctgcagagcgtgcagcgggagctggaggtgctgtctgagcagtacagccagaagtgcctggagaatgcccacctggcccaggccctggaggccgagcggcaggccctgcggcagtgccagcgggagaaccaggagctgaatgcccacaaccaggagctgaacaaccggctggccgctgagatcacccggctgcggaccctgctgactggagatggcggcggggaggccaccggcagccccctggcccagggcaaggatgcctatgagctggaggtgctgctgcgggtgaaggagagcgagatccagtacctgaagcaggagatcagcagcctgaaggatgagctgcagacagccctgcgggacaagaagtatgccagtgacaagtacaaggacatctacacagagctgagcatcgccaaggccaaggctgactgtgacatcagccggctgaaggagcagctgaaggccgccacagaggccctgggggagaagagcccagacagcgccaccgtgtctggctatgacatcatgaagagcaagagcaacccagacttcctgaagaaggacaggagctgtgtgacccggcagctgaggaacatccgcagcaagagcgtcatcgagcaggtgtcctgggacacctag

SEQ ID NO: 160820 - DNA, 3078 bp, synthetic construct; identical to SEQ ID NO: 160819
  misc_feature 1..3078: note = Description of Artificial Sequence: Synthetic coding sequence
  source 1..3078: mol_type = other DNA

SEQ ID NO: 160821 - DNA, 192 bp, synthetic construct
  misc_feature 1..192: note = Description of Artificial Sequence: Synthetic coding sequence
  source 1..192: mol_type = other DNA
atgtctgctgccaaggagaacccctgcaggaagttccaggccaacatcttcaacaagagcaagtgccagaactgcttcaagccccgggagagccacctgctgaatgatgaggacctgacccagcagaacacccaccccctggagatgaagagaggagcccacatctatgatgccaggatgttcagctgctag

SEQ ID NO: 160822 - DNA, 282 bp, synthetic construct
  misc_feature 1..282: note = Description of Artificial Sequence: Synthetic coding sequence
  source 1..282: mol_type = other DNA
atgtctgctgccaaggagaacccctgcaggaagttccaggccaacatcttcaacaagagcaagtgccagaactgcttcaagccccgggagagccacctgctgaatgatgaggacctgacccaggccaagcccatctacggcggctggctgctgctggccccagatggaacagactttgacaaccctgtgcacaggagcaggaagtggcagaggcgcttcttcatcctgtatgaacatggcctgctgcgctatgccctggatgagatgatgagcagccagtag

SEQ ID NO: 160823 - DNA, 3117 bp, synthetic construct
  misc_feature 1..3117: note = Description of Artificial Sequence: Synthetic coding sequence
  source 1..3117: mol_type = other DNA
atgtctgctgccaaggagaacccctgcaggaagttccaggccaacatcttcaacaagagcaagtgccagaactgcttcaagccccgggagagccacctgctgaatgatgaggacctgacccaggccaagcccatctacggcggctggctgctgctggccccagatggaacagactttgacaaccctgtgcacaggagcaggaagtggcagaggcgcttcttcatcctgtatgaacatggcctgctgcgctatgccctggatgagatgcccaccaccctgccccagggcaccatcaacatgaaccagtgcacagatgtggtggatggagagggccgcacaggccagaagttcagcctgtgcatcctgaccccagagaaggagcacttcatccgggcagagaccaaggagatcgtgtctggctggctggagatgctgatggtgtaccccaggaccaacaagcagaaccagaagaagaagaggaaggtggagccccccaccccccaggagcccggccctgccaaggtggccgtgaccagcagcagcagcagcagcagcagcagcagcagcatccccagcgctgagaaggtgcccaccaccaagagcaccctgtggcaggaggagatgaggaccaaggaccagccagatggcagcagcctgagccctgcccagagccccagccagagccagcccccagctgccagcagcctgcgggagcccggcctggagagcaaggaggaggagagcgccatgagcagtgacaggatggactgtggcaggaaggtgcgggtggagagcggctacttcagcctggagaagaccaagcaggacctgaaggccgaggagcagcagctgcccccacccctgagcccccccagccccagcacccccaaccacagaagaagccaggtgattgagaagtttgaggccctggacatcgagaaggccgagcacatggagaccaatgctgtgggccccagccccagcagtgacacccggcagggccgctctgagaagagggccttccccaggaagagggacttcaccaatgaggcccccccagcccccctgcctgatgccagcgccagccccctgagcccccaccggcgggccaagagcctggacagaagaagcacagagcccagcgtgaccccagacctgctgaacttcaagaagggctggctgaccaagcagtatgaagatggccagtggaagaagcactggtttgtgctggccgaccagagcctgcgctactacagagattctgtggccgaggaggccgctgacctggatggagaaattgacctgagcgcctgctatgatgtgacagagtaccctgtgcagaggaactacggcttccagatccacaccaaggagggggagttcaccctgagcgccatgaccagcggcatcagaagaaactggatccagaccatcatgaagcacgtgcaccccaccacagccccagatgtgaccagcagcctgcctgaggagaagaacaagagcagctgcagctttgagacctgcccccggcccacagagaagcaggaggccgagctgggggagccagaccctgagcagaagaggagccgggcccgggagaggagaagagagggccgcagcaagacctttgactgggccgagttccggcccatccagcaggccctggcccaggagcgggtgggcggcgtgggccctgctgacacccatgagcccctgcggcctgaggccgagcccggggagctggagcgggagcgggcccggcggcgggaggagaggaggaagcgcttcggcatgctggatgccacagatggccctggaacagaagatgctgccctgaggatggaggtggacaggagccctggcctgcccatgtctgacctgaagacccacaacgtgcacgtggagattgagcagcgctggcaccaggtggagaccacccccctgcgggaggagaagcaggtgcccatcgcccctgtgcacctgagcagtgaagatggaggagaccggctgagcacccatgagctgaccagcctgctggagaaggagctggagcagagccagaaggaggccagtgacctgctggagcagaaccggctgctgcaggaccagctgcgggtggccctgggccgggagcagagcgcccgggagggctacgtgctgcaggccacctgtgagcggggctttgctgccatggaggagacccaccagaagaagattgaggacctgcagaggcagcaccagcgggagctggagaagctgcgggaggagaaggaccggctgctggccgaggagacagctgccaccatcagcgccatcgaggccatgaagaatgcccaccgggaggagatggagcgggagctggagaagagccagaggagccagatcagctctgtgaacagtgatgtggaggccctgcggcggcagtacctggaggagctgcagagcgtgcagcgggagctggaggtgctgtctgagcagtacagccagaagtgcctggagaatgcccacctggcccaggccctggaggccgagcggcaggccctgcggcagtgccagcgggagaaccaggagctgaatgcccacaaccaggagctgaacaaccggctggccgctgagatcacccggctgcggaccctgctgactggagatggcggcggggaggccaccggcagccccctggcccagggcaaggatgcctatgagctggaggtgctgctgcgggtgaaggagagcgagatccagtacctgaagcaggagatcagcagcctgaaggatgagctgcagacagccctgcgggacaagaagtatgccagtgacaagtacaaggacatctacacagagctgagcatcgccaaggccaaggctgactgtgacatcagccggctgaaggagcagctgaaggccgccacagaggccctgggggagaagagcccagacagcgccaccgtgtctggctatgacatcatgaagagcaagagcaacccagacttcctgaagaaggacaggagctgtgtgacccggcagctgaggaacatccgcagcaagagcctgaaggagggcctgactgtgcaggagcggctgaagctgtttgagagccgggacctgaagaaggactag

SEQ ID NO: 160824 - DNA, 3276 bp, synthetic construct
  misc_feature 1..3276: note = Description of Artificial Sequence: Synthetic coding sequence
  source 1..3276: mol_type = other DNA
tgaagattcagcaccatccagtgccagcgctacatccaccctgagggcagcgagaagacctggaccagcagcaccagcagtgacaccagccaggacaggagccccagcgaggagagcatgagcagcgagcccgcccccagcgtgctgcctgccaccggggacagcgacacctacctgagcatcatccacagcctggagaccaagctgtatgtgacagaggagaagctgaaggatgtgacagtgcggctggagagccagcagggccagagccgggaggccctgctggccctgcaccaccagtgggccggcacagaggcccagctgcgggagcagctgcgggccagcctgctgcaggtgggcgccctggccagccagctggagcaggagcggcaggagcgggccaggagagtggagggccacgtgggggagctgggggacttccaggtgaagaacagccaggccctgatgtgcctggagaactgccgggagcagctgcggagcctgccccgggccagccaggaggatgagcaggatgcccgggccgccagcctggcctctgtggagagcgccctggtgtctgccatccaggccctgcagcactggccagccccagcccacggcggggcccgggcccagctggagactggaggaacagaggagaatggcaagccagccagcctgcagcagtgcagccagagcgagctgacagagcaggagcaggtgcggctgctgagtgaccagatcgccctggaggccagcctcatcagccagattgctgacagcctgaagaacaccaccagtgatgtgtccaggatgctgcacgagatctcctggagcggccagccccccatggagagcgctggggcccctgtggacacctgggccaggaaggtgctggtggatggagagttctggagccaggtggagagcctgaggaagcacctgggcaccctgggcggggaggccgtgggcgccagcggagatggccagcagagcatcccccagggcctggcccccatcctggccaatgccacctgggtgcgggcagagctgagctttgccacccagagcgtgcgggagagcttccaccggcggctgcagagcatccaggagaccctgcggggcacccagacagccctgcggcagcacaagtgcctgctgcgggagatcctgggcgcctaccagaccccagactttgagcgggtgatgcagcaggtgctggaggccctgcggctgcctgctggccatgaagatggagtgcagctgtcctgggacctgagccccctgggggaggtgctgggccgggacagcgacagcagccaggagccctttgatgtgtctgaccagagccctggggcctttgtggccatccaggaggagctggcccagcagctgaaggagaaggccagcctgctggaggagattgctgctgccctgcccagcctgccccctgtggagagcctgcgggactgccagaagctgctgcaggtgtcccagagcctgagctacaacacctgcctgggcggcctgggccagtacagcagcctgctggtgcaggatgccatcatccaggcccaggtgtgctacgccagctgccgcatccggctggagtatgagaaggagctgcagctgtgcaaggagagctggcagacccgggagcccagctgcagcgagcaggcccaggccgcccgggccctgcgggaggagtatgaggagctgctgaggaagcagaagtctgagtacctggatgtgattgccatcgtggagagagaaaatgctgagctgaaggccaaggccgcccagctggaccaccagcagcagtgcctggaggatgctgagagcaagcacagcatgtccatgttcaccctgcggggccgctatgaggaggagatccgctgtgtggtggagcagctgaccaggacagagagcaccctgcaggccgagaggagccgggtgctgagccagctggatgcctctgtgcgggaccggcaggacatggagcggcaccacggggagcagatccagaccctggaggaccgcttccagctgaaggtgcgggagctgcagaccatccacgaggaggagctgcggaccctgcaggagcactacagccagagcctgcgctgcctgcaggacaccctgtgcctgcaccagggcccccaccccaaggccctgcctgccccagcccccaactggcaggccacccagggcgaggccgacagcatgacaggcctgcgggagcgcatccaggagctggaggcccagatggatgtgatgagggaggagctgggccacaaggacctggagggagatgctgccaccctgcgggagaagtaccagagggacctggagagcctgaaggccacctgtgagcggggctttgctgccatggaggagacccaccagaagaagattgaggacctgcagaggcagcaccagcgggagctggagaagctgcgggaggagaaggaccggctgctggccgaggagacagctgccaccatcagcgccatcgaggccatgaagaatgcccaccgggaggagatggagcgggagctggagaagagccagaggagccagatcagctctgtgaacagtgatgtggaggccctgcggcggcagtacctggaggagctgcagagcgtgcagcgggagctggaggtgctgtctgagcagtacagccagaagtgcctggagaatgcccacctggcccaggccctggaggccgagcggcaggccctgcggcagtgccagcgggagaaccaggagctgaatgcccacaaccaggagctgaacaaccggctggccgctgagatcacccggctgcggaccctgctgactggagatggcggcggggaggccaccggcagccccctggcccagggcaaggatgcctatgagctggaggtgctgctgcgggtgaaggagagcgagatccagtacctgaagcaggagatcagcagcctgaaggatgagctgcagacagccctgcgggacaagaagtatgccagtgacaagtacaaggacatctacacagagctgagcatcgccaaggccaaggctgactgtgacatcagccggctgaaggagcagctgaaggccgccacagaggccctgggggagaagagcccagacagcgccaccgtgtctggctatgacatcatgaagagcaagagcaacccagacttcctgaagaaggacaggagctgtgtgacccggcagctgaggaacatccgcagcaagagcgtcatcgagcaggtgtcctgggacacctag

SEQ ID NO: 160825 - DNA, 840 bp, synthetic construct
  misc_feature 1..840: note = Description of Artificial Sequence: Synthetic coding sequence
  source 1..840: mol_type = other DNA
tgacaggaggccgagctgggggagccagaccctgagcagaagaggagccgggcccgggagcggcggcgggagggccgcagcaagacctttgactgggccgagttccggcccatccagcaggccctggcccaggagcgggtgggcggcgtgggccctgctgacacccatgagcccctgcggcctgaggccgagcctggagagctggagcgggagcgggccaggagaagagaggagaggaggaagagatttggcatgctggatgccacagatggccctggaacagaagatgctgccctgaggatggaggtggacaggagccctggcctgcccatgtctgacctgaagacccacaacgtgcacgtggagattgagcagcgctggcaccaggtggagaccacccccctgcgggaggagaagcaggtgcccatcgcccctgtgcacctgagcagtgaagatggaggagaccggctgagcacccatgagctgaccagcctgctggagaaggagctggagcagagccagaaggaggccagtgacctgctggagcagaaccggctgctgcaggaccagctgcgggtggccctgggccgggagcagagcgcccgggagggctacgtgctgcagacagaggtggccgccagccccagcggggcctggcagaggctgcaccgggtgaaccaggacctgcagagcgagctggaggcccagtgccagaggcaggagctgatcacccaccagatccagaccctgaagaggagctatggagaggccaaggacaccatccgccaccacgaggccgagatccgcagcctgcaggcccggctgagcaatgctgcctag

SEQ ID NO: 160826 - DNA, 585 bp, synthetic construct
  misc_feature 1..585: note = Description of Artificial Sequence: Synthetic coding sequence
  source 1..585: mol_type = other DNA
ctgcggcagcagacagtggaggagctgcagagcgtgcagcgggagctggaggtgctgtctgagcagtacagccagaagtgcctggagaatgcccacctggcccaggccctggaggccgagcggcaggccctgcggcagtgccagcgggagaaccaggagctgaatgcccacaaccaggtgctgctgcgggtgaaggagagcgagatccagtacctgaagcaggagatcagcagcctgaaggatgagctgcagacagccctgcgggacaagaagtatgccagtgacaagtacaaggacatctacacagagctgagcatcgccaaggccaaggctgactgtgacatcagccggctgaaggagcagctgaaggccgccacagaggccctgggggagaagagcccagacagcgccaccgtgtctggctatgacatcatgaagagcaagagcaacccagacttcctgaagaaggacaggagctgtgtgacccggcagctgaggaacatccgcagcaagagcctgaaggagggcctgactgtgcaggagcggctgaagctgtttgagagccgggacctgaagaaggactag

SEQ ID NO: 160827 - DNA, 3003 bp, synthetic construct
  misc_feature 1..3003: note = Description of Artificial Sequence: Synthetic coding sequence
  source 1..3003: mol_type = other DNA
atgtctgctgccaaggagaacccctgcaggaagttccaggccaacatcttcaacaagagcaagtgccagaactgcttcaagccccgggagagccacctgctgaatgatgaggacctgacccaggccaagcccatctacggcggctggctgctgctggccccagatggaacagactttgacaaccctgtgcacaggagcaggaagtggcagaggcgcttcttcatcctgtatgaacatggcctgctgcgctatgccctggatgagatgcccaccaccctgccccagggcaccatcaacatgaaccagtgcacagatgtggtggatggagagggccgcacaggccagaagttcagcctgtgcatcctgaccccagagaaggagcacttcatccgggcagagaccaaggagatcgtgtctggctggctggagatgctgatggtgtaccccaggaccaacaagcagaaccagaagaagaagaggaaggtggagccccccaccccccaggagcccggccctgccaaggtggccgtgaccagcagcagcagcagcagcagcagcagcagcagcatccccagcgctgagaaggtgcccaccaccaagagcaccctgtggcaggaggagatgaggaccaaggaccagccagatggcagcagcctgagccctgcccagagccccagccagagccagcccccagctgccagcagcctgcgggagcccggcctggagagcaaggaggaggagagcgccatgagcagtgacaggatggactgtggcaggaaggtgcgggtggagagcggctacttcagcctggagaagaccaagcaggacctgaaggccgaggagcagcagctgcccccacccctgagcccccccagccccagcacccccaaccacagaagaagccaggtgattgagaagtttgaggccctggacatcgagaaggccgagcacatggagaccaatgctgtgggccccagccccagcagtgacacccggcagggccgctctgagaagagggccttccccaggaagaggccagacctgctgaacttcaagaagggctggctgaccaagcagtatgaagatggccagtggaagaagcactggtttgtgctggccgaccagagcctgcgctactacagagattctgtggccgaggaggccgctgacctggatggagaaattgacctgagcgcctgctatgatgtgacagagtaccctgtgcagaggaactacggcttccagatccacaccaaggagggggagttcaccctgagcgccatgaccagcggcatcagaagaaactggatccagaccatcatgaagcacgtgcaccccaccacagccccagatgtgaccagcagcctgcctgaggagaagaacaagagcagctgcagctttgagacctgcccccggcccacagagaagcaggaggccgagctgggggagccagaccctgagcagaagaggagccgggcccgggagaggagaagagagggccgcagcaagacctttgactgggccgagttccggcccatccagcaggccctggcccaggagcgggtgggcggcgtgggccctgctgacacccatgagcccctgcggcctgaggccgagcccggggagctggagcgggagcgggcccggcggcgggaggagaggaggaagcgcttcggcatgctggatgccacagatggccctggaacagaagatgctgccctgaggatggaggtggacaggagccctggcctgcccatgtctgacctgaagacccacaacgtgcacgtggagattgagcagcgctggcaccaggtggagaccacccccctgcgggaggagaagcaggtgcccatcgcccctgtgcacctgagcagtgaagatggaggagaccggctgagcacccatgagctgaccagcctgctggagaaggagctggagcagagccagaaggaggccagtgacctgctggagcagaaccggctgctgcaggaccagctgcgggtggccctgggccgggagcagagcgcccgggagggctacgtgctgcaggccacctgtgagcggggctttgctgccatggaggagacccaccagaagaagattgaggacctgcagaggcagcaccagcgggagctggagaagctgcgggaggagaaggaccggctgctggccgaggagacagctgccaccatcagcgccatcgaggccatgaagaatgcccaccgggaggagatggagcgggagctggagaagagccagaggagccagatcagctctgtgaacagtgatgtggaggccctgcggcggcagtacctggaggagctgcagagcgtgcagcgggagctggaggtgctgtctgagcagtacagccagaagtgcctggagaatgcccacctggcccaggccctggaggccgagcggcaggccctgcggcagtgccagcgggagaaccaggagctgaatgcccacaaccaggagctgaacaaccggctggccgctgagatcacccggctgcggaccctgctgactggagatggcggcggggaggccaccggcagccccctggcccagggcaaggatgcctatgagctggaggtgctgctgcgggtgaaggagagcgagatccagtacctgaagcaggagatcagcagcctgaaggatgagctgcagacagccctgcgggacaagaagtatgccagtgacaagtacaaggacatctacacagagctgagcatcgccaaggccaaggctgactgtgacatcagccggctgaaggagcagctgaaggccgccacagaggccctgggggagaagagcccagacagcgccaccgtgtctggctatgacatcatgaagagcaagagcaacccagacttcctgaagaaggacaggagctgtgtgacccggcagctgaggaacatccgcagcaagagcctgaaggagggcctgactgtgcaggagcggctgaagctgtttgagagccgggacctgaagaaggactag

SEQ ID NO: 160828 - DNA, 795 bp, synthetic construct
  misc_feature 1..795: note = Description of Artificial Sequence: Synthetic coding sequence
  source 1..795: mol_type = other DNA
atggagaactacggcatcgagtggcacagcgtgcgggacagcgagggccagaagctgctgattggagtgggccctgagggcatcagcatctgcaaggatgacttcagccccatcaacagaattgcctaccctgtggtgcagatggccacccagagcggcaagaatgtgtacctgactgtgaccaaggagagcggcaacagcatcgtgctgctcttcaagatgatcagcaccagggctgccagcggcctgtaccgggccatcacagagacccacgccttctaccgctgtgacacagtgaccagcgctgtgatgatgcagtacagccgggacctgaagggccacctggccagcctcttcctgaatgaaaacatcaacctgggcaagaagtatgtgtttgacatcaagaggaccagcaaggaggtgtatgaccacgcccggcgggccctgtacaatgctggggtggtggacctggtgtccaggaacaaccagagccccagccacagccccctgaagagcagcgagagctccatgaactgcagcagctgtgagggcctgagctgccagcagaccagggtgctgcaggagaagctgaggaagctgaaggaggccatgctgtgcatggtgtgctgtgaggaggagatcaacagcaccttctgcccctgtggccacacagtgtgctgtgagagctgtgccgcccagctgcagagctgccctgtgtgccgcagccgggtggagcacgtgcagcacgtgtacctgcccacccacaccagcctgctgaacctgaccgtcatctag

SEQ ID NO: 160829 - DNA, 1338 bp, synthetic construct
  misc_feature 1..1338: note = Description of Artificial Sequence: Synthetic coding sequence
  source 1..1338: mol_type = other DNA
atgctgtgctacgtgaccaggccagatgctgtgctgatggaggtggaggtggaggccaaggccaacggggaggactgcctgaaccaggtgtgccggcggctgggcatcatcgaggtggactacttcggcctgcagttcaccggcagcaagggggagagcctgtggctgaacctgaggaaccgcatcagccagcagatggatggcctggccccctaccgcctgaagctgcgggtgaagttctttgtggagccccacctgatcctgcaggagcagaccaggcacatcttcttcctgcacatcaaggaggccctgctggccggccacctgctgtgcagccctgagcaggccgtggagctgagcgccctgctggcccagaccaagtttggagactacaaccagaacacagccaagtacaactatgaggagctgtgtgccaaggagctgagcagcgccaccctgaacagcatcgtggccaagcacaaggagctggagggcaccagccaggccagcgctgagtaccaggtgctgcagatcgtgtctgccatggagaactatggaattgagtggcacagcgtgcgggacagcgagggccagaagctgctgattggagtgggccctgagggcatcagcatctgcaaggatgacttcagccccatcaaccgcatcgcctaccctgtggtgcagatggccacccagagcggcaagaatgtgtacctgactgtgaccaaggagagcggcaacagcatcgtgctgctcttcaagatgatcagcacccgggccgccagcggcctgtaccgggccatcacagagacccacgccttctaccgctgtgacacagtgaccagcgctgtgatgatgcagtacagccgggacctgaagggccacctggccagcctcttcctgaatgaaaacatcaacctgggcaagaagtatgtgtttgacatcaagaggaccagcaaggaggtgtatgaccacgcccggcgggccctgtacaatgccggcgtggtggacctggtgtccaggaacaaccagagccccagccacagccccctgaagagcagcgagagctccatgaactgcagcagctgtgagggcctgagctgccagcagaccagggtgctgcaggagaagctgaggaagctgaaggaggccatgctgtgcatggtgtgctgtgaggaggagatcaacagcaccttctgcccctgtggccacacagtgtgctgtgagagctgtgccgcccagctgcagagctgccctgtgtgccgcagccgggtggagcacgtgcagcacgtgtacctgcccacccacaccagcctgctgaacctgaccgtcatctag

SEQ ID NO: 160830 - DNA, 5487 bp, synthetic construct
  misc_feature 1..5487: note = Description of Artificial Sequence: Synthetic coding sequence
  source 1..5487: mol_type = other DNA
atggccgccagcgagctgtacaccaagtttgcccgggtgtggatcccagaccctgaggaggtgtggaagtctgctgagctgctgaaggactacaagccaggggacaaggtgctgctgctgcacctggaggagggcaaggacctggagtaccacctggaccccaagaccaaggagctgccccacctgagaaatccagacatcctggtgggagaaaatgacctgacagccctgagctacctgcacgagcctgctgtgctgcacaacctgcgggtgcgcttcatcgacagcaagctgatctacacctactgcggcatcgtgctggtggccatcaacccctatgagcagctgcccatctatggagaggacatcatcaatgcctacagcggccagaacatgggagacatggacccccacatctttgctgtggccgaggaggcctacaagcagatggccagagatgaaagaaaccagagcatcatcgtgtctggagagagcggggccggcaagacagtgtctgccaagtatgccatgagatactttgccaccgtgtctggcagcgccagcgaggccaacgtggaggagaaggtgctggccagcaaccccatcatggagagcattggaaatgccaagaccaccagaaatgacaacagcagcagatttgggaagtacatcgagatcggctttgacaagcgctaccgcatcattggagccaacatgaggacctacctgctggagaagagccgggtggtgttccaggccgaggaggagaggaactaccacatcttctaccagctgtgtgccagcgccaagctgcctgagttcaagatgctgcggctgggcaatgctgacaacttcaactacaccaagcagggcggcagccctgtgattgagggcgtggatgatgccaaggagatggcccacacccggcaggcctgcaccctgctgggcatcagcgagagccaccagatgggcatcttccgcatcctggccggcatcctgcacctgggcaatgtgggcttcaccagcagagatgctgacagctgcaccatcccccccaagcatgagcccctgtgcatcttctgtgagctgatgggcgtggactatgaggagatgtgccactggctgtgccacaggaagctggccacagccacagagacctacatcaagcccatcagcaagctgcaggccaccaatgccagagatgccctggccaagcacatctatgccaagctgttcaactggatcgtggacaacgtgaaccaggccctgcacagcgctgtgaagcagcacagcttcatcggcgtgctggacatctacggctttgagacctttgagatcaacagctttgagcagttctgcatcaactatgccaatgagaagctgcagcagcagttcaacatgcacgtgttcaagctggagcaggaggagtacatgaaggagcagatcccctggaccctgattgacttctatgacaaccagccctgcatcaacctgattgagagcaagctgggcatcctggacctgctggatgaggagtgcaagatgcccaagggcacagatgacacctgggcccagaagctgtacaacacccacctgaacaagtgtgccctgtttgagaagccccggctgagcaacaaggccttcatcatccagcactttgctgacaaggtggagtaccagtgtgagggcttcctggagaagaacaaggacacagtgtttgaggagcagatcaaggtgctgaagagcagcaagttcaagatgctgcctgagctgttccaggatgatgagaaggccatcagccccaccagcgccaccagcagcggccgcacccccctgaccaggaccccagccaagcccaccaagggccggcccggccagatggccaaggagcacaagaagacagtgggccaccagttcaggaacagcctgcacctgctgatggagaccctgaatgccaccaccccccactacgtgcgctgcatcaagcccaatgacttcaagttccccttcacctttgatgagaagagagctgtgcagcagctgcgggcctgtggggtgctggagaccatccgcatctctgctgctggcttccccagccgctggacctaccaggagttcttcagccgctacagagtgctgatgaagcagaaggatgtgctgagtgacaggaagcagacctgcaagaatgtgctggagaagctgatcctggacaaggacaagtaccagtttgggaagaccaagatcttcttccgggccggccaggtggcctacctggagaagctgcgggctgacaagctgcgggccgcctgcatccgcatccagaagaccatccggggctggctgctgaggaagaagtacctgaggatgaggaaggccgccatcaccatgcagagatatgtgcggggctaccaggcccgctgctacgccaagttcctgcggaggaccaaggccgccaccatcatccagaagtactggaggatgtatgtggtgagaagacgctacaagatcagaagagctgccaccatcgtgctgcagagctacctgcggggcttcctggccaggaaccgctacaggaagatcctgcgggagcacaaggccgtcatcatccagaagagggtgcggggctggctggcccggacccactacaagaggtccatgcacgccatcatctacctgcagtgctgcttccggaggatgatggccaagcgggagctgaagaagctgaagattgaggcccggtctgtggagcgctacaagaagctgcacatcggcatggagaacaagatcatgcagctgcagaggaaggtggatgagcagaacaaggactacaagtgcctggtggagaagctgaccaacctggagggcatctacaacagcgagacagagaagctgcggagtgacctggagcggctgcagctgtctgaggaggaggccaaggtggccaccggccgggtgctgagcctgcaggaggagatcgccaagctgaggaaggacctggagcagaccaggtctgagaagaagtgcatcgaggagcacgccgaccgctacaagcaggagacagagcagctggtgagcaacctgaaggaggagaacaccctgctgaagcaggagaaggaggccctgaaccacagaattgtgcagcaggccaaggagatgacagagaccatggagaagaagctggtggaggagaccaagcagctggagctggacctgaatgatgagcggctgcgctaccagaacctgctgaatgagttcagccggctggaggagagatatgatgacctgaaggaggagatgaccctgatggtgcacgtgcccaagccaggccacaagaggacagacagcacccacagcagcaatgaaagtgagtacatcttcagcagcgagattgctgagatggaggacatccccagcaggacagaggagcccagcgagaagaaggtgcccctggacatgagcctcttcctgaagctgcagaagagggtgacagagctggagcaggagaagcaggtgatgcaggatgagctggacaggaaggaggagcaggtgctgcggagcaaggccaaggaggaggagcggccccagatcagaggagctgagctggagtatgagagcctgaagaggcaggagctggagagcgagaacaagaagctgaagaatgagctgaatgagctgaggaaggccctgtctgagaagagcgcccctgaggtgacagcccctggggccccagcctacagagtgctgatggagcagctgacctctgtgtctgaggagctggatgtgaggaaggaggaggtgctgatcctgcggagccagctggtgtcccagaaggaggccatccagcccaaggatgacaagaacaccatgacagacagcaccatcctgctggaggatgtgcagaagatgaaggacaagggggagatcgcccaggcctacatcggcctgaaggagaccaaccggctgctggagagccagctgcagagccagaagaggagccatgaaaatgaagctgaggccctgcggggggagatccagagcctgaaggaggagaacaaccggcagcagcagctgctggcccagaacctgcagctgcccccagaggcccgcatcgaggccagcctgcagcacgagatcacccggctgaccaatgaaaacctggacctgatggagcagctggagaagcaggacaagacagtgaggaagctgaagaagcagctgaaggtgtttgccaagaagattggagagctggaggtgggccagatggagaacatcagccctggccagatcattgatgagcccatccggcctgtgaacatccccaggaaggagaaggacttccagggcatgctggagtacaagaaggaggatgagcagaagctggtgaagaacctgatcctggagctgaagccccggggcgtggccgtgaacctgatccctggcctgcctgcctacatcctcttcatgtgtgtgagacatgctgactacctgaatgatgaccagaaggtgcgcagcctgctgaccagcaccatcaacagcatcaagaaggtgctgaagaagagaggagatgactttgagaccgtgtccttctggctgagcaacacctgccgcttcctgcactgcctgaagcagtacagcggggaggagggcttcatgaagcacaacaccagccggcagaatgagcactgcctgaccaactttgacctggccgagtaccggcaggtgctgagtgacctggccatccagatctaccagcagctggtgcgggtgctggagaacatcctgcagcccatgattgtgtctggcatgctggagcacgagaccatccagggcgtgtctggagtgaagcccaccggcctgaggaagaggaccagcagcattgctgatgagggcacctacaccctggacagcatcctgcggcagctgaacagcttccacagcgtgatgtgccagcacggcatggaccctgagctgatcaagcaggtggtgaagcagatgttctacatcattggagccatcaccctgaacaacctgctgctgaggaaggacatgtgctcctggagcaagggcatgcagatccgctacaacgtgtcccagctggaggagtggctgcgggacaagaacctgatgaacagcggggccaaggagaccctggagcccctcatccaggccgcccagctgctgcaggtgaagaagaagacagatgatgatgctgaggccatctgcagcatgtgcaatgccctgaccacagcccagatcgtgaaggtgctgaacctgtacacccctgtgaatgaatttgaggagcgggtgtctgtgtccttcatccgcaccatccagatgaggctgcgggacaggaaggacagcccccagctgctgatggatgccaagcacatcttccctgtgaccttccccttcaaccccagcagcctggccctggagaccatccagatcccagccagcctgggcctgggcttcatcagccgggtgtag

SEQ ID NO: 160831 - DNA, 5643 bp, synthetic construct
  misc_feature 1..5643: note = Description of Artificial Sequence: Synthetic coding sequence
  source 1..5643: mol_type = other DNA
atgaagagcagcagcctggagaccatgtttgcccgggtgtggatcccagaccctgaggaggtgtggaagtctgctgagctgctgaaggactacaagccaggggacaaggtgctgctgctgcacctggaggagggcaaggacctggagtaccacctggaccccaagaccaaggagctgccccacctgagaaatccagacatcctggtgggagaaaatgacctgacagccctgagctacctgcacgagcctgctgtgctgcacaacctgcgggtgcgcttcatcgacagcaagctgatctacacctactgcggcatcgtgctggtggccatcaacccctatgagcagctgcccatctatggagaggacatcatcaatgcctacagcggccagaacatgggagacatggacccccacatctttgctgtggccgaggaggcctacaagcagatggccagagatgaaagaaaccagagcatcatcgtgtctggagagagcggggccggcaagacagtgtctgccaagtatgccatgagatactttgccaccgtgtctggcagcgccagcgaggccaacgtggaggagaaggtgctggccagcaaccccatcatggagagcattggaaatgccaagaccaccagaaatgacaacagcagcagatttgggaagtacatcgagatcggctttgacaagcgctaccgcatcattggagccaacatgaggacctacctgctggagaagagccgggtggtgttccaggccgaggaggagaggaactaccacatcttctaccagctgtgtgccagcgccaagctgcctgagttcaagatgctgcggctgggcaatgctgacaacttcaactacaccaagcagggcggcagccctgtgattgagggcgtggatgatgccaaggagatggcccacacccggcaggcctgcaccctgctgggcatcagcgagagccaccagatgggcatcttccgcatcctggccggcatcctgcacctgggcaatgtgggcttcaccagcagagatgctgacagctgcaccatcccccccaagcatgagcccctgtgcatcttctgtgagctgatgggcgtggactatgaggagatgtgccactggctgtgccacaggaagctggccacagccacagagacctacatcaagcccatcagcaagctgcaggccaccaatgccagagatgccctggccaagcacatctatgccaagctgttcaactggatcgtggacaacgtgaaccaggccctgcacagcgctgtgaagcagcacagcttcatcggcgtgctggacatctacggctttgagacctttgagatcaacagctttgagcagttctgcatcaactatgccaatgagaagctgcagcagcagttcaacatgcacgtgttcaagctggagcaggaggagtacatgaaggagcagatcccctggaccctgattgacttctatgacaaccagccctgcatcaacctgattgagagcaagctgggcatcctggacctgctggatgaggagtgcaagatgcccaagggcacagatgacacctgggcccagaagctgtacaacacccacctgaacaagtgtgccctgtttgagaagccccggctgagcaacaaggccttcatcatccagcactttgctgacaaggtggagtaccagtgtgagggcttcctggagaagaacaaggacacagtgtttgaggagcagatcaaggtgctgaagagcagcaagttcaagatgctgcctgagctgttccaggatgatgagaaggccatcagccccaccagcgccaccagcagcggccgcacccccctgaccaggaccccagccaagcccaccaagggccggcccggccagatggccaaggagcacaagaagacagtgggccaccagttcaggaacagcctgcacctgctgatggagaccctgaatgccaccaccccccactacgtgcgctgcatcaagcccaatgacttcaagttccccttcacctttgatgagaagagagctgtgcagcagctgcgggcctgtggggtgctggagaccatccgcatctctgctgctggcttccccagccgctggacctaccaggagttcttcagccgctacagagtgctgatgaagcagaaggatgtgctgagtgacaggaagcagacctgcaagaatgtgctggagaagctgatcctggacaaggacaagtaccagtttgggaagaccaagatcttcttccgggccggccaggtggcctacctggagaagctgcgggctgacaagctgcgggccgcctgcatccgcatccagaagaccatccggggctggctgctgaggaagaagtacctgaggatgaggaaggccgccatcaccatgcagagatatgtgcggggctaccaggcccgctgctacgccaagttcctgcggaggaccaaggccgccaccatcatccagaagtactggaggatgtatgtggtgagaagacgctacaagatcagaagagctgccaccatcgtgctgcagagctacctgcggggcttcctggccaggaaccgctacaggaagatcctgcgggagcacaaggccgtcatcatccagaagagggtgcggggctggctggcccggacccactacaagaggtccatgcacgccatcatctacctgcagtgctgcttccggaggatgatggccaagcgggagctgaagaagctgaagattgaggcccggtctgtggagcgctacaagaagctgcacatcggcatggagaacaagatcatgcagctgcagaggaaggtggatgagcagaacaaggactacaagtgcctggtggagaagctgaccaacctggagggcatctacaacagcgagacagagaagctgcggagtgacctggagcggctgcagctgtctgaggaggaggccaaggtggccaccggccgggtgctgagcctgcaggaggagatcgccaagctgaggaaggacctggagcagaccaggtctgagaagaagtgcatcgaggagcacgccgaccgctacaagcaggagacagagcagctggtgagcaacctgaaggaggagaacaccctgctgaagcaggagaaggaggccctgaaccacagaattgtgcagcaggccaaggagatgacagagaccatggagaagaagctggtggaggagaccaagcagctggagctggacctgaatgatgagcggctgcgctaccagaacctgctgaatgagttcagccggctggaggagagatatgatgacctgaaggaggagatgaccctgatggtgcacgtgcccaagccaggccacaagaggacagacagcacccacagcagcaatgaaagtgagtacatcttcagcagcgagattgctgagatggaggacatccccagcaggacagaggagcccagcgagaagaaggtgcccctggacatgagcctcttcctgaagctgcagaagagggtgacagagctggagcaggagaagcaggtgatgcaggatgagctggacaggaaggaggagcaggtgctgcggagcaaggccaaggaggaggagcggccccagatcagaggagctgagctggagtatgagagcctgaagaggcaggagctggagagcgagaacaagaagctgaagaatgagctgaatgagctgaggaaggccctgtctgagaagagcgcccctgaggtgacagcccctggggccccagcctacagagtgctgatggagcagctgacctctgtgtctgaggagctggatgtgaggaaggaggaggtgctgatcctgcggagccagctggtgtcccagaaggaggccatccagcccaagctgcacgagaacaccatgacagacagcaccatcctgctggaggatgtgcagaagatgaaggacaagggggagatcgcccaggcctacatcggcctgaaggagaccaacagaagcagcgccctggactaccacgagctgaatgaagatggagagctgtggctggtgtatgagggcctgaagcaggccaaccggctgctggagagccagctgcagagccagaagaggagccatgaaaatgaggccgaggccctgcggggggagatccagagcctgaaggaggagaacaaccggcagcagcagctgctggcccagaacctgcagctgcccccagaggccagaattgaggccagcctgcagcacgagatcacccggctgaccaatgaaaatctctactttgaggagctgtatgcagatgaccccaagaagtaccagagctaccgcatcagcctgtacaagaggatgattgacctgatggagcagctggagaagcaggacaagacagtgaggaagctgaagaagcagctgaaggtgtttgccaagaagattggagagctggaggtgggccagatggagaacatcagccctggccagatcattgatgagcccatccggcctgtgaacatccccaggaaggagaaggacttccagggcatgctggagtacaagaaggaggatgagcagaagctggtgaagaacctgatcctggagctgaagccccggggcgtggccgtgaacctgatccctggcctgcctgcctacatcctcttcatgtgtgtgagacatgctgactacctgaatgatgaccagaaggtgcgcagcctgctgaccagcaccatcaacagcatcaagaaggtgctgaagaagagaggagatgactttgagaccgtgtccttctggctgagcaacacctgccgcttcctgcactgcctgaagcagtacagcggggaggagggcttcatgaagcacaacaccagccggcagaatgagcactgcctgaccaactttgacctggccgagtaccggcaggtgctgagtgacctggccatccagatctaccagcagctggtgcgggtgctggagaacatcctgcagcccatgattgtgtctggcatgctggagcacgagaccatccagggcgtgtctggagtgaagcccaccggcctgaggaagaggaccagcagcattgctgatgagggcacctacaccctggacagcatcctgcggcagctgaacagcttccacagcgtgatgtgccagcacggcatggaccctgagctgatcaagcaggtggtgaagcagatgttctacatcattggagccatcaccctgaacaacctgctgctgaggaaggacatgtgctcctggagcaagggcatgcagatccgctacaacgtgtcccagctggaggagtggctgcgggacaagaacctgatgaacagcggggccaaggagaccctggagcccctcatccaggccgcccagctgctgcaggtgaagaagaagacagatgatgatgctgaggccatctgcagcatgtgcaatgccctgaccacagcccagatcgtgaaggtgctgaacctgtacacccctgtgaatgaatttgaggagcgggtgtctgtgtccttcatccgcaccatccagatgaggctgcgggacaggaaggacagcccccagctgctgatggatgccaagcacatcttccctgtgaccttccccttcaaccccagcagcctggccctggagaccatccagatcccagccagcctgggcctgggcttcatcagccgggtgtag

SEQ ID NO: 160832 - DNA, 4089 bp, synthetic construct
  misc_feature 1..4089: note = Description of Artificial Sequence: Synthetic coding sequence
  source 1..4089: mol_type = other DNA
atgcacgtgttcaagctggagcaggaggagtacatgaaggagcagatcccctggaccctgattgacttctatgacaaccagccctgcatcaacctgattgagagcaagctgggcatcctggacctgctggatgaggagtgcaagatgcccaagggcacagatgacacctgggcccagaagctgtacaacacccacctgaacaagtgtgccctgtttgagaagccccggctgagcaacaaggccttcatcatccagcactttgctgacaaggtggagtaccagtgtgagggcttcctggagaagaacaaggacacagtgtttgaggagcagatcaaggtgctgaagagcagcaagttcaagatgctgcctgagctgttccaggatgatgagaaggccatcagccccaccagcgccaccagcagcggccgcacccccctgaccaggaccccagccaagcccaccaagggccggcccggccagatggccaaggagcacaagaagacagtgggccaccagttcaggaacagcctgcacctgctgatggagaccctgaatgccaccaccccccactacgtgcgctgcatcaagcccaatgacttcaagttccccttcacctttgatgagaagagagctgtgcagcagctgcgggcctgtggggtgctggagaccatccgcatctctgctgctggcttccccagccgctggacctaccaggagttcttcagccgctacagagtgctgatgaagcagaaggatgtgctgagtgacaggaagcagacctgcaagaatgtgctggagaagctgatcctggacaaggacaagtaccagtttgggaagaccaagatcttcttccgggccggccaggtggcctacctggagaagctgcgggctgacaagctgcgggccgcctgcatccgcatccagaagaccatccggggctggctgctgaggaagaagtacctgaggatgaggaaggccgccatcaccatgcagagatatgtgcggggctaccaggcccgctgctacgccaagttcctgcggaggaccaaggccgccaccatcatccagaagtactggaggatgtatgtggtgagaagacgctacaagatcagaagagctgccaccatcgtgctgcagagctacctgcggggcttcctggccaggaaccgctacaggaagatcctgcgggagcacaaggccgtcatcatccagaagagggtgcggggctggctggcccggacccactacaagaggtccatgcacgccatcatctacctgcagtgctgcttccggaggatgatggccaagcgggagctgaagaagctgaagattgaggcccggtctgtggagcgctacaagaagctgcacatcggcatggagaacaagatcatgcagctgcagaggaaggtggatgagcagaacaaggactacaagtgcctggtggagaagctgaccaacctggagggcatctacaacagcgagacagagaagctgcggagtgacctggagcggctgcagctgtctgaggaggaggccaaggtggccaccggccgggtgctgagcctgcaggaggagatcgccaagctgaggaaggacctggagcagaccaggtctgagaagaagtgcatcgaggagcacgccgaccgctacaagcaggagacagagcagctggtgagcaacctgaaggaggagaacaccctgctgaagcaggagaaggaggccctgaaccacagaattgtgcagcaggccaaggagatgacagagaccatggagaagaagctggtggaggagaccaagcagctggagctggacctgaatgatgagcggctgcgctaccagaacctgctgaatgagttcagccggctggaggagagatatgatgacctgaaggaggagatgaccctgatggtgcacgtgcccaagccaggccacaagaggacagacagcacccacagcagcaatgaaagtgagtacatcttcagcagcgagattgctgagatggaggacatccccagcaggacagaggagcccagcgagaagaaggtgcccctggacatgagcctcttcctgaagctgcagaagagggtgacagagctggagcaggagaagcaggtgatgcaggatgagctggacaggaaggaggagcaggtgctgcggagcaaggccaaggaggaggagcggccccagatcagaggagctgagctggagtatgagagcctgaagaggcaggagctggagagcgagaacaagaagctgaagaatgagctgaatgagctgaggaaggccctgtctgagaagagcgcccctgaggtgacagcccctggggccccagcctacagagtgctgatggagcagctgacctctgtgtctgaggagctggatgtgaggaaggaggaggtgctgatcctgcggagccagctggtgtcccagaaggaggccatccagcccaaggatgacaagaacaccatgacagacagcaccatcctgctggaggatgtgcagaagatgaaggacaagggggagatcgcccaggcctacatcggcctgaaggagaccaaccggctgctggagagccagctgcagagccagaagaggagccatgaaaatgaagctgaggccctgcggggggagatccagagcctgaaggaggagaacaaccggcagcagcagctgctggcccagaacctgcagctgcccccagaggcccgcatcgaggccagcctgcagcacgagatcacccggctgaccaatgaaaacctggacctgatggagcagctggagaagcaggacaagacagtgaggaagctgaagaagcagctgaaggtgtttgccaagaagattggagagctggaggtgggccagatggagaacatcagccctggccagatcattgatgagcccatccggcctgtgaacatccccaggaaggagaaggacttccagggcatgctggagtacaagaaggaggatgagcagaagctggtgaagaacctgatcctggagctgaagccccggggcgtggccgtgaacctgatccctggcctgcctgcctacatcctcttcatgtgtgtgagacatgctgactacctgaatgatgaccagaaggtgcgcagcctgctgaccagcaccatcaacagcatcaagaaggtgctgaagaagagaggagatgactttgagaccgtgtccttctggctgagcaacacctgccgcttcctgcactgcctgaagcagtacagcggggaggagggcttcatgaagcacaacaccagccggcagaatgagcactgcctgaccaactttgacctggccgagtaccggcaggtgctgagtgacctggccatccagatctaccagcagctggtgcgggtgctggagaacatcctgcagcccatgattgtgtctggcatgctggagcacgagaccatccagggcgtgtctggagtgaagcccaccggcctgaggaagaggaccagcagcattgctgatgagggcacctacaccctggacagcatcctgcggcagctgaacagcttccacagcgtgatgtgccagcacggcatggaccctgagctgatcaagcaggtggtgaagcagatgttctacatcattggagccatcaccctgaacaacctgctgctgaggaaggacatgtgctcctggagcaagggcatgcagatccgctacaacgtgtcccagctggaggagtggctgcgggacaagaacctgatgaacagcggggccaaggagaccctggagcccctcatccaggccgcccagctgctgcaggtgaagaagaagacagatgatgatgctgaggccatctgcagcatgtgcaatgccctgaccacagcccagatcgtgaaggtgctgaacctgtacacccctgtgaatgaatttgaggagcgggtgtctgtgtccttcatccgcaccatccagatgaggctgcgggacaggaaggacagcccccagctgctgatggatgccaagcacatcttccctgtgaccttccccttcaaccccagcagcctggccctggagaccatccagatcccagccagcctgggcctgggcttcatcagccgggtgtag

SEQ ID NO: 160833 - DNA, 5568 bp, synthetic construct
  misc_feature 1..5568: note = Description of Artificial Sequence: Synthetic coding sequence
  source 1..5568: mol_type = other DNA
atggccgccagcgagctgtacaccaagtttgcccgggtgtggatcccagaccctgaggaggtgtggaagtctgctgagctgctgaaggactacaagccaggggacaaggtgctgctgctgcacctggaggagggcaaggacctggagtaccacctggaccccaagaccaaggagctgccccacctgagaaatccagacatcctggtgggagaaaatgacctgacagccctgagctacctgcacgagcctgctgtgctgcacaacctgcgggtgcgcttcatcgacagcaagctgatctacacctactgcggcatcgtgctggtggccatcaacccctatgagcagctgcccatctatggagaggacatcatcaatgcctacagcggccagaacatgggagacatggacccccacatctttgctgtggccgaggaggcctacaagcagatggccagagatgaaagaaaccagagcatcatcgtgtctggagagagcggggccggcaagacagtgtctgccaagtatgccatgagatactttgccaccgtgtctggcagcgccagcgaggccaacgtggaggagaaggtgctggccagcaaccccatcatggagagcattggaaatgccaagaccaccagaaatgacaacagcagcagatttgggaagtacatcgagatcggctttgacaagcgctaccgcatcattggagccaacatgaggacctacctgctggagaagagccgggtggtgttccaggccgaggaggagaggaactaccacatcttctaccagctgtgtgccagcgccaagctgcctgagttcaagatgctgcggctgggcaatgctgacaacttcaactacaccaagcagggcggcagccctgtgattgagggcgtggatgatgccaaggagatggcccacacccggcaggcctgcaccctgctgggcatcagcgagagccaccagatgggcatcttccgcatcctggccggcatcctgcacctgggcaatgtgggcttcaccagcagagatgctgacagctgcaccatcccccccaagcatgagcccctgtgcatcttctgtgagctgatgggcgtggactatgaggagatgtgccactggctgtgccacaggaagctggccacagccacagagacctacatcaagcccatcagcaagctgcaggccaccaatgccagagatgccctggccaagcacatctatgccaagctgttcaactggatcgtggacaacgtgaaccaggccctgcacagcgctgtgaagcagcacagcttcatcggcgtgctggacatctacggctttgagacctttgagatcaacagctttgagcagttctgcatcaactatgccaatgagaagctgcagcagcagttcaacatgcacgtgttcaagctggagcaggaggagtacatgaaggagcagatcccctggaccctgattgacttctatgacaaccagccctgcatcaacctgattgagagcaagctgggcatcctggacctgctggatgaggagtgcaagatgcccaagggcacagatgacacctgggcccagaagctgtacaacacccacctgaacaagtgtgccctgtttgagaagccccggctgagcaacaaggccttcatcatccagcactttgctgacaaggtggagtaccagtgtgagggcttcctggagaagaacaaggacacagtgtttgaggagcagatcaaggtgctgaagagcagcaagttcaagatgctgcctgagctgttccaggatgatgagaaggccatcagccccaccagcgccaccagcagcggccgcacccccctgaccaggaccccagccaagcccaccaagggccggcccggccagatggccaaggagcacaagaagacagtgggccaccagttcaggaacagcctgcacctgctgatggagaccctgaatgccaccaccccccactacgtgcgctgcatcaagcccaatgacttcaagttccccttcacctttgatgagaagagagctgtgcagcagctgcgggcctgtggggtgctggagaccatccgcatctctgctgctggcttccccagccgctggacctaccaggagttcttcagccgctacagagtgctgatgaagcagaaggatgtgctgagtgacaggaagcagacctgcaagaatgtgctggagaagctgatcctggacaaggacaagtaccagtttgggaagaccaagatcttcttccgggccggccaggtggcctacctggagaagctgcgggctgacaagctgcgggccgcctgcatccgcatccagaagaccatccggggctggctgctgaggaagaagtacctgaggatgaggaaggccgccatcaccatgcagagatatgtgcggggctaccaggcccgctgctacgccaagttcctgcggaggaccaaggccgccaccatcatccagaagtactggaggatgtatgtggtgagaagacgctacaagatcagaagagctgccaccatcgtgctgcagagctacctgcggggcttcctggccaggaaccgctacaggaagatcctgcgggagcacaaggccgtcatcatccagaagagggtgcggggctggctggcccggacccactacaagaggtccatgcacgccatcatctacctgcagtgctgcttccggaggatgatggccaagcgggagctgaagaagctgaagattgaggcccggtctgtggagcgctacaagaagctgcacatcggcatggagaacaagatcatgcagctgcagaggaaggtggatgagcagaacaaggactacaagtgcctggtggagaagctgaccaacctggagggcatctacaacagcgagacagagaagctgcggagtgacctggagcggctgcagctgtctgaggaggaggccaaggtggccaccggccgggtgctgagcctgcaggaggagatcgccaagctgaggaaggacctggagcagaccaggtctgagaagaagtgcatcgaggagcacgccgaccgctacaagcaggagacagagcagctggtgagcaacctgaaggaggagaacaccctgctgaagcaggagaaggaggccctgaaccacagaattgtgcagcaggccaaggagatgacagagaccatggagaagaagctggtggaggagaccaagcagctggagctggacctgaatgatgagcggctgcgctaccagaacctgctgaatgagttcagccggctggaggagagatatgatgacctgaaggaggagatgaccctgatggtgcacgtgcccaagccaggccacaagaggacagacagcacccacagcagcaatgaaagtgagtacatcttcagcagcgagattgctgagatggaggacatccccagcaggacagaggagcccagcgagaagaaggtgcccctggacatgagcctcttcctgaagctgcagaagagggtgacagagctggagcaggagaagcaggtgatgcaggatgagctggacaggaaggaggagcaggtgctgcggagcaaggccaaggaggaggagcggccccagatcagaggagctgagctggagtatgagagcctgaagaggcaggagctggagagcgagaacaagaagctgaagaatgagctgaatgagctgaggaaggccctgtctgagaagagcgcccctgaggtgacagcccctggggccccagcctacagagtgctgatggagcagctgacctctgtgtctgaggagctggatgtgaggaaggaggaggtgctgatcctgcggagccagctggtgtcccagaaggaggccatccagcccaaggatgacaagaacaccatgacagacagcaccatcctgctggaggatgtgcagaagatgaaggacaagggggagatcgcccaggcctacatcggcctgaaggagaccaacagaagcagcgccctggactaccacgagctgaatgaagatggagagctgtggctggtgtatgagggcctgaagcaggccaaccggctgctggagagccagctgcagagccagaagaggagccatgaaaatgaggccgaggccctgcggggggagatccagagcctgaaggaggagaacaaccggcagcagcagctgctggcccagaacctgcagctgcccccagaggccagaattgaggccagcctgcagcacgagatcacccggctgaccaatgaaaacctggacctgatggagcagctggagaagcaggacaagacagtgaggaagctgaagaagcagctgaaggtgtttgccaagaagatcggggagctggaggtgggccagatggagaacatcagccctggccagatcattgatgagcccatccggcctgtgaacatccccaggaaggagaaggacttccagggcatgctggagtacaagaaggaggatgagcagaagctggtgaagaacctgatcctggagctgaagccccggggcgtggccgtgaacctgatccctggcctgcctgcctacatcctcttcatgtgtgtgagacatgctgactacctgaatgatgaccagaaggtgcgcagcctgctgaccagcaccatcaacagcatcaagaaggtgctgaagaagagaggagatgactttgaaacagtgtccttctggctgagcaacacctgccgcttcctgcactgcctgaagcagtacagcggggaggagggcttcatgaagcacaacaccagccggcagaatgagcactgcctgaccaactttgacctggccgagtaccggcaggtgctgagtgacctggccatccagatctaccagcagctggtgcgggtgctggagaacatcctgcagcccatgattgtgtctggcatgctggagcacgagaccatccagggcgtgtctggagtgaagcccaccggcctgaggaagaggaccagcagcattgctgatgagggcacctacaccctggacagcatcctgcggcagctgaacagcttccacagcgtgatgtgccagcacggcatggaccctgagctgatcaagcaggtggtgaagcagatgttctacatcatcggggccatcaccctgaacaacctgctgctgaggaaggacatgtgctcctggagcaagggcatgcagatccgctacaacgtgtcccagctggaggagtggctgcgggacaagaacctgatgaacagcggggccaaggagaccctggagcccctcatccaggccgcccagctgctgcaggtgaagaagaagacagatgatgatgctgaggccatctgcagcatgtgcaatgccctgaccacagcccagatcgtgaaggtgctgaacctgtacacccctgtgaatgaatttgaggagcgggtgtctgtgtccttcatccgcaccatccagatgaggctgcgggacaggaaggacagcccccagctgctgatggatgccaagcacatcttccctgtgaccttccccttcaaccccagcagcctggccctggagaccatccagatcccagccagcctgggcctgggcttcatcagccgggtgtag

SEQ ID NO: 160834 - DNA, 5559 bp, synthetic construct
  misc_feature 1..5559: note = Description of Artificial Sequence: Synthetic coding sequence
  source 1..5559: mol_type = other DNA
atggccgccagcgagctgtacaccaagtttgcccgggtgtggatcccagaccctgaggaggtgtggaagtctgctgagctgctgaaggactacaagccaggggacaaggtgctgctgctgcacctggaggagggcaaggacctggagtaccacctggaccccaagaccaaggagctgccccacctgagaaatccagacatcctggtgggagaaaatgacctgacagccctgagctacctgcacgagcctgctgtgctgcacaacctgcgggtgcgcttcatcgacagcaagctgatctacacctactgcggcatcgtgctggtggccatcaacccctatgagcagctgcccatctatggagaggacatcatcaatgcctacagcggccagaacatgggagacatggacccccacatctttgctgtggccgaggaggcctacaagcagatggccagagatgaaagaaaccagagcatcatcgtgtctggagagagcggggccggcaagacagtgtctgccaagtatgccatgagatactttgccaccgtgtctggcagcgccagcgaggccaacgtggaggagaaggtgctggccagcaaccccatcatggagagcattggaaatgccaagaccaccagaaatgacaacagcagcagatttgggaagtacatcgagatcggctttgacaagcgctaccgcatcattggagccaacatgaggacctacctgctggagaagagccgggtggtgttccaggccgaggaggagaggaactaccacatcttctaccagctgtgtgccagcgccaagctgcctgagttcaagatgctgcggctgggcaatgctgacaacttcaactacaccaagcagggcggcagccctgtgattgagggcgtggatgatgccaaggagatggcccacacccggcaggcctgcaccctgctgggcatcagcgagagccaccagatgggcatcttccgcatcctggccggcatcctgcacctgggcaatgtgggcttcaccagcagagatgctgacagctgcaccatcccccccaagcatgagcccctgtgcatcttctgtgagctgatgggcgtggactatgaggagatgtgccactggctgtgccacaggaagctggccacagccacagagacctacatcaagcccatcagcaagctgcaggccaccaatgccagagatgccctggccaagcacatctatgccaagctgttcaactggatcgtggacaacgtgaaccaggccctgcacagcgctgtgaagcagcacagcttcatcggcgtgctggacatctacggctttgagacctttgagatcaacagctttgagcagttctgcatcaactatgccaatgagaagctgcagcagcagttcaacatgcacgtgttcaagctggagcaggaggagtacatgaaggagcagatcccctggaccctgattgacttctatgacaaccagccctgcatcaacctgattgagagcaagctgggcatcctggacctgctggatgaggagtgcaagatgcccaagggcacagatgacacctgggcccagaagctgtacaacacccacctgaacaagtgtgccctgtttgagaagccccggctgagcaacaaggccttcatcatccagcactttgctgacaaggtggagtaccagtgtgagggcttcctggagaagaacaaggacacagtgtttgaggagcagatcaaggtgctgaagagcagcaagttcaagatgctgcctgagctgttccaggatgatgagaaggccatcagccccaccagcgccaccagcagcggccgcacccccctgaccaggaccccagccaagcccaccaagggccggcccggccagatggccaaggagcacaagaagacagtgggccaccagttcaggaacagcctgcacctgctgatggagaccctgaatgccaccaccccccactacgtgcgctgcatcaagcccaatgacttcaagttccccttcacctttgatgagaagagagctgtgcagcagctgcgggcctgtggggtgctggagaccatccgcatctctgctgctggcttccccagccgctggacctaccaggagttcttcagccgctacagagtgctgatgaagcagaaggatgtgctgagtgacaggaagcagacctgcaagaatgtgctggagaagctgatcctggacaaggacaagtaccagtttgggaagaccaagatcttcttccgggccggccaggtggcctacctggagaagctgcgggctgacaagctgcgggccgcctgcatccgcatccagaagaccatccggggctggctgctgaggaagaagtacctgaggatgaggaaggccgccatcaccatgcagagatatgtgcggggctaccaggcccgctgctacgccaagttcctgcggaggaccaaggccgccaccatcatccagaagtactggaggatgtatgtggtgagaagacgctacaagatcagaagagctgccaccatcgtgctgcagagctacctgcggggcttcctggccaggaaccgctacaggaagatcctgcgggagcacaaggccgtcatcatccagaagagggtgcggggctggctggcccggacccactacaagaggtccatgcacgccatcatctacctgcagtgctgcttccggaggatgatggccaagcgggagctgaagaagctgaagattgaggcccggtctgtggagcgctacaagaagctgcacatcggcatggagaacaagatcatgcagctgcagaggaaggtggatgagcagaacaaggactacaagtgcctggtggagaagctgaccaacctggagggcatctacaacagcgagacagagaagctgcggagtgacctggagcggctgcagctgtctgaggaggaggccaaggtggccaccggccgggtgctgagcctgcaggaggagatcgccaagctgaggaaggacctggagcagaccaggtctgagaagaagtgcatcgaggagcacgccgaccgctacaagcaggagacagagcagctggtgagcaacctgaaggaggagaacaccctgctgaagcaggagaaggaggccctgaaccacagaattgtgcagcaggccaaggagatgacagagaccatggagaagaagctggtggaggagaccaagcagctggagctggacctgaatgatgagcggctgcgctaccagaacctgctgaatgagttcagccggctggaggagagatatgatgacctgaaggaggagatgaccctgatggtgcacgtgcccaagccaggccacaagaggacagacagcacccacagcagcaatgaaagtgagtacatcttcagcagcgagattgctgagatggaggacatccccagcaggacagaggagcccagcgagaagaaggtgcccctggacatgagcctcttcctgaagctgcagaagagggtgacagagctggagcaggagaagcaggtgatgcaggatgagctggacaggaaggaggagcaggtgctgcggagcaaggccaaggaggaggagcggccccagatcagaggagctgagctggagtatgagagcctgaagaggcaggagctggagagcgagaacaagaagctgaagaatgagctgaatgagctgaggaaggccctgtctgagaagagcgcccctgaggtgacagcccctggggccccagcctacagagtgctgatggagcagctgacctctgtgtctgaggagctggatgtgaggaaggaggaggtgctgatcctgcggagccagctggtgtcccagaaggaggccatccagcccaagaacaccatgacagacagcaccatcctgctggaggatgtgcagaagatgaaggacaagggggagatcgcccaggcctacatcggcctgaaggagaccaacagaagcagcgccctggactaccacgagctgaatgaagatggagagctgtggctggtgtatgagggcctgaagcaggccaaccggctgctggagagccagctgcagagccagaagaggagccatgaaaatgaagctgaggccctgcggggggagatccagagcctgaaggaggagaacaaccggcagcagcagctgctggcccagaacctgcagctgcccccagaggcccgcatcgaggccagcctgcagcacgagatcacccggctgaccaatgaaaacctggacctgatggagcagctggagaagcaggacaagacagtgaggaagctgaagaagcagctgaaggtgtttgccaagaagattggagagctggaggtgggccagatggagaacatcagccctggccagatcattgatgagcccatccggcctgtgaacatccccaggaaggagaaggacttccagggcatgctggagtacaagaaggaggatgagcagaagctggtgaagaacctgatcctggagctgaagccccggggcgtggccgtgaacctgatccctggcctgcctgcctacatcctcttcatgtgtgtgagacatgctgactacctgaatgatgaccagaaggtgcgcagcctgctgaccagcaccatcaacagcatcaagaaggtgctgaagaagagaggagatgactttgagaccgtgtccttctggctgagcaacacctgccgcttcctgcactgcctgaagcagtacagcggggaggagggcttcatgaagcacaacaccagccggcagaatgagcactgcctgaccaactttgacctggccgagtaccggcaggtgctgagtgacctggccatccagatctaccagcagctggtgcgggtgctggagaacatcctgcagcccatgattgtgtctggcatgctggagcacgagaccatccagggcgtgtctggagtgaagcccaccggcctgaggaagaggaccagcagcattgctgatgagggcacctacaccctggacagcatcctgcggcagctgaacagcttccacagcgtgatgtgccagcacggcatggaccctgagctgatcaagcaggtggtgaagcagatgttctacatcattggagccatcaccctgaacaacctgctgctgaggaaggacatgtgctcctggagcaagggcatgcagatccgctacaacgtgtcccagctggaggagtggctgcgggacaagaacctgatgaacagcggggccaaggagaccctggagcccctcatccaggccgcccagctgctgcaggtgaagaagaagacagatgatgatgctgaggccatctgcagcatgtgcaatgccctgaccacagcccagatcgtgaaggtgctgaacctgtacacccctgtgaatgaatttgaggagcgggtgtctgtgtccttcatccgcaccatccagatgaggctgcgggacaggaaggacagcccccagctgctgatggatgccaagcacatcttccctgtgaccttccccttcaaccccagcagcctggccctggagaccatccagatcccagccagcctgggcctgggcttcatcagccgggtgtag

SEQ ID NO: 160835 - DNA, 4377 bp, synthetic construct
  misc_feature 1..4377: note = Description of Artificial Sequence: Synthetic coding sequence
  source 1..4377: mol_type = other DNA
atgtgccactggctgtgccacaggaagctggccacagccacagagacctacatcaagcccatcagcaagctgcaggccaccaatgccagagatgccctggccaagcacatctatgccaagctgttcaactggatcgtggacaacgtgaaccaggccctgcacagcgctgtgaagcagcacagcttcatcggcgtgctggacatctacggctttgagacctttgagatcaacagctttgagcagttctgcatcaactatgccaatgagaagctgcagcagcagttcaacatgcacgtgttcaagctggagcaggaggagtacatgaaggagcagatcccctggaccctgattgacttctatgacaaccagccctgcatcaacctgattgagagcaagctgggcatcctggacctgctggatgaggagtgcaagatgcccaagggcacagatgacacctgggcccagaagctgtacaacacccacctgaacaagtgtgccctgtttgagaagccccggctgagcaacaaggccttcatcatccagcactttgctgacaaggtggagtaccagtgtgagggcttcctggagaagaacaaggacacagtgtttgaggagcagatcaaggtgctgaagagcagcaagttcaagatgctgcctgagctgttccaggatgatgagaaggccatcagccccaccagcgccaccagcagcggccgcacccccctgaccaggaccccagccaagcccaccaagggccggcccggccagatggccaaggagcacaagaagacagtgggccaccagttcaggaacagcctgcacctgctgatggagaccctgaatgccaccaccccccactacgtgcgctgcatcaagcccaatgacttcaagttccccttcacctttgatgagaagagagctgtgcagcagctgcgggcctgtggggtgctggagaccatccgcatctctgctgctggcttccccagccgctggacctaccaggagttcttcagccgctacagagtgctgatgaagcagaaggatgtgctgagtgacaggaagcagacctgcaagaatgtgctggagaagctgatcctggacaaggacaagtaccagtttgggaagaccaagatcttcttccgggccggccaggtggcctacctggagaagctgcgggctgacaagctgcgggccgcctgcatccgcatccagaagaccatccggggctggctgctgaggaagaagtacctgaggatgaggaaggccgccatcaccatgcagagatatgtgcggggctaccaggcccgctgctacgccaagttcctgcggaggaccaaggccgccaccatcatccagaagtactggaggatgtatgtggtgagaagacgctacaagatcagaagagctgccaccatcgtgctgcagagctacctgcggggcttcctggccaggaaccgctacaggaagatcctgcgggagcacaaggccgtcatcatccagaagagggtgcggggctggctggcccggacccactacaagaggtccatgcacgccatcatctacctgcagtgctgcttccggaggatgatggccaagcgggagctgaagaagctgaagattgaggcccggtctgtggagcgctacaagaagctgcacatcggcatggagaacaagatcatgcagctgcagaggaaggtggatgagcagaacaaggactacaagtgcctggtggagaagctgaccaacctggagggcatctacaacagcgagacagagaagctgcggagtgacctggagcggctgcagctgtctgaggaggaggccaaggtggccaccggccgggtgctgagcctgcaggaggagatcgccaagctgaggaaggacctggagcagaccaggtctgagaagaagtgcatcgaggagcacgccgaccgctacaagcaggagacagagcagctggtgagcaacctgaaggaggagaacaccctgctgaagcaggagaaggaggccctgaaccacagaattgtgcagcaggccaaggagatgacagagaccatggagaagaagctggtggaggagaccaagcagctggagctggacctgaatgatgagcggctgcgctaccagaacctgctgaatgagttcagccggctggaggagagatatgatgacctgaaggaggagatgaccctgatggtgcacgtgcccaagccaggccacaagaggacagacagcacccacagcagcaatgaaagtgagtacatcttcagcagcgagattgctgagatggaggacatccccagcaggacagaggagcccagcgagaagaaggtgcccctggacatgagcctcttcctgaagctgcagaagagggtgacagagctggagcaggagaagcaggtgatgcaggatgagctggacaggaaggaggagcaggtgctgcggagcaaggccaaggaggaggagcggccccagatcagaggagctgagctggagtatgagagcctgaagaggcaggagctggagagcgagaacaagaagctgaagaatgagctgaatgagctgaggaaggccctgtctgagaagagcgcccctgaggtgacagcccctggggccccagcctacagagtgctgatggagcagctgacctctgtgtctgaggagctggatgtgaggaaggaggaggtgctgatcctgcggagccagctggtgtcccagaaggaggccatccagcccaagctgcacgagaacaccatgacagacagcaccatcctgctggaggatgtgcagaagatgaaggacaagggggagatcgcccaggcctacatcggcctgaaggagaccaaccggctgctggagagccagctgcagagccagaagaggagccatgaaaatgaagctgaggccctgcggggggagatccagagcctgaaggaggagaacaaccggcagcagcagctgctggcccagaacctgcagctgcccccagaggcccgcatcgaggccagcctgcagcacgagatcacccggctgaccaatgaaaacctggacctgatggagcagctggagaagcaggacaagacagtgaggaagctgaagaagcagctgaaggtgtttgccaagaagattggagagctggaggtgggccagatggagaacatcagccctggccagatcattgatgagcccatccggcctgtgaacatccccaggaaggagaaggacttccagggcatgctggagtacaagaaggaggatgagcagaagctggtgaagaacctgatcctggagctgaagccccggggcgtggccgtgaacctgatccctggcctgcctgcctacatcctcttcatgtgtgtgagacatgctgactacctgaatgatgaccagaaggtgcgcagcctgctgaccagcaccatcaacagcatcaagaaggtgctgaagaagagaggagatgactttgagaccgtgtccttctggctgagcaacacctgccgcttcctgcactgcctgaagcagtacagcggggaggagggcttcatgaagcacaacaccagccggcagaatgagcactgcctgaccaactttgacctggccgagtaccggcaggtgctgagtgacctggccatccagatctaccagcagctggtgcgggtgctggagaacatcctgcagcccatgattgtgtctggcatgctggagcacgagaccatccagggcgtgtctggagtgaagcccaccggcctgaggaagaggaccagcagcattgctgatgagggcacctacaccctggacagcatcctgcggcagctgaacagcttccacagcgtgatgtgccagcacggcatggaccctgagctgatcaagcaggtggtgaagcagatgttctacatcattggagccatcaccctgaacaacctgctgctgaggaaggacatgtgctcctggagcaagggcatgcagatccgctacaacgtgtcccagctggaggagtggctgcgggacaagaacctgatgaacagcggggccaaggagaccctggagcccctcatccaggccgcccagctgctgcaggtgaagaagaagacagatgatgatgctgaggccatctgcagcatgtgcaatgccctgaccacagcccagatcgtgaaggtgctgaacctgtacacccctgtgaatgaatttgaggagcgggtgtctgtgtccttcatccgcaccatccagatgaggctgcgggacaggaaggacagcccccagctgctgatggatgccaagcacatcttccctgtgaccttccccttcaaccccagcagcctggccctggagaccatccagatcccagccagcctgggcctgggcttcatcagccgggtgtag

SEQ ID NO: 160836 - DNA, 5562 bp, synthetic construct
  misc_feature 1..5562: note = Description of Artificial Sequence: Synthetic coding sequence
  source 1..5562: mol_type = other DNA
atggccgccagcgagctgtacaccaagtttgcccgggtgtggatcccagaccctgaggaggtgtggaagtctgctgagctgctgaaggactacaagccaggggacaaggtgctgctgctgcacctggaggagggcaaggacctggagtaccacctggaccccaagaccaaggagctgccccacctgagaaatccagacatcctggtgggagaaaatgacctgacagccctgagctacctgcacgagcctgctgtgctgcacaacctgcgggtgcgcttcatcgacagcaagctgatctacacctactgcggcatcgtgctggtggccatcaacccctatgagcagctgcccatctatggagaggacatcatcaatgcctacagcggccagaacatgggagacatggacccccacatctttgctgtggccgaggaggcctacaagcagatggccagagatgaaagaaaccagagcatcatcgtgtctggagagagcggggccggcaagacagtgtctgccaagtatgccatgagatactttgccaccgtgtctggcagcgccagcgaggccaacgtggaggagaaggtgctggccagcaaccccatcatggagagcattggaaatgccaagaccaccagaaatgacaacagcagcagatttgggaagtacatcgagatcggctttgacaagcgctaccgcatcattggagccaacatgaggacctacctgctggagaagagccgggtggtgttccaggccgaggaggagaggaactaccacatcttctaccagctgtgtgccagcgccaagctgcctgagttcaagatgctgcggctgggcaatgctgacaacttcaactacaccaagcagggcggcagccctgtgattgagggcgtggatgatgccaaggagatggcccacacccggcaggcctgcaccctgctgggcatcagcgagagccaccagatgggcatcttccgcatcctggccggcatcctgcacctgggcaatgtgggcttcaccagcagagatgctgacagctgcaccatcccccccaagcatgagcccctgtgcatcttctgtgagctgatgggcgtggactatgaggagatgtgccactggctgtgccacaggaagctggccacagccacagagacctacatcaagcccatcagcaagctgcaggccaccaatgccagagatgccctggccaagcacatctatgccaagctgttcaactggatcgtggacaacgtgaaccaggccctgcacagcgctgtgaagcagcacagcttcatcggcgtgctggacatctacggctttgagacctttgagatcaacagctttgagcagttctgcatcaactatgccaatgagaagctgcagcagcagttcaacatgcacgtgttcaagctggagcaggaggagtacatgaaggagcagatcccctggaccctgattgacttctatgacaaccagccctgcatcaacctgattgagagcaagctgggcatcctggacctgctggatgaggagtgcaagatgcccaagggcacagatgacacctgggcccagaagctgtacaacacccacctgaacaagtgtgccctgtttgagaagccccggctgagcaacaaggccttcatcatccagcactttgctgacaaggtggagtaccagtgtgagggcttcctggagaagaacaaggacacagtgtttgaggagcagatcaaggtgctgaagagcagcaagttcaagatgctgcctgagctgttccaggatgatgagaaggccatcagccccaccagcgccaccagcagcggccgcacccccctgaccaggaccccagccaagcccaccaagggccggcccggccagatggccaaggagcacaagaagacagtgggccaccagttcaggaacagcctgcacctgctgatggagaccctgaatgccaccaccccccactacgtgcgctgcatcaagcccaatgacttcaagttccccttcacctttgatgagaagagagctgtgcagcagctgcgggcctgtggggtgctggagaccatccgcatctctgctgctggcttccccagccgctggacctaccaggagttcttcagccgctacagagtgctgatgaagcagaaggatgtgctgagtgacaggaagcagacctgcaagaatgtgctggagaagctgatcctggacaaggacaagtaccagtttgggaagaccaagatcttcttccgggccggccaggtggcctacctggagaagctgcgggctgacaagctgcgggccgcctgcatccgcatccagaagaccatccggggctggctgctgaggaagaagtacctgaggatgaggaaggccgccatcaccatgcagagatatgtgcggggctaccaggcccgctgctacgccaagttcctgcggaggaccaaggccgccaccatcatccagaagtactggaggatgtatgtggtgagaagacgctacaagatcagaagagctgccaccatcgtgctgcagagctacctgcggggcttcctggccaggaaccgctacaggaagatcctgcgggagcacaaggccgtcatcatccagaagagggtgcggggctggctggcccggacccactacaagaggtccatgcacgccatcatctacctgcagtgctgcttccggaggatgatggccaagcgggagctgaagaagctgaagattgaggcccggtctgtggagcgctacaagaagctgcacatcggcatggagaacaagatcatgcagctgcagaggaaggtggatgagcagaacaaggactacaagtgcctggtggagaagctgaccaacctggagggcatctacaacagcgagacagagaagctgcggagtgacctggagcggctgcagctgtctgaggaggaggccaaggtggccaccggccgggtgctgagcctgcaggaggagatcgccaagctgaggaaggacctggagcagaccaggtctgagaagaagtgcatcgaggagcacgccgaccgctacaagcaggagacagagcagctggtgagcaacctgaaggaggagaacaccctgctgaagcaggagaaggaggccctgaaccacagaattgtgcagcaggccaaggagatgacagagaccatggagaagaagctggtggaggagaccaagcagctggagctggacctgaatgatgagcggctgcgctaccagaacctgctgaatgagttcagccggctggaggagagatatgatgacctgaaggaggagatgaccctgatggtgcacgtgcccaagccaggccacaagaggacagacagcacccacagcagcaatgaaagtgagtacatcttcagcagcgagattgctgagatggaggacatccccagcaggacagaggagcccagcgagaagaaggtgcccctggacatgagcctcttcctgaagctgcagaagagggtgacagagctggagcaggagaagcaggtgatgcaggatgagctggacaggaaggaggagcaggtgctgcggagcaaggccaaggaggaggagcggccccagatcagaggagctgagctggagtatgagagcctgaagaggcaggagctggagagcgagaacaagaagctgaagaatgagctgaatgagctgaggaaggccctgtctgagaagagcgcccctgaggtgacagcccctggggccccagcctacagagtgctgatggagcagctgacctctgtgtctgaggagctggatgtgaggaaggaggaggtgctgatcctgcggagccagctggtgtcccagaaggaggccatccagcccaaggatgacaagaacaccatgacagacagcaccatcctgctggaggatgtgcagaagatgaaggacaagggggagatcgcccaggcctacatcggcctgaaggagaccaaccggctgctggagagccagctgcagagccagaagaggagccatgaaaatgaagctgaggccctgcggggggagatccagagcctgaaggaggagaacaaccggcagcagcagctgctggcccagaacctgcagctgcccccagaggcccgcatcgaggccagcctgcagcacgagatcacccggctgaccaatgaaaacctgtactttgaggagctgtatgcagatgaccccaagaagtaccagagctaccgcatcagcctgtacaagaggatgattgacctgatggagcagctggagaagcaggacaagacagtgaggaagctgaagaagcagctgaaggtgtttgccaagaagatcggggagctggaggtgggccagatggagaacatcagccctggccagatcattgatgagcccatccggcctgtgaacatccccaggaaggagaaggacttccagggcatgctggagtacaagaaggaggatgagcagaagctggtgaagaacctgatcctggagctgaagccccggggcgtggccgtgaacctgatccctggcctgcctgcctacatcctcttcatgtgtgtgagacatgctgactacctgaatgatgaccagaaggtgcgcagcctgctgaccagcaccatcaacagcatcaagaaggtgctgaagaagagaggagatgactttgaaacagtgtccttctggctgagcaacacctgccgcttcctgcactgcctgaagcagtacagcggggaggagggcttcatgaagcacaacaccagccggcagaatgagcactgcctgaccaactttgacctggccgagtaccggcaggtgctgagtgacctggccatccagatctaccagcagctggtgcgggtgctggagaacatcctgcagcccatgattgtgtctggcatgctggagcacgagaccatccagggcgtgtctggagtgaagcccaccggcctgaggaagaggaccagcagcattgctgatgagggcacctacaccctggacagcatcctgcggcagctgaacagcttccacagcgtgatgtgccagcacggcatggaccctgagctgatcaagcaggtggtgaagcagatgttctacatcatcggggccatcaccctgaacaacctgctgctgaggaaggacatgtgctcctggagcaagggcatgcagatccgctacaacgtgtcccagctggaggagtggctgcgggacaagaacctgatgaacagcggggccaaggagaccctggagcccctcatccaggccgcccagctgctgcaggtgaagaagaagacagatgatgatgctgaggccatctgcagcatgtgcaatgccctgaccacagcccagatcgtgaaggtgctgaacctgtacacccctgtgaatgaatttgaggagcgggtgtctgtgtccttcatccgcaccatccagatgaggctgcgggacaggaaggacagcccccagctgctgatggatgccaagcacatcttccctgtgaccttccccttcaaccccagcagcctggccctggagaccatccagatcccagccagcctgggcctgggcttcatcagccgggtgtag

SEQ ID NO: 160837 - DNA, 5547 bp, synthetic construct
  misc_feature 1..5547: note = Description of Artificial Sequence: Synthetic coding sequence
  source 1..5547: mol_type = other DNA
atgtctgtgggggagctgtacagccagtgcaccagggtgtggatcccagaccctgatgaggtgtggaggtctgctgagctgaccaaggactacaaggagggggacaagagcctgcagctgcggctggaggatgagaccatcctggagtaccccattgatgtgcagaggaaccagctgcccttcctgagaaatccagacatcctggtgggagaaaatgacctgacagccctgagctacctgcacgagcctgctgtgctgcacaacctgaaggtgcgcttcctggagagcaaccacatctacacctactgcggcatcgtgctggtggccatcaacccctatgagcagctgcccatctacggccaggacgtcatctacacctacagcggccagaacatgggagacatggacccccacatctttgctgtggccgaggaggcctacaagcagatggccagagatgagaagaaccagagcatcatcgtgtctggagagagcggggccggcaagacagtgtctgccaagtatgccatgagatactttgccaccgtgggcggcagcgccagcgagaccaacatcgaggagaaggtgctggccagcagccccatcatggaggccatcggaaatgccaagaccaccagaaatgacaacagcagcagatttgggaagtacatccagatcggctttgacaagcgctaccacatcattggagccaacatgaggacctacctgctggagaagagccgggtggtgttccaggctgatgatgaaagaaactaccacatcttctaccagctgtgtgccgctgctggcctgcctgagttcaaggagctggccctgaccagcgctgaggacttcttctacaccagccagggcggggacaccagcattgagggcgtggatgatgctgaagattttgagaagacccggcaggccttcaccctgctgggcgtgaaggagagccaccagatgagcatcttcaagatcatcgccagcatcctgcacctgggctctgtggccatccaggccgagagagatggagacagctgcagcatcagcccccaggatgtgtacctgagcaacttctgccgcctgctgggcgtggagcacagccagatggagcactggctgtgccacaggaagctggtgaccaccagcgagacctacgtgaagaccatgagcctgcagcaggtgatcaatgccagaaatgccctggccaagcacatctatgcccagctgtttggctggatcgtggagcacatcaacaaggccctgcacaccagcctgaagcagcacagcttcatcggcgtgctggacatctacggctttgagacctttgaggtgaacagctttgagcagttctgcatcaactatgccaatgagaagctgcagcagcagttcaacagccacgtgttcaagctggagcaggaggagtacatgaaggagcagatcccctggaccctgattgacttctatgacaaccagccctgcatcgacctgattgaggccaagctgggcatcctggacctgctggatgaggagtgcaaggtgcccaagggcacagaccagaactgggcccagaagctgtatgacagacacagcagcagccagcacttccagaagcccaggatgagcaacacagccttcatcatcgtgcactttgctgacaaggtggagtacctgagtgatggcttcctggagaagaacagagacacagtgtatgaggagcagatcaacatcctgaaggccagcaagttccccctggtggccgacctcttccatgatgacaaggaccctgtgcctgccaccacccctgggaagggcagcagcagcaagatctctgtgcgcagcgcccggccccccatgaaggtgagcaacaaggagcacaagaagacagtgggccaccagttccgcaccagcctgcacctgctgatggagaccctgaatgccaccaccccccactacgtgcgctgcatcaagcccaatgatgagaagctgcccttccactttgaccccaagagagctgtgcagcagctgcgggcctgtggggtgctggagaccatccgcatctctgctgctggctaccccagccgctgggcctaccatgacttcttcaaccgctacagagtgctggtgaagaagcgggagctggccaacacagacaagaaggccatctgccgctctgtgctggagaacctgatcaaggaccctgacaagttccagtttggaagaaccaagatcttcttccgggccggccaggtggcctacctggagaagctgcgggctgacaagttcagaacagccaccatcatgatccagaagacagtgcggggctggctgcagaaggtgaagtaccaccggctgaagggggccaccctgaccctgcagcgctactgccggggccacctggcccggcggctggccgagcacctgcggcgcatccgggctgctgtggtgctgcagaagcactacaggatgcagagggcccggcaggcctaccagagggtgcggcgggctgctgtggtgatccaggccttcacccgggccatgtttgtgcggaggacctaccggcaggtgctgatggagcacaaggccaccaccatccagaagcacgtgcggggctggatggcccggcggcacttccagaggctgagagatgctgccatcgtcatccagtgtgccttcaggatgctgaaggcccggcgggagctgaaggccctgcgcatcgaggcccggtctgctgagcacctgaagaggctgaatgtgggcatggagaacaaggtggtgcagctgcagaggaagattgatgagcagaacaaggagttcaagaccctgtctgagcagctgtctgtgaccaccagcacctacaccatggaggtggagcggctgaagaaggagctggtgcactaccagcagagccctggagaggacaccagcctgcggctgcaggaggaggtggagagcctgaggacagagctgcagagggcccacagcgagaggaagatcctggaggatgcccacagccgggagaaggatgagctgaggaagagggtggccgacctggagcaggagaatgccctgctgaaggatgagaaggagcagctgaacaaccagatcctgtgccagagcaaggatgaatttgcccagaacagcgtgaaggagaacctgatgaagaaggagctggaggaggagaggagccgctaccagaacctggtgaaggagtacagccagctggagcagagatatgacaacctgagagatgagatgaccatcatcaagcagaccccaggccacagaagaaaccccagcaaccagagcagcctggagagtgacagcaactaccccagcatcagcaccagcgagattggagacacagaagatgccctgcagcaggtggaggagatcggcctggagaaggccgccatggacatgaccgtcttcctgaagctgcagaagagggtgcgggagctggagcaggagaggaagaagctgcaggtgcagctggagaagcgggagcagcaggacagcaagaaggtgcaggccgagcccccccagacagacatcgacctggaccccaatgctgacctggcctacaacagcctgaagaggcaggagctggagagcgagaacaagaagctgaagaatgacctgaatgagctgaggaaggctgtggccgaccaggccacccagaacaacagcagccacggcagcccagacagctacagcctgctgctgaaccagctgaagctggcccacgaggagctggaggtgaggaaggaggaggtgctgatcctgcggacccagatcgtgtctgctgaccagaggcggctggccggcagaaatgctgagcccaacatcaatgcccggagctcctggcccaacagcgagaagcacgtggaccaggaggatgccatcgaggcctaccacggcgtgtgccagaccaacagcaagacagaggactggggctacctgaatgaagatggagagctgggcctggcctaccagggcctgaagcaggtggcccggctgctggaggcccagctgcaggcccagagcctggagcacgaggaggaggtggagcacctgaaggcccagctggaggccctgaaggaggagatggacaagcagcagcagaccttctgccagaccctgctgctgagccctgaggcccaggtggagtttggagtgcagcaggagatcagccggctgaccaatgaaaacctggacctgaaggagctggtggagaagctggagaagaatgaaaggaagctgaagaagcagctgaagatctacatgaagaaggcccaggacctggaggccgcccaggccctggcccagagcgagaggaagagacatgagctgaaccggcaggtgacagtgcagaggaaggagaaggacttccagggcatgctggagtaccacaaggaggatgaggccctgctgatccggaacctggtgacagacctgaagccccagatgctgagcggcaccgtgccctgcctgcctgcctacatcctgtacatgtgcatcagacatgctgactacaccaatgatgacctgaaggtgcacagcctgctgaccagcaccatcaatggcatcaagaaggtgctgaagaagcacaatgatgactttgagatgaccagcttctggctgagcaacacctgccgcctgctgcactgcctgaagcagtacagcggagatgagggcttcatgacccagaacacagccaagcagaatgagcactgcctgaagaactttgacctgacagagtaccggcaggtgctgagtgacctgagcatccagatctaccagcagctgatcaagattgctgagggcgtgctgcagcccatgattgtgtctgccatgctggagaatgaaagcatccagggcctgtctggagtgaagcccaccggctacaggaagaggagcagctccatggctgatggagacaacagctactgcctggaggccatcatccggcagatgaatgccttccacacagtgatgtgtgaccagggcctggaccctgagatcatcctgcaggtgttcaagcagctgttctacatgatcaatgctgtgaccctgaacaacctgctgctgaggaaggatgtgtgctcctggagcacaggcatgcagctgcgctacaacatcagccagctggaggagtggctgcggggcaggaacctgcaccagagcggggctgtgcagaccatggagcccctcatccaggccgcccagctgctgcagctgaagaagaagacccaggaggatgctgaggccatctgcagcctgtgcaccagcctgagcacccagcagatcgtgaagatcctgaacctgtacacccccctgaatgaatttgaggagcgggtgacagtggccttcatccgcaccatccaggcccagctgcaggagagaaatgacccccagcagctgctgctggatgccaagcacatgtttcctgtgctcttccccttcaaccccagcagcctgaccatggacagcatccacatcccagcctgcctgaacctggagttcctgaatgaggtgtag

SEQ ID NO: 160838 - DNA, 2892 bp, synthetic construct
  misc_feature 1..2892: note = Description of Artificial Sequence: Synthetic coding sequence
  source 1..2892: mol_type = other DNA
atggagcacaaggccaccaccatccagaagcacgtgcggggctggatggcccggcggcacttccagaggctgagagatgctgccatcgtcatccagtgtgccttcaggatgctgaaggcccggcgggagctgaaggccctgagaattgaggcccggtctgctgagcacctgaagaggctgaatgtgggcatggagaacaaggtggtgcagctgcagaggaagattgatgagcagaacaaggagttcaagaccctgtctgagcagctgtctgtgaccaccagcacctacaccatggaggtggagcggctgaagaaggagctggtgcactaccagcagagccctggagaggacaccagcctgcggctgcaggaggaggtggagagcctgaggacagagctgcagagggcccacagcgagaggaagatcctggaggatgcccacagccgggagaaggatgagctgaggaagagggtggccgacctggagcaggagaatgccctgctgaaggatgagaaggagcagctgaacaaccagatcctgtgccagagcaaggatgaatttgcccagaacagcgtgaaggagaacctgatgaagaaggagctggaggaggagaggagccgctaccagaacctggtgaaggagtacagccagctggagcagagatatgacaacctgagagatgagatgaccatcatcaagcagaccccaggccacagaagaaaccccagcaaccagagcagcctggagagtgacagcaactaccccagcatcagcaccagcgagatcggggacacagaagatgccctgcagcaggtggaggagatcggcctggagaaggccgccatggacatgacagtgttcctgaagctgcagaagagggtgcgggagctggagcaggagaggaagaagctgcaggtgcagctggagaagcgggagcagcaggacagcaagaaggtgcaggccgagcccccccagacagacatcgacctggaccccaatgctgacctggcctacaacagcctgaagaggcaggagctggagagcgagaacaagaagctgaagaatgacctgaatgagctgaggaaggctgtggccgaccaggccacccagaacaacagcagccacggcagcccagacagctacagcctgctgctgaaccagctgaagctggcccacgaggagctggaggtgaggaaggaggaggtgctgatcctgcggacccagatcgtgtctgctgaccagaggcggctggccggcagaaatgctgagcccaacatcaatgcccggagctcctggcccaacagcgagaagcacgtggaccaggaggatgccatcgaggcctaccatggagtgtgccagaccaaccggctgctggaggcccagctgcaggcccagagcctggagcacgaggaggaggtggagcacctgaaggcccagctggaggccctgaaggaggagatggacaagcagcagcagaccttctgccagaccctgctgctgagccctgaggcccaggtggagtttggagtgcagcaggagatcagccggctgaccaatgaaaacctggacctgaaggagctggtggagaagctggagaagaatgaaaggaagctgaagaagcagctgaagatctacatgaagaaggcccaggacctggaggccgcccaggccctggcccagagcgagaggaagagacatgagctgaaccggcaggtgacagtgcagaggaaggagaaggacttccagggcatgctggagtaccacaaggaggatgaggccctgctgatccggaacctggtgacagacctgaagccccagatgctgtctggaacagtgccctgcctgcctgcctacatcctgtacatgtgcatcagacatgctgactacaccaatgatgacctgaaggtgcacagcctgctgaccagcaccatcaatggcatcaagaaggtgctgaagaagcacaatgatgactttgagatgaccagcttctggctgagcaacacctgccgcctgctgcactgcctgaagcagtacagcggagatgagggcttcatgacccagaacacagccaagcagaatgagcactgcctgaagaactttgacctgacagagtaccggcaggtgctgagtgacctgagcatccagatctaccagcagctgatcaagattgctgagggcgtgctgcagcccatgattgtgtctgccatgctggagaatgaaagcatccagggcctgagcggcgtgaagcccaccggctacaggaagaggagcagctccatggctgatggagacaacagctactgcctggaggccatcatccggcagatgaatgccttccacacagtgatgtgtgaccagggcctggaccctgagatcatcctgcaggtgttcaagcagctgttctacatgatcaatgctgtgaccctgaacaacctgctgctgaggaaggatgtgtgctcctggagcacaggcatgcagctgcgctacaacatcagccagctggaggagtggctgcggggcaggaacctgcaccagagcggggctgtgcagaccatggagcccctcatccaggccgcccagctgctgcagctgaagaagaagacccaggaggatgctgaggccatctgcagcctgtgcaccagcctgagcacccagcagatcgtgaagatcctgaacctgtacacccccctgaatgaatttgaggagcgggtgacagtggccttcatccgcaccatccaggcccagctgcaggagagaaatgacccccagcagctgctgctggatgccaagcacatgtttcctgtgctcttccccttcaaccccagcagcctgaccatggacagcatccacatcccagcctgcctgaacctggagttcctgaatgaggtgtag

SEQ ID NO: 160839 - DNA, 2163 bp, synthetic construct
  misc_feature 1..2163: note = Description of Artificial Sequence: Synthetic coding sequence
  source 1..2163: mol_type = other DNA
atgcactggcctgtgacccgggagtgcaccagggtgtggatcccagaccctgatgaggtgtggaggtctgctgagctgaccaaggactacaaggagggggacaagagcctgcagctgcggctggaggatgagaccatcctggagtaccccattgatgtgcagaggaaccagctgcccttcctgaggaacccagacatcctggtgggggagaatgacctgacagccctgagctacctgcacgagcctgctgtgctgcacaacctgaaggtgcgcttcctggagagcaaccacatctacacctactgcggcatcgtgctggtggccatcaacccctatgagcagctgcccatctacggccaggatgtgatctacacctacagcggccagaacatgggagacatggacccccacatctttgctgtggccgaggaggcctacaagcagatggccagagatgagaagaaccagagcatcatcgtgtctggagagagcggggccggcaagacagtgtctgccaagtatgccatgagatactttgccaccgtgggcggcagcgccagcgagaccaacatcgaggagaaggtgctggccagcagccccatcatggaggccatcggaaatgccaagaccaccagaaatgacaacagcagcagatttgggaagtacatccagattggatttgacaagcgctaccacatcatcggggccaacatgaggacctacctgctggagaagagccgggtggtgttccaggctgatgatgagaggaactaccacatcttctaccagctgtgtgccgccgccggcctgcctgagttcaaggagctggccctgaccagcgctgaggacttcttctacaccagccagggcggggacaccagcattgaaggagtggatgatgctgaggactttgagaagacccggcaggccttcaccctgctgggcgtgaaggagagccaccagatgagcatcttcaagatcatcgccagcatcctgcacctgggctctgtggccatccaggccgagagagatggagacagctgcagcatcagcccccaggatgtgtacctgagcaacttctgccgcctgctgggcgtggagcacagccagatggagcactggctgtgccacaggaagctggtgaccaccagcgagacctacgtgaagaccatgagcctgcagcaggtgatcaatgccagaaatgccctggccaagcacatctatgcccagctgtttggctggatcgtggagcacatcaacaaggccctgcacaccagcctgaagcagcacagcttcatcggcgtgctggacatctacggctttgagacctttgaggtgaacagctttgagcagttctgcatcaactatgccaatgagaagctgcagcagcagttcaacagccacgtgttcaagctggagcaggaggagtacatgaaggagcagatcccctggaccctgattgacttctatgacaaccagccctgcatcgacctgattgaggccaagctgggcatcctggacctgctggatgaggagtgcaaggtgcccaagggcacagaccagaactgggcccagaagctgtatgacagacacagcagcagccagcacttccagaagcccaggatgagcaacacagccttcatcatcgtgcactttgctgacaaggtggagtacctgagtgatggcttcctggagaagaacagagacacagtgtatgaggagcagatcaacatcctgaaggccagcaagttccccctggtggccgacctcttccatgatgacaaggaccctgtgcctgccaccaccccaggcaagggcagcagcagcaagatctctgtgcgcagcgcccggccccccatgaaggtgagcaacaaggagcacaagaagacagtgggccaccagttccgcaccagcctgagcacccagcagatcgtgaagatcctgaacctgtacacccccctgaatgaatttgaggagcgggtgacagtggccttcatccgcaccatccaggcccagctgcaggagagaaatgacccccagcagctgctgctggatgccaagcacatgtttcctgtgctcttccccttcaaccccagcagcctgaccatggacagcatccacatcccagcctgcctgaacctggagttcctgaatgaggtgtag

SEQ ID NO: 160840 - DNA, 5229 bp, synthetic construct
  misc_feature 1..5229: note = Description of Artificial Sequence: Synthetic coding sequence
  source 1..5229: mol_type = other DNA
atggctgtggccgagctgtacacccagtacaacagagtgtggatcccagaccctgaggaggtgtggaagtctgctgagatcgccaaggactacagagtgggggacaaggtgctgcggctgctgctggaggatggaacagagctggactacagcgtgaaccctgagagcctgccccccctgagaaatccagacatcctggtgggagaaaatgacctgacagccctgagctacctgcacgagcctgctgtgctgcacaacctgcgcatccgctttgctgagagcaagctgatctacacctacagcggcatcatcctggtggccatgaacccctacaagcagctgcccatctatggagatgccatcatccacgcctacagcggccagaacatgggagacatggacccccacatctttgctgtggccgaggaggcctacaagcagatggccaggaacaacagaaaccagagcatcatcgtgtctggagagagcggggccggcaagacagtgtctgcccgctatgccatgagatactttgccaccgtgtccaagagcggcagcaatgcccacgtggaggacaaggtgctggccagcaaccccatcacagaagctgtgggcaatgccaagaccaccagaaatgacaacagcagcagatttgggaagtacacagagatcagctttgatgagcagaaccagatcattggagccaacatgagcacctacctgctggagaagagccgggtggtgttccagagtgaaaatgaaagaaactaccacatcttctaccagctgtgtgccagcgcccagcagagcgagttcaagcacctgaagctgggcagcgctgaggagttcaactacaccaggatgggcggcaacacagtcatcgagggcgtgaatgacagagctgagatggtggagacccagaagaccttcaccctgctgggcttcaaggaggacttccagatggatgtgttcaagatcctggccgccatcctgcacctgggcaatgtgcagatcacagctgtgggcaatgaaagaagctctgtgtctgaagatgacagccacctgaaggtgttctgtgagctgctgggcctggagagcggccgggtggcccagtggctgtgcaacaggaagatcgtgaccagcagcgagaccgtggtgaagcccatgacccggccccaggccgtgaatgccagagatgccctggccaagaagatctatgcccacctgtttgacttcatcgtggagcgcatcaaccaggccctgcagttcagcggcaagcagcacaccttcatcggcgtgctggacatctacggctttgagacctttgatgtgaacagctttgagcagttctgcatcaactatgccaatgagaagctgcagcagcagttcaacatgcacgtgttcaagctggagcaggaggagtacatgaaggaggacatcccctggaccctgattgacttctatgacaaccagcccgtcatcgacctgattgaggccaagatgggcatcctggagctgctggatgaggagtgcctgctgccccatggaacagatgagaactggctgcagaagctgtacaacaactttgtgaacagaaaccccctgtttgagaagcccaggatgagcaacaccagctttgtgatccagcactttgctgacaaggtggagtacaagtgtgagggcttcctggagaagaacagagacacagtgtatgacatgctggtggagatcctgcgggccagcaagttccacctgtgtgccaacttcttccaggagaaccccaccccacccagccccttcggctccatgatcaccgtgaagagcgccaagcaggtgatcaagcccaacagcaagcacttccgcaccaccgtgggcagcaagttccgcagcagcctgtacctgctgatggagaccctgaatgccaccaccccccactacgtgcgctgcatcaagcccaatgatgagaagctgccctttgaatttgacagcaagagaattgtgcagcagctgcgggcctgtggggtgctggagaccatccgcatcagcgcccagagctaccccagccgctggacctacatcgagttctacagccgctatggcatcctgatgaccaagcaggagctgtccttcagtgacaagaaggaggtgtgcaaggtggtgctgcacaggctcatccaggacagcaaccagtaccagtttgggaagaccaagatcttcttccgggccggccaggtggcctacctggagaagctgcggctggacaagctgcggcagagctgtgtgatggtgcagaagcacatgaggggctggctgcagaggaagaagttcctgcgggagcggcgggccgccctgatcatccagcagtacttccggggccagcagacagtgaggaaggccatcacagctgtggccctgaaggaggcctgggccgccatcatcatccagaagcactgccggggctacctggtgcgcagcctgtaccagctgatccgcatggccaccatcaccatgcaggcctacagccggggcttcctggcccggcggcgctacaggaagatgctggaggagcacaaggctgtgatcctgcagaagtatgcccgggcctggctggcccggcggcgcttccagagcatcagaagatttgtgctgaacatccagctgacctacagagtgcagaggctgcagaagaagctggaggaccagaacaaggagaaccacggcctggtggagaagctgaccagcctggccgccctgcgggctggagatgtggagaagatccagaagctggaggccgagctggagaaggccgccacccacagaagaaattatgaggagaagggcaagcgctacagagatgctgtggaggagaagctggccaagctgcagaagcacaacagcgagctggagacccagaaggagcagatccagctgaagctgcaggagaagacagaggagctgaaggagaagatggacaacctgaccaagcagctgtttgatgatgtgcagaaggaggagcggcagaggatgctgctggagaagagctttgagctgaagacccaggactatgagaagcagatccagagcctgaaggaggagatcaaggccctgaaggatgagaagatgcagctgcagcacctggtggagggggagcacgtgaccagtgatggcctgaaggccgaggtggcccggctgagcaagcaggtgaagaccatcagcgagtttgagaaggagattgagctgctgcaggcccagaagattgatgtggagaagcacgtgcagagccagaagcgggagatgagggagaagatgtctgagatcaccaagcagctgctggagagctatgacattgaagatgtgcgcagccggctgtctgtggaggacctggagcacctgaatgaagatggagagctgtggtttgcctatgagggcctgaagaaggccaccagggtgctggagagccacttccagagccagaaggactgctatgagaaggagattgaggccctgaacttcaaggtggtgcacctgagccaggagatcaaccacctgcagaagctgttccgggaggagaatgacatcaatgaaagcatcagacatgaggtgacccggctgaccagcgagaacatgatgatcccagacttcaagcagcagatcagcgagctggagaagcagaagcaggacctggagatccggctgaatgagcaggccgagaagatgaagggcaagctggaggagctgagcaaccagctgcacaggagccaggaggaggagggcacccagaggaaggccctggaggcccagaatgagatccacaccaaggagaaggagaagctgattgacaagatccaggagatgcaggaggccagtgaccacctgaagaagcagtttgaaacagagagcgaggtgaagtgcaacttccggcaggaggccagccggctgaccctggagaacagagacctggaggaggagctggacatgaaggacagagtcatcaagaagctgcaggaccaggtgaagaccctgagcaagaccatcggcaaggccaatgatgtgcacagcagcagcggccccaaggagtacctgggcatgctgcagtacaagagagaagatgaggccaagctgatccagaacctgatcctggacctgaagccccggggcgtggtggtgaacatgatccctggcctgcctgcccacatcctcttcatgtgtgtgcgctatgctgacagcctgaatgatgccaacatgctgaagagcctgatgaacagcaccatcaatggcatcaagcaggtggtgaaggagcacctggaggactttgagatgctgtccttctggctgagcaacacctgccacttcctgaactgcctgaagcagtacagcggggaggaggagttcatgaagcacaacagcccccagcagaacaagaactgcctgaacaactttgacctgtctgagtaccggcagatcctgagtgatgtggccatccgcatctaccaccagttcatcatcatcatggagaagaacatccagcccatcatcgtgcccggcatgctggagtatgagagcctgcagggcatcagcggcctgaagcccaccggcttcaggaagaggagcagcagcattgatgacacagatggctacaccatgacctctgtgctgcagcagctgagctacttctacaccaccatgtgccagaatggcctggaccctgagctggtgcggcaggccgtgaagcagctgttcttcctgattggagctgtgaccctgaacagcctcttcctgaggaaggacatgtgcagctgcaggaagggcatgcagatccgctgcaacatctcctacctggaggagtggctgaaggacaagaacctgcagaacagcctggccaaggagaccctggagcccctgagccaggccgcctggctgctgcaggtgaagaagaccacagacagtgatgccaaggagatctatgagcgctgcaccagcctgtctgctgtgcagatcatcaagatcctgaacagctacacccccattgatgactttgagaagagggtgacccccagctttgtgaggaaggtgcaggccctgctgaacagccgggaggacagcagccagctgatgctggacaccaagtacctgttccaggtgaccttccccttcacccccagcccccacgccctggagatgatccagatccccagcagcttcaagctgggcttcctgaaccggctgtag

SEQ ID NO: 160841 - DNA, 1122 bp, synthetic construct
  misc_feature 1..1122: note = Description of Artificial Sequence: Synthetic coding sequence
  source 1..1122: mol_type = other DNA
atgcccagcagcacccccacagctggccgcacctgggccatctggacccacacctacctgccctggcagaagaggcacaccagccgctggccagatggcaagtctgaggcccaggacctggacctgctgaccctgtacctgaacctgtactgcatcaccccagctgctgcccctgagctgccccccctgtatgtgtttgtgtgtgagctggacagccagagggcccccatccctggcagtgatgcctacaatgaaggagctggaggagcctacatgaggaacaacagaaaccagagcatcatcgtgtctggagagagcggggccggcaagacagtgtctgcccgctatgccatgagatactttgccaccgtgtccaagagcggcagcaatgcccacgtggaggacaaggtgctggccagcaaccccatcacagaggccgtgggcaatgccaagaccaccagaaatgacaacagcagcagatttgggaagtacacagagatcagctttgatgagcagaaccagatcatcggggccaacatgagcacctacctgctggagaagagccgggtggtgttccagagtgaaaatgaaagaaactaccacatcttctaccagctgtgtgccagcgcccagcagagcgagttcaagcacctgaagctgggcagcgctgaggagttcaactacaccaggatgggcggcaacacagtgattgaaggagtgaatgacagagctgagatggtggagacccagaagaccttcaccctgctgggcttcaaggaggacttccagatggatgtgttcaagatcctggccgccatcctgcacctgggcaatgtgcagatcacagctgtgggcaatgaaagaagctctgtgtctgaagatgacagccacctgaaggtgttctgtgagctgctgggcctggagagcggccgggtggcccagtggctgtgcaacaggaagatcgtgaccagcagcgagaccgtggtgaagcccatgacccggccccaggccgtgaatgccagagatgccctggccaagaagatctatgcccacctgtttgacttcatcgtggagcgcatcaaccaggccctgcagttctctgtgctgaagcccctgatgtag

SEQ ID NO: 160842 - DNA, 321 bp, synthetic construct
  misc_feature 1..321: note = Description of Artificial Sequence: Synthetic coding sequence
  source 1..321: mol_type = other DNA
atgaacccctacaagcagctgcccatctatggagatgccatcatccacgcctacagcggccagaacatgggagacatggacccccacatctttgctgtggccgaggaggcctacaagcagatggccaggaacaacagaaaccagagcatcatcgtgtctggagagagcggggccggcaagacagtgtctgcccgctatgccatgagatactttgccaccgtgtccaagagcggcagcaatgcccacgtggaggacaaggtgctggccagcaaccccatcacagaggccgtgggcaatgccaagaccaccagaaatgactag

SEQ ID NO: 160843 - DNA, 1293 bp, synthetic construct
  misc_feature 1..1293: note = Description of Artificial Sequence: Synthetic coding sequence
  source 1..1293: mol_type = other DNA
atggctgtggccgagctgtacacccagtacaacagagtgtggatcccagaccctgaggaggtgtggaagtctgctgagatcgccaaggactacagagtgggggacaaggtgctgcggctgctgctggaggatggaacagagctggactacagcgtgaaccctgagagcctgccccccctgagaaatccagacatcctggtgggagaaaatgacctgacagccctgagctacctgcacgagcctgctgtgctgcacaacctgcgcatccgctttgctgagagcaagctgatctacacctacagcggcatcatcctggtggccatgaacccctacaagcagctgcccatctatggagatgccatcatccacgcctacagcggccagaacatgggagacatggacccccacatctttgctgtggccgaggaggcctacaagcagatggccaggaacaacagaaaccagagcatcatcgtgtctggagagagcggggccggcaagacagtgtctgcccgctatgccatgagatactttgccaccgtgtccaagagcggcagcaatgcccacgtggaggacaaggtgctggccagcaaccccatcacagaagctgtgggcaatgccaagaccaccagaaatgacaacagcagcagatttgggaagtacacagagatcagctttgatgagcagaaccagatcattggagccaacatgagcacctacctgctggagaagagccgggtggtgttccagagtgaaaatgaaagaaactaccacatcttctaccagctgtgtgccagcgcccagcagagcgagttcaagcacctgaagctgggcagcgctgaggagttcaactacaccaggatgggcggcaacacagtcatcgagggcgtgaatgacagagctgagatggtggagacccagaagaccttcaccctgctgggcttcaaggaggacttccagatggatgtgttcaagatcctggccgccatcctgcacctgggcaatgtgcagatcacagctgtgggcaatgaaagaagctctgtgtctgaagatgacagccacctgaaggtgttctgtgagctgctgggcctggagagcggccgggtggcccagtggctgtgcaacaggaagatcgtgaccagcagcgagaccgtggtgaagcccatgacccggccccaggccgtgaatgccagagatgccctggccaagaagatctatgcccacctgtttgacttcatcgtggagcgcatcaaccaggccctgcagttctctgtgctgaagcccctgatgtag

SEQ ID NO: 160844 - DNA, 810 bp, synthetic construct
  misc_feature 1..810: note = Description of Artificial Sequence: Synthetic coding sequence
  source 1..810: mol_type = other DNA
atggctgtggccgagctgtacacccagtacaacagagtgtggatcccagaccctgaggaggtgtggaagtctgctgagatcgccaaggactacagagtgggggacaaggtgctgcggctgctgctggaggatggaacagagctggactacagcgtgaaccctgagagcctgccccccctgagaaatccagacatcctggtgggagaaaatgacctgacagccctgagctacctgcacgagcctgctgtgctgcacaacctgcgcatccgctttgctgagagcaagctgatctacacctacagcggcatcatcctggtggccatgaacccctacaagcagctgcccatctatggagatgccatcatccacgcctacagcggccagaacatgggagacatggacccccacatctttgctgtggccgaggaggcctacaagcagatggccaggaacaacagaaaccagagcatcatcgtgtctggagagagcggggccggcaagacagtgtctgcccgctatgccatgagatactttgccaccgtgtccaagagcggcagcaatgcccacgtggaggacaaggtgctggccagcaaccccatcacagaagctgtgggcaatgccaagaccaccagaaatgacaacagcagcagatttgggaagtacacagagatcagctttgatgagcagaaccagatcattggagccaacatgagcacctacctgctggagaagagccgggtggtgttccagggcgtgcccaagaacctgatcatccaggagtgggaggccatcctgagcctgcgggtgtag

SEQ ID NO: 160845 - DNA, 3762 bp, synthetic construct
  misc_feature 1..3762: note = Description of Artificial Sequence: Synthetic coding sequence
  source 1..3762: mol_type = other DNA
atggaggatggcaagcctgtgtgggccccccaccccacagatggcttccagatgggcaacatcgtggacatcggccctgacagcctgaccatcgagcccctgaaccagaagggcaagaccttcctggccctgatcaaccaggtgtttcctgctgaggaggacagcaagaaggatgtggaggacaactgcagcctgatgtacctgaatgaggccaccctgctgcacaacatcaaggtgcgctacagcaaggaccgcatctacacctacgtggccaacatcctgattgctgtgaacccctactttgacatccccaagatctacagcagcgaggccatcaagagctaccagggcaagagcctgggcacccggcccccccacgtgtttgccatcgctgacaaggccttccgggacatgaaggtgctgaagatgagccagagcatcatcgtgtctggagagagcggggccggcaagacagagaacaccaagtttgtgctgcgctacctgacagagagctatggcaccggccaggacattgatgaccgcatcgtggaggccaaccccctgctggaggcctttggaaatgccaagacagtgaggaacaacaacagcagcagatttgggaagtttgtggagatccacttcaatgagaagagctctgtggtgggcggctttgtgagccactacctgctggagaagagccgcatctgtgtgcagggcaaggaggagaggaactaccacatcttctaccgcctgtgtgccggggccagcgaggacatccgggagaagctgcacctgagcagcccagacaacttccgctacctgaacagaggctgcacccgctactttgccaacaaggagacagacaagcagatcctgcagaacaggaagagccctgagtacctgaaggccggctccatgaaggaccccctgctggatgaccacggggacttcatccgcatgtgcacagccatgaagaagattggcctggatgatgaggagaagctggacctcttccgggtggtggccggcgtgctgcacctgggcaacatcgactttgaggaggccggcagcaccagcggcggctgcaacctgaagaacaagagcgcccagagcctggagtactgtgccgagctgctgggcctggaccaggatgacctgcgggtgtccctgaccaccagggtgatgctgaccacagctgggggcaccaagggcaccgtcatcaaggtgcccctgaaggtggagcaggccaacaatgccagagatgccctggccaagacagtgtacagccacctgtttgaccacgtggtgaacagagtgaaccagtgcttcccctttgagaccagcagctacttcatcggcgtgctggacattgctggctttgagtactttgagcacaacagctttgagcagttctgcatcaactactgcaatgagaagctgcagcagttcttcaatgaaagaatcctgaaggaggagcaggagctgtaccagaaggagggcctgggcgtgaatgaggtgcactacgtggacaaccaggactgcatcgacctgattgaggccaagctggtgggcatcctggacatcctggatgaggagaaccggctgccccagcccagcgaccagcacttcaccagcgctgtgcaccagaagcacaaggaccacttccggctgaccatccccaggaagagcaagctggccgtgcacaggaacatcagagatgatgagggcttcatcatccgccactttgctggagctgtgtgctatgagaccacccagtttgtggagaagaacaatgatgccctgcacatgagcctggagagcctcatctgtgagagccgggacaagttcatccgggagctgtttgagagcagcaccaacaacaacaaggacaccaagcagaaggccggcaagctgtccttcatctctgtgggcaacaagttcaagacccagctgaacctgctgctggacaagctgcggagcactggagccagcttcatccgctgcatcaagcccaacctgaagatgaccagccaccactttgagggcgcccagatcctgagccagctgcagtgcagcggcatggtgtctgtgctggacctgatgcagggcggctaccccagccgggccagcttccacgagctgtacaacatgtacaagaagtacatgccagacaagctggcccggctggaccccaggctcttctgcaaggccctcttcaaggccctgggcctgaatgaaaatgactacaagtttggcctgaccaaggtgttcttccggcctgggaagtttgctgagtttgaccagatcatgaagagtgaccctgaccacctggccgagctggtgaagagggtgaaccactggctgacctgcagccgctggaagaaggtgcagtggtgcagcctgagcgtcatcaagctgaagaacaagatcaagtacagagctgaggcctgcatcaagatgcagaagaccatccgcatgtggctgtgcaagagaagacacaagcccagaattgatggcctggtgaaggtgggcaccctgaagaagaggctggacaagttcaatgaggtggtgtctgtgctgaaggatggcaagccagagatgaacaagcagatcaagaacctggagatcagcattgacaccctgatggccaagatcaagagcaccatgatgacccaggagcagatccagaaggagtatgatgccctggtgaagagcagcgaggagctgctgagcgccctgcagaagaagaagcagcaggaggaggaggccgagcggctgcggcgcatccaggaggagatggagaaggagaggaagagaagagaggaggatgagaagagaagaaggaaggaggaggaggagaggaggatgaagctggagatggaggccaagaggaagcaggaggaggaggagaggaagaagagagaagatgatgagaagaggatccaggccgaggtggaggcccagctggcccggcagaaggaggaggagagccagcagcaggccgtgctggagcaggagcggcgggaccgggagctggccctgcgcatcgcccagagcgaggccgagctgatcagtgatgaggcccaggccgacctggccctgcggcggggccctgctgtgctggccaccaaggctgctgctggcaccaagaagtatgacctgagcaagtggaagtatgcagagctgcgggacaccatcaacaccagctgtgacatcgagctgctggccgcctgccgggaggagttccaccggcggctgaaggtgtaccacgcctggaagagcaagaacaagaagaggaacacagaaacagagcagagggcccccaagtctgtgacagattatgcccagcagaacccagctgcccagatcccagcccggcagcgggagattgagatgaaccggcagcagcgcttcttccgcatccccttcatccggcctgctgaccagtacaaggacccccagagcaagaagaagggctggtggtacgcccactttgatggcccctggatcgcccggcagatggagctgcacccagacaagccacccatcctgctggtggccggcaaggatgacatggagatgtgtgagctgaacctggaggagaccggcctgaccaggaagagaggagctgagatcctgccccggcagtttgaggagatctgggagcgctgtggcggcatccagtacctgcagaatgccatcgagagccggcaggcccggcccacctacgccacagccatgctgcagagcctgctgaagtag

SEQ ID NO: 160846 - DNA, 3858 bp, synthetic construct
  misc_feature 1..3858: note = Description of Artificial Sequence: Synthetic coding sequence
  source 1..3858: mol_type = other DNA
atggaggatggcaagcctgtgtgggccccccaccccacagatggcttccagatgggcaacatcgtggacatcggccctgacagcctgaccatcgagcccctgaaccagaagggcaagaccttcctggccctgatcaaccaggtgtttcctgctgaggaggacagcaagaaggatgtggaggacaactgcagcctgatgtacctgaatgaggccaccctgctgcacaacatcaaggtgcgctacagcaaggaccgcatctacacctacgtggccaacatcctgattgctgtgaacccctactttgacatccccaagatctacagcagcgaggccatcaagagctaccagggcaagagcctgggcacccggcccccccacgtgtttgccatcgctgacaaggccttccgggacatgaaggtgctgaagatgagccagagcatcatcgtgtctggagagagcggggccggcaagacagagaacaccaagtttgtgctgcgctacctgacagagagctatggcaccggccaggacattgatgaccgcatcgtggaggccaaccccctgctggaggcctttggaaatgccaagacagtgaggaacaacaacagcagcagatttgggaagtttgtggagatccacttcaatgagaagagctctgtggtgggcggctttgtgagccactacctgctggagaagagccgcatctgtgtgcagggcaaggaggagaggaactaccacatcttctaccgcctgtgtgccggggccagcgaggacatccgggagaagctgcacctgagcagcccagacaacttccgctacctgaacagaggctgcacccgctactttgccaacaaggagacagacaagcagatcctgcagaacaggaagagccctgagtacctgaaggccggctccatgaaggaccccctgctggatgaccacggggacttcatccgcatgtgcacagccatgaagaagattggcctggatgatgaggagaagctggacctcttccgggtggtggccggcgtgctgcacctgggcaacatcgactttgaggaggccggcagcaccagcggcggctgcaacctgaagaacaagagcgcccagagcctggagtactgtgccgagctgctgggcctggaccaggatgacctgcgggtgtccctgaccaccagggtgatgctgaccacagctgggggcaccaagggcaccgtcatcaaggtgcccctgaaggtggagcaggccaacaatgccagagatgccctggccaagacagtgtacagccacctgtttgaccacgtggtgaacagagtgaaccagtgcttcccctttgagaccagcagctacttcatcggcgtgctggacattgctggctttgagtactttgagcacaacagctttgagcagttctgcatcaactactgcaatgagaagctgcagcagttcttcaatgaaagaatcctgaaggaggagcaggagctgtaccagaaggagggcctgggcgtgaatgaggtgcactacgtggacaaccaggactgcatcgacctgattgaggccaagctggtgggcatcctggacatcctggatgaggagaaccggctgccccagcccagcgaccagcacttcaccagcgctgtgcaccagaagcacaaggaccacttccggctgaccatccccaggaagagcaagctggccgtgcacaggaacatcagagatgatgagggcttcatcatccgccactttgctggagctgtgtgctatgagaccacccagtttgtggagaagaacaatgatgccctgcacatgagcctggagagcctcatctgtgagagccgggacaagttcatccgggagctgtttgagagcagcaccaacaacaacaaggacaccaagcagaaggccggcaagctgtccttcatctctgtgggcaacaagttcaagacccagctgaacctgctgctggacaagctgcggagcactggagccagcttcatccgctgcatcaagcccaacctgaagatgaccagccaccactttgagggcgcccagatcctgagccagctgcagtgcagcggcatggtgtctgtgctggacctgatgcagggcggctaccccagccgggccagcttccacgagctgtacaacatgtacaagaagtacatgccagacaagctggcccggctggaccccaggctcttctgcaaggccctcttcaaggccctgggcctgaatgaaaatgactacaagtttggcctgaccaaggtgttcttccggcctgggaagtttgctgagtttgaccagatcatgaagagtgaccctgaccacctggccgagctggtgaagagggtgaaccactggctgacctgcagccgctggaagaaggtgcagtggtgcagcctgagcgtcatcaagctgaagaacaagatcaagtacagagctgaggcctgcatcaagatgcagaagaccatccgcatgtggctgtgcaagagaagacacaagcccagaattgatggcctggtgaaggtgggcaccctgaagaagaggctggacaagttcaatgaggtggtgtctgtgctgaaggatggcaagccagagatgaacaagcagatcaagaacctggagatcagcattgacaccctgatggccaagatcaagagcaccatgatgacccaggagcagatccagaaggagtatgatgccctggtgaagagcagcgaggagctgctgagcgccctgcagaagaagaagcagcaggaggaggaggccgagcggctgcggcgcatccaggaggagatggagaaggagaggaagagaagagaggaggatgagaagagaagaaggaaggaggaggaggagaggaggatgaagctggagatggaggccaagaggaagcaggaggaggaggagaggaagaagagagaagatgatgagaagaggatccaggccgaggtggaggcccagctggcccggcagaaggaggaggagagccagcagcaggccgtgctggagcaggagcggcgggaccgggagctggccctgcgcatcgcccagagcgaggccgagctgatcagtgatgaggcccaggccgacctggccctgcggagaaatgatggcacccggcccaagatgaccccagagcagatggccaaggagatgtctgagttcctgagccggggccctgctgtgctggccaccaaggctgctgctggcaccaagaagtatgacctgagcaagtggaagtatgcagagctgcgggacaccatcaacaccagctgtgacatcgagctgctggccgcctgccgggaggagttccaccggcggctgaaggtgtaccacgcctggaagagcaagaacaagaagaggaacacagaaacagagcagagggcccccaagtctgtgacagattatgactttgcccccttcctgaacaacagcccccagcagaacccagctgcccagatcccagcccggcagcgggagattgagatgaaccggcagcagcgcttcttccgcatccccttcatccggcctgctgaccagtacaaggacccccagagcaagaagaagggctggtggtacgcccactttgatggcccctggatcgcccggcagatggagctgcacccagacaagccacccatcctgctggtggccggcaaggatgacatggagatgtgtgagctgaacctggaggagaccggcctgaccaggaagagaggagctgagatcctgccccggcagtttgaggagatctgggagcgctgtggcggcatccagtacctgcagaatgccatcgagagccggcaggcccggcccacctacgccacagccatgctgcagagcctgctgaagtag

SEQ ID NO: 160847 - DNA, 3861 bp, synthetic construct
  misc_feature 1..3861: note = Description of Artificial Sequence: Synthetic coding sequence
  source 1..3861: mol_type = other DNA
atggaggatggcaagcctgtgtgggccccccaccccacagatggcttccagatgggcaacatcgtggacatcggccctgacagcctgaccatcgagcccctgaaccagaagggcaagaccttcctggccctgatcaaccaggtgtttcctgctgaggaggacagcaagaaggatgtggaggacaactgcagcctgatgtacctgaatgaggccaccctgctgcacaacatcaaggtgcgctacagcaaggaccgcatctacacctacgtggccaacatcctgattgctgtgaacccctactttgacatccccaagatctacagcagcgaggccatcaagagctaccagggcaagagcctgggcacccggcccccccacgtgtttgccatcgctgacaaggccttccgggacatgaaggtgctgaagatgagccagagcatcatcgtgtctggagagagcggggccggcaagacagagaacaccaagtttgtgctgcgctacctgacagagagctatggcaccggccaggacattgatgaccgcatcgtggaggccaaccccctgctggaggcctttggaaatgccaagacagtgaggaacaacaacagcagcagatttgggaagtttgtggagatccacttcaatgagaagagctctgtggtgggcggctttgtgagccactacctgctggagaagagccgcatctgtgtgcagggcaaggaggagaggaactaccacatcttctaccgcctgtgtgccggggccagcgaggacatccgggagaagctgcacctgagcagcccagacaacttccgctacctgaacagaggctgcacccgctactttgccaacaaggagacagacaagcagatcctgcagaacaggaagagccctgagtacctgaaggccggctccatgaaggaccccctgctggatgaccacggggacttcatccgcatgtgcacagccatgaagaagattggcctggatgatgaggagaagctggacctcttccgggtggtggccggcgtgctgcacctgggcaacatcgactttgaggaggccggcagcaccagcggcggctgcaacctgaagaacaagagcgcccagagcctggagtactgtgccgagctgctgggcctggaccaggatgacctgcgggtgtccctgaccaccagggtgatgctgaccacagctgggggcaccaagggcaccgtcatcaaggtgcccctgaaggtggagcaggccaacaatgccagagatgccctggccaagacagtgtacagccacctgtttgaccacgtggtgaacagagtgaaccagtgcttcccctttgagaccagcagctacttcatcggcgtgctggacattgctggctttgagtactttgagcacaacagctttgagcagttctgcatcaactactgcaatgagaagctgcagcagttcttcaatgaaagaatcctgaaggaggagcaggagctgtaccagaaggagggcctgggcgtgaatgaggtgcactacgtggacaaccaggactgcatcgacctgattgaggccaagctggtgggcatcctggacatcctggatgaggagaaccggctgccccagcccagcgaccagcacttcaccagcgctgtgcaccagaagcacaaggaccacttccggctgaccatccccaggaagagcaagctggccgtgcacaggaacatcagagatgatgagggcttcatcatccgccactttgctggagctgtgtgctatgagaccacccagtttgtggagaagaacaatgatgccctgcacatgagcctggagagcctcatctgtgagagccgggacaagttcatccgggagctgtttgagagcagcaccaacaacaacaaggacaccaagcagaaggccggcaagctgtccttcatctctgtgggcaacaagttcaagacccagctgaacctgctgctggacaagctgcggagcactggagccagcttcatccgctgcatcaagcccaacctgaagatgaccagccaccactttgagggcgcccagatcctgagccagctgcagtgcagcggcatggtgtctgtgctggacctgatgcagggcggctaccccagccgggccagcttccacgagctgtacaacatgtacaagaagtacatgccagacaagctggcccggctggaccccaggctcttctgcaaggccctcttcaaggccctgggcctgaatgaaaatgactacaagtttggcctgaccaaggtgttcttccggcctgggaagtttgctgagtttgaccagatcatgaagagtgaccctgaccacctggccgagctggtgaagagggtgaaccactggctgacctgcagccgctggaagaaggtgcagtggtgcagcctgagcgtcatcaagctgaagaacaagatcaagtacagagctgaggcctgcatcaagatgcagaagaccatccgcatgtggctgtgcaagagaagacacaagcccagaattgatggcctggtgaaggtgggcaccctgaagaagaggctggacaagttcaatgaggtggtgtctgtgctgaaggatggcaagccagagatgaacaagcagatcaagaacctggagatcagcattgacaccctgatggccaagatcaagagcaccatgatgacccaggagcagatccagaaggagtatgatgccctggtgaagagcagcgaggagctgctgagcgccctgcagaagaagaagcagcaggaggaggaggccgagcggctgcggcgcatccaggaggagatggagaaggagaggaagagaagagaggaggatgagaagagaagaaggaaggaggaggaggagaggaggatgaagctggagatggaggccaagaggaagcaggaggaggaggagaggaagaagagagaagatgatgagaagaggatccaggccgaggtggaggcccagctggcccggcagaaggaggaggagagccagcagcaggccgtgctggagcaggagcggcgggaccgggagctggccctgcgcatcgcccagagcgaggccgagctgatcagtgatgaggcccaggccgacctggccctgcggcgctacctggacagctaccctgtgaccagcaagaatgatggcacccggcccaagatgaccccagagcagatggccaaggagatgtctgagttcctgagccggggccctgctgtgctggccaccaaggctgctgctggcaccaagaagtatgacctgagcaagtggaagtatgcagagctgcgggacaccatcaacaccagctgtgacatcgagctgctggccgcctgccgggaggagttccaccggcggctgaaggtgtaccacgcctggaagagcaagaacaagaagaggaacacagaaacagagcagagggcccccaagtctgtgacagattatgcccagcagaacccagctgcccagatcccagcccggcagcgggagattgagatgaaccggcagcagcgcttcttccgcatccccttcatccggcctgctgaccagtacaaggacccccagagcaagaagaagggctggtggtacgcccactttgatggcccctggatcgcccggcagatggagctgcacccagacaagccacccatcctgctggtggccggcaaggatgacatggagatgtgtgagctgaacctggaggagaccggcctgaccaggaagagaggagctgagatcctgccccggcagtttgaggagatctgggagcgctgtggcggcatccagtacctgcagaatgccatcgagagccggcaggcccggcccacctacgccacagccatgctgcagagcctgctgaagtag

SEQ ID NO: 160848 - DNA, 3789 bp, synthetic construct
  misc_feature 1..3789: note = Description of Artificial Sequence: Synthetic coding sequence
  source 1..3789: mol_type = other DNA
atggaggatggcaagcctgtgtgggccccccaccccacagatggcttccagatgggcaacatcgtggacatcggccctgacagcctgaccatcgagcccctgaaccagaagggcaagaccttcctggccctgatcaaccaggtgtttcctgctgaggaggacagcaagaaggatgtggaggacaactgcagcctgatgtacctgaatgaggccaccctgctgcacaacatcaaggtgcgctacagcaaggaccgcatctacacctacgtggccaacatcctgattgctgtgaacccctactttgacatccccaagatctacagcagcgaggccatcaagagctaccagggcaagagcctgggcacccggcccccccacgtgtttgccatcgctgacaaggccttccgggacatgaaggtgctgaagatgagccagagcatcatcgtgtctggagagagcggggccggcaagacagagaacaccaagtttgtgctgcgctacctgacagagagctatggcaccggccaggacattgatgaccgcatcgtggaggccaaccccctgctggaggcctttggaaatgccaagacagtgaggaacaacaacagcagcagatttgggaagtttgtggagatccacttcaatgagaagagctctgtggtgggcggctttgtgagccactacctgctggagaagagccgcatctgtgtgcagggcaaggaggagaggaactaccacatcttctaccgcctgtgtgccggggccagcgaggacatccgggagaagctgcacctgagcagcccagacaacttccgctacctgaacagaggctgcacccgctactttgccaacaaggagacagacaagcagatcctgcagaacaggaagagccctgagtacctgaaggccggctccatgaaggaccccctgctggatgaccacggggacttcatccgcatgtgcacagccatgaagaagattggcctggatgatgaggagaagctggacctcttccgggtggtggccggcgtgctgcacctgggcaacatcgactttgaggaggccggcagcaccagcggcggctgcaacctgaagaacaagagcgcccagagcctggagtactgtgccgagctgctgggcctggaccaggatgacctgcgggtgtccctgaccaccagggtgatgctgaccacagctgggggcaccaagggcaccgtcatcaaggtgcccctgaaggtggagcaggccaacaatgccagagatgccctggccaagacagtgtacagccacctgtttgaccacgtggtgaacagagtgaaccagtgcttcccctttgagaccagcagctacttcatcggcgtgctggacattgctggctttgagtactttgagcacaacagctttgagcagttctgcatcaactactgcaatgagaagctgcagcagttcttcaatgaaagaatcctgaaggaggagcaggagctgtaccagaaggagggcctgggcgtgaatgaggtgcactacgtggacaaccaggactgcatcgacctgattgaggccaagctggtgggcatcctggacatcctggatgaggagaaccggctgccccagcccagcgaccagcacttcaccagcgctgtgcaccagaagcacaaggaccacttccggctgaccatccccaggaagagcaagctggccgtgcacaggaacatcagagatgatgagggcttcatcatccgccactttgctggagctgtgtgctatgagaccacccagtttgtggagaagaacaatgatgccctgcacatgagcctggagagcctcatctgtgagagccgggacaagttcatccgggagctgtttgagagcagcaccaacaacaacaaggacaccaagcagaaggccggcaagctgtccttcatctctgtgggcaacaagttcaagacccagctgaacctgctgctggacaagctgcggagcactggagccagcttcatccgctgcatcaagcccaacctgaagatgaccagccaccactttgagggcgcccagatcctgagccagctgcagtgcagcggcatggtgtctgtgctggacctgatgcagggcggctaccccagccgggccagcttccacgagctgtacaacatgtacaagaagtacatgccagacaagctggcccggctggaccccaggctcttctgcaaggccctcttcaaggccctgggcctgaatgaaaatgactacaagtttggcctgaccaaggtgttcttccggcctgggaagtttgctgagtttgaccagatcatgaagagtgaccctgaccacctggccgagctggtgaagagggtgaaccactggctgacctgcagccgctggaagaaggtgcagtggtgcagcctgagcgtcatcaagctgaagaacaagatcaagtacagagctgaggcctgcatcaagatgcagaagaccatccgcatgtggctgtgcaagagaagacacaagcccagaattgatggcctggtgaaggtgggcaccctgaagaagaggctggacaagttcaatgaggtggtgtctgtgctgaaggatggcaagccagagatgaacaagcagatcaagaacctggagatcagcattgacaccctgatggccaagatcaagagcaccatgatgacccaggagcagatccagaaggagtatgatgccctggtgaagagcagcgaggagctgctgagcgccctgcagaagaagaagcagcaggaggaggaggccgagcggctgcggcgcatccaggaggagatggagaaggagaggaagagaagagaggaggatgagaagagaagaaggaaggaggaggaggagaggaggatgaagctggagatggaggccaagaggaagcaggaggaggaggagaggaagaagagagaagatgatgagaagaggatccaggccgaggtggaggcccagctggcccggcagaaggaggaggagagccagcagcaggccgtgctggagcaggagcggcgggaccgggagctggccctgcgcatcgcccagagcgaggccgagctgatcagtgatgaggcccaggccgacctggccctgcggcggggccctgctgtgctggccaccaaggctgctgctggcaccaagaagtatgacctgagcaagtggaagtatgcagagctgcgggacaccatcaacaccagctgtgacatcgagctgctggccgcctgccgggaggagttccaccggcggctgaaggtgtaccacgcctggaagagcaagaacaagaagaggaacacagaaacagagcagagggcccccaagtctgtgacagattatgactttgcccccttcctgaacaacagcccccagcagaacccagctgcccagatcccagcccggcagcgggagattgagatgaaccggcagcagcgcttcttccgcatccccttcatccggcctgctgaccagtacaaggacccccagagcaagaagaagggctggtggtacgcccactttgatggcccctggatcgcccggcagatggagctgcacccagacaagccacccatcctgctggtggccggcaaggatgacatggagatgtgtgagctgaacctggaggagaccggcctgaccaggaagagaggagctgagatcctgccccggcagtttgaggagatctgggagcgctgtggcggcatccagtacctgcagaatgccatcgagagccggcaggcccggcccacctacgccacagccatgctgcagagcctgctgaagtag

SEQ ID NO: 160849 - DNA, 3888 bp, synthetic construct
  misc_feature 1..3888: note = Description of Artificial Sequence: Synthetic coding sequence
  source 1..3888: mol_type = other DNA
atggaggatggcaagcctgtgtgggccccccaccccacagatggcttccagatgggcaacatcgtggacatcggccctgacagcctgaccatcgagcccctgaaccagaagggcaagaccttcctggccctgatcaaccaggtgtttcctgctgaggaggacagcaagaaggatgtggaggacaactgcagcctgatgtacctgaatgaggccaccctgctgcacaacatcaaggtgcgctacagcaaggaccgcatctacacctacgtggccaacatcctgattgctgtgaacccctactttgacatccccaagatctacagcagcgaggccatcaagagctaccagggcaagagcctgggcacccggcccccccacgtgtttgccatcgctgacaaggccttccgggacatgaaggtgctgaagatgagccagagcatcatcgtgtctggagagagcggggccggcaagacagagaacaccaagtttgtgctgcgctacctgacagagagctatggcaccggccaggacattgatgaccgcatcgtggaggccaaccccctgctggaggcctttggaaatgccaagacagtgaggaacaacaacagcagcagatttgggaagtttgtggagatccacttcaatgagaagagctctgtggtgggcggctttgtgagccactacctgctggagaagagccgcatctgtgtgcagggcaaggaggagaggaactaccacatcttctaccgcctgtgtgccggggccagcgaggacatccgggagaagctgcacctgagcagcccagacaacttccgctacctgaacagaggctgcacccgctactttgccaacaaggagacagacaagcagatcctgcagaacaggaagagccctgagtacctgaaggccggctccatgaaggaccccctgctggatgaccacggggacttcatccgcatgtgcacagccatgaagaagattggcctggatgatgaggagaagctggacctcttccgggtggtggccggcgtgctgcacctgggcaacatcgactttgaggaggccggcagcaccagcggcggctgcaacctgaagaacaagagcgcccagagcctggagtactgtgccgagctgctgggcctggaccaggatgacctgcgggtgtccctgaccaccagggtgatgctgaccacagctgggggcaccaagggcaccgtcatcaaggtgcccctgaaggtggagcaggccaacaatgccagagatgccctggccaagacagtgtacagccacctgtttgaccacgtggtgaacagagtgaaccagtgcttcccctttgagaccagcagctacttcatcggcgtgctggacattgctggctttgagtactttgagcacaacagctttgagcagttctgcatcaactactgcaatgagaagctgcagcagttcttcaatgaaagaatcctgaaggaggagcaggagctgtaccagaaggagggcctgggcgtgaatgaggtgcactacgtggacaaccaggactgcatcgacctgattgaggccaagctggtgggcatcctggacatcctggatgaggagaaccggctgccccagcccagcgaccagcacttcaccagcgctgtgcaccagaagcacaaggaccacttccggctgaccatccccaggaagagcaagctggccgtgcacaggaacatcagagatgatgagggcttcatcatccgccactttgctggagctgtgtgctatgagaccacccagtttgtggagaagaacaatgatgccctgcacatgagcctggagagcctcatctgtgagagccgggacaagttcatccgggagctgtttgagagcagcaccaacaacaacaaggacaccaagcagaaggccggcaagctgtccttcatctctgtgggcaacaagttcaagacccagctgaacctgctgctggacaagctgcggagcactggagccagcttcatccgctgcatcaagcccaacctgaagatgaccagccaccactttgagggcgcccagatcctgagccagctgcagtgcagcggcatggtgtctgtgctggacctgatgcagggcggctaccccagccgggccagcttccacgagctgtacaacatgtacaagaagtacatgccagacaagctggcccggctggaccccaggctcttctgcaaggccctcttcaaggccctgggcctgaatgaaaatgactacaagtttggcctgaccaaggtgttcttccggcctgggaagtttgctgagtttgaccagatcatgaagagtgaccctgaccacctggccgagctggtgaagagggtgaaccactggctgacctgcagccgctggaagaaggtgcagtggtgcagcctgagcgtcatcaagctgaagaacaagatcaagtacagagctgaggcctgcatcaagatgcagaagaccatccgcatgtggctgtgcaagagaagacacaagcccagaattgatggcctggtgaaggtgggcaccctgaagaagaggctggacaagttcaatgaggtggtgtctgtgctgaaggatggcaagccagagatgaacaagcagatcaagaacctggagatcagcattgacaccctgatggccaagatcaagagcaccatgatgacccaggagcagatccagaaggagtatgatgccctggtgaagagcagcgaggagctgctgagcgccctgcagaagaagaagcagcaggaggaggaggccgagcggctgcggcgcatccaggaggagatggagaaggagaggaagagaagagaggaggatgagaagagaagaaggaaggaggaggaggagaggaggatgaagctggagatggaggccaagaggaagcaggaggaggaggagaggaagaagagagaagatgatgagaagaggatccaggccgaggtggaggcccagctggcccggcagaaggaggaggagagccagcagcaggccgtgctggagcaggagcggcgggaccgggagctggccctgcgcatcgcccagagcgaggccgagctgatcagtgatgaggcccaggccgacctggccctgcggcgctacctggacagctaccctgtgaccagcaagaatgatggcacccggcccaagatgaccccagagcagatggccaaggagatgtctgagttcctgagccggggccctgctgtgctggccaccaaggctgctgctggcaccaagaagtatgacctgagcaagtggaagtatgcagagctgcgggacaccatcaacaccagctgtgacatcgagctgctggccgcctgccgggaggagttccaccggcggctgaaggtgtaccacgcctggaagagcaagaacaagaagaggaacacagaaacagagcagagggcccccaagtctgtgacagattatgactttgcccccttcctgaacaacagcccccagcagaacccagctgcccagatcccagcccggcagcgggagattgagatgaaccggcagcagcgcttcttccgcatccccttcatccggcctgctgaccagtacaaggacccccagagcaagaagaagggctggtggtacgcccactttgatggcccctggatcgcccggcagatggagctgcacccagacaagccacccatcctgctggtggccggcaaggatgacatggagatgtgtgagctgaacctggaggagaccggcctgaccaggaagagaggagctgagatcctgccccggcagtttgaggagatctgggagcgctgtggcggcatccagtacctgcagaatgccatcgagagccggcaggcccggcccacctacgccacagccatgctgcagagcctgctgaagtag

SEQ ID NO: 160850 - DNA, 525 bp, synthetic construct
  misc_feature 1..525: note = Description of Artificial Sequence: Synthetic coding sequence
  source 1..525: mol_type = other DNA
aagaggcgggaggaggatgagaagagaagaaggaaggaggaggaggagaggaggatgaagctggagatggaggccaagaggaagcaggaggaggaggagaggaagaagcgggaggatgatgagaagaggatccaggccgaggtggaggcccagctggcccggcagaaggaggaggagagccagcagcaggccgtgctggagcaggagcggcgggaccgggagctggccctgagaattgcccagagcgaggccgagctgatcagtgatgaggcccaggccgacctggccctgcggagcctggacagctaccctgtgaccagcaagaatgatggcacccggcccaagatgaccccaggccctgctgtgctggccaccaaggctgctgctggcaccaagaagtatgacctgagcaagtggaagtatgcagagctgcgggacaccatcaacaccagctgtgacatcgagctgctggccgcctgccgggaggagttccaccggcggctgaaggtgtaccacgcctggtag

SEQ ID NO: 160851 - DNA, 6276 bp, synthetic construct
  misc_feature 1..6276: note = Description of Artificial Sequence: Synthetic coding sequence
  source 1..6276: mol_type = other DNA
gccctgctgcagaagggggaccacgtgtggatggacctgcggctgggccaggagtttgatgtgcccatcggggctgtggtgaagctgtgtgacagcggccaggtgcaggtggtggatgatgaagataatgagcactggatcagcccccagaatgccacccacatcaagcccatgcaccccacctctgtgcacggcgtggaggacatgatccggctgggggacctgaatgaggccggcatcctgaggaacctgctgatccgctacagagaccacctgatctacacctacacaggcagcatcctggtggccgtgaacccctaccagctgctgagcatctacagccctgagcacatccggcagtacaccaacaagaagatcggggagatgccaccccacatctttgccatcgctgacaactgctacttcaacatgaagaggaacagccgggaccagtgctgcatcatcagcggggagagcggggccggcaagacagagagcaccaagctgatcctgcagttcctggccgccatcagcggccagcacagctggattgagcagcaggtgctggaggccacccccatcctggaggcctttggaaatgccaagaccatcagaaatgacaacagcagcagatttgggaagtacatcgacatccacttcaacaagagaggagccatcgagggcgccaagattgagcagtacctgctggagaagagccgggtgtgccggcaggccctggatgaaagaaactaccacgtgttctactgcatgctggagggcatgtctgaggaccagaagaagaagctgggcctgggccaggccagtgactacaactacctggccatggtgaaccccccagacctgatgagctgcctgaccagcaggaccctcatcaccagaggagaaacagtgtccacccccctgagccgggagcaggccctggatgtgagagatgcctttgtgaagggcatctacggccgcctgtttgtgtggatcgtggacaagatcaatgctgccatctacaagccacccagccaggatgtgaagaacagccgccgcagcatcggcctgctggacatctttggatttgagaactttgctgtgaacagctttgagcagctgtgcatcaactttgccaatgagcacctgcagcagttctttgtgcgccacgtgttcaagctggagcaggaggagtatgacctggagagcattgactggctgcacatcgagttcacagacaaccaggatgccctggacatgattgccaacaagcccatgaacatcatcagcctgattgatgaggagagcaagttccccaagttcctggagaagaacagagacaccctgcacggggacatcatccagctggtgcacagcagcaggaacaagttcatcaagcagatcttccaggctgatgtggccatgggcgctgagaccaggaagaggagccccaccctgagcagccagttcaagaggagcctggagctgctgatgaggaccctgggcgcctgccagcccttctttgtgcgctgcatcaagcccaatgagttcaagaagcccatgctgtttgacagacacctgtgtgtgcggcagctgcgctacagcggcatgatggagaccatccgcatccggcgggccggctaccccatccgctacagctttgtggagtttgtggagcgctacagagtgctgctgcccggggtgaagccagcctacaagcagggcgacctgcggggcacctgccagaggatggccgaggccgtgctgggcacccatgatgactggcagatcggcaagaccaagatcttcctgaaggaccaccacgacatgctgctggaggtggagcgggacaaggccatcacagacagagtcatcctgctgcagaaggtgatccggggcttcaaggacaggagcaacttcctgaagctgaagaatgctgccaccctcatccagaggcactggaggggccacaactgcaggaagaactacggcctgatgaggctgggcttcctgcggctgcaggccctgcacaggagcaggaagctgcaccagcagtaccgcctggcccggcagaggatcatccagttccaggcccgctgccgggcctacctggtgaggaaggccttccgccaccggctgtgggccgtgctgactgtgcaggcctatgcccggggcatgattgcccggcggctgcaccagaggctgcgggcagagtacctgtggaggctggaggccgagaagatgaggctggccgaggaggagaagctgaggaaggagatgtctgccaagaaggccaaggaggaggccgagaggaagcaccaggagcggctggcccagctggccagagaagatgctgagcgggagctgaaggagaaggaggccgcccggaggaagaaggagctgctggagcagatggagcgggcccggcatgagcctgtgaaccacagcgacatggtggacaagatgtttggcttcctgggcaccagcggcggcctgcccggccaggagggccaggcccccagcggctttgaggacctggagcggggccggcgggagatggtggaggaggacctggatgctgccctgcccctgcctgatgaagatgaggaggacctgtctgagtacaagtttgccaagtttgctgccacctacttccagggcaccaccacccacagctacacccggcggcccctgaagcagcccctgctgtaccatgatgatgaaggagaccagctggccgccctggccgtgtggatcaccatcctgcgcttcatgggagacctgcctgagcccaagtaccacacagccatgtctgatggcagcgagaagatccctgtgatgaccaagatctatgagaccctgggcaagaagacctacaagcgggagctgcaggccctgcagggcgagggggaggcccagctgcctgagggccagaagaagagctctgtgcgccacaagctggtgcacctgaccctgaagaagaagagcaagctgacagaggaggtgaccaagaggctgcatgatggagagagcacagtgcagggcaacagcatgctggaggaccggcccaccagcaacctggagaagctgcacttcatcattggaaatggcatcctgcggcctgccctgagagatgagatctactgccagatcagcaagcagctgacccacaaccccagcaagagcagctatgcccggggctggatcctggtgtccctgtgtgtgggctgctttgcccccagcgagaagtttgtgaagtacctgaggaacttcatccatggaggccccccaggctacgccccctactgtgaggagcggctgcggaggacctttgtgaatggcaccaggacccagcccccatcctggctggagctgcaggccaccaagagcaagaagcccatcatgctgcctgtgaccttcatggatggcaccaccaagaccctgctgacagacagcgccaccacagccaaggagctgtgcaatgccctggccgacaagatcagcctgaaggacagatttggcttcagcctgtacatcgccctgtttgacaaggtgagcagcctgggcagcggcagtgaccacgtgatggatgccatcagccagtgtgagcagtatgccaaggagcagggcgcccaggagagaaatgccccctggaggctcttcttcaggaaggaggtgttcaccccctggcacagccccagtgaagataatgtggccaccaacctgatctaccagcaggtggtgcggggcgtgaagtttggagagtaccgctgtgagaaggaggatgacctggccgagctggccagccagcagtactttgtggactatggcagcgagatgatcctggagcggctgctgaacctggtgcccacctacatcccagaccgggagatcacccccctgaagaccctggagaagtgggcccagctggccatcgccgcccacaagaagggcatctatgcccagaggagaacagatgcccagaaggtgaaggaggatgtggtgtcctatgcccgcttcaagtggcccctgctcttcagccgcttctatgaggcctacaagttcagcggccccagcctgcccaagaatgatgtgattgtggccgtgaactggacaggagtgtactttgtggatgagcaggagcaggtgctgctggagctgtccttccctgagatcatggctgtgagcagcagccgggagtgccgggtgtggctgagcctgggctgcagcgacctgggctgtgccgccccccacagcggctgggccggcctgaccccagctggcccctgcagcccctgctggagctgccgcggggccaagaccacagcccccagcttcaccctggccaccatcaagggagatgagtacaccttcaccagcagcaatgctgaggacatccgggacctggtggtgaccttcctggagggcctgaggaagaggagcaaatatgtggtggccctgcaggacaaccccaacccagctggggaggagagcggcttcctgagctttgccaagggggacctgatcatcctggaccatgacacaggagagcaggtgatgaacagcggctgggccaacggcatcaatgaaagaaccaagcagagaggagacttccccacagacagcgtgtatgtgatgcccaccgtgaccatgccaccccgggagatcgtggccctggtgaccatgaccccagaccagaggcaggatgtggtgcggctgctgcagctgaggacagctgagcctgaggtgcgggccaagccctacaccctggaggagttctcctatgactacttccggcccccacccaagcacaccctgagccgggtgatggtgtccaaggcccggggcaaggaccggctgtggagccacacccgggagcccctgaagcaggccctgctgaagaagctgctgggcagcgaggagctgagccaggaggcctgcctggccttcatcgctgtgctgaagtacatgggagactaccccagcaagaggaccaggtctgtgaatgagctgacagaccagatctttgagggccccctgaaggccgagcccctgaaggatgaggcctacgtgcagatcctgaagcagctgacagacaaccacatccgctacagcgaggagcggggctgggagctgctgtggctgtgcaccggcctcttcccccccagcaacatcctgctgccccacgtgcagcgcttcctgcagagcaggaagcactgccccctggccatcgactgcctgcagaggctgcagaaggccctgagaaatggcagcaggaagtacccaccccacctggtggaggtggaggccatccagcacaagaccacccagatcttccacaaggtgtacttcccagatgacacagatgaggcctttgaggtggagagcagcaccaaggccaaggacttctgccagaacatcgccacccggctgctgctgaagagcagcgagggcttcagcctgtttgtgaagattgctgacaaggtgctgtctgtgcctgaaaatgacttcttctttgattttgtgcgccacctgacagactggatcaagaaggcccggcccatcaaggatggcatcgtgcccagcctgacctaccaggtgttcttcatgaagaagctgtggaccaccaccgtgcctgggaaggaccccatggctgacagcatcttccactactaccaggagctgcccaagtacctgcggggctaccacaagtgcacccgggaggaggtgctgcagctgggcgccctgatctacagagtgaagtttgaggaggacaagagctacttccccagcatccccaagctgctgcgggagctggtgccccaggacctgatccggcaggtgtccccagatgactggaagaggagcatcgtggcctacttcaacaagcatgctgggaagagcaaggaggaggccaagctggccttcctgaagctgatcttcaagtggcccaccttcggcagcgccttctttgaggtgaagcagaccacagagcccaacttccctgagatcctgctgattgccatcaacaagtatggagtgtccctgattgaccccaagaccaaggacatcctgaccacccaccccttcaccaagatcagcaactggagcagcggcaacacctacttccacatcaccatcggcaacctggtgcggggcagcaagctgctgtgtgagaccagcctgggctacaagatggatgacctgctgaccagctacatcagccagatgctgacagccatgagcaagcagaggggcagccgcagcggcaagtag

SEQ ID NO: 160852 - DNA, 6555 bp, synthetic construct
  misc_feature 1..6555: note = Description of Artificial Sequence: Synthetic coding sequence
  source 1..6555: mol_type = other DNA
gccctgctgcagaagggggaccacgtgtggatggacctgcggctgggccaggagtttgatgtgcccatcggggctgtggtgaagctgtgtgacagcggccaggtgcaggtggtggatgatgaagataatgagcactggatcagcccccagaatgccacccacatcaagcccatgcaccccacctctgtgcacggcgtggaggacatgatccggctgggggacctgaatgaggccggcatcctgaggaacctgctgatccgctacagagaccacctgatctacacctacacaggcagcatcctggtggccgtgaacccctaccagctgctgagcatctacagccctgagcacatccggcagtacaccaacaagaagatcggggagatgccaccccacatctttgccatcgctgacaactgctacttcaacatgaagaggaacagccgggaccagtgctgcatcatcagcggggagagcggggccggcaagacagagagcaccaagctgatcctgcagttcctggccgccatcagcggccagcacagctggattgagcagcaggtgctggaggccacccccatcctggaggcctttggaaatgccaagaccatcagaaatgacaacagcagcagatttgggaagtacatcgacatccacttcaacaagagaggagccatcgagggcgccaagattgagcagtacctgctggagaagagccgggtgtgccggcaggccctggatgaaagaaactaccacgtgttctactgcatgctggagggcatgtctgaggaccagaagaagaagctgggcctgggccaggccagtgactacaactacctggccatgggcaactgcatcacctgtgagggccgggtggacagccaggagtatgccaacatccgcagcgccatgaaggtgctgatgttcacagacacagagaactgggagatcagcaagctgctggccgccatcctgcacctgggcaacctgcagtatgaggcccggacctttgagaacctggatgcctgtgaggtgctcttcagccccagcctggccacagctgccagcctgctggaggtgaaccccccagacctgatgagctgcctgaccagcaggaccctcatcaccagaggagagaccgtgtccacccccctgagccgggagcaggccctggatgtgagagatgcctttgtgaagggcatctacggccgcctgtttgtgtggatcgtggacaagatcaatgctgccatctacaagccacccagccaggatgtgaagaacagcagaagaagcatcggcctgctggacatcttcggctttgaaaattttgctgtgaacagctttgagcagctgtgcatcaactttgccaatgagcacctgcagcagttctttgtgagacatgtgttcaagctggagcaggaggagtatgacctggagagcattgactggctgcacatcgagttcacagacaaccaggatgccctggacatgattgccaacaagcccatgaacatcatcagcctgattgatgaggagagcaagttccccaagggcacagacaccaccatgctgcacaagctgaacagccagcacaagctgaatgccaactacatcccccccaagaacaaccacgagacccagtttggcatcaaccactttgctggcatcgtgtactatgagacccagggcttcctggagaagaacagagacaccctgcatggagacatcatccagctggtgcacagcagcaggaacaagttcatcaagcagatcttccaggctgatgtggccatgggcgctgagaccaggaagaggagccccaccctgagcagccagttcaagaggagcctggagctgctgatgaggaccctgggcgcctgccagcccttctttgtgcgctgcatcaagcccaatgagttcaagaagcccatgctgtttgacagacacctgtgtgtgcggcagctgcgctacagcggcatgatggagaccatccgcatcagaagagctggctaccccatccgctacagctttgtggagtttgtggagcgctacagagtgctgctgcccggggtgaagccagcctacaagcagggcgacctgcggggcacctgccagaggatggccgaggccgtgctgggcacccatgatgactggcagatcggcaagaccaagatcttcctgaaggaccaccacgacatgctgctggaggtggagcgggacaaggccatcacagacagagtcatcctgctgcagaaggtgatccggggcttcaaggacaggagcaacttcctgaagctgaagaatgctgccaccctcatccagaggcactggaggggccacaactgcaggaagaactacggcctgatgaggctgggcttcctgcggctgcaggccctgcacaggagcaggaagctgcaccagcagtaccgcctggcccggcagaggatcatccagttccaggcccgctgccgggcctacctggtgaggaaggccttccgccaccggctgtgggccgtgctgactgtgcaggcctatgcccggggcatgattgcccggcggctgcaccagaggctgcgggcagagtacctgtggaggctggaggccgagaagatgaggctggccgaggaggagaagctgaggaaggagatgtctgccaagaaggccaaggaggaggccgagaggaagcaccaggagcggctggcccagctggcccgggaggatgctgagcgggagctgaaggagaaggaggccgcccggaggaagaaggagctgctggagcagatggagcgggcccggcatgagcctgtgaaccacagcgacatggtggacaagatgtttggcttcctgggcaccagcggcggcctgcccggccaggagggccaggcccccagcggctttgaggacctggagcggggcagaagagagatggtggaggaggacctggatgctgccctgcccctgcctgatgaagatgaggaggacctgtctgagtacaagtttgccaagtttgctgccacctacttccagggcaccaccacccacagctacacccggcggcccctgaagcagcccctgctgtaccatgatgatgaaggagaccagctggccgccctggccgtgtggatcaccatcctgcgcttcatgggagacctgcctgagcccaagtaccacacagccatgtctgatggcagcgagaagatccctgtgatgaccaagatctatgagaccctgggcaagaagacctacaagcgggagctgcaggccctgcagggcgagggggaggtgaccaagaggctgcatgatggagagagcacagtgcagggcaacagcatgctggaggaccggcccaccagcaacctggagaagctgcacttcatcattggaaatggcatcctgcggcctgccctgagagatgagatctactgccagatcagcaagcagctgacccacaaccccagcaagagcagctatgcccggggctggatcctggtgtccctgtgtgtgggctgctttgcccccagcgagaagtttgtgaagtacctgaggaacttcatccacggcggccccccaggctacgccccctactgtgaggagcggctgcggaggacctttgtgaatggcaccaggacccagccccccagctggctggagctgcaggccaccaagagcaagaagcccatcatgctgcctgtgaccttcatggatggcaccaccaagaccctgctgacagattctgccaccacagccaaggagctgtgcaatgccctggccgacaagatcagcctgaaggaccgcttcggcttcagcctgtacatcgccctgtttgacaaggtgagcagcctgggcagcggcagtgaccacgtgatggatgccatcagccagtgtgagcagtatgccaaggagcagggcgcccaggagagaaatgccccctggaggctcttcttcaggaaggaggtgttcaccccctggcacagccccagcgaggacaacgtggccaccaacctgatctaccagcaggtggtgcggggcgtgaagtttggagagtaccgctgtgagaaggaggatgacctggccgagctggccagccagcagtactttgtggactatggcagcgagatgatcctggagcggctgctgaacctggtgcccacctacatcccagaccgggagatcacccccctgaagaccctggagaagtgggcccagctggccatcgccgcccacaagaagggcatctatgcccagaggagaacagatgcccagaaggtgaaggaggatgtggtgtcctatgcccgcttcaagtggcccctgctcttcagccgcttctatgaggcctacaagttcagcggccccagcctgcccaagaatgatgtgattgtggccgtgaactggacaggagtgtactttgtggatgagcaggagcaggtgctgctggagctgtccttccctgagatcatggctgtgagcagcagcagagaatgtcgggtgtggctgagcctgggctgcagcgacctgggctgtgccgccccccacagcggctgggccggcctgaccccagctggcccctgcagcccctgctggagctgccgcggggccaagaccacagcccccagcttcaccctggccaccatcaagggagatgagtacaccttcaccagcagcaatgctgaggacatccgggacctggtggtgaccttcctggagggcctgaggaagaggagcaaatatgtggtggccctgcaggacaaccccaacccagctggggaggagagcggcttcctgagctttgccaagggggacctgatcatcctggaccatgacaccggggagcaggtgatgaacagcggctgggccaacggcatcaatgaaagaaccaagcagagaggagacttccccacagattctgtgtatgtgatgcccaccgtgaccatgccaccccgggagatcgtggccctggtgaccatgaccccagaccagaggcaggatgtggtgcggctgctgcagctgaggacagctgagcctgaggtgcgggccaagccctacaccctggaggagttctcctatgactacttccggcccccacccaagcacaccctgagccgggtgatggtgtccaaggcccggggcaaggaccggctgtggagccacacccgggagcccctgaagcaggccctgctgaagaagctgctgggcagcgaggagctgagccaggaggcctgcctggccttcatcgctgtgctgaagtacatgggagactaccccagcaagaggaccaggtctgtgaatgagctgacagaccagatctttgagggccccctgaaggccgagcccctgaaggatgaggcctacgtgcagatcctgaagcagctgacagacaaccacatccgctacagcgaggagcggggctgggagctgctgtggctgtgcaccggcctcttcccccccagcaacatcctgctgccccacgtgcagcgcttcctgcagagcaggaagcactgccccctggccatcgactgcctgcagaggctgcagaaggccctgagaaatggcagcaggaagtacccaccccacctggtggaggtggaggccatccagcacaagaccacccagatcttccacaaggtgtacttcccagatgacacagatgaggcctttgaggtggagagcagcaccaaggccaaggacttctgccagaacatcgccacccggctgctgctgaagagcagcgagggcttcagcctgtttgtgaagattgctgacaaggtgctgtctgtgcctgaaaatgacttcttctttgattttgtgcgccacctgacagactggatcaagaaggcccggcccatcaaggatggcatcgtgcccagcctgacctaccaggtgttcttcatgaagaagctgtggaccaccaccgtgcctgggaaggaccccatggctgacagcatcttccactactaccaggagctgcccaagtacctgcggggctaccacaagtgcacccgggaggaggtgctgcagctgggcgccctgatctacagagtgaagtttgaggaggacaagagctacttccccagcatccccaagctgctgcgggagctggtgccccaggacctgatccggcaggtgtccccagatgactggaagaggagcatcgtggcctacttcaacaagcacgccggcaagagcaaggaggaggccaagctggccttcctgaagctgatcttcaagtggcccacctttggaagtgccttctttgaggtgaagcagaccacagagcccaacttccctgagatcctgctgattgccatcaacaagtatggagtgtccctgattgaccccaagaccaaggacatcctgaccacccaccccttcaccaagatcagcaactggagcagcggcaacacctacttccacatcaccatcggcaacctggtgcggggcagcaagctgctgtgtgagaccagcctgggctacaagatggatgacctgctgaccagctacatcagccagatgctgacagccatgagcaagcagaggggcagccgcagcggcaagtag

SEQ ID NO: 160853 - DNA, 3609 bp, synthetic construct
  misc_feature 1..3609: note = Description of Artificial Sequence: Synthetic coding sequence
  source 1..3609: mol_type = other DNA
gccctgctgcagaagggggaccacgtgtggatggacctgcggctgggccaggagtttgatgtgcccatcggggctgtggtgaagctgtgtgacagcggccaggtgcaggtggtggatgatgaagataatgagcactggatcagcccccagaatgccacccacatcaagcccatgcaccccacctctgtgcacggcgtggaggacatgatccggctgggggacctgaatgaggccggcatcctgaggaacctgctgatccgctacagagaccacctgatctacacctacacaggcagcatcctggtggccgtgaacccctaccagctgctgagcatctacagccctgagcacatccggcagtacaccaacaagaagatcggggagatgccaccccacatctttgccatcgctgacaactgctacttcaacatgaagaggaacagccgggaccagtgctgcatcatcagcggggagagcggggccggcaagacagagagcaccaagctgatcctgcagttcctggccgccatcagcggccagcacagctggattgagcagcaggtgctggaggccacccccatcctggaggcctttggaaatgccaagaccatcagaaatgacaacagcagcagatttgggaagtacatcgacatccacttcaacaagagaggagccatcgagggcgccaagattgagcagtacctgctggagaagagccgggtgtgccggcaggccctggatgaaagaaactaccacgtgttctactgcatgctggagggcatgtctgaggaccagaagaagaagctgggcctgggccaggccagtgactacaactacctggccatgggcaactgcatcacctgtgagggccgggtggacagccaggagtatgccaacatccgcagcgccatgaaggtgctgatgttcacagacacagagaactgggagatcagcaagctgctggccgccatcctgcacctgggcaacctgcagtatgaggcccggacctttgagaacctggatgcctgtgaggtgctcttcagccccagcctggccacagctgccagcctgctggaggtgaaccccccagacctgatgagctgcctgaccagcaggaccctcatcaccagaggagagaccgtgtccacccccctgagccgggagcaggccctggatgtgagagatgcctttgtgaagggcatctacggccgcctgtttgtgtggatcgtggacaagatcaatgctgccatctacaagccacccagccaggatgtgaagaacagcagaagaagcatcggcctgctggacatcttcggctttgaaaattttgctgtgaacagctttgagcagctgtgcatcaactttgccaatgagcacctgcagcagttctttgtgagacatgtgttcaagctggagcaggaggagtatgacctggagagcattgactggctgcacatcgagttcacagacaaccaggatgccctggacatgattgccaacaagcccatgaacatcatcagcctgattgatgaggagagcaagttccccaagggcacagacaccaccatgctgcacaagctgaacagccagcacaagctgaatgccaactacatcccccccaagaacaaccacgagacccagtttggcatcaaccactttgctggcatcgtgtactatgagacccagggcttcctggagaagaacagagacaccctgcatggagacatcatccagctggtgcacagcagcaggaacaagttcatcaagcagatcttccaggctgatgtggccatgggcgctgagaccaggaagaggagccccaccctgagcagccagttcaagaggagcctggagctgctgatgaggaccctgggcgcctgccagcccttctttgtgcgctgcatcaagcccaatgagttcaagaagcccatgctgtttgacagacacctgtgtgtgcggcagctgcgctacagcggcatgatggagaccatccgcatcagaagagctggctaccccatccgctacagctttgtggagtttgtggagcgctacagagtgctgctgcccggggtgaagccagcctacaagcagggcgacctgcggggcacctgccagaggatggccgaggccgtgctgggcacccatgatgactggcagatcggcaagaccaagatcttcctgaaggaccaccacgacatgctgctggaggtggagcgggacaaggccatcacagacagagtcatcctgctgcagaaggtgatccggggcttcaaggacaggagcaacttcctgaagctgaagaatgctgccaccctcatccagaggcactggaggggccacaactgcaggaagaactacggcctgatgaggctgggcttcctgcggctgcaggccctgcacaggagcaggaagctgcaccagcagtaccgcctggcccggcagaggatcatccagttccaggcccgctgccgggcctacctggtgaggaaggccttccgccaccggctgtgggccgtgctgactgtgcaggcctatgcccggggcatgattgcccggcggctgcaccagaggctgcgggcagagtacctgtggaggctggaggccgagaagatgaggctggccgaggaggagaagctgaggaaggagatgtctgccaagaaggccaaggaggaggccgagaggaagcaccaggagcggctggcccagctggcccgggaggatgctgagcgggagctgaaggagaaggaggccgcccggaggaagaaggagctgctggagcagatggagcgggcccggcatgagcctgtgaaccacagcgacatggtggacaagatgtttggcttcctgggcaccagcggcggcctgcccggccaggagggccaggcccccagcggctttgaggacctggagcggggcagaagagagatggtggaggaggacctggatgctgccctgcccctgcctgatgaagatgaggaggacctgtctgagtacaagtttgccaagtttgctgccacctacttccagggcaccaccacccacagctacacccggcggcccctgaagcagcccctgctgtaccatgatgatgaaggagaccagctggccgccctggccgtgtggatcaccatcctgcgcttcatgggagacctgcctgagcccaagtaccacacagccatgtctgatggcagcgagaagatccctgtgatgaccaagatctatgagaccctgggcaagaagacctacaagcgggagctgcaggccctgcagggcgagggggaggtgctgcaggcccagctgcctgagggccagaagaagagctctgtgcgccacaagctggtgcacctgaccctgaagaagaagagcaagctgacagaggaggtgaccaagaggctgcatgatggagagagcacagtgcagggcaacagcatgctggaggaccggcccaccagcaacctggagaagctgcacttcatcattggaaatggcatcctgcggcctgccctgcggtctgtgcccccagagagcctgctggtggccgagtggtgcctgtgccagcccagcaagaggctgagccaggcccctggctttggatttgctgccagctag

SEQ ID NO: 160854 - DNA, 6645 bp, synthetic construct
  misc_feature 1..6645: note = Description of Artificial Sequence: Synthetic coding sequence
  source 1..6645: mol_type = other DNA
gccctgctgcagaagggggaccacgtgtggatggacctgcggctgggccaggagtttgatgtgcccatcggggctgtggtgaagctgtgtgacagcggccaggtgcaggtggtggatgatgaagataatgagcactggatcagcccccagaatgccacccacatcaagcccatgcaccccacctctgtgcacggcgtggaggacatgatccggctgggggacctgaatgaggccggcatcctgaggaacctgctgatccgctacagagaccacctgatctacacctacacaggcagcatcctggtggccgtgaacccctaccagctgctgagcatctacagccctgagcacatccggcagtacaccaacaagaagatcggggagatgccaccccacatctttgccatcgctgacaactgctacttcaacatgaagaggaacagccgggaccagtgctgcatcatcagcggggagagcggggccggcaagacagagagcaccaagctgatcctgcagttcctggccgccatcagcggccagcacagctggattgagcagcaggtgctggaggccacccccatcctggaggcctttggaaatgccaagaccatcagaaatgacaacagcagcagatttgggaagtacatcgacatccacttcaacaagagaggagccatcgagggcgccaagattgagcagtacctgctggagaagagccgggtgtgccggcaggccctggatgaaagaaactaccacgtgttctactgcatgctggagggcatgtctgaggaccagaagaagaagctgggcctgggccaggccagtgactacaactacctggccatgggcaactgcatcacctgtgagggccgggtggacagccaggagtatgccaacatccgcagcgccatgaaggtgctgatgttcacagacacagagaactgggagatcagcaagctgctggccgccatcctgcacctgggcaacctgcagtatgaggcccggacctttgagaacctggatgcctgtgaggtgctcttcagccccagcctggccacagctgccagcctgctggaggtgaaccccccagacctgatgagctgcctgaccagcaggaccctcatcaccagaggagagaccgtgtccacccccctgagccgggagcaggccctggatgtgagagatgcctttgtgaagggcatctacggccgcctgtttgtgtggatcgtggacaagatcaatgctgccatctacaagccacccagccaggatgtgaagaacagcagaagaagcatcggcctgctggacatcttcggctttgaaaattttgctgtgaacagctttgagcagctgtgcatcaactttgccaatgagcacctgcagcagttctttgtgagacatgtgttcaagctggagcaggaggagtatgacctggagagcattgactggctgcacatcgagttcacagacaaccaggatgccctggacatgattgccaacaagcccatgaacatcatcagcctgattgatgaggagagcaagttccccaagggcacagacaccaccatgctgcacaagctgaacagccagcacaagctgaatgccaactacatcccccccaagaacaaccacgagacccagtttggcatcaaccactttgctggcatcgtgtactatgagacccagggcttcctggagaagaacagagacaccctgcatggagacatcatccagctggtgcacagcagcaggaacaagttcatcaagcagatcttccaggctgatgtggccatgggcgctgagaccaggaagaggagccccaccctgagcagccagttcaagaggagcctggagctgctgatgaggaccctgggcgcctgccagcccttctttgtgcgctgcatcaagcccaatgagttcaagaagcccatgctgtttgacagacacctgtgtgtgcggcagctgcgctacagcggcatgatggagaccatccgcatcagaagagctggctaccccatccgctacagctttgtggagtttgtggagcgctacagagtgctgctgcccggggtgaagccagcctacaagcagggcgacctgcggggcacctgccagaggatggccgaggccgtgctgggcacccatgatgactggcagatcggcaagaccaagatcttcctgaaggaccaccacgacatgctgctggaggtggagcgggacaaggccatcacagacagagtcatcctgctgcagaaggtgatccggggcttcaaggacaggagcaacttcctgaagctgaagaatgctgccaccctcatccagaggcactggaggggccacaactgcaggaagaactacggcctgatgaggctgggcttcctgcggctgcaggccctgcacaggagcaggaagctgcaccagcagtaccgcctggcccggcagaggatcatccagttccaggcccgctgccgggcctacctggtgaggaaggccttccgccaccggctgtgggccgtgctgactgtgcaggcctatgcccggggcatgattgcccggcggctgcaccagaggctgcgggcagagtacctgtggaggctggaggccgagaagatgaggctggccgaggaggagaagctgaggaaggagatgtctgccaagaaggccaaggaggaggccgagaggaagcaccaggagcggctggcccagctggcccgggaggatgctgagcgggagctgaaggagaaggaggccgcccggaggaagaaggagctgctggagcagatggagcgggcccggcatgagcctgtgaaccacagcgacatggtggacaagatgtttggcttcctgggcaccagcggcggcctgcccggccaggagggccaggcccccagcggctttgaggacctggagcggggcagaagagagatggtggaggaggacctggatgctgccctgcccctgcctgatgaagatgaggaggacctgtctgagtacaagtttgccaagtttgctgccacctacttccagggcaccaccacccacagctacacccggcggcccctgaagcagcccctgctgtaccatgatgatgaaggagaccagctggccgccctggccgtgtggatcaccatcctgcgcttcatgggagacctgcctgagcccaagtaccacacagccatgtctgatggcagcgagaagatccctgtgatgaccaagatctatgagaccctgggcaagaagacctacaagcgggagctgcaggccctgcagggcgagggggaggcccagctgcctgagggccagaagaagagctctgtgcgccacaagctggtgcacctgaccctgaagaagaagagcaagctgacagaggaggtgaccaagaggctgcatgatggagagagcacagtgcagggcaacagcatgctggaggaccggcccaccagcaacctggagaagctgcacttcatcattggaaatggcatcctgcggcctgccctgagagatgagatctactgccagatcagcaagcagctgacccacaaccccagcaagagcagctatgcccggggctggatcctggtgtccctgtgtgtgggctgctttgcccccagcgagaagtttgtgaagtacctgaggaacttcatccacggcggccccccaggctacgccccctactgtgaggagcggctgcggaggacctttgtgaatggcaccaggacccagccccccagctggctggagctgcaggccaccaagagcaagaagcccatcatgctgcctgtgaccttcatggatggcaccaccaagaccctgctgacagattctgccaccacagccaaggagctgtgcaatgccctggccgacaagatcagcctgaaggaccgcttcggcttcagcctgtacatcgccctgtttgacaaggtgagcagcctgggcagcggcagtgaccacgtgatggatgccatcagccagtgtgagcagtatgccaaggagcagggcgcccaggagagaaatgccccctggaggctcttcttcaggaaggaggtgttcaccccctggcacagccccagcgaggacaacgtggccaccaacctgatctaccagcaggtggtgcggggcgtgaagtttggagagtaccgctgtgagaaggaggatgacctggccgagctggccagccagcagtactttgtggactatggcagcgagatgatcctggagcggctgctgaacctggtgcccacctacatcccagaccgggagatcacccccctgaagaccctggagaagtgggcccagctggccatcgccgcccacaagaagggcatctatgcccagaggagaacagatgcccagaaggtgaaggaggatgtggtgtcctatgcccgcttcaagtggcccctgctcttcagccgcttctatgaggcctacaagttcagcggccccagcctgcccaagaatgatgtgattgtggccgtgaactggacaggagtgtactttgtggatgagcaggagcaggtgctgctggagctgtccttccctgagatcatggctgtgagcagcagcagagaatgtcgggtgtggctgagcctgggctgcagcgacctgggctgtgccgccccccacagcggctgggccggcctgaccccagctggcccctgcagcccctgctggagctgccgcggggccaagaccacagcccccagcttcaccctggccaccatcaagggagatgagtacaccttcaccagcagcaatgctgaggacatccgggacctggtggtgaccttcctggagggcctgaggaagaggagcaaatatgtggtggccctgcaggacaaccccaacccagctggggaggagagcggcttcctgagctttgccaagggggacctgatcatcctggaccatgacaccggggagcaggtgatgaacagcggctgggccaacggcatcaatgaaagaaccaagcagagaggagacttccccacagattctgtgtatgtgatgcccaccgtgaccatgccaccccgggagatcgtggccctggtgaccatgaccccagaccagaggcaggatgtggtgcggctgctgcagctgaggacagctgagcctgaggtgcgggccaagccctacaccctggaggagttctcctatgactacttccggcccccacccaagcacaccctgagccgggtgatggtgtccaaggcccggggcaaggaccggctgtggagccacacccgggagcccctgaagcaggccctgctgaagaagctgctgggcagcgaggagctgagccaggaggcctgcctggccttcatcgctgtgctgaagtacatgggagactaccccagcaagaggaccaggtctgtgaatgagctgacagaccagatctttgagggccccctgaaggccgagcccctgaaggatgaggcctacgtgcagatcctgaagcagctgacagacaaccacatccgctacagcgaggagcggggctgggagctgctgtggctgtgcaccggcctcttcccccccagcaacatcctgctgccccacgtgcagcgcttcctgcagagcaggaagcactgccccctggccatcgactgcctgcagaggctgcagaaggccctgagaaatggcagcaggaagtacccaccccacctggtggaggtggaggccatccagcacaagaccacccagatcttccacaaggtgtacttcccagatgacacagatgaggcctttgaggtggagagcagcaccaaggccaaggacttctgccagaacatcgccacccggctgctgctgaagagcagcgagggcttcagcctgtttgtgaagattgctgacaaggtgctgtctgtgcctgaaaatgacttcttctttgattttgtgcgccacctgacagactggatcaagaaggcccggcccatcaaggatggcatcgtgcccagcctgacctaccaggtgttcttcatgaagaagctgtggaccaccaccgtgcctgggaaggaccccatggctgacagcatcttccactactaccaggagctgcccaagtacctgcggggctaccacaagtgcacccgggaggaggtgctgcagctgggcgccctgatctacagagtgaagtttgaggaggacaagagctacttccccagcatccccaagctgctgcgggagctggtgccccaggacctgatccggcaggtgtccccagatgactggaagaggagcatcgtggcctacttcaacaagcacgccggcaagagcaaggaggaggccaagctggccttcctgaagctgatcttcaagtggcccacctttggaagtgccttctttgaggtgaagcagaccacagagcccaacttccctgagatcctgctgattgccatcaacaagtatggagtgtccctgattgaccccaagaccaaggacatcctgaccacccaccccttcaccaagatcagcaactggagcagcggcaacacctacttccacatcaccatcggcaacctggtgcggggcagcaagctgctgtgtgagaccagcctgggctacaagatggatgacctgctgaccagctacatcagccagatgctgacagccatgagcaagcagaggggcagccgcagcggcaagtag

SEQ ID NO: 160855 - DNA, 6648 bp, synthetic construct
  misc_feature 1..6648: note = Description of Artificial Sequence: Synthetic coding sequence
  source 1..6648: mol_type = other DNA
atggtgatcctgcagcagggcgaccacgtgtggatggacctgcggctgggccaggagtttgatgtgcccatcggggctgtggtgaagctgtgtgacagcggccaggtgcaggtggtggatgatgaggacaatgagcactggatcagcccccagaatgccacccacatcaagcccatgcaccccacctctgtgcatggagtggaggacatgatccggctgggggacctgaatgaagctggcatcctgaggaacctgctgatccgctacagagaccacctgatctacacctacacaggcagcatcctggtggccgtgaacccctaccagctgctgagcatctacagccctgagcacatccggcagtacaccaacaagaagattggagagatgccaccccacatctttgccatcgctgacaactgctacttcaacatgaagaggaacagccgggaccagtgctgcatcatctctggagagagcggggccggcaagacagagagcaccaagctgatcctgcagttcctggccgccatcagcggccagcacagctggattgagcagcaggtgctggaggccacccccatcctggaggcctttggaaatgccaagaccatcagaaatgacaacagcagcagatttgggaagtacatcgacatccacttcaacaagagaggagccattgaaggagccaagattgagcagtacctgctggagaagagccgggtgtgccggcaggccctggatgagaggaactaccacgtgttctactgcatgctggagggcatgtctgaggaccagaagaagaagctgggcctgggccaggccagtgactacaactacctggccatgggcaactgcatcacctgtgagggccgggtggacagccaggagtatgccaacatccgcagcgccatgaaggtgctgatgttcacagacacagagaactgggagatcagcaagctgctggccgccatcctgcacctgggcaacctgcagtatgaggcccggacctttgagaacctggatgcctgtgaggtgctcttcagccccagcctggccacagctgccagcctgctggaggtgaaccccccagacctgatgagctgcctgaccagcaggaccctcatcaccagaggagaaacagtgtccacccccctgagccgggagcaggccctggatgtgagagatgcctttgtgaagggcatctacggccgcctgtttgtgtggatcgtggacaagatcaatgctgccatctacaagccacccagccaggatgtgaagaacagccgccgcagcatcggcctgctggacatctttggatttgagaactttgctgtgaacagctttgagcagctgtgcatcaactttgccaatgagcacctgcagcagttctttgtgcgccacgtgttcaagctggagcaggaggagtatgacctggagagcattgactggctgcacatcgagttcacagacaaccaggatgccctggacatgattgccaacaagcccatgaacatcatcagcctgattgatgaggagagcaagttccccaagggcacagacaccaccatgctgcacaagctgaacagccagcacaagctgaatgccaactacatcccccccaagaacaaccacgagacccagtttggcatcaaccactttgctggcatcgtgtactatgagacccagggcttcctggagaagaacagagacaccctgcacggggacatcatccagctggtgcacagcagcaggaacaagttcatcaagcagatcttccaggctgatgtggccatgggcgctgagaccaggaagaggagccccaccctgagcagccagttcaagaggagcctggagctgctgatgaggaccctgggcgcctgccagcccttctttgtgcgctgcatcaagcccaatgagttcaagaagcccatgctgtttgacagacacctgtgtgtgcggcagctgcgctacagcggcatgatggagaccatccgcatccggcgggccggctaccccatccgctacagctttgtggagtttgtggagcgctacagagtgctgctgcccggggtgaagccagcctacaagcagggcgacctgcggggcacctgccagaggatggccgaggccgtgctgggcacccatgatgactggcagatcggcaagaccaagatcttcctgaaggaccaccacgacatgctgctggaggtggagcgggacaaggccatcacagacagagtcatcctgctgcagaaggtgatccggggcttcaaggacaggagcaacttcctgaagctgaagaatgctgccaccctcatccagaggcactggaggggccacaactgcaggaagaactacggcctgatgaggctgggcttcctgcggctgcaggccctgcacaggagcaggaagctgcaccagcagtaccgcctggcccggcagaggatcatccagttccaggcccgctgccgggcctacctggtgaggaaggccttccgccaccggctgtgggccgtgctgactgtgcaggcctatgcccggggcatgattgcccggcggctgcaccagaggctgcgggcagagtacctgtggaggctggaggccgagaagatgaggctggccgaggaggagaagctgaggaaggagatgtctgccaagaaggccaaggaggaggccgagaggaagcaccaggagcggctggcccagctggccagagaagatgctgagcgggagctgaaggagaaggaggccgcccggaggaagaaggagctgctggagcagatggagcgggcccggcatgagcctgtgaaccacagcgacatggtggacaagatgtttggcttcctgggcaccagcggcggcctgcccggccaggagggccaggcccccagcggctttgaggacctggagcggggccggcgggagatggtggaggaggacctggatgctgccctgcccctgcctgatgaagatgaggaggacctgtctgagtacaagtttgccaagtttgctgccacctacttccagggcaccaccacccacagctacacccggcggcccctgaagcagcccctgctgtaccatgatgatgaaggagaccagctggccgccctggccgtgtggatcaccatcctgcgcttcatgggagacctgcctgagcccaagtaccacacagccatgtctgatggcagcgagaagatccctgtgatgaccaagatctatgagaccctgggcaagaagacctacaagcgggagctgcaggccctgcagggcgagggggaggcccagctgcctgagggccagaagaagagctctgtgcgccacaagctggtgcacctgaccctgaagaagaagagcaagctgacagaggaggtgaccaagaggctgcatgatggagagagcacagtgcagggcaacagcatgctggaggaccggcccaccagcaacctggagaagctgcacttcatcattggaaatggcatcctgcggcctgccctgagagatgagatctactgccagatcagcaagcagctgacccacaaccccagcaagagcagctatgcccggggctggatcctggtgtccctgtgtgtgggctgctttgcccccagcgagaagtttgtgaagtacctgaggaacttcatccatggaggccccccaggctacgccccctactgtgaggagcggctgcggaggacctttgtgaatggcaccaggacccagcccccatcctggctggagctgcaggccaccaagagcaagaagcccatcatgctgcctgtgaccttcatggatggcaccaccaagaccctgctgacagacagcgccaccacagccaaggagctgtgcaatgccctggccgacaagatcagcctgaaggacagatttggcttcagcctgtacatcgccctgtttgacaaggtgagcagcctgggcagcggcagtgaccacgtgatggatgccatcagccagtgtgagcagtatgccaaggagcagggcgcccaggagagaaatgccccctggaggctcttcttcaggaaggaggtgttcaccccctggcacagccccagtgaagataatgtggccaccaacctgatctaccagcaggtggtgcggggcgtgaagtttggagagtaccgctgtgagaaggaggatgacctggccgagctggccagccagcagtactttgtggactatggcagcgagatgatcctggagcggctgctgaacctggtgcccacctacatcccagaccgggagatcacccccctgaagaccctggagaagtgggcccagctggccatcgccgcccacaagaagggcatctatgcccagaggagaacagatgcccagaaggtgaaggaggatgtggtgtcctatgcccgcttcaagtggcccctgctcttcagccgcttctatgaggcctacaagttcagcggccccagcctgcccaagaatgatgtgattgtggccgtgaactggacaggagtgtactttgtggatgagcaggagcaggtgctgctggagctgtccttccctgagatcatggctgtgagcagcagccgggagtgccgggtgtggctgagcctgggctgcagcgacctgggctgtgccgccccccacagcggctgggccggcctgaccccagctggcccctgcagcccctgctggagctgccgcggggccaagaccacagcccccagcttcaccctggccaccatcaagggagatgagtacaccttcaccagcagcaatgctgaggacatccgggacctggtggtgaccttcctggagggcctgaggaagaggagcaaatatgtggtggccctgcaggacaaccccaacccagctggggaggagagcggcttcctgagctttgccaagggggacctgatcatcctggaccatgacacaggagagcaggtgatgaacagcggctgggccaacggcatcaatgaaagaaccaagcagagaggagacttccccacagacagcgtgtatgtgatgcccaccgtgaccatgccaccccgggagatcgtggccctggtgaccatgaccccagaccagaggcaggatgtggtgcggctgctgcagctgaggacagctgagcctgaggtgcgggccaagccctacaccctggaggagttctcctatgactacttccggcccccacccaagcacaccctgagccgggtgatggtgtccaaggcccggggcaaggaccggctgtggagccacacccgggagcccctgaagcaggccctgctgaagaagctgctgggcagcgaggagctgagccaggaggcctgcctggccttcatcgctgtgctgaagtacatgggagactaccccagcaagaggaccaggtctgtgaatgagctgacagaccagatctttgagggccccctgaaggccgagcccctgaaggatgaggcctacgtgcagatcctgaagcagctgacagacaaccacatccgctacagcgaggagcggggctgggagctgctgtggctgtgcaccggcctcttcccccccagcaacatcctgctgccccacgtgcagcgcttcctgcagagcaggaagcactgccccctggccatcgactgcctgcagaggctgcagaaggccctgagaaatggcagcaggaagtacccaccccacctggtggaggtggaggccatccagcacaagaccacccagatcttccacaaggtgtacttcccagatgacacagatgaggcctttgaggtggagagcagcaccaaggccaaggacttctgccagaacatcgccacccggctgctgctgaagagcagcgagggcttcagcctgtttgtgaagattgctgacaaggtgctgtctgtgcctgaaaatgacttcttctttgattttgtgcgccacctgacagactggatcaagaaggcccggcccatcaaggatggcatcgtgcccagcctgacctaccaggtgttcttcatgaagaagctgtggaccaccaccgtgcctgggaaggaccccatggctgacagcatcttccactactaccaggagctgcccaagtacctgcggggctaccacaagtgcacccgggaggaggtgctgcagctgggcgccctgatctacagagtgaagtttgaggaggacaagagctacttccccagcatccccaagctgctgcgggagctggtgccccaggacctgatccggcaggtgtccccagatgactggaagaggagcatcgtggcctacttcaacaagcatgctgggaagagcaaggaggaggccaagctggccttcctgaagctgatcttcaagtggcccaccttcggcagcgccttctttgaggtgaagcagaccacagagcccaacttccctgagatcctgctgattgccatcaacaagtatggagtgtccctgattgaccccaagaccaaggacatcctgaccacccaccccttcaccaagatcagcaactggagcagcggcaacacctacttccacatcaccatcggcaacctggtgcggggcagcaagctgctgtgtgagaccagcctgggctacaagatggatgacctgctgaccagctacatcagccagatgctgacagccatgagcaagcagaggggcagccgcagcggcaagtag

SEQ ID NO: 160856 - DNA, 3537 bp, synthetic construct
  misc_feature 1..3537: note = Description of Artificial Sequence: Synthetic coding sequence
  source 1..3537: mol_type = other DNA
atggtgatcctgcagcagggcgaccacgtgtggatggacctgcggctgggccaggagtttgatgtgcccatcggggctgtggtgaagctgtgtgacagcggccaggtgcaggtggtggatgatgaggacaatgagcactggatcagcccccagaatgccacccacatcaagcccatgcaccccacctctgtgcatggagtggaggacatgatccggctgggggacctgaatgaagctggcatcctgaggaacctgctgatccgctacagagaccacctgatctacacctacacaggcagcatcctggtggccgtgaacccctaccagctgctgagcatctacagccctgagcacatccggcagtacaccaacaagaagattggagagatgccaccccacatctttgccatcgctgacaactgctacttcaacatgaagaggaacagccgggaccagtgctgcatcatctctggagagagcggggccggcaagacagagagcaccaagctgatcctgcagttcctggccgccatcagcggccagcacagctggattgagcagcaggtgctggaggccacccccatcctggaggcctttggaaatgccaagaccatcagaaatgacaacagcagcagatttgggaagtacatcgacatccacttcaacaagagaggagccattgaaggagccaagattgagcagtacctgctggagaagagccgggtgtgccggcaggccctggatgagaggaactaccacgtgttctactgcatgctggagggcatgtctgaggaccagaagaagaagctgggcctgggccaggccagtgactacaactacctggccatgggcaactgcatcacctgtgagggccgggtggacagccaggagtatgccaacatccgcagcgccatgaaggtgctgatgttcacagacacagagaactgggagatcagcaagctgctggccgccatcctgcacctgggcaacctgcagtatgaggcccggacctttgagaacctggatgcctgtgaggtgctcttcagccccagcctggccacagctgccagcctgctggaggtgaaccccccagacctgatgagctgcctgaccagcaggaccctcatcaccagaggagaaacagtgtccacccccctgagccgggagcaggccctggatgtgagagatgcctttgtgaagggcatctacggccgcctgtttgtgtggatcgtggacaagatcaatgctgccatctacaagccacccagccaggatgtgaagaacagccgccgcagcatcggcctgctggacatctttggatttgagaactttgctgtgaacagctttgagcagctgtgcatcaactttgccaatgagcacctgcagcagttctttgtgcgccacgtgttcaagctggagcaggaggagtatgacctggagagcattgactggctgcacatcgagttcacagacaaccaggatgccctggacatgattgccaacaagcccatgaacatcatcagcctgattgatgaggagagcaagttccccaagggcacagacaccaccatgctgcacaagctgaacagccagcacaagctgaatgccaactacatcccccccaagaacaaccacgagacccagtttggcatcaaccactttgctggcatcgtgtactatgagacccagggcttcctggagaagaacagagacaccctgcacggggacatcatccagctggtgcacagcagcaggaacaagttcatcaagcagatcttccaggctgatgtggccatgggcgctgagaccaggaagaggagccccaccctgagcagccagttcaagaggagcctggagctgctgatgaggaccctgggcgcctgccagcccttctttgtgcgctgcatcaagcccaatgagttcaagaagcccatgctgtttgacagacacctgtgtgtgcggcagctgcgctacagcggcatgatggagaccatccgcatccggcgggccggctaccccatccgctacagctttgtggagtttgtggagcgctacagagtgctgctgcccggggtgaagccagcctacaagcagggcgacctgcggggcacctgccagaggatggccgaggccgtgctgggcacccatgatgactggcagatcggcaagaccaagatcttcctgaaggaccaccacgacatgctgctggaggtggagcgggacaaggccatcacagacagagtcatcctgctgcagaaggtgatccggggcttcaaggacaggagcaacttcctgaagctgaagaatgctgccaccctcatccagaggcactggaggggccacaactgcaggaagaactacggcctgatgaggctgggcttcctgcggctgcaggccctgcacaggagcaggaagctgcaccagcagtaccgcctggcccggcagaggatcatccagttccaggcccgctgccgggcctacctggtgaggaaggccttccgccaccggctgtgggccgtgctgactgtgcaggcctatgcccggggcatgattgcccggcggctgcaccagaggctgcgggcagagtacctgtggaggctggaggccgagaagatgaggctggccgaggaggagaagctgaggaaggagatgtctgccaagaaggccaaggaggaggccgagaggaagcaccaggagcggctggcccagctggccagagaagatgctgagcgggagctgaaggagaaggaggccgcccggaggaagaaggagctgctggagcagatggagcgggcccggcatgagcctgtgaaccacagcgacatggtggacaagatgtttggcttcctgggcaccagcggcggcctgcccggccaggagggccaggcccccagcggctttgaggacctggagcggggccggcgggagatggtggaggaggacctggatgctgccctgcccctgcctgatgaagatgaggaggacctgtctgagtacaagtttgccaagtttgctgccacctacttccagggcaccaccacccacagctacacccggcggcccctgaagcagcccctgctgtaccatgatgatgaaggagaccagctggccgccctggccgtgtggatcaccatcctgcgcttcatgggagacctgcctgagcccaagtaccacacagccatgtctgatggcagcgagaagatccctgtgatgaccaagatctatgagaccctgggcaagaagacctacaagcgggagctgcaggccctgcagggcgagggggaggcccagctgcctgagggccagaagaagagctctgtgcgccacaagctggtgcacctgaccctgaagaagaagagcaagctgacagaggaggtgaccaagaggctgcatgatggagagagcacagtgcagggcaacagcatgctggaggaccggcccaccagcaacctggagaagctgcacttcatcattggaaatggcatcctgcggcctgccctgcggtctgtgcctgggggcggggacacccgggcctag

SEQ ID NO: 160857 - DNA, 6528 bp, synthetic construct
  misc_feature 1..6528: note = Description of Artificial Sequence: Synthetic coding sequence
  source 1..6528: mol_type = other DNA
atggtgatcctgcagcagggcgaccacgtgtggatggacctgcggctgggccaggagtttgatgtgcccatcggggctgtggtgaagctgtgtgacagcggccaggtgcaggtggtggatgatgaggacaatgagcactggatcagcccccagaatgccacccacatcaagcccatgcaccccacctctgtgcatggagtggaggacatgatccggctgggggacctgaatgaagctggcatcctgaggaacctgctgatccgctacagagaccacctgatctacacctacacaggcagcatcctggtggccgtgaacccctaccagctgctgagcatctacagccctgagcacatccggcagtacaccaacaagaagattggagagatgccaccccacatctttgccatcgctgacaactgctacttcaacatgaagaggaacagccgggaccagtgctgcatcatctctggagagagcggggccggcaagacagagagcaccaagctgatcctgcagttcctggccgccatcagcggccagcacagctggattgagcagcaggtgctggaggccacccccatcctggaggcctttggaaatgccaagaccatcagaaatgacaacagcagcagatttgggaagtacatcgacatccacttcaacaagagaggagccattgaaggagccaagattgagcagtacctgctggagaagagccgggtgtgccggcaggccctggatgagaggaactaccacgtgttctactgcatgctggagggcatgtctgaggaccagaagaagaagctgggcctgggccaggccagtgactacaactacctggccatgggcaactgcatcacctgtgagggccgggtggacagccaggagtatgccaacatccgcagcgccatgaaggtgctgatgttcacagacacagagaactgggagatcagcaagctgctggccgccatcctgcacctgggcaacctgcagtatgaggcccggacctttgagaacctggatgcctgtgaggtgctcttcagccccagcctggccacagctgccagcctgctggaggtgaaccccccagacctgatgagctgcctgaccagcaggaccctcatcaccagaggagaaacagtgtccacccccctgagccgggagcaggccctggatgtgagagatgcctttgtgaagggcatctacggccgcctgtttgtgtggatcgtggacaagatcaatgctgccatctacaagccacccagccaggatgtgaagaacagccgccgcagcatcggcctgctggacatctttggatttgagaactttgctgtgaacagctttgagcagctgtgcatcaactttgccaatgagcacctgcagcagttctttgtgcgccacgtgttcaagctggagcaggaggagtatgacctggagagcattgactggctgcacatcgagttcacagacaaccaggatgccctggacatgattgccaacaagcccatgaacatcatcagcctgattgatgaggagagcaagttccccaagggcacagacaccaccatgctgcacaagctgaacagccagcacaagctgaatgccaactacatcccccccaagaacaaccacgagacccagtttggcatcaaccactttgctggcatcgtgtactatgagacccagggcttcctggagaagaacagagacaccctgcacggggacatcatccagctggtgcacagcagcaggaacaagttcatcaagcagatcttccaggctgatgtggccatgggcgctgagaccaggaagaggagccccaccctgagcagccagttcaagaggagcctggagctgctgatgaggaccctgggcgcctgccagcccttctttgtgcgctgcatcaagcccaatgagttcaagaagcccatgctgtttgacagacacctgtgtgtgcggcagctgcgctacagcggcatgatggagaccatccgcatccggcgggccggctaccccatccgctacagctttgtggagtttgtggagcgctacagagtgctgctgcccggggtgaagccagcctacaagcagggcgacctgcggggcacctgccagaggatggccgaggccgtgctgggcacccatgatgactggcagatcggcaagaccaagatcttcctgaaggaccaccacgacatgctgctggaggtggagcgggacaaggccatcacagacagagtcatcctgctgcagaaggtgatccggggcttcaaggacaggagcaacttcctgaagctgaagaatgctgccaccctcatccagaggcactggaggggccacaactgcaggaagaactacggcctgatgaggctgggcttcctgcggctgcaggccctgcacaggagcaggaagctgcaccagcagtaccgcctggcccggcagaggatcatccagttccaggcccgctgccgggcctacctggtgaggaaggccttccgccaccggctgtgggccgtgctgactgtgcaggcctatgcccggggcatgattgcccggcggctgcaccagaggctgcgggcagagtacctgtggaggctggaggccgagaagatgaggctggccgaggaggagaagctgaggaaggagatgtctgccaagaaggccaaggaggaggccgagaggaagcaccaggagcggctggcccagctggccagagaagatgctgagcgggagctgaaggagaaggaggccgcccggaggaagaaggagctgctggagcagatggagcgggcccggcatgagcctgtgaaccacagcgacatggtggacaagatgtttggcttcctgggcaccagcggcggcctgcccggccaggagggccaggcccccagcggctttgaggacctggagcggggccggcgggagatggtggaggaggacctggatgctgccctgcccctgcctgatgaagatgaggaggacctgtctgagtacaagtttgccaagtttgctgccacctacttccagggcaccaccacccacagctacacccggcggcccctgaagcagcccctgctgtaccatgatgatgaaggagaccagctggccgccctggccgtgtggatcaccatcctgcgcttcatgggagacctgcctgagcccaagtaccacacagccatgtctgatggcagcgagaagatccctgtgatgaccaagatctatgagaccctgggcaagaagacctacaagcgggagctgcaggccctgcagggcgagggggaggcccagctgcctgagggccagaagaagagctctgtgcgccacaagctggtgcacctgaccctgaagaagaagagcaagctgacagaggaggtgaccaagaggctgcatgatggagagagcacagtgcagggcaacagcatgctggaggaccggcccaccagcaacctggagaagctgcacttcatcattggaaatggcatcctgcggcctgccctgagagatgagatctactgccagatcagcaagcagctgacccacaaccccagcaagagcagctatgcccggggctggatcctggtgtccctgtgtgtgggctgctttgcccccagcgagaagtttgtgaagtacctgaggaacttcatccatggaggccccccaggctacgccccctactgtgaggagcggctgcggaggacctttgtgaatggcaccaggacccagcccccatcctggctggagctgcaggccaccaagagcaagaagcccatcatgctgcctgtgaccttcatggatggcaccaccaagaccctgctgacagacagcgccaccacagccaaggagctgtgcaatgccctggccgacaagatcagcctgaaggacagatttggcttcagcctgtacatcgccctgtttgacaaggtgagcagcctgggcagcggcagtgaccacgtgatggatgccatcagccagtgtgagcagtatgccaaggagcagggcgcccaggagagaaatgccccctggaggctcttcttcaggaaggaggtgttcaccccctggcacagccccagtgaagataatgtggccaccaacctgatctaccagcaggtggtgcggggcgtgaagtttggagagtaccgctgtgagaaggaggatgacctggccgagctggccagccagcagtactttgtggactatggcagcgagatgatcctggagcggctgctgaacctggtgcccacctacatcccagaccgggagatcacccccctgaagaccctggagaagtgggcccagctggccatcgccgcccacaagaagggcatctatgcccagaggagaacagatgcccagaaggtgaaggaggatgtggtgtcctatgcccgcttcaagtggcccctgctcttcagccgcttctatgaggcctacaagttcagcggccccagcctgcccaagaatgatgtgattgtggccgtgaactggacaggagtgtactttgtggatgagcaggagcaggtgctgctggagctgtccttccctgagatcatggctgtgagcagcagcagaggagccaagaccacagcccccagcttcaccctggccaccatcaagggagatgagtacaccttcaccagcagcaatgctgaggacatccgggacctggtggtgaccttcctggagggcctgaggaagaggagcaaatatgtggtggccctgcaggacaaccccaacccagctggggaggagagcggcttcctgagctttgccaagggggacctgatcatcctggaccatgacacaggagagcaggtgatgaacagcggctgggccaacggcatcaatgaaagaaccaagcagagaggagacttccccacagacagcgtgtatgtgatgcccaccgtgaccatgccaccccgggagatcgtggccctggtgaccatgaccccagaccagaggcaggatgtggtgcggctgctgcagctgaggacagctgagcctgaggtgcgggccaagccctacaccctggaggagttctcctatgactacttccggcccccacccaagcacaccctgagccgggtgatggtgtccaaggcccggggcaaggaccggctgtggagccacacccgggagcccctgaagcaggccctgctgaagaagctgctgggcagcgaggagctgagccaggaggcctgcctggccttcatcgctgtgctgaagtacatgggagactaccccagcaagaggaccaggtctgtgaatgagctgacagaccagatctttgagggccccctgaaggccgagcccctgaaggatgaggcctacgtgcagatcctgaagcagctgacagacaaccacatccgctacagcgaggagcggggctgggagctgctgtggctgtgcaccggcctcttcccccccagcaacatcctgctgccccacgtgcagcgcttcctgcagagcaggaagcactgccccctggccatcgactgcctgcagaggctgcagaaggccctgagaaatggcagcaggaagtacccaccccacctggtggaggtggaggccatccagcacaagaccacccagatcttccacaaggtgtacttcccagatgacacagatgaggcctttgaggtggagagcagcaccaaggccaaggacttctgccagaacatcgccacccggctgctgctgaagagcagcgagggcttcagcctgtttgtgaagattgctgacaaggtgctgtctgtgcctgaaaatgacttcttctttgattttgtgcgccacctgacagactggatcaagaaggcccggcccatcaaggatggcatcgtgcccagcctgacctaccaggtgttcttcatgaagaagctgtggaccaccaccgtgcctgggaaggaccccatggctgacagcatcttccactactaccaggagctgcccaagtacctgcggggctaccacaagtgcacccgggaggaggtgctgcagctgggcgccctgatctacagagtgaagtttgaggaggacaagagctacttccccagcatccccaagctgctgcgggagctggtgccccaggacctgatccggcaggtgtccccagatgactggaagaggagcatcgtggcctacttcaacaagcatgctgggaagagcaaggaggaggccaagctggccttcctgaagctgatcttcaagtggcccaccttcggcagcgccttctttgagcagaccacagagcccaacttccctgagatcctgctgattgccatcaacaagtatggagtgtccctgattgaccccaagaccaaggacatcctgaccacccaccccttcaccaagatcagcaactggagcagcggcaacacctacttccacatcaccatcggcaacctggtgcggggcagcaagctgctgtgtgagaccagcctgggctacaagatggatgacctgctgaccagctacatcagccagatgctgacagccatgagcaagcagaggggcagccgcagcggcaagtag

SEQ ID NO: 160858 - DNA, 2532 bp, synthetic construct
  misc_feature 1..2532: note = Description of Artificial Sequence: Synthetic coding sequence
  source 1..2532: mol_type = other DNA
ggcctgtctgtgcagtggctgctggatggcctggcctgcttctttgccagcctgcacgtgcccctgggccgggtgcagctgcacgccagcgcccggggcatccaggagaaggaggatgacctggccgagctggccagccagcagtactttgtggactatggcagcgagatgatcctggagcggctgctgaacctggtgcccacctacatcccagaccgggagatcacccccctgaagaccctggagaagtgggcccagctggccatcgccgcccacaagaagggcatctatgcccagaggagaacagatgcccagaaggtgaaggaggatgtggtgtcctatgcccgcttcaagtggcccctgctcttcagccgcttctatgaggcctacaagttcagcggccccagcctgcccaagaatgatgtgattgtggccgtgaactggacaggagtgtactttgtggatgagcaggagcaggtgctgctggagctgtccttccctgagatcatggctgtgagcagcagcagaggagccaagaccacagcccccagcttcaccctggccaccatcaagggagatgagtacaccttcaccagcagcaatgctgaggacatccgggacctggtggtgaccttcctggagggcctgaggaagaggagcaaatatgtggtggccctgcaggacaaccccaacccagctggggaggagagcggcttcctgagctttgccaagggggacctgatcatcctggaccatgacaccggggagcaggtgatgaacagcggctgggccaacggcatcaatgaaagaaccaagcagagaggagacttccccacagattctgtgtatgtgatgcccaccgtgaccatgccaccccgggagatcgtggccctggtgaccatgaccccagaccagaggcaggatgtggtgcggctgctgcagctgaggacagctgagcctgaggtgcgggccaagccctacaccctggaggagttctcctatgactacttccggcccccacccaagcacaccctgagccgggtgatggtgtccaaggcccggggcaaggaccggctgtggagccacacccgggagcccctgaagcaggccctgctgaagaagctgctgggcagcgaggagctgagccaggaggcctgcctggccttcatcgctgtgctgaagtacatgggagactaccccagcaagaggaccaggtctgtgaatgagctgacagaccagatctttgagggccccctgaaggccgagcccctgaaggatgaggcctacgtgcagatcctgaagcagctgacagacaaccacatccgctacagcgaggagcggggctgggagctgctgtggctgtgcaccggcctcttcccccccagcaacatcctgctgccccacgtgcagcgcttcctgcagagcaggaagcactgccccctggccatcgactgcctgcagaggctgcagaaggccctgagaaatggcagcaggaagtacccaccccacctggtggaggtggaggccatccagcacaagaccacccagatcttccacaaggtgtacttcccagatgacacagatgaggcctttgaggtggagagcagcaccaaggccaaggacttctgccagaacatcgccacccggctgctgctgaagagcagcgagggcttcagcctgtttgtgaagattgctgacaaggtgctgtctgtgcctgaaaatgacttcttctttgattttgtgcgccacctgacagactggatcaagaaggcccggcccatcaaggatggcatcgtgcccagcctgacctaccaggtgttcttcatgaagaagctgtggaccaccaccgtgcctgggaaggaccccatggctgacagcatcttccactactaccaggagctgcccaagtacctgcggggctaccacaagtgcacccgggaggaggtgctgcagctgggcgccctgatctacagagtgaagtttgaggaggacaagagctacttccccagcatccccaagctgctgcgggagctggtgccccaggacctgatccggcaggtgtccccagatgactggaagaggagcatcgtggcctacttcaacaagcacgccggcaagagcaaggaggaggccaagctggccttcctgaagctgatcttcaagtggcccacctttggaagtgccttctttgaggtgaaggtgcaccacggcctgctgcgggcagaggaggagggcaacagagccctgatcaagcaccgggacagcagcctgggcctgtgggagcgggccatggccctggacacctgccctggagagggccggcgggccgcccccagcgccctgagccagctgtctgtgctggccggcgtgtcccctggggaccggggcacccggcgcagcagcgcctggcagtggaggcagacctgcaagcaggccggcgtgatggaggatggcctgtgcagcgacacaggagagcccagcccccgctggcagagcagcggcggcagcgctggctgtgagaaggccagctag

SEQ ID NO: 160859 - DNA, 4167 bp, synthetic construct
  misc_feature 1..4167: note = Description of Artificial Sequence: Synthetic coding sequence
  source 1..4167: mol_type = other DNA
atgaggctgggcttcctgcggctgcaggccctgcacaggagcaggaagctgcaccagcagtaccgcctggcccggcagaggatcatccagttccaggcccgctgccgggcctacctggtgaggaaggccttccgccaccggctgtgggccgtgctgactgtgcaggcctatgcccggggcatgattgcccggcggctgcaccagaggctgcgggcagagtacctgtggaggctggaggccgagaagatgaggctggccgaggaggagaagctgaggaaggagatgtctgccaagaaggccaaggaggaggccgagaggaagcaccaggagcggctggcccagctggcccgggaggatgctgagcgggagctgaaggagaaggaggccgcccggaggaagaaggagctgctggagcagatggagcgggcccggcatgagcctgtgaaccacagcgacatggtggacaagatgtttggcttcctgggcaccagcggcggcctgcccggccaggagggccaggcccccagcggctttgaggacctggagcggggcagaagagagatggtggaggaggacctggatgctgccctgcccctgcctgatgaagatgaggaggacctgtctgagtacaagtttgccaagtttgctgccacctacttccagggcaccaccacccacagctacacccggcggcccctgaagcagcccctgctgtaccatgatgatgaaggagaccagctggccgccctggccgtgtggatcaccatcctgcgcttcatgggagacctgcctgagcccaagtaccacacagccatgtctgatggcagcgagaagatccctgtgatgaccaagatctatgagaccctgggcaagaagacctacaagcgggagctgcaggccctgcagggcgagggggaggcccagctgcctgagggccagaagaagagctctgtgcgccacaagctggtgcacctgaccctgaagaagaagagcaagctgacagaggaggtgaccaagaggctgcatgatggagagagcacagtgcagggcaacagcatgctggaggaccggcccaccagcaacctggagaagctgcacttcatcattggaaatggcatcctgcggcctgccctgagagatgagatctactgccagatcagcaagcagctgacccacaaccccagcaagagcagctatgcccggggctggatcctggtgtccctgtgtgtgggctgctttgcccccagcgagaagtttgtgaagtacctgaggaacttcatccacggcggccccccaggctacgccccctactgtgaggagcggctgcggaggacctttgtgaatggcaccaggacccagccccccagctggctggagctgcaggccaccaagagcaagaagcccatcatgctgcctgtgaccttcatggatggcaccaccaagaccctgctgacagattctgccaccacagccaaggagctgtgcaatgccctggccgacaagatcagcctgaaggaccgcttcggcttcagcctgtacatcgccctgtttgacaaggtgagcagcctgggcagcggcagtgaccacgtgatggatgccatcagccagtgtgagcagtatgccaaggagcagggcgcccaggagagaaatgccccctggaggctcttcttcaggaaggaggtgttcaccccctggcacagccccagcgaggacaacgtggccaccaacctgatctaccagcaggtggtgcggggcgtgaagtttggagagtaccgctgtgagaaggaggatgacctggccgagctggccagccagcagtactttgtggactatggcagcgagatgatcctggagcggctgctgaacctggtgcccacctacatcccagaccgggagatcacccccctgaagaccctggagaagtgggcccagctggccatcgccgcccacaagaagggcatctatgcccagaggagaacagatgcccagaaggtgaaggaggatgtggtgtcctatgcccgcttcaagtggcccctgctcttcagccgcttctatgaggcctacaagttcagcggccccagcctgcccaagaatgatgtgattgtggccgtgaactggacaggagtgtactttgtggatgagcaggagcaggtgctgctggagctgtccttccctgagatcatggctgtgagcagcagcagaggagccaagaccacagcccccagcttcaccctggccaccatcaagggagatgagtacaccttcaccagcagcaatgctgaggacatccgggacctggtggtgaccttcctggagggcctgaggaagaggagcaaatatgtggtggccctgcaggacaaccccaacccagctggggaggagagcggcttcctgagctttgccaagggggacctgatcatcctggaccatgacaccggggagcaggtgatgaacagcggctgggccaacggcatcaatgaaagaaccaagcagagaggagacttccccacagattctgtgtatgtgatgcccaccgtgaccatgccaccccgggagatcgtggccctggtgaccatgaccccagaccagaggcaggatgtggtgcggctgctgcagctgaggacagctgagcctgaggtgcgggccaagccctacaccctggaggagttctcctatgactacttccggcccccacccaagcacaccctgagccgggtgatggtgtccaaggcccggggcaaggaccggctgtggagccacacccgggagcccctgaagcaggccctgctgaagaagctgctgggcagcgaggagctgagccaggaggcctgcctggccttcatcgctgtgctgaagtacatgggagactaccccagcaagaggaccaggtctgtgaatgagctgacagaccagatctttgagggccccctgaaggccgagcccctgaaggatgaggcctacgtgcagatcctgaagcagctgacagacaaccacatccgctacagcgaggagcggggctgggagctgctgtggctgtgcaccggcctcttcccccccagcaacatcctgctgccccacgtgcagcgcttcctgcagagcaggaagcactgccccctggccatcgactgcctgcagaggctgcagaaggccctgagaaatggcagcaggaagtacccaccccacctggtggaggtggaggccatccagcacaagaccacccagatcttccacaaggtgtacttcccagatgacacagatgaggcctttgaggtggagagcagcaccaaggccaaggacttctgccagaacatcgccacccggctgctgctgaagagcagcgagggcttcagcctgtttgtgaagattgctgacaaggtgctgtctgtgcctgaaaatgacttcttctttgattttgtgcgccacctgacagactggatcaagaaggcccggcccatcaaggatggcatcgtgcccagcctgacctaccaggtgttcttcatgaagaagctgtggaccaccaccgtgcctgggaaggaccccatggctgacagcatcttccactactaccaggagctgcccaagtacctgcggggctaccacaagtgcacccgggaggaggtgctgcagctgggcgccctgatctacagagtgaagtttgaggaggacaagagctacttccccagcatccccaagctgctgcgggagctggtgccccaggacctgatccggcaggtgtccccagatgactggaagaggagcatcgtggcctacttcaacaagcacgccggcaagagcaaggaggaggccaagctggccttcctgaagctgatcttcaagtggcccacctttggaagtgccttctttgaggtgaagcagaccacagagcccaacttccctgagatcctgctgattgccatcaacaagtatggagtgtccctgattgaccccaagaccaaggacatcctgaccacccaccccttcaccaagatcagcaactggagcagcggcaacacctacttccacatcaccatcggcaacctggtgcggggcagcaagctgctgtgtgagaccagcctgggctacaagatggatgacctgctgaccagctacatcagccagatgctgacagccatgagcaagcagaggggcagccgcagcggcaagtag

SEQ ID NO: 160860 - DNA, 2580 bp, synthetic construct
  misc_feature 1..2580: note = Description of Artificial Sequence: Synthetic coding sequence
  source 1..2580: mol_type = other DNA
atgggcaggaagctggacctgagcggcctgacagatgatgaaacagaacatgtgctgcaggtggtgcagagggacttcaacctgaggaagaaggaggaggagcggctgtctgagctgaagcagaagctggatgaggagggcagcaaatgttccatcctgagcaagcaccagcagtttgtggagcactgctgcatgcgctgctgcagccccttcaccttcctggtgaacaccaagaggcagtgtggggactgcaagttcaacgtgtgcaagagctgctgcagctaccagaagcatgagaaggcctgggtgtgctgcgtgtgccagcaggcccggctgctgcgggcccagagcctggagtggttctacaacaacgtgaagagccgcttcaagcgcttcggcagcgccaaggtgctgaagaacctgtacaggaagcaccggctggagagcggggcctgctttgacatcctgggcggcagcctgtttgagagcaacctggagaatgaaggcagcatcagcggcagtgacagcaccttctaccggcagagcgagggccacagcgtgatggacaccctggccgtggccctgcgggtggccgaggaggccatcgaggaggccatcagcaaggccgaggcctacggggacagcctggacaagcagaatgaggccagctacctgcgggaccacaaggaggagctgacagaggagctggccaccaccatcctgcagaagatcatcaggaagcagaagagcaagtctgagcagcaggtggaggaggagcccggctggccccacccccagagctgcagcaccaaggtggctgatgagggcaccagcgccagccctgggggctaccgggccccagctgccctgtggaggagccagagcgccttcagcatcaccggggaggaggccctgaagaccccacctgtggaggcccccagccggcagccccgggaccagggccagcaccccagggctgagagcgccctgcccagctggaagtctgtggaccggctggatgagaccaacctggcccctgtgctgcagagcccagatggcaactgggtggccctgaaggatggagcccccccacccacccggctgctggccaagcccaagagcggcaccttccaggccctggaggtggccagctctgtggccagcgcctatgatgagatgggcagtgacagtgaagaagattttgactggagcgaggccctgagcaagctgtgccccaggagccgggccctgcccaggaacccccagccccagcccacccaggcccagagcagtgaccagggccccatcgccgccagccccagcagcgccctgagccccaaccctgaggccatgtgcagcgacagcgagaccagcagcgctggcagcagccgggaggtgggccaccaggcccggctgtcctggctgcagaggaaggcccccagaaatcctgctgctgagaagatgaggctgcatggagagctggatgtgaacttcaacccccagctggccagccgggagaccagtgacagcagcgagcctgaggaggccccccacaccacagaccggcgggcccggcgctggaggcgggcccggctgggcagcgaggagcccagcaaggagcccagcagccccagcgcccagctgcgggacctggacacccaccaggtgtctgatgacctgtctgaaacagacatcagcaatgaggcccgggacccccagaccctgacagacaccacagaggagaagagaagaaaccggctgtatgagctggccatgaagatgtctgagaaggagaccagcagtggagaggaccaggagagcgagcccaagacagaaagtgagaaccagaaggagagcctgagcagcgaggacaacagccagagcgtgcaggaggagctgaagaagaagttctctgctgtgtccctgtgcaacatcagcacagaggtgctgaaggtgatcaatgccacagaggagctgattgctggcagcacaggcccctgggagagcccccaggtgcccccagaccggcagaagggcatgttcccccggggcacagaccaggtgcggctggatgagcagctgaccagcctggaggagaatgtgtacctggccgccggcaccgtgtatggcctggagacccagctgacagagctggaggatgctgcccgctgcatccacagcggcacagatgagacccacctggccgacctggaggaccaggtggccacagctgctgcccaggtgcaccacgccgagctgcagatcagtgacatcgagagccgcatcagcgccctgaccatcgccggcctgaacatcgccccctgtgtgcgcttcaccaggagaagagaccagaagcagaggacccaggtgcagaccatcgacaccagccggcagcagaggaggaagctgcctgcccctcctgtgaaggccgagaagattgagaccagctctgtgaccaccatcaagaccttcaaccacaacttcatcctgcagggcagcagcaccaacagaaccaaggagaggaagggcaccaccaaggacctgatggagcccgccctggagagcgctgtgatgtactag

SEQ ID NO: 160861 - DNA, 2313 bp, synthetic construct
  misc_feature 1..2313: note = Description of Artificial Sequence: Synthetic coding sequence
  source 1..2313: mol_type = other DNA
atgaggaaggccgccagcgctgccagcagccgcagcaccagcagcctgtggagcacagctgcctgtgccgccgcccggcccagccccagcagcagcaccccatctgcctctgtggagatcgccaacagcatgtctgcccgggctgctgcccccaccaggagcaccaagaggcctggcagcgctgccagcgccagcaagaggggcggcagcctgtttgagagcaacctggagaatgaaggcagcatcagcggcagtgacagcaccttctaccggcagagcgagggccacagcgtgatggacaccctggccgtggccctgcgggtggccgaggaggccatcgaggaggccatcagcaaggccgaggcctatggagacagcctggacaagcagaatgaggccagctacctgcgggaccacaaggaggagctgacagaggagctggccaccaccatcctgcagaagatcatcaggaagcagaagagcaagtctgagcagcaggtggaggaggagcccggctggccccacccccagagctgcagcaccaaggtggctgatgagggcaccagcgccagccctgggggctaccgggccccagctgccctgtggaggagccagagcgccttcagcatcactggagaggaggccctgaagaccccacctgtggaggcccccagccggcagccccgggaccagggccagcaccccagggctgagagcgccctgcccagctggaagtctgtggaccggctggatgagaccaacctggcccctgtgctgcagagcccagatggcaactgggtggccctgaaggatggagcccccccacccacccggctgctggccaagcccaagagcggcaccttccaggccctggaggtggccagctctgtggccagcgcctatgatgagatgggcagtgacagcgaggaggactttgactggagcgaggccctgagcaagctgtgccccaggagccgggccctgcccaggaacccccagccccagcccacccaggcccagagcagtgaccagggccccatcgccgccagccccagcagcgccctgagccccaaccctgaggccatgtgcagcgacagcgagaccagcagcgctggcagcagccgggaggtgggccaccaggcccggctgtcctggctgcagaggaaggcccccaggaacccagctgctgagaagatgaggctgcacggggagctggatgtgaacttcaacccccagctggccagccgggagaccagtgacagcagcgagcctgaggaggccccccacaccacagacagaagagcccggcgctggaggcgggcccggctgggcagcgaggagcccagcaaggagcccagcagccccagcgcccagctgcgggacctggacacccaccaggtgtctgatgacctgtctgaaacagacatcagcaatgaggcccgggacccccagaccctgacagacaccacagaggagaagagaagaaaccggctgtatgagctggccatgaagatgtctgagaaggagaccagcagcggggaggaccaggagagcgagcccaagacagaaagtgagaaccagaaggagagcctgagcagcgaggacaacagccagagcgtgcaggaggagctgaagaagaagttctctgctgtgtccctgtgcaacatcagcacagaggtgctgaaggtgatcaatgccacagaggagctgattgctggcagcacaggcccctgggagagcccccaggtgcccccagaccggcagaagggcatgttcccccggggcacagaccaggtgcggctggatgagcagctgaccagcctggaggagaatgtgtacctggccgccggcaccgtgtatggcctggagacccagctgacagagctggaggatgctgcccgctgcatccacagcggcacagatgagacccacctggccgacctggaggaccaggtggccacagctgctgcccaggtgcaccacgccgagctgcagatcagtgacatcgagagccgcatcagcgccctgaccatcgccggcctgaacatcgccccctgtgtgcgcttcacccggcggcgggaccagaagcagaggacccaggtgcagaccatcgacaccagccggcagcagaggaggaagctgcctgcccctcctgtgaaggccgagaagattgagaccagctctgtgaccaccatcaagaccttcaaccacaacttcatcctgcagggcagcagcaccaacagaaccaaggagaggaagggcaccaccaaggacctgatggagcccgccctggagagcgctgtgatgtactag

SEQ ID NO: 160862 - DNA, 2580 bp, synthetic construct; identical to SEQ ID NO: 160860
  misc_feature 1..2580: note = Description of Artificial Sequence: Synthetic coding sequence
  source 1..2580: mol_type = other DNA

SEQ ID NO: 160863 - DNA, 2019 bp, synthetic construct
  misc_feature 1..2019: note = Description of Artificial Sequence: Synthetic coding sequence
  source 1..2019: mol_type = other DNA
atggacaccctggccgtggccctgcgggtggccgaggaggccatcgaggaggccatcagcaaggccgaggcctatggagacagcctggacaagcagaatgaggccagctacctgcgggaccacaaggaggagctgacagaggagctggccaccaccatcctgcagaagatcatcaggaagcagaagagcaagtctgagcagcaggtggaggaggagcccggctggccccacccccagagctgcagcaccaaggtggctgatgagggcaccagcgccagccctgggggctaccgggccccagctgccctgtggaggagccagagcgccttcagcatcactggagaggaggccctgaagaccccacctgtggaggcccccagccggcagccccgggaccagggccagcaccccagggctgagagcgccctgcccagctggaagtctgtggaccggctggatgagaccaacctggcccctgtgctgcagagcccagatggcaactgggtggccctgaaggatggagcccccccacccacccggctgctggccaagcccaagagcggcaccttccaggccctggaggtggccagctctgtggccagcgcctatgatgagatgggcagtgacagcgaggaggactttgactggagcgaggccctgagcaagctgtgccccaggagccgggccctgcccaggaacccccagccccagcccacccaggcccagagcagtgaccagggccccatcgccgccagccccagcagcgccctgagccccaaccctgaggccatgtgcagcgacagcgagaccagcagcgctggcagcagccgggaggtgggccaccaggcccggctgtcctggctgcagaggaaggcccccaggaacccagctgctgagaagatgaggctgcacggggagctggatgtgaacttcaacccccagctggccagccgggagaccagtgacagcagcgagcctgaggaggccccccacaccacagacagaagagcccggcgctggaggcgggcccggctgggcagcgaggagcccagcaaggagcccagcagccccagcgcccagctgcgggacctggacacccaccaggtgtctgatgacctgtctgaaacagacatcagcaatgaggcccgggacccccagaccctgacagacaccacagaggagaagagaagaaaccggctgtatgagctggccatgaagatgtctgagaaggagaccagcagcggggaggaccaggagagcgagcccaagacagaaagtgagaaccagaaggagagcctgagcagcgaggacaacagccagagcgtgcaggaggagctgaagaagaagttctctgctgtgtccctgtgcaacatcagcacagaggtgctgaaggtgatcaatgccacagaggagctgattgctggcagcacaggcccctgggagagcccccaggtgcccccagaccggcagaagggcatgttcccccggggcacagaccaggtgcggctggatgagcagctgaccagcctggaggagaatgtgtacctggccgccggcaccgtgtatggcctggagacccagctgacagagctggaggatgctgcccgctgcatccacagcggcacagatgagacccacctggccgacctggaggaccaggtggccacagctgctgcccaggtgcaccacgccgagctgcagatcagtgacatcgagagccgcatcagcgccctgaccatcgccggcctgaacatcgccccctgtgtgcgcttcacccggcggcgggaccagaagcagaggacccaggtgcagaccatcgacaccagccggcagcagaggaggaagctgcctgcccctcctgtgaaggccgagaagattgagaccagctctgtgaccaccatcaagaccttcaaccacaacttcatcctgcagggcagcagcaccaacagaaccaaggagaggaagggcaccaccaaggacctgatggagcccgccctggagagcgctgtgatgtactag

SEQ ID NO: 160864 - DNA, 2886 bp, synthetic construct
  misc_feature 1..2886: note = Description of Artificial Sequence: Synthetic coding sequence
  source 1..2886: mol_type = other DNA
atgaagtacctgctgaacttcatcggccagggccctgccacctacggccccttctgtgccgagcggctgcggaggacctacgccaatggagtgcgggcagagccccccacctggctggagctgcaggccgtgaagagcaagaagcacatccccatccaggtgatcctggccaccggggagagcctgactgtgcctgtggacagcgccagcaccagccgggagatgtgcatgcacatcgcccacaagcagggcctgagtgaccacctgggcttcagcctgcaggtggccgtgtatgacaagttctggagcctgggcagcggccgggaccacatgatggatgccatcgcccgctgtgagcagatggcccaggagcggggggagagccagaggcagagcccctggaggatctacttcaggaaggagttcttcaccccctggcatgacagcagagaagatcctgtgtccacagagctgatctaccggcaggtgctgcggggcgtgtggagcggggagtacagctttgagaaggaggaggagctggtggagctgctggcccggcactgctacgtgcagctgggcgccagcgctgagagcaaggctgtgcaggagctgctgcccagctgcatcccccacaagctgtaccgcaccaagcccccagaccgctgggccagcctggtgacagctgcctgtgccaaggccccctacacccagaagcaggtgacccccctggccgtgcgggagcaggtggtggatgctgcccggctgcagtggcccctgctcttcagccggctgtttgaagtcatcaccctgagcgccttcaccctgcccagcctgctggcccggcccccaccagcccaggatgctggccctgctggagaagatgctgctggcaccctcttcccccggggccacggcagcggccaccagcaggtgcgggccctgcgggaggacctcttcctgcacacagagccccaccccccagcccctggccgcacagcccacgaggtgctgcactggggcatcacccgctgcaccggcagcttcagcctgaagcccaggagcaccaggaagggccagggctctgtgcagcccctggccggcacctacctggagggcagcttcctgtgccacggccgggagctggtggcctggagggtgcaggtggtgtgggagggggacaagggccagtgcctggccggggctgacccccacagccacggcagcccctggatcagcctgaccggcaacttctccatgccctttgggaagagcacccagcagagcggcacctgcatcagcggcctgtgccaggtgtacagcggccaccacagccccctggccaccagccccaggagcacagacagcatcacccacagcgcagatgagaggatgagcaagctgaagcacgccgaggtgcgctggctgcgggtgtccacctggcagagccggcagctgatcagcgccctgacctttgctgtgtccctgcgctgccactgcaccccagccaccagcctgagcgcccacagccagccccacacctgggccgcccccctgagcgccagcgagcggcccaccgtggtgtctggcctggtgctggccctggccgagcagctgtgtgtgctgatccgctggaggggcctgctggtgaccctgtccttcatcagccgggaggcccagggcggccagaggctgctgctgagcaccatgcatgaggagtatgaatttgtgagccccagctctgtggccatcgccgagctggtggccctcttcctggagggcctgaaggagaggagcatctttgccatggccctgcaggacaggaaggccacagatgacaccaccctgctggccttcaagaagggggacctgctggtgctgaccaagaagcagggcctgctggccagcgagaactggaccctgggccagaatgacagaacaggcaagacaggcctggtgcccatggcctgcctgtacaccatccccaccgtgaccaagcccagcgcccagctgctgagcctgctggccatgagccctgagaagaggaagctggccgcccaggagggccagttcacagagcccaggcctgaggagccccccaaggagaagctgcacaccctggaggagttctcctatgagttcttccgggcccctgagaaggacatggtgtccatggctgtgctgcccctggcccgggcccggggccacctgtgggcctacagctgtgagcccctgcggcagcccctgctgaagagggtgcacgccaacgtggacctgtgggacatcgcctgccagatctttgccacccccatcctgcgctacatgggagactaccccagccggcaggcctggcccaccctggagctgacagaccagatcttcaccctggccctgcagcacccagccctgcaggatgaggtgtactgccagatcctgaagcagctgacccacaacagcaacagacacagcgaggagcggggctggcagctgctgtggctgtgcaccggcctcttcccccccagcaagggcctgctgccccacgcccagaagttcatcgacacccggcggggcaagctgctggccccagactgcagccgccgcatccagaaggtgctgaggacaggccccaggaagcagcccccccaccaggtggaggtggaggccgctgagcagaatgtgagccgcatctgccacaagatctacttccccaatgacaccagcgagatgctggaggtggtggccaacaccagggtgagagatgtgtgtgacagcatcgccacccggctgcagctggcctcctgggagggctgcagcctcttcatcaagatcagtgacaaggtgatcagccagaaggagggggacttcttctttgacagcctgcgggagtag

SEQ ID NO: 160865 - DNA, 6354 bp, synthetic construct
  misc_feature 1..6354: note = Description of Artificial Sequence: Synthetic coding sequence
  source 1..6354: mol_type = other DNA
atgagcggcttccggctgggggaccacgtgtggctggagccccccagcacccacaagacaggagtggccatcggcggcatcatcaaggaggccaagccaggcaaggtgctggtggaggatgatgagggcaaggagcactggatccgggcagaagattttggagtgctgagccccatgcaccccaacagcgtgcagggcgtggatgacatgatccggctgggggacctgaatgaagctggcatggtgcacaacctgctgatccgctaccagcagcacaagatctacacctacacaggcagcatcctggtggccgtgaaccccttccaggtgctgcccctgtacaccctggagcaggtgcagctgtactacagccgccacatgggagagctgccccctcatgtgtttgccatcgccaacaactgctacttctccatgaagaggaacaagagggaccagtgctgcatcatctctggagagagcggggccggcaagacagagaccaccaagctgatcctgcagttcctggccaccatcagcggccagcacagctggattgagcagcaggtgctggaggccaaccccatcctggaggcctttggaaatgccaagaccatcagaaatgacaacagcagcagatttgggaagtacatcgacatctacttcaaccccagcggcgtgattgaaggagcccgcatcgagcagttcctgctggagaagagccgggtgtgccggcaggcccctgaggagaggaactaccacatcttctactgcatgctgatgggcgtgtctgctgaggacaagcagctgctgagcctgggcacccccagcgagtaccactacctgaccatgggcaactgcaccagctgtgagggcctgaatgatgccaaggactatgcccacatccgcagcgccatgaagatcctgcagttcagtgacagcgagagctgggatgtgatcaagctgctggccgccatcctgcacctgggcaatgtgggcttcatggcctctgtgtttgagaacctggatgccagtgatgtgatggagaccccagccttccccaccgtgatgaagctgctggaggtgcagcaccaggagctgcgggactgcctgatcaagcacaccatcctgatccggggggagtttgtgaccaggagcctgaacatcgcccaggccgctgacagaagagatgcctttgtgaagggcatctacggccacctgttcctgtggatcgtgaagaagatcaatgctgccatcttcaccccaccagcccaggaccccaagaatgtgcggcgggccatcggcctgctggacatctttggatttgagaactttgagaacaacagctttgagcagctgtgcatcaactttgccaatgagcacctgcagcagttctttgtgcagcacgtgttcaccatggagcaggaggagtacagaagtgagaacatctcctgggactacatccactacacagacaaccggcccaccctggacctgctggccctgaagcccatgagcatcatcagcctgctggatgaggagagccgcttcccccagggcacagacctgaccatgctgcagaagctgaacagcgtgcacgccaacaacaaggccttcctgcagcccaagaacatccatgatgccaggtttggaattgcccactttgctggggaggtgtactaccaggccgagggcttcctggagaagaacagagatgtgctgagcacagacatcctgaccctggtgtacagcagcaagaacaagttcctgcgggagatcttcaacctggagctggccgagaccaagctgggccacggcaccatccggcaggccaaggccggcaaccacctgttcaagtctgctgacagcaacaagaggcccagcaccctgggcagccagttcaagcagagcctggaccagctgatgaagatcctgaccaactgccagccctacttcatccgctgcatcaagcccaatgagtacaagaagcccctgctgtttgaccgggagctgtgcctgcggcagctgcgctacagcggcatgatggagaccgtgcacatcaggaagagcggcttccccatccgctacacctttgaggagttcagccagcgcttcggcgtgctgctgcccaatgccatgaggatgcagctgcagggcaagctgcggcagatgaccctgggcatcacagatgtgtggctgaggacagacaaggactggaaggccggcaagaccaagatcttcctgcgggaccaccaggacaccctgctggaggtgcagaggagccaggtgctggaccgggccgccctgagcatccagaaggtgctgcggggctaccgctacaggaaggagttcctgcggcagaggagagctgctgtgaccctgcaggcctggtggaggggctactgcaacagaagaaacttcaagctgatcctggtgggctttgagcggctgcaggccatcgcccggagccagcccctggcccggcagtaccaggccatgaggcagaggacagtgcagctgcaggccctgtgccggggctacctggtgcggcagcaggtgcaggccaagagaagagctgtggtggtgatccaggcccacgcccggggcatggccgcccggaggaacttccagcagaggaaggccaatgcccccctggtgatcccagctgagggccagaagagccagggcgccctgcctgccaagaagaggaggagcatctatgacacagtgacagacacagagatggtggagaaggtgtttggcttcctgcctgccatgattggaggccaggagggccaggccagcccccactttgaggacctggagagcaagacccagaagctgctggaggtggacctggacacagtgcccatggccgaggagccagaagaagatgtggatggcctggccgagtacaccttccccaagtttgctgtgacctacttccagaagagcgccagccacacccacatcagaagacccctgcgctaccccctgctgtaccatgaagatgacacagactgcctggccgccctggtgatctggaatgtcatcctgcgcttcatgggagacctgcctgagcctgtgctgtatgcccggagcagccagcagggcagctctgtgatgaggcagatccatgacaccctgggccgggagcacggggcccaggtgccccagcacagccgcagcgcccaggtggccagccagctgaacattggagaggaggccctggagccagatggcctgggcgctgaccggcccatgagcaacctggagaaggtgcacttcatcgtgggctacgccatcctgcggcccagcctgagagatgagatctactgccagatctgcaagcagctgtctgagaacttcaagaccagcagcctggcccggggctggatcctgctgagcctgtgcctgggctgcttcccccccagcgagcgcttcatgaagtacctgctgaacttcatcggccagggccctgccacctacggccccttctgtgccgagcggctgcggaggacctacgccaacggggtgcgggcagagccccccacctggctggagctgcaggccgtgaagagcaagaagcacatccccatccaggtgatcctggccactggagagagcctgactgtgcctgtggacagcgccagcaccagccgggagatgtgcatgcacatcgcccacaagcagggcctgagtgaccacctgggcttcagcctgcaggtggccgtgtatgacaagttctggagcctgggcagcggccgggaccacatgatggatgccatcgcccgctgtgagcagatggcccaggagcggggggagagccagaggcagagcccctggaggatctacttcaggaaggagttcttcaccccctggcatgacagccgggaggaccctgtgtccacagagctgatctaccggcaggtgctgcggggcgtgtggagcggggagtacagctttgagaaggaggaggagctggtggagctgctggcccggcactgctacgtgcagctgggcgccagcgctgagagcaaggctgtgcaggagctgctgcccagctgcatcccccacaagctgtaccgcaccaagcccccagaccgctgggccagcctggtgacagctgcctgtgccaaggccccctacacccagaagcaggtgacccccctggccgtgcgggagcaggtggtggatgctgcccggctgcagtggcccctgctcttcagccggctgtttgaggtgatcaccctgagcggcccccggctgcccaagacccagctgatcctggccgtgaactggaagggcctgtgcttcctggaccagcaggagaagatgctgctggagctgtccttccctgaggtgatgggcctggccaccaaccgggaggcccagggcggccagaggctgctgctgagcaccatgcatgaggagtatgaatttgtgagccccagctctgtggccatcgccgagctggtggccctcttcctggagggcctgaaggagaggagcatctttgccatggccctgcaggacaggaaggccacagatgacaccaccctgctggccttcaagaagggggacctgctggtgctgaccaagaagcagggcctgctggccagcgagaactggaccctgggccagaatgacagaacaggcaagacaggcctggtgcccatggcctgcctgtacaccatccccaccgtgaccaagcccagcgcccagctgctgagcctgctggccatgagccctgagaagaggaagctggccgcccaggagggccagttcacagagcccaggcctgaggagccccccaaggagaagctgcacaccctggaggagttctcctatgagttcttccgggcccctgagaaggacatggtgtccatggctgtgctgcccctggcccgggcccggggccacctgtgggcctacagctgtgagcccctgcggcagcccctgctgaagagggtgcacgccaacgtggacctgtgggacatcgcctgccagatctttgccacccccatcctgcgctacatgggagactaccccagccggcaggcctggcccaccctggagctgacagaccagatcttcaccctggccctgcagcacccagccctgcaggatgaggtgtactgccagatcctgaagcagctgacccacaacagcaacagacattctgaggagcggggctggcagctgctgtggctgtgcaccggcctcttcccccccagcaagggcctgctgccccacgcccagaagttcatcgacacccggcggggcaagctgctggccccagactgcagccgccgcatccagaaggtgctgaggacaggccccaggaagcagcccccccaccaggtggaggtggaggccgctgagcagaatgtgagccgcatctgccacaagatctacttccccaatgacaccagcgagatgctggaggtggtggccaacaccagggtgagagatgtgtgtgacagcatcgccacccggctgcagctggcctcctgggagggctgcagcctcttcatcaagatcagtgacaaggtgatcagccagaaggagggggacttcttctttgacagcctgcgggaggtgtctgactgggtgaagaagaacaagccccagaaggagggcgcccctgtgaccctgccctaccaggtgtacttcatgaggaagctgtggctgaacatcagccctgggaaggatgtgaatgctgacaccatcctgcactaccaccaggagctgcccaagtacctgcggggcttccacaagtgcagccgggaggatgccatccacctggccggcctcatctacaaggcccagttcaacaatgacaggagccagctggcctctgtgcccaagatcctgcgggagctggtgcctgagaacctgacccggctgatgagcagcgaggagtggaagaagagcatcctgctggcctatgacaagcacaaggacaagacagtggaggaggccaaggtggccttcctgaagtggatctgccgctggcccaccttcggcagcgccttctttgaggtgaagcagaccagcgagcccagctacccagatgtgatcctgattgccatcaacagacatggagtgctgctgatccaccccaagaccaaggacctgctgaccacctaccccttcaccaagatcagctcctggagcagcggcagcacctacttccacatggccctgggcagcctgggccggggcagccggctgctgtgtgagaccagcctgggctacaagatggatgacctgctgaccagctatgtgcagcagctgctgagcgccatgaacaagcagaggggcagcaaggccccagccctggccagcacctag

SEQ ID NO: 160866 - DNA, 6351 bp, synthetic construct
  misc_feature 1..6351: note = Description of Artificial Sequence: Synthetic coding sequence
  source 1..6351: mol_type = other DNA
atgagcggcttccggctgggggaccacgtgtggctggagccccccagcacccacaagacaggagtggccatcggcggcatcatcaaggaggccaagccaggcaaggtgctggtggaggatgatgagggcaaggagcactggatccgggcagaagattttggagtgctgagccccatgcaccccaacagcgtgcagggcgtggatgacatgatccggctgggggacctgaatgaagctggcatggtgcacaacctgctgatccgctaccagcagcacaagatctacacctacacaggcagcatcctggtggccgtgaaccccttccaggtgctgcccctgtacaccctggagcaggtgcagctgtactacagccgccacatgggagagctgccccctcatgtgtttgccatcgccaacaactgctacttctccatgaagaggaacaagagggaccagtgctgcatcatctctggagagagcggggccggcaagacagagaccaccaagctgatcctgcagttcctggccaccatcagcggccagcacagctggattgagcagcaggtgctggaggccaaccccatcctggaggcctttggaaatgccaagaccatcagaaatgacaacagcagcagatttgggaagtacatcgacatctacttcaaccccagcggcgtgattgaaggagcccgcatcgagcagttcctgctggagaagagccgggtgtgccggcaggcccctgaggagaggaactaccacatcttctactgcatgctgatgggcgtgtctgctgaggacaagcagctgctgagcctgggcacccccagcgagtaccactacctgaccatgggcaactgcaccagctgtgagggcctgaatgatgccaaggactatgcccacatccgcagcgccatgaagatcctgcagttcagtgacagcgagagctgggatgtgatcaagctgctggccgccatcctgcacctgggcaatgtgggcttcatggcctctgtgtttgagaacctggatgccagtgatgtgatggagaccccagccttccccaccgtgatgaagctgctggaggtgcagcaccaggagctgcgggactgcctgatcaagcacaccatcctgatccggggggagtttgtgaccaggagcctgaacatcgcccaggccgctgacagaagagatgcctttgtgaagggcatctacggccacctgttcctgtggatcgtgaagaagatcaatgctgccatcttcaccccaccagcccaggaccccaagaatgtgcggcgggccatcggcctgctggacatctttggatttgagaactttgagaacaacagctttgagcagctgtgcatcaactttgccaatgagcacctgcagcagttctttgtgcagcacgtgttcaccatggagcaggaggagtacagaagtgagaacatctcctgggactacatccactacacagacaaccggcccaccctggacctgctggccctgaagcccatgagcatcatcagcctgctggatgaggagagccgcttcccccagggcacagacctgaccatgctgcagaagctgaacagcgtgcacgccaacaacaaggccttcctgcagcccaagaacatccatgatgccaggtttggaattgcccactttgctggggaggtgtactaccaggccgagggcttcctggagaagaacagagatgtgctgagcacagacatcctgaccctggtgtacagcagcaagaacaagttcctgcgggagatcttcaacctggagctggccgagaccaagctgggccacggcaccatccggcaggccaaggccggcaaccacctgttcaagtctgctgacagcaacaagaggcccagcaccctgggcagccagttcaagcagagcctggaccagctgatgaagatcctgaccaactgccagccctacttcatccgctgcatcaagcccaatgagtacaagaagcccctgctgtttgaccgggagctgtgcctgcggcagctgcgctacagcggcatgatggagaccgtgcacatcaggaagagcggcttccccatccgctacacctttgaggagttcagccagcgcttcggcgtgctgctgcccaatgccatgaggatgcagctgcagggcaagctgcggcagatgaccctgggcatcacagatgtgtggctgaggacagacaaggactggaaggccggcaagaccaagatcttcctgcgggaccaccaggacaccctgctggaggtgcagaggagccaggtgctggaccgggccgccctgagcatccagaaggtgctgcggggctaccgctacaggaaggagttcctgcggcagaggagagctgctgtgaccctgcaggcctggtggaggggctactgcaacagaagaaacttcaagctgatcctggtgggctttgagcggctgcaggccatcgcccggagccagcccctggcccggcagtaccaggccatgaggcagaggacagtgcagctgcaggccctgtgccggggctacctggtgcggcagcaggtgcaggccaagagaagagctgtggtggtgatccaggcccacgcccggggcatggccgcccggaggaacttccagcagaggaaggccaatgcccccctggtgatcccagctgagggccagaagagccagggcgccctgcctgccaagaagaggaggagcatctatgacacagtgacagacacagagatggtggagaaggtgtttggcttcctgcctgccatgattggaggccaggagggccaggccagcccccactttgaggacctggagagcaagacccagaagctgctggaggtggacctggacacagtgcccatggccgaggagccagaagaagatgtggatggcctggccgagtacaccttccccaagtttgctgtgacctacttccagaagagcgccagccacacccacatcagaagacccctgcgctaccccctgctgtaccatgaagatgacacagactgcctggccgccctggtgatctggaatgtcatcctgcgcttcatgggagacctgcctgagcctgtgctgtatgcccggagcagccagcagggcagctctgtgatgaggcagatccatgacaccctgggccgggagcacggggcccaggtgccccagcacagccgcagcgcccaggtggccagccagctgaacattggagaggaggccctggagccagatggcctgggcgctgaccggcccatgagcaacctggagaaggtgcacttcatcgtgggctacgccatcctgcggcccagcctgagagatgagatctactgccagatctgcaagcagctgtctgagaacttcaagaccagcagcctggcccggggctggatcctgctgagcctgtgcctgggctgcttcccccccagcgagcgcttcatgaagtacctgctgaacttcatcggccagggccctgccacctacggccccttctgtgccgagcggctgcggaggacctacgccaacggggtgcgggcagagccccccacctggctggagctgcaggccgtgaagagcaagaagcacatccccatccaggtgatcctggccactggagagagcctgactgtgcctgtggacagcgccagcaccagccgggagatgtgcatgcacatcgcccacaagcagggcctgagtgaccacctgggcttcagcctgcaggtggccgtgtatgacaagttctggagcctgggcagcggccgggaccacatgatggatgccatcgcccgctgtgagcagatggcccaggagcggggggagagccagaggcagagcccctggaggatctacttcaggaaggagttcttcaccccctggcatgacagccgggaggaccctgtgtccacagagctgatctaccggcaggtgctgcggggcgtgtggagcggggagtacagctttgagaaggaggaggagctggtggagctgctggcccggcactgctacgtgcagctgggcgccagcgctgagagcaaggctgtgcaggagctgctgcccagctgcatcccccacaagctgtaccgcaccaagcccccagaccgctgggccagcctggtgacagctgcctgtgccaaggccccctacacccagaagcaggtgacccccctggccgtgcgggagcaggtggtggatgctgcccggctgcagtggcccctgctcttcagccggctgtttgaggtgatcaccctgagcggcccccggctgcccaagacccagctgatcctggccgtgaactggaagggcctgtgcttcctggaccagcaggagaagatgctgctggagctgtccttccctgaggtgatgggcctggccaccaaccgggaggcccagggcggccagaggctgctgctgagcaccatgcatgaggagtatgaatttgtgagccccagctctgtggccatcgccgagctggtggccctcttcctggagggcctgaaggagaggagcatctttgccatggccctgcaggacaggaaggccacagatgacaccaccctgctggccttcaagaagggggacctgctggtgctgaccaagaagcagggcctgctggccagcgagaactggaccctgggccagaatgacagaacaggcaagacaggcctggtgcccatggcctgcctgtacaccatccccaccgtgaccaagcccagcgcccagctgctgagcctgctggccatgagccctgagaagaggaagctggccgcccaggagggccagttcacagagcccaggcctgaggagccccccaaggagaagctgcacaccctggaggagttctcctatgagttcttccgggcccctgagaaggacatggtgtccatggctgtgctgcccctggcccgggcccggggccacctgtgggcctacagctgtgagcccctgcggcagcccctgctgaagagggtgcacgccaacgtggacctgtgggacatcgcctgccagatctttgtggccatcctgcgctacatgggagactaccccagccggcaggcctggcccaccctggagctgacagaccagatcttcaccctggccctgcagcacccagccctgcaggatgaggtgtactgccagatcctgaagcagctgacccacaacagcaacagacacagcgaggagcggggctggcagctgctgtggctgtgcaccggcctcttcccccccagcaagggcctgctgccccacgcccagaagttcatcgacacccggcggggcaagctgctggccccagactgcagccgccgcatccagaaggtgctgaggacaggccccaggaagcagcccccccaccaggtggaggtggaggccgctgagcagaatgtgagccgcatctgccacaagatctacttccccaatgacaccagcgagatgctggaggtggtggccaacaccagggtgagagatgtgtgtgacagcatcgccacccggctgcagctggcctcctgggagggctgcagcctcttcatcaagatcagtgacaaggtgatcagccagaaggagggggacttcttctttgacagcctgcgggaggtgtctgactgggtgaagaagaacaagccccagaaggagggcgcccctgtgaccctgccctaccaggtgtacttcatgaggaagctgtggctgaacatcagccctgggaaggatgtgaatgctgacaccatcctgcactaccaccaggagctgcccaagtacctgcggggcttccacaagtgcagcagagaagatgccatccacctggccggcctcatctacaaggcccagttcaacaatgacaggagccagctggcctctgtgcccaagatcctgcgggagctggtgcctgagaacctgacccggctgatgagcagcgaggagtggaagaagagcatcctgctggcctatgacaagcacaaggacaagacagtggaggaggccaaggtggccttcctgaagtggatctgccgctggcccacctttggaagtgccttctttgaggtgaagcagaccagcgagcccagctacccagatgtgatcctgattgccatcaacagacatggagtgctgctgatccaccccaagaccaaggacctgctgaccacctaccccttcaccaagatcagctcctggagcagcggcagcacctacttccacatggccctgggcagcctgggccggggcagccggctgctgtgtgagaccagcctgggctacaagatggatgacctgctgaccagctatgtgcagcagctgctgagcgccatgaacaagcagaggggcagcaaggccccagccctggccagcacctag

SEQ ID NO: 160867 - DNA, 6351 bp, synthetic construct; identical to SEQ ID NO: 160866
  misc_feature 1..6351: note = Description of Artificial Sequence: Synthetic coding sequence
  source 1..6351: mol_type = other DNA

SEQ ID NO: 160868 - DNA, 4248 bp, synthetic construct
  misc_feature 1..4248: note = Description of Artificial Sequence: Synthetic coding sequence
  source 1..4248: mol_type = other DNA
atgccagaccagtttgaccaggccgtggtgctgaaccagctgcgctacagcggcatgctggagaccgtgcgcatcaggaaggccggctatgctgtgagaagacccttccaggacttctacaagcgctacaaggtgctgatgaggaacctggccctgcctgaagatgtgcggggcaagtgcaccagcctgctgcagctgtatgatgccagcaacagcgagtggcagctgggcaagaccaaggtgttcctgcgggagagcctggagcagaagctggagaagaggcgggaggaggaggtgtcccatgctgccatggtgatccgggcccacgtgctgggcttcctggccaggaagcagtacaggaaggtgctgtactgtgtggtgatcatccagaagaactaccgggccttcctgctgcggcggcgcttcctgcacctgaagaaggccgccatcgtgttccagaagcagctgcggggccagatcgcccggcgggtgtaccggcagctgctggccgagaagcgggagcaggaggagaagaagaagcaggaggaggaggagaagaagaagcgggaggaggaggagcgggagcgggagcgggagcggcgggaggccgagctgcgggcccagcaggaggaggagaccaggaagcagcaggagctggaggccctgcagaagagccagaaggaggccgagctgacccgggagctggagaagcagaaggagaacaagcaggtggaggagatcctgcggctggagaaggagattgaggacctgcagaggatgaaggagcagcaggagctgagcctgacagaggccagcctgcagaagctgcaggagcggcgggaccaggagctgcggcggctggaggaggaggcctgccgggccgcccaggagttcctggagagcctgaactttgatgaaattgatgaatgtgtgaggaacatcgagaggagcctgtctgtgggcagcgagttcagcagcgagctggccgagagcgcctgtgaggagaagcccaacttcaacttcagccagccctacccagaggaggaggtggatgagggctttgaagcagatgatgatgccttcaaggacagccccaaccccagcgagcacggccacagcgaccagaggaccagcggcatccgcaccagtgatgacagcagcgaggaggacccctacatgaatgacacagtggtgcccaccagccccagcgctgacagcacagtgctgctggcccccagcgtgcaggacagcggcagcctgcacaacagcagcagtggagagagcacctactgcatgccccagaatgctggggacctgcccagcccagatggagactatgactatgaccaggatgattatgaagatggagccatcaccagcggcagctctgtgaccttcagcaacagctatggcagccagtggagcccagactaccgctgcagcgtgggcacctacaacagcagcggggcctaccgcttcagcagcgagggcgcccagagcagctttgaagattctgaagaagattttgacagcagatttgacacagatgatgagctgagctaccgccgggacagcgtgtacagctgtgtgaccctgccctacttccacagcttcctgtacatgaagggcggcctgatgaacagctggaagaggcgctggtgtgtgctgaaggatgagaccttcctgtggttccgcagcaagcaggaggccctgaagcagggctggctgcacaagaagggcggcggcagcagcaccctgagcagaagaaactggaagaagcgctggtttgtgctgcggcagagcaagctgatgtactttgaaaatgacagcgaggagaagctgaagggcaccgtggaggtgaggacagccaaggagatcatcgacaacaccaccaaggaaaatggcatcgacatcatcatggctgacaggaccttccacctgattgctgagagcccagaagatgccagccagtggttctctgtgctgagccaggtgcacgccagcacagaccaggagatccaggagatgcatgatgagcaggccaacccccagaatgctgtgggcaccctggatgtgggcctgattgattctgtgtgtgccagtgacagcccagaccggcccaacagctttgtgatcatcacagccaacagagtgctgcactgcaatgctgacaccccagaggagatgcaccactggatcaccctgctgcagaggagcaagggggacaccagggtggagggccaggagttcatcgtgcggggctggctgcacaaggaggtgaagaacagccccaagatgagcagcctgaagctgaagaagcgctggtttgtgctgacccacaacagcctggactactacaagagcagcgagaagaatgccctgaagctgggcaccctggtgctgaacagcctgtgcagcgtggtgcccccagatgagaagatcttcaaggagaccggctactggaatgtgacagtgtatggcaggaagcactgctaccgcctgtacaccaagctgctgaatgaggccacccgctggagcagcgccatccagaatgtgacagacaccaaggcccccatcgacacccccacccagcagctgatccaggacatcaaggagaactgcctgaacagtgatgtggtggagcagatctacaagaggaaccccatcctgcgctacacccaccaccccctgcacagccccctgctgcccctgccctacggggacatcaacctgaacctgctgaaggacaagggctacaccaccctgcaggatgaggccatcaagatcttcaacagcctgcagcagctggagagcatgtctgaccccatccccatcatccagggcatcctgcagacaggccatgacctgcggcccctgagagatgagctgtactgccagctgatcaagcagaccaacaaggtgccccaccctggctctgtgggcaacctgtacagctggcagatcctgacctgcctgagctgcaccttcctgcccagccggggcatcctgaagtacctgaagttccacctgaagaggatccgggagcagtttcctggcagcgagatggagaagtatgccctcttcacctatgagagcctgaagaagaccaagtgccgggagtttgtgcccagcagagatgaaattgaggccctgatccaccggcaggagatgaccagcacagtgtactgccacggcggcggcagctgcaagatcaccatcaacagccacaccacagctggggaggtggtggagaagctgatccggggcctggccatggaggacagcaggaacatgtttgccctgtttgagtacaatggacatgtggacaaggccatcgagagcaggacagtggtggctgatgtgctggccaagtttgagaagctggccgccaccagcgaggtgggggacctgccctggaagttctacttcaagctgtactgcttcctggacacagacaacgtgcccaaggacagcgtggagtttgccttcatgtttgagcaggcccatgaagctgtgatccacggccaccacccagcccctgaggagaacctgcaggtgctggccgccctgcggctgcagtacctgcagggcgactacaccctgcatgctgccatcccccccctggaggaggtgtacagcctgcagaggctgaaggcccgcatcagccagagcaccaagaccttcaccccctgtgagcggctggagaagaggaggaccagcttcctggagggcaccctgcggcgctccttcagaacaggctctgtggtgcggcagaaggtggaggaggagcagatgctggacatgtggatcaaggaggaggtgagcagcgcccgggccagcatcatcgacaagtggaggaagttccagggcatgaaccaggagcaggccatggccaagtacatggccctgatcaaggagtggccaggctacggcagcaccctgtttgatgtggagtgcaaggagggcggcttcccccaggagctgtggctgggcgtgtctgcagatgctgtgtctgtgtacaagagaggagagggccggcccctggaggtgttccagtatgagcacatcctgagctttggagcccccctggccaacacctacaagatcgtggtggatgagcgggagctgctgtttgagaccagcgaggtggtggatgtggccaagctgatgaaggcctacatctccatgattgtgaagaagcgctacagcaccaccaggtctgccagcagccagggcagcagcaggtag

SEQ ID NO: 160869 - DNA, 4248 bp, synthetic construct; identical to SEQ ID NO: 160868
  misc_feature 1..4248: note = Description of Artificial Sequence: Synthetic coding sequence
  source 1..4248: mol_type = other DNA

SEQ ID NO: 160870 - DNA, 4194 bp, synthetic construct
  misc_feature 1..4194: note = Description of Artificial Sequence: Synthetic coding sequence
  source 1..4194: mol_type = other DNA
atgctggagaccgtgcgcatcaggaaggccggctatgctgtgagaagacccttccaggacttctacaagcgctacaaggtgctgatgaggaacctggccctgcctgaagatgtgcggggcaagtgcaccagcctgctgcagctgtatgatgccagcaacagcgagtggcagctgggcaagaccaaggtgttcctgcgggagagcctggagcagaagctggagaagaggcgggaggaggaggtgtcccatgctgccatggtgatccgggcccacgtgctgggcttcctggccaggaagcagtacaggaaggtgctgtactgtgtggtgatcatccagaagaactaccgggccttcctgctgcggcggcgcttcctgcacctgaagaaggccgccatcgtgttccagaagcagctgcggggccagatcgcccggcgggtgtaccggcagctgctggccgagaagcgggagcaggaggagaagaagaagcaggaggaggaggagaagaagaagcgggaggaggaggagcgggagcgggagcgggagcggcgggaggccgagctgcgggcccagcaggaggaggagaccaggaagcagcaggagctggaggccctgcagaagagccagaaggaggccgagctgacccgggagctggagaagcagaaggagaacaagcaggtggaggagatcctgcggctggagaaggagattgaggacctgcagaggatgaaggagcagcaggagctgagcctgacagaggccagcctgcagaagctgcaggagcggcgggaccaggagctgcggcggctggaggaggaggcctgccgggccgcccaggagttcctggagagcctgaactttgatgaaattgatgaatgtgtgaggaacatcgagaggagcctgtctgtgggcagcgagttcagcagcgagctggccgagagcgcctgtgaggagaagcccaacttcaacttcagccagccctacccagaggaggaggtggatgagggctttgaagcagatgatgatgccttcaaggacagccccaaccccagcgagcacggccacagcgaccagaggaccagcggcatccgcaccagtgatgacagcagcgaggaggacccctacatgaatgacacagtggtgcccaccagccccagcgctgacagcacagtgctgctggcccccagcgtgcaggacagcggcagcctgcacaacagcagcagtggagagagcacctactgcatgccccagaatgctggggacctgcccagcccagatggagactatgactatgaccaggatgattatgaagatggagccatcaccagcggcagctctgtgaccttcagcaacagctatggcagccagtggagcccagactaccgctgcagcgtgggcacctacaacagcagcggggcctaccgcttcagcagcgagggcgcccagagcagctttgaagattctgaagaagattttgacagcagatttgacacagatgatgagctgagctaccgccgggacagcgtgtacagctgtgtgaccctgccctacttccacagcttcctgtacatgaagggcggcctgatgaacagctggaagaggcgctggtgtgtgctgaaggatgagaccttcctgtggttccgcagcaagcaggaggccctgaagcagggctggctgcacaagaagggcggcggcagcagcaccctgagcagaagaaactggaagaagcgctggtttgtgctgcggcagagcaagctgatgtactttgaaaatgacagcgaggagaagctgaagggcaccgtggaggtgaggacagccaaggagatcatcgacaacaccaccaaggaaaatggcatcgacatcatcatggctgacaggaccttccacctgattgctgagagcccagaagatgccagccagtggttctctgtgctgagccaggtgcacgccagcacagaccaggagatccaggagatgcatgatgagcaggccaacccccagaatgctgtgggcaccctggatgtgggcctgattgattctgtgtgtgccagtgacagcccagaccggcccaacagctttgtgatcatcacagccaacagagtgctgcactgcaatgctgacaccccagaggagatgcaccactggatcaccctgctgcagaggagcaagggggacaccagggtggagggccaggagttcatcgtgcggggctggctgcacaaggaggtgaagaacagccccaagatgagcagcctgaagctgaagaagcgctggtttgtgctgacccacaacagcctggactactacaagagcagcgagaagaatgccctgaagctgggcaccctggtgctgaacagcctgtgcagcgtggtgcccccagatgagaagatcttcaaggagaccggctactggaatgtgacagtgtatggcaggaagcactgctaccgcctgtacaccaagctgctgaatgaggccacccgctggagcagcgccatccagaatgtgacagacaccaaggcccccatcgacacccccacccagcagctgatccaggacatcaaggagaactgcctgaacagtgatgtggtggagcagatctacaagaggaaccccatcctgcgctacacccaccaccccctgcacagccccctgctgcccctgccctacggggacatcaacctgaacctgctgaaggacaagggctacaccaccctgcaggatgaggccatcaagatcttcaacagcctgcagcagctggagagcatgtctgaccccatccccatcatccagggcatcctgcagacaggccatgacctgcggcccctgagagatgagctgtactgccagctgatcaagcagaccaacaaggtgccccaccctggctctgtgggcaacctgtacagctggcagatcctgacctgcctgagctgcaccttcctgcccagccggggcatcctgaagtacctgaagttccacctgaagaggatccgggagcagtttcctggcagcgagatggagaagtatgccctcttcacctatgagagcctgaagaagaccaagtgccgggagtttgtgcccagcagagatgaaattgaggccctgatccaccggcaggagatgaccagcacagtgtactgccacggcggcggcagctgcaagatcaccatcaacagccacaccacagctggggaggtggtggagaagctgatccggggcctggccatggaggacagcaggaacatgtttgccctgtttgagtacaatggacatgtggacaaggccatcgagagcaggacagtggtggctgatgtgctggccaagtttgagaagctggccgccaccagcgaggtgggggacctgccctggaagttctacttcaagctgtactgcttcctggacacagacaacgtgcccaaggacagcgtggagtttgccttcatgtttgagcaggcccatgaagctgtgatccacggccaccacccagcccctgaggagaacctgcaggtgctggccgccctgcggctgcagtacctgcagggcgactacaccctgcatgctgccatcccccccctggaggaggtgtacagcctgcagaggctgaaggcccgcatcagccagagcaccaagaccttcaccccctgtgagcggctggagaagaggaggaccagcttcctggagggcaccctgcggcgctccttcagaacaggctctgtggtgcggcagaaggtggaggaggagcagatgctggacatgtggatcaaggaggaggtgagcagcgcccgggccagcatcatcgacaagtggaggaagttccagggcatgaaccaggagcaggccatggccaagtacatggccctgatcaaggagtggccaggctacggcagcaccctgtttgatgtggagtgcaaggagggcggcttcccccaggagctgtggctgggcgtgtctgcagatgctgtgtctgtgtacaagagaggagagggccggcccctggaggtgttccagtatgagcacatcctgagctttggagcccccctggccaacacctacaagatcgtggtggatgagcgggagctgctgtttgagaccagcgaggtggtggatgtggccaagctgatgaaggcctacatctccatgattgtgaagaagcgctacagcaccaccaggtctgccagcagccagggcagcagcaggtag

SEQ ID NO: 160871 - DNA, 6177 bp, synthetic construct
  misc_feature 1..6177: note = Description of Artificial Sequence: Synthetic coding sequence
  source 1..6177: mol_type = other DNA
atggacaacttcttcacagagggcaccagggtgtggctgagagaaaatggccagcacttccccagcacagtgaacagctgtgccgagggcatcgtggtgttcagaacagattatggccaggtgttcacctacaagcagagcaccatcacccaccagaaggtgacagccatgcaccccaccaatgaggagggcgtggatgacatggccagcctgacagagctgcatggaggcagcatcatgtacaacctcttccagcgctacaagaggaaccagatctacacctacatcggcagcatcctggcctctgtgaacccctaccagcccatcgccggcctgtatgagcccgccaccatggagcagtacagcagaagacacctgggggagctgcccccccacatctttgccatcgccaatgaatgctaccgctgcctgtggaagagacatgacaaccagtgcatcctgatcagcggggagagcggggccggcaagacagagagcaccaagctgatcctgaagttcctgagcgtcatcagccagcagagcctggagctgagcctgaaggagaagaccagctgtgtggagcgggccatcctggagagcagccccatcatggaggcctttggaaatgccaagacagtgtacaacaacaacagcagcagatttgggaagtttgtgcagctgaacatctgccagaagggcaacatccagggcggccgcatcgtggactacctgctggagaagaacagagtggtgcggcagaaccctggagagaggaactaccacatcttctacgccctgctggccggcctggagcacgaggagcgggaggagttctacctgagcaccccagagaactaccactacctgaaccagagcggctgtgtggaggacaagaccatcagtgaccaggagagcttccgggaggtgatcacagccatggatgtgatgcagttcagcaaggaggaggtgcgggaggtgtcccggctgctggccggcatcctgcacctgggcaacatcgagttcatcacagctgggggcgcccaggtgtccttcaagacagccctgggccgctctgctgagctgctgggcctggaccccacccagctgacagatgccctgacccagaggtccatgttcctgcggggggaggagatcctgacccccctgaatgtgcagcaggccgtggacagccgggacagcctggccatggccctgtatgcctgctgctttgagtgggtgatcaagaagatcaacagccgcatcaagggaaatgaagacttcaagagcatcggcatcctggacatcttcggctttgaaaattttgaggtgaaccactttgagcagttcaacatcaactatgccaatgagaagctgcaggagtacttcaacaagcacatcttcagcctggagcagctggagtacagccgggagggcctggtgtgggaggacatcgactggattgacaatggagaatgtctggacctgattgagaagaagctgggcctgctggccctgatcaatgaggagagccacttcccccaggccacagacagcaccctgctggagaagctgcacagccagcacgccaacaaccacttctacgtgaagccccgggtggccgtgaacaactttggagtgaagcactacgccggggaggtgcagtatgatgtgcggggcatcctggagaagaacagagacaccttcagagatgacctgctgaacctgctgcgggagagcagatttgacttcatctatgacctgtttgagcacgtgagcagcaggaacaaccaggacaccctgaagtgtggcagcaagcacagaagacccaccgtgagcagccagttcaaggacagcctgcacagcctgatggccaccctgagcagcagcaaccccttctttgtgcgctgcatcaagcccaacatgcagaagatgccagaccagtttgaccaggccgtggtgctgaaccagctgcgctacagcggcatgctggagaccgtgcgcatcaggaaggccggctatgctgtgcggcggcccttccaggacttctacaagcgctacaaggtgctgatgaggaacctggccctgcctgaagatgtgcggggcaagtgcaccagcctgctgcagctgtatgatgccagcaacagcgagtggcagctgggcaagaccaaggtgttcctgcgggagagcctggagcagaagctggagaagagaagagaggaggaggtgtcccatgctgccatggtgatccgggcccacgtgctgggcttcctggccaggaagcagtacaggaaggtgctgtactgtgtggtgatcatccagaagaactaccgggccttcctgctgcggcggcgcttcctgcacctgaagaaggccgccatcgtgttccagaagcagctgcggggccagatcgccaggagagtgtaccggcagctgctggccgagaagcgggagcaggaggagaagaagaagcaggaggaggaggagaagaagaagcgggaggaggaggagcgggagcgggagcgggagcggcgggaggccgagctgcgggcccagcaggaggaggagaccaggaagcagcaggagctggaggccctgcagaagagccagaaggaggccgagctgacccgggagctggagaagcagaaggagaacaagcaggtggaggagatcctgcggctggagaaggagattgaggacctgcagaggatgaaggagcagcaggagctgagcctgacagaggccagcctgcagaagctgcaggagcggcgggaccaggagctgcggcggctggaggaggaggcctgcagagctgcccaggagttcctggagagcctgaactttgatgaaattgatgaatgtgtgagaaatattgaaagaagcctgtctgtgggcagcgagttcagcagcgagctggccgagagcgcctgtgaggagaagcccaacttcaacttcagccagccctacccagaggaggaggtggatgagggctttgaagcagatgatgatgccttcaaggacagccccaaccccagcgagcacggccacagcgaccagaggaccagcggcatccgcaccagtgatgacagcagcgaggaggacccctacatgaatgacacagtggtgcccaccagccccagcgctgacagcacagtgctgctggcccccagcgtgcaggacagcggcagcctgcacaacagcagcagcggggagagcacctactgcatgccccagaatgctggggacctgcccagcccagatggagactatgactatgaccaggatgattatgaagatggagccatcaccagcggcagctctgtgaccttcagcaacagctatggcagccagtggagcccagactaccgctgcagcgtgggcacctacaacagcagcggggcctaccgcttcagcagcgagggcgcccagagcagctttgaggacagcgaggaggactttgacagcagatttgacacagatgatgagctgagctacagaagagacagcgtgtacagctgtgtgaccctgccctacttccacagcttcctgtacatgaagggcggcctgatgaacagctggaagaggcgctggtgtgtgctgaaggatgagaccttcctgtggttccgcagcaagcaggaggccctgaagcagggctggctgcacaagaagggcggcggcagcagcaccctgagcagaagaaactggaagaagcgctggtttgtgctgcggcagagcaagctgatgtactttgaaaatgattctgaggagaagctgaagggcaccgtggaggtgaggacagccaaggagatcatcgacaacaccaccaaggaaaatggaattgacatcatcatggctgacaggaccttccacctgattgctgagagcccagaagatgccagccagtggttctctgtgctgagccaggtgcacgccagcacagaccaggagatccaggagatgcatgatgagcaggccaacccccagaatgctgtgggcaccctggatgtgggcctgattgacagcgtgtgtgccagtgacagcccagaccggcccaacagctttgtgatcatcacagccaacagagtgctgcactgcaatgctgacaccccagaggagatgcaccactggatcaccctgctgcagaggagcaaaggagacaccagggtggagggccaggagttcatcgtgcggggctggctgcacaaggaggtgaagaacagccccaagatgagcagcctgaagctgaagaagcgctggtttgtgctgacccacaacagcctggactactacaagagcagcgagaagaatgccctgaagctgggcaccctggtgctgaacagcctgtgcagcgtggtgcccccagatgagaagatcttcaaggagaccggctactggaatgtgacagtgtatggcaggaagcactgctaccgcctgtacaccaagctgctgaatgaggccacccgctggagcagcgccatccagaatgtgacagacaccaaggcccccatcgacacccccacccagcagctgatccaggacatcaaggagaactgcctgaacagtgatgtggtggagcagatctacaagaggaaccccatcctgcgctacacccaccaccccctgcacagccccctgctgcccctgccctatggagacatcaacctgaacctgctgaaggacaagggctacaccaccctgcaggatgaggccatcaagatcttcaacagcctgcagcagctggagagcatgtctgaccccatccccatcatccagggcatcctgcagacaggccatgacctgcggcccctgagagatgagctgtactgccagctgatcaagcagaccaacaaggtgccccaccctggctctgtgggcaacctgtacagctggcagatcctgacctgcctgagctgcaccttcctgcccagccggggcatcctgaagtacctgaagttccacctgaagaggatccgggagcagtttcctggcagcgagatggagaagtatgccctcttcacctatgagagcctgaagaagaccaagtgccgggagtttgtgcccagcagagatgaaattgaggccctgatccaccggcaggagatgaccagcacagtgtactgccacggcggcggcagctgcaagatcaccatcaacagccacaccacagctggggaggtggtggagaagctgatccggggcctggccatggaggacagcaggaacatgtttgccctgtttgagtacaacggccacgtggacaaggccatcgagagcaggacagtggtggctgatgtgctggccaagtttgagaagctggccgccaccagcgaggtgggggacctgccctggaagttctacttcaagctgtactgcttcctggacacagacaacgtgcccaaggacagcgtggagtttgccttcatgtttgagcaggcccacgaggccgtcatccacggccaccacccagcccctgaggagaacctgcaggtgctggccgccctgcggctgcagtacctgcagggcgactacaccctgcacgccgccatcccccccctggaggaggtgtacagcctgcagaggctgaaggcccgcatcagccagagcaccaagaccttcaccccctgtgagcggctggagaagaggaggaccagcttcctggagggcaccctgcggcgctccttcagaactggatctgtggtgcggcagaaggtggaggaggagcagatgctggacatgtggatcaaggaggaggtgtcctctgcccgggccagcatcatcgacaagtggaggaagttccagggcatgaaccaggagcaggccatggccaagtacatggccctgatcaaggagtggccaggctacggcagcaccctgtttgatgtggagtgcaaggagggcggcttcccccaggagctgtggctgggcgtgtctgcagatgctgtgtctgtgtacaagagaggagagggccggcccctggaggtgttccagtatgagcacatcctgagctttggagcccccctggccaacacctacaagatcgtggtggatgagcgggagctgctgtttgagaccagcgaggtggtggatgtggccaagctgatgaaggcctacatctccatgattgtgaagaagcgctacagcaccaccaggtctgccagcagccagggcagcagcaggtag

SEQ ID NO: 160872 - DNA, 4194 bp, synthetic construct; identical to SEQ ID NO: 160870
  misc_feature 1..4194: note = Description of Artificial Sequence: Synthetic coding sequence
  source 1..4194: mol_type = other DNA

SEQ ID NO: 160873 - DNA, 552 bp, synthetic construct
  misc_feature 1..552: note = Description of Artificial Sequence: Synthetic coding sequence
  source 1..552: mol_type = other DNA
atggagaatggagctgtgtacagccccaccacagaagaagatcctggccctgcccggggccccaggagcggcctggccgcctacttcttcatgggccgcctgcccctgctgcggcgggtgctgaagggcctgcagctgctgctgagcctgctggccttcatctgtgaggaggtggtgtcccagtgcaccctgtgtggcggcctgtacttctttgaatttgtgtcctgcagcgccttcctgctgagcctgctgatcctgattgtgtactgcacccccttctatgaaagagtggacaccaccaaggtgaagagcagtgacttctacatcaccctgggcaccggctgtgtgttcctgctggccagcatcatctttgtgtccacccatgacaggaccagcgctgagattgctgccatcgtgtttggcttcatcgccagcttcatgttcctgctggacttcatcaccatgctgtatgagaagaggcaggagagccagctgaggaagccagagaacaccaccagggctgaggccctgacagagcccctgaatgcctag

SEQ ID NO: 160874 - DNA, 1437 bp, synthetic construct
  misc_feature 1..1437: note = Description of Artificial Sequence: Synthetic coding sequence
  source 1..1437: mol_type = other DNA
atgctggagtttgcccagaagtacttccgggacccccagaggcggccccaggacggcctgcggctgaagagcaaggagccccgggagagcaggaccctggaggacatgctgtgcttcaccaagacccccctgcaggagagcctgattgagctgagtgacagcagcctgagcaagatggccacagacatgttcctggccgtgatgaggttcatgggagatgcccccctgaagggccagagcgacctggatgtgctgtgcaacctgctgaagctgtgtggggaccacgaggtgatgagagatgagtgctactgccaggtggtgaagcagatcacagacaacaccagcagcaagcaggacagctgccagaggggctggaggctgctgtacatcgtgacagcctaccacagctgcagcgaggtgctgcacccccacctgacccgcttcctgcaggatgtgtccaggaccccaggcctgcccttccagggcatcgccaaggcctgtgagcagaacctgcagaagaccctgcgctttggaggccgcctggagctgcccagcagcattgagctgcgggccatgctggccggccgcagcagcaagaggcagctgttcctgctgcccggcggcctggagcggcacctgaagatcaagacctgcaccgtggccctggatgtggtggaggagatctgtgccgagatggccctgaccaggcctgaggccttcaatgaatatgtgatctttgtggtgaccaacagaggccagcacgtgtgccccctgagccggcgggcctacatcctggatgtggccagcgagatggagcaggtggatggcggctacatgctgtggttcagaagagtgctgtgggaccagcccctgaagtttgaaaatgagctgtatgtgaccatgcactacaaccaggtgctgcctgactacctgaagggcctcttcagctctgtgcctgccagccggcccagcgagcagctgctgcagcaggtgtccaagctggccagcctgcagcaccgggccaaggaccacttctacctgcccagcgtgcgggaggtgcaggagtacatcccagcccagctgtaccgcaccacagctggcagcacctggctgaacctggtgtcccagcaccggcagcagacccaggccctgagcccccaccaggcccgggcccagttcctgggcctgctgagcgccctgcccatgtttggcagcagcttcttcttcatccagagctgcagcaacattgctgtgcctgccccctgcatcctggccatcaaccacaacggcctgaacttcctgagcacagagacccacgtgtctggcctgagcctggccctgcccagcccccccagcgtgccctggagccccacccccagcaagaggcccaggcctcctgctgctgaggcccagttccactgcctgccccccagctag

SEQ ID NO: 160875 - DNA, 555 bp, synthetic construct
  misc_feature 1..555: note = Description of Artificial Sequence: Synthetic coding sequence
  source 1..555: mol_type = other DNA
atgaacatgctgagcagcctgagccccaccgtggtgctgcctgactacctgaagggcctcttcagctctgtgcctgccagccggcccagcgagcagctgctgcagcaggtgtccaagctggccagcctgcagcaccgggccaaggaccacttctacctgcccagcgtgcgggaggtgcaggagtacatcccagcccagctgtaccgcaccacagctggcagcacctggctgaacctggtgtcccagcaccggcagcagacccaggccctgagcccccaccaggcccgggcccagttcctgggcctgctgagcgccctgcccatgtttggcagcagcttcttcttcatccagagctgcagcaacattgctgtgcctgccccctgcatcctggccatcaaccacaacggcctgaacttcctgagcacagagacccacgtgtctggcctgagcctggccctgcccagcccccccagcgtgccctggagccccacccccagcaagaggcccaggcctcctgctgctgaggcccagttccactgcctgccccccagctag

SEQ ID NO: 160876 - DNA, 735 bp, synthetic construct
  misc_feature 1..735: note = Description of Artificial Sequence: Synthetic coding sequence
  source 1..735: mol_type = other DNA
atgagagatgagtgctactgccaggtggtgaagcagatcacagacaacaccagcagcaagcaggacagctgccagaggggctggaggctgctgtacatcgtgacagcctaccacagctgcagcgaggtgctgcacccccacctgacccgcttcctgcaggatgtgtccaggaccccaggcctgcccttccagggcatcgccaaggcctgtgagcagaacctgcagaagaccctgcgctttggaggccgcctggagctgcccagcagcattgagctgcgggccatgctggccggccgcagcagcaagaggcagctgttcctgctgcccggcggcctggagcggcacctgaagatcaagacctgcaccgtggccctggatgtggtggaggagatctgtgccgagatggccctgaccaggcctgaggccttcaatgaatatgtgatctttgtggtgaccaacagaggaggcaagagccgcagcaccagccagcccagcagcacagtgcagaggcaggcccggcccggcagcacctggagcgccagcacaggcagccgccacagaagaagtgcccccaccaggcctgtgcccagcttctgggccagcagcgccccctacctgtgcagcgccccacccagcagcagcagcagagctgctgccaccctgctgtgccagcccctggccagcctgcccagcaccaccatggccagcaccttcagcgcccagaggctgatgtag

SEQ ID NO: 160877 - DNA, 429 bp, synthetic construct
  misc_feature 1..429: note = Description of Artificial Sequence: Synthetic coding sequence
  source 1..429: mol_type = other DNA
atggtgaagggcggccaggaggccggcggccagctgcgggtgctgcgggcctacagctttgctgacatcctgtttgtgaccatgcccagccagaacatgctggagttcaacctggccagcgagaaggtgatcctcttcagcgcccgggcccaccaggtgaagaccctggtggatgacttcatcctggagctgaagaaggacagcgactatgtggtggccgtgaggaacttcctgcctgaggaccctgccctgctggccttccacaagggggacatcatccacctgcagcccctggagcccccccgggtgggctacagcgctggctgtgtggtgcggaggaaggtggtgtacctggaggagctgcggcggcggggccctgactttggagtgtgccccaggacctggaaccccatccggggggccagctag

SEQ ID NO: 160878 - DNA, 6165 bp, synthetic construct
  misc_feature 1..6165: note = Description of Artificial Sequence: Synthetic coding sequence
  source 1..6165: mol_type = other DNA
atgttcaacctgatgaagaaggacaaggacaaggatggcggcaggaaggagaagaaggagaagaaggagaagaaggagaggatgtctgctgctgagctgcggagcctggaggagatgagcctgcggcggggcttcttcaacctgaacagaagcagcaagcgggagagcaagacccggctggagatcagcaaccccatccccatcaaggtggccagcggcagtgacctgcacctgacagacatcgacagcgacagcaacagaggcagcgtcatcctggacagcggccacctgagcacagccagcagcagtgatgacctgaagggggaggagggcagcttccggggctctgtgctgcagagagctgccaagtttggcagcctggccaagcagaacagccagatgattgtgaagcgcttctccttcagccagaggagcagagatgaaagtgccagcgagaccagcaccccatctgagcacagcgctgcccccagcccccaggtggaggtgaggaccctggagggccagctggtgcagcaccctggccctggcatccccaggcctggccacaggagccgggcccctgagctggtgaccaagaagtttcctgtggacctgcggctgccccctgtggtgcccctgcccccacccaccctgcgggagctggagctgcagaggcggcccaccggggactttggcttcagcctgcggaggaccaccatgctggaccggggccctgagggccaggcctgcagaagagtggtgcactttgctgagcctggagctggcaccaaggacctggccctgggcctggtgcctggggaccggctggtggagatcaatggccacaacgtggagagcaagagcagagatgagatcgtggagatgatccggcagagcggggacagcgtgcggctgaaggtgcagcccatccctgagctgtctgagctgagccgctcctggctgcggtctggagagggcccccggcgggagcccagtgatgccaagacagaggagcagattgctgctgaggaggcctggaatgaaacagagaaggtgtggctggtgcacagagatggcttcagcctggccagccagctgaagtctgaggagctgaacctgcctgagggcaaggtgcgggtgaagctggaccatgatggagccatcctggatgtggatgaagatgatgtggagaaggccaatgcccccagctgtgaccggctggaggacctggccagcctggtgtacctgaatgaatcttctgtgctgcacaccctgcggcagagatatggagccagcctgctgcacacctacgccggccccagcctgctggtgctgggccccaggggggccccagctgtgtacagcgagaaggtgatgcacatgttcaagggctgccggcgggaggacatggccccccacatctatgctgtggcccagacagcctaccgggccatgctgatgagccggcaggaccagagcatcatcctgctgggcagcagcggcagcggcaagaccaccagctgccagcacctggtgcagtacctggccaccatcgccggcatcagcggcaacaaggtgttttctgtggagaagtggcaggccctgtacaccctgctggaggccttcggcaacagccccaccatcatcaatggaaatgccacccgcttcagccagatcctgagcctggactttgaccaggccggccaggtggccagcgccagcatccagaccatgctgctggagaagctgcgggtggcccggcggcctgccagcgaggccaccttcaacgtgttctactacctgctggcctgtggagatggcaccctgaggacagagctgcacctgaaccacctggccgagaacaacgtgtttggcatcgtgcccctggccaagccagaggagaagcagaaggccgcccagcagttcagcaagctgcaggccgccatgaaggtgctgggcatcagcccagatgagcagaaggcctgctggttcatcctggccgccatctaccacctgggcgctgctggggccaccaaggtgcacagcacagctggcaggaagcagtttgcccggcatgagtgggcccagaaggccgcctacctgctgggctgcagcctggaggagctgagcagcgccatcttcaagcaccagcacaagggcggcaccctgcagaggagcaccagcttccggcagggccctgaggagagcggcctgggagatggcaccggccccaagctgagcgccctggagtgcctggagggcatggctgctggcctgtacagcgagctgttcaccctgctggtgtccctggtgaacagagccctgaagagcagccagcacagcctgtgcagcatgatgattgtggacaccccaggcttccagaaccctgagcagggcggcagcgcccggggggccagctttgaggagctgtgccacaactacacccaggaccggctgcagaggctcttccacgagaggacctttgtgcaggagctggagcgctacaaggaggagaacatcgagctggcctttgatgacctggagcccccaacagatgacagcgtggccgctgtggaccaggccagccaccagagcctggtgcgcagcctggccaggacagatgaggcccggggcctgctgtggctgctggaggaggaggccctggtgcctggggccagcgaggacaccctgctggagcggctcttctcctactacggcccccaggagggggacaagaagggccagagccccctgctgcacagcagcaagccccaccacttcctgctgggccacagccacggcaccaactgggtggagtacaacgtgacaggctggctgaactacaccaagcagaacccagccacccagaatgccccccggctgctgcaggacagccagaagaagatcatcagcaacctcttcctgggccgggccggcagcgccaccgtgctgagcggcagcattgctggcctggagggcggcagccagctggccctgcggcgggccacctccatgaggaagaccttcaccaccggcatggctgctgtgaagaagaagagcctgtgcatccagatgaagctgcaggtggatgccctgattgacaccatcaagaagagcaagctgcactttgtgcactgcttcctgcctgtggccgagggctgggccggggagcccaggtctgccagcagccggcgggtgagcagcagcagcgagctggacctgcccagcggggaccactgtgaggccggcctgctgcagctggatgtgcccctgctgcggacccagctgcggggcagccggctgctggatgccatgaggatgtaccggcagggctacccagaccacatggtgttttctgagttcagaagaagatttgatgtgctggccccccacctgaccaagaagcacggcaggaactacatcgtggtggatgagcggcgggctgtggaggagctgctggagtgcctggacctggagaagagcagctgctgcatgggcctgagcagggtcttcttccgggccggcaccctggcccggctggaggagcagagagatgagcagaccagcaggaacctgaccctcttccaggccgcctgccggggctacctggcccggcagcacttcaagaagaggaagatccaggacctggccatccgctgtgtgcagaagaacatcaagaagaacaagggcgtgaaggactggccctggtggaagctgttcaccaccgtgcggcccctgattgaggtgcagctgtctgaggagcagatccggaacaaggatgaggagatccagcagctgcggagcaagctggagaaggccgagaaggagagaaatgagctgcggctgaacagcgaccggctggagagccgcatcagcgagctgaccagcgagctgacagatgagaggaacacaggagagagcgccagccagctgctggatgctgagacagctgagcggctgcgggcagagaaggagatgaaggagctgcagacccagtatgatgccctgaagaagcagatggaggtgatggagatggaggtgatggaggcccggctcatccgggctgctgagatcaatggagaggtggatgatgatgatgctggaggagagtggaggctgaagtatgaaagagctgtgcgggaggtggacttcaccaagaagaggctgcagcaggagtttgaggacaagctggaggtggagcagcagaacaagaggcagctggagcggcggctgggggacctgcaggccgacagcgaggagagccagagggccctgcagcagctgaagaagaagtgccagaggctgacagctgagctgcaggacaccaagctgcacctggagggccagcaggtgaggaaccacgagctggagaagaagcagaggagatttgattctgagctgagccaggcccacgaggaggcccagcgggagaagctgcagcgggagaagctgcagcgggagaaggacatgctgctggccgaggccttcagcctgaagcagcagctggaggagaaggacatggacattgctggcttcacccagaaggtggtgtccctggaggccgagctgcaggacatcagcagccaggagagcaaggatgaggccagcctggccaaggtgaagaagcagctgcgggacctggaggccaaggtgaaggaccaggaggaggagctggatgagcaggccggcaccatccagatgctggagcaggccaagctgcggctggagatggagatggagaggatgaggcagacccacagcaaggagatggagagcagagatgaggaggtggaggaggcccggcagagctgccagaagaagctgaagcagatggaggtgcagctggaggaggagtatgaggacaagcagaaggtgctgcgggagaagcgggagctggagggcaagctggccaccctgagtgaccaggtgaacagaagagactttgagagcgagaagaggctgaggaaggacctgaagaggaccaaggccctgctggctgatgcccagctgatgctggaccacctgaagaacagcgcccccagcaagcgggagatcgcccagctgaagaaccagctggaggagagcgagttcacctgtgccgctgctgtgaaggccaggaaggccatggaggtggagattgaggacctgcacctgcagattgatgacatcgccaaggccaagacagccctggaggagcagctgagccggctgcagcgggagaagaatgagatccagaaccggctggaggaggaccaggaggacatgaatgagctgatgaagaagcacaaggctgctgtggcccaggccagccgggacctggcccagatcaatgacctgcaggcccagctggaggaggccaacaaggagaagcaggagctgcaggagaagctgcaggccctgcagagccaggtggagttcctggagcagagcatggtggacaagagcctggtgtcccggcaggaggccaagatccgggagctggagacccggctggagtttgagaggacccaggtgaagaggctggagagcctggccagccggctgaaggagaacatggagaagctgacagaggagcgggaccagagaattgctgctgagaaccgggagaaggagcagaacaagaggctgcagaggcagctgcgggacaccaaggaggagatgggagagctggccaggaaggaggccgaggccagcaggaagaagcatgagctggagatggacctggagagcctggaggccgccaaccagagcctgcaggccgacctgaagctggccttcaagagaattggagacctgcaggccgccattgaagatgagatggagagtgatgaaaatgaagacctgatcaacagcctgcaggacatggtgaccaagtaccagaagaggaagaacaagctggagggggacagtgatgtggacagcgagctggaggacagagtggatggagtgaagtcctggctgagcaagaacaagggccccagcaaggccgccagtgatgatggcagcctgaagagcagcagccccaccagctactggaagagcctggccccagacagaagtgatgatgaacatgaccccctggacaacaccagccggccccgctacagccacagctacctgagtgacagcgacacagaggccaagctgacagagaccaatgcctag

SEQ ID NO: 160879 - DNA, 6009 bp, synthetic construct
  misc_feature 1..6009: note = Description of Artificial Sequence: Synthetic coding sequence
  source 1..6009: mol_type = other DNA
atgttcaacctgatgaagaaggacaaggacaaggatggcggcaggaaggagaagaaggagaagaaggagaagaaggagaggatgtctgctgctgagctgcggagcctggaggagatgagcctgcggcggggcttcttcaacctgaacagaagcagcaagcgggagagcaagacccggctggagatcagcaaccccatccccatcaaggtggccagcggcagtgacctgcacctgacagacatcgacagcgacagcaacagaggcagcgtcatcctggacagcggccacctgagcacagccagcagcagtgatgacctgaagggggaggagggcagcttccggggctctgtgctgcagagagctgccaagtttggcagcctggccaagcagaacagccagatgattgtgaagcgcttctccttcagccagaggagcagagatgaaagtgccagcgagaccagcaccccatctgagcacagcgctgcccccagcccccaggtggaggtgaggaccctggagggccagctggtgcagcaccctggccctggcatccccaggcctggccacaggagccgggcccctgagctggtgaccaagaagtttcctgtggacctgcggctgccccctgtggtgcccctgcccccacccaccctgcgggagctggagctgcagaggcggcccaccggggactttggcttcagcctgcggaggaccaccatgctggaccggggccctgagggccaggcctgcagaagagtggtgcactttgctgagcctggagctggcaccaaggacctggccctgggcctggtgcctggggaccggctggtggagatcaatggccacaacgtggagagcaagagcagagatgagatcgtggagatgatccggcagagcggggacagcgtgcggctgaaggtgcagcccatccctgagctgtctgagctgagccgctcctggctgcggtctggagagggcccccggcgggagcccagtgatgccaagacagaggagcagattgctgctgaggaggcctggaatgaaacagagaaggtgtggctggtgcacagagatggcttcagcctggccagccagctgaagtctgaggagctgaacctgcctgagggcaaggtgcgggtgaagctggaccatgatggagccatcctggatgtggatgaagatgatgtggagaaggccaatgcccccagctgtgaccggctggaggacctggccagcctggtgtacctgaatgaatcttctgtgctgcacaccctgcggcagagatatggagccagcctgctgcacacctacgccggccccagcctgctggtgctgggccccaggggggccccagctgtgtacagcgagaaggtgatgcacatgttcaagggctgccggcgggaggacatggccccccacatctatgctgtggcccagacagcctaccgggccatgctgatgagccggcaggaccagagcatcatcctgctgggcagcagcggcagcggcaagaccaccagctgccagcacctggtgcagtacctggccaccatcgccggcatcagcggcaacaaggtgttttctgtggagaagtggcaggccctgtacaccctgctggaggccttcggcaacagccccaccatcatcaatggaaatgccacccgcttcagccagatcctgagcctggactttgaccaggccggccaggtggccagcgccagcatccagaccatgctgctggagaagctgcgggtggcccggcggcctgccagcgaggccaccttcaacgtgttctactacctgctggcctgtggagatggcaccctgaggacagagctgcacctgaaccacctggccgagaacaacgtgtttggcatcgtgcccctggccaagccagaggagaagcagaaggccgcccagcagttcagcaagctgcaggccgccatgaaggtgctgggcatcagcccagatgagcagaaggcctgctggttcatcctggccgccatctaccacctgggcgctgctggggccaccaaggtgcacagcacagctggcaggaagcagtttgcccggcatgagtgggcccagaaggccgcctacctgctgggctgcagcctggaggagctgagcagcgccatcttcaagcaccagcacaagggcggcaccctgcagaggagcaccagcttccggcagggccctgaggagagcggcctgggagatggcaccggccccaagctgagcgccctggagtgcctggagggcatggctgctggcctgtacagcgagctgttcaccctgctggtgtccctggtgaacagagccctgaagagcagccagcacagcctgtgcagcatgatgattgtggacaccccaggcttccagaaccctgagcagggcggcagcgcccggggggccagctttgaggagctgtgccacaactacacccaggaccggctgcagaggctcttccacgagaggacctttgtgcaggagctggagcgctacaaggaggagaacatcgagctggcctttgatgacctggagcccccaacagatgacagcgtggccgctgtggaccaggccagccaccagagcctggtgcgcagcctggccaggacagatgaggcccggggcctgctgtggctgctggaggaggaggccctggtgcctggggccagcgaggacaccctgctggagcggctcttctcctactacggcccccaggagggggacaagaagggccagagccccctgctgcacagcagcaagccccaccacttcctgctgggccacagccacggcaccaactgggtggagtacaacgtgacaggctggctgaactacaccaagcagaacccagccacccagaatgccccccggctgctgcaggacagccagaagaagatcatcagcaacctcttcctgggccgggccggcagcgccaccgtgctgagcggcagcattgctggcctggagggcggcagccagctggccctgcggcgggccacctccatgaggaagaccttcaccaccggcatggctgctgtgaagaagaagagcctgtgcatccagatgaagctgcaggtggatgccctgattgacaccatcaagaagagcaagctgcactttgtgcactgcttcctgcctgtggccgagggctgggccggggagcccaggtctgccagcagccggcgggtgagcagcagcagcgagctggacctgcccagcggggaccactgtgaggccggcctgctgcagctggatgtgcccctgctgcggacccagctgcggggcagccggctgctggatgccatgaggatgtaccggcagggctacccagaccacatggtgttttctgagttcagaagaagatttgatgtgctggccccccacctgaccaagaagcacggcaggaactacatcgtggtggatgagcggcgggctgtggaggagctgctggagtgcctggacctggagaagagcagctgctgcatgggcctgagcagggtcttcttccgggccggcaccctggcccggctggaggagcagagagatgagcagaccagcaggaacctgaccctcttccaggccgcctgccggggctacctggcccggcagcacttcaagaagaggaagatccaggacctggccatccgctgtgtgcagaagaacatcaagaagaacaagggcgtgaaggactggccctggtggaagctgttcaccaccgtgcggcccctgattgaggtgcagctgtctgaggagcagatccggaacaaggatgaggagatccagcagctgcggagcaagctggagaaggccgagaaggagagaaatgagctgcggctgaacagcgaccggctggagagccgcatcagcgagctgaccagcgagctgacagatgagaggaacacaggagagagcgccagccagctgctggatgctgagacagctgagcggctgcgggcagagaaggagatgaaggagctgcagacccagtatgatgccctgaagaagcagatggaggtgatggagatggaggtgatggaggcccggctcatccgggctgctgagatcaatggagaggtggatgatgatgatgctggaggagagtggaggctgaagtatgaaagagctgtgcgggaggtggacttcaccaagaagaggctgcagcaggagtttgaggacaagctggaggtggagcagcagaacaagaggcagctggagcggcggctgggggacctgcaggccgacagcgaggagagccagagggccctgcagcagctgaagaagaagtgccagaggctgacagctgagctgcaggacaccaagctgcacctggagggccagcaggtgaggaaccacgagctggagaagaagcagaggagatttgattctgagctgagccaggcccacgaggaggcccagcgggagaagctgcagcgggagaagctgcagcgggagaaggacatgctgctggccgaggccttcagcctgaagcagcagctggaggagaaggacatggacattgctggcttcacccagaaggtggtgtccctggaggccgagctgcaggacatcagcagccaggagagcaaggatgaggccagcctggccaaggtgaagaagcagctgcgggacctggaggccaaggtgaaggaccaggaggaggagctggatgagcaggccggcaccatccagatgctggagcagctgaagcagatggaggtgcagctggaggaggagtatgaggacaagcagaaggtgctgcgggagaagcgggagctggagggcaagctggccaccctgagtgaccaggtgaacagaagagactttgaaagtgagaagaggctgaggaaggacctgaagaggaccaaggccctgctggctgatgcccagctgatgctggaccacctgaagaacagcgcccccagcaagcgggagatcgcccagctgaagaaccagctggaggagagcgagttcacctgtgccgctgctgtgaaggccaggaaggccatggaggtggagattgaggacctgcacctgcagattgatgacatcgccaaggccaagacagccctggaggagcagctgagccggctgcagcgggagaagaatgagatccagaaccggctggaggaggaccaggaggacatgaatgagctgatgaagaagcacaaggctgctgtggcccaggccagccgggacctggcccagatcaatgacctgcaggcccagctggaggaggccaacaaggagaagcaggagctgcaggagaagctgcaggccctgcagagccaggtggagttcctggagcagagcatggtggacaagagcctggtgtcccggcaggaggccaagatccgggagctggagacccggctggagtttgagaggacccaggtgaagaggctggagagcctggccagccggctgaaggagaacatggagaagctgacagaggagcgggaccagagaattgctgctgaaaatcgggagaaggagcagaacaagaggctgcagaggcagctgcgggacaccaaggaggagatgggagagctggccaggaaggaggccgaggccagcaggaagaagcatgagctggagatggacctggagagcctggaggccgccaaccagagcctgcaggccgacctgaagctggccttcaagagaattggagacctgcaggccgccattgaagatgagatggagagtgatgaaaatgaagatctcatcaacagcgagggggacagtgatgtggacagcgagctggaggacagagtggatggagtgaagtcctggctgagcaagaacaagggccccagcaaggccgccagtgatgatggcagcctgaagagcagcagccccaccagctactggaagagcctggccccagacagaagtgatgatgaacatgaccccctggacaacaccagccggccccgctacagccacagctacctgagtgacagcgacacagaggccaagctgacagagaccaatgcctag

SEQ ID NO: 160880 - DNA, 4929 bp, synthetic construct
  misc_feature 1..4929: note = Description of Artificial Sequence: Synthetic coding sequence
  source 1..4929: mol_type = other DNA
atggagggccccaggaccaccaagctggagggcagcagcaaggagggcagcggccccagccgcagcccccagccccccaccagccccatccccccagagaccagccagagggcccggagccctgcccccaccctggccatgaatggacctggggccgccacagctgagggcctgtctgaggaggccccagctgtgtacagcgagaaggtgatgcacatgttcaagggctgccggcgggaggacatggccccccacatctatgctgtggcccagacagcctaccgggccatgctgatgagccggcaggaccagagcatcatcctgctgggcagcagcggcagcggcaagaccaccagctgccagcacctggtgcagtacctggccaccatcgccggcatcagcggcaacaaggtgttttctgtggagaagtggcaggccctgtacaccctgctggaggccttcggcaacagccccaccatcatcaatggaaatgccacccgcttcagccagatcctgagcctggactttgaccaggccggccaggtggccagcgccagcatccagaccatgctgctggagaagctgcgggtggcccggcggcctgccagcgaggccaccttcaacgtgttctactacctgctggcctgtggagatggcaccctgaggacagagctgcacctgaaccacctggccgagaacaacgtgtttggcatcgtgcccctggccaagccagaggagaagcagaaggccgcccagcagttcagcaagctgcaggccgccatgaaggtgctgggcatcagcccagatgagcagaaggcctgctggttcatcctggccgccatctaccacctgggcgctgctggggccaccaaggaggccgctgaggccggcaggaagcagtttgcccggcatgagtgggcccagaaggccgcctacctgctgggctgcagcctggaggagctgagcagcgccatcttcaagcaccagcacaagggcggcaccctgcagaggagcaccagcttccggcagggccctgaggagagcggcctgggagatggcaccggccccaagctgagcgccctggagtgcctggagggcatggctgctggcctgtacagcgagctgttcaccctgctggtgtccctggtgaacagagccctgaagagcagccagcacagcctgtgcagcatgatgattgtggacaccccaggcttccagaaccctgagcagggcggcagcgcccggggggccagctttgaggagctgtgccacaactacacccaggaccggctgcagaggctcttccacgagaggacctttgtgcaggagctggagcgctacaaggaggagaacatcgagctggcctttgatgacctggagcccccaacagatgacagcgtggccgctgtggaccaggccagccaccagagcctggtgcgcagcctggccaggacagatgaggcccggggcctgctgtggctgctggaggaggaggccctggtgcctggggccagcgaggacaccctgctggagcggctcttctcctactacggcccccaggagggggacaagaagggccagagccccctgctgcacagcagcaagccccaccacttcctgctgggccacagccacggcaccaactgggtggagtacaacgtgacaggctggctgaactacaccaagcagaacccagccacccagaatgccccccggctgctgcaggacagccagaagaagatcatcagcaacctcttcctgggccgggccggcagcgccaccgtgctgagcggcagcattgctggcctggagggcggcagccagctggccctgcggcgggccacctccatgaggaagaccttcaccaccggcatggctgctgtgaagaagaagagcctgtgcatccagatgaagctgcaggtggatgccctgattgacaccatcaagaagagcaagctgcactttgtgcactgcttcctgcctgtggccgagggctgggccggggagcccaggtctgccagcagccggcgggtgagcagcagcagcgagctggacctgcccagcggggaccactgtgaggccggcctgctgcagctggatgtgcccctgctgcggacccagctgcggggcagccggctgctggatgccatgaggatgtaccggcagggctacccagaccacatggtgttttctgagttcagaagaagatttgatgtgctggccccccacctgaccaagaagcacggcaggaactacatcgtggtggatgagcggcgggctgtggaggagctgctggagtgcctggacctggagaagagcagctgctgcatgggcctgagcagggtcttcttccgggccggcaccctggcccggctggaggagcagagagatgagcagaccagcaggaacctgaccctcttccaggccgcctgccggggctacctggcccggcagcacttcaagaagaggaagatccaggacctggccatccgctgtgtgcagaagaacatcaagaagaacaagggcgtgaaggactggccctggtggaagctgttcaccaccgtgcggcccctgattgaggtgcagctgtctgaggagcagatccggaacaaggatgaggagatccagcagctgcggagcaagctggagaaggccgagaaggagagaaatgagctgcggctgaacagcgaccggctggagagccgcatcagcgagctgaccagcgagctgacagatgagaggaacacaggagagagcgccagccagctgctggatgctgagacagctgagcggctgcgggcagagaaggagatgaaggagctgcagacccagtatgatgccctgaagaagcagatggaggtgatggagatggaggtgatggaggcccggctcatccgggctgctgagatcaatggagaggtggatgatgatgatgctggaggagagtggaggctgaagtatgaaagagctgtgcgggaggtggacttcaccaagaagaggctgcagcaggagtttgaggacaagctggaggtggagcagcagaacaagaggcagctggagcggcggctgggggacctgcaggccgacagcgaggagagccagagggccctgcagcagctgaagaagaagtgccagaggctgacagctgagctgcaggacaccaagctgcacctggagggccagcaggtgaggaaccacgagctggagaagaagcagaggagatttgattctgagctgagccaggcccacgaggaggcccagcgggagaagctgcagcgggagaagctgcagcgggagaaggacatgctgctggccgaggccttcagcctgaagcagcagctggaggagaaggacatggacattgctggcttcacccagaaggtggtgtccctggaggccgagctgcaggacatcagcagccaggagagcaaggatgaggccagcctggccaaggtgaagaagcagctgcgggacctggaggccaaggtgaaggaccaggaggaggagctggatgagcaggccaagctgcggctggagatggagatggagaggatgaggcagacccacagcaaggagatggagagcagagatgaggaggtggaggaggcccggcagagctgccagaagaagctgaagcagatggaggtgcagctggaggaggagtatgaggacaagcagaaggtgctgcgggagaagcgggagctggagggcaagctggccaccctgagtgaccaggtgaacagaagagactttgaaagtgagaagaggctgaggaaggacctgaagaggaccaaggccctgctggctgatgcccagctgatgctggaccacctgaagaacagcgcccccagcaagcgggagatcgcccagctgaagaaccagctggaggagagcgagttcacctgtgccgctgctgtgaaggccaggaaggccatggaggtggagattgaggacctgcacctgcagattgatgacatcgccaaggccaagacagccctggaggagcagctgagccggctgcagcgggagaagaatgagatccagaaccggctggaggaggaccaggaggacatgaatgagctgatgaagaagcacaaggctgctgtggcccaggccagccgggacctggcccagatcaatgacctgcaggcccagctggaggaggccaacaaggagaagcaggagctgcaggagaagctgcaggccctgcagagccaggtggagttcctggagcagagcatggtggacaagagcctggtgtcccggcaggaggccaagatccgggagctggagacccggctggagtttgagaggacccaggtgaagaggctggagagcctggccagccggctgaaggagaacatggagaagctgacagaggagcgggaccagagaattgctgctgaaaatcgggagaaggagcagaacaagaggctgcagaggcagctgcgggacaccaaggaggagatgggagagctggccaggaaggaggccgaggccagcaggaagaagcatgagctggagatggacctggagagcctggaggccgccaaccagagcctgcaggccgacctgaagctggccttcaagagaattggagacctgcaggccgccattgaagatgagatggagagtgatgaaaatgaagatctcatcaacagcgagggggacagtgatgtggacagcgagctggaggacagagtggatggagtgaagtcctggctgagcaagaacaagggccccagcaaggccgccagtgatgatggcagcctgaagagcagcagccccaccagctactggaagagcctggccccagacagaagtgatgatgaacatgaccccctggacaacaccagccggccccgctacagccacagctacctgagtgacagcgacacagaggccaagctgacagagaccaatgcctag

SEQ ID NO: 160881 - DNA, 6165 bp, synthetic construct
  misc_feature 1..6165: note = Description of Artificial Sequence: Synthetic coding sequence
  source 1..6165: mol_type = other DNA
atgttcaacctgatgaagaaggacaaggacaaggatggcggcaggaaggagaagaaggagaagaaggagaagaaggagaggatgtctgctgctgagctgcggagcctggaggagatgagcctgcggcggggcttcttcaacctgaacagaagcagcaagcgggagagcaagacccggctggagatcagcaaccccatccccatcaaggtggccagcggcagtgacctgcacctgacagacatcgacagcgacagcaacagaggcagcgtcatcctggacagcggccacctgagcacagccagcagcagtgatgacctgaagggggaggagggcagcttccggggctctgtgctgcagagagctgccaagtttggcagcctggccaagcagaacagccagatgattgtgaagcgcttctccttcagccagaggagcagagatgaaagtgccagcgagaccagcaccccatctgagcacagcgctgcccccagcccccaggtggaggtgaggaccctggagggccagctggtgcagcaccctggccctggcatccccaggcctggccacaggagccgggcccctgagctggtgaccaagaagtttcctgtggacctgcggctgccccctgtggtgcccctgcccccacccaccctgcgggagctggagctgcagaggcggcccaccggggactttggcttcagcctgcggaggaccaccatgctggaccggggccctgagggccaggcctgcagaagagtggtgcactttgctgagcctggagctggcaccaaggacctggccctgggcctggtgcctggggaccggctggtggagatcaatggccacaacgtggagagcaagagcagagatgagatcgtggagatgatccggcagagcggggacagcgtgcggctgaaggtgcagcccatccctgagctgtctgagctgagccgctcctggctgcggtctggagagggcccccggcgggagcccagtgatgccaagacagaggagcagattgctgctgaggaggcctggaatgaaacagagaaggtgtggctggtgcacagagatggcttcagcctggccagccagctgaagtctgaggagctgaacctgcctgagggcaaggtgcgggtgaagctggaccatgatggagccatcctggatgtggatgaagatgatgtggagaaggccaatgcccccagctgtgaccggctggaggacctggccagcctggtgtacctgaatgaatcttctgtgctgcacaccctgcggcagagatatggagccagcctgctgcacacctacgccggccccagcctgctggtgctgggccccaggggggccccagctgtgtacagcgagaaggtgatgcacatgttcaagggctgccggcgggaggacatggccccccacatctatgctgtggcccagacagcctaccgggccatgctgatgagccggcaggaccagagcatcatcctgctgggcagcagcggcagcggcaagaccaccagctgccagcacctggtgcagtacctggccaccatcgccggcatcagcggcaacaaggtgttttctgtggagaagtggcaggccctgtacaccctgctggaggccttcggcaacagccccaccatcatcaatggaaatgccacccgcttcagccagatcctgagcctggactttgaccaggccggccaggtggccagcgccagcatccagaccatgctgctggagaagctgcgggtggcccggcggcctgccagcgaggccaccttcaacgtgttctactacctgctggcctgtggagatggcaccctgaggacagagctgcacctgaaccacctggccgagaacaacgtgtttggcatcgtgcccctggccaagccagaggagaagcagaaggccgcccagcagttcagcaagctgcaggccgccatgaaggtgctgggcatcagcccagatgagcagaaggcctgctggttcatcctggccgccatctaccacctgggcgctgctggggccaccaaggaggccgctgaggccggcaggaagcagtttgcccggcatgagtgggcccagaaggccgcctacctgctgggctgcagcctggaggagctgagcagcgccatcttcaagcaccagcacaagggcggcaccctgcagaggagcaccagcttccggcagggccctgaggagagcggcctgggagatggcaccggccccaagctgagcgccctggagtgcctggagggcatggctgctggcctgtacagcgagctgttcaccctgctggtgtccctggtgaacagagccctgaagagcagccagcacagcctgtgcagcatgatgattgtggacaccccaggcttccagaaccctgagcagggcggcagcgcccggggggccagctttgaggagctgtgccacaactacacccaggaccggctgcagaggctcttccacgagaggacctttgtgcaggagctggagcgctacaaggaggagaacatcgagctggcctttgatgacctggagcccccaacagatgacagcgtggccgctgtggaccaggccagccaccagagcctggtgcgcagcctggccaggacagatgaggcccggggcctgctgtggctgctggaggaggaggccctggtgcctggggccagcgaggacaccctgctggagcggctcttctcctactacggcccccaggagggggacaagaagggccagagccccctgctgcacagcagcaagccccaccacttcctgctgggccacagccacggcaccaactgggtggagtacaacgtgacaggctggctgaactacaccaagcagaacccagccacccagaatgccccccggctgctgcaggacagccagaagaagatcatcagcaacctcttcctgggccgggccggcagcgccaccgtgctgagcggcagcattgctggcctggagggcggcagccagctggccctgcggcgggccacctccatgaggaagaccttcaccaccggcatggctgctgtgaagaagaagagcctgtgcatccagatgaagctgcaggtggatgccctgattgacaccatcaagaagagcaagctgcactttgtgcactgcttcctgcctgtggccgagggctgggccggggagcccaggtctgccagcagccggcgggtgagcagcagcagcgagctggacctgcccagcggggaccactgtgaggccggcctgctgcagctggatgtgcccctgctgcggacccagctgcggggcagccggctgctggatgccatgaggatgtaccggcagggctacccagaccacatggtgttttctgagttcagaagaagatttgatgtgctggccccccacctgaccaagaagcacggcaggaactacatcgtggtggatgagcggcgggctgtggaggagctgctggagtgcctggacctggagaagagcagctgctgcatgggcctgagcagggtcttcttccgggccggcaccctggcccggctggaggagcagagagatgagcagaccagcaggaacctgaccctcttccaggccgcctgccggggctacctggcccggcagcacttcaagaagaggaagatccaggacctggccatccgctgtgtgcagaagaacatcaagaagaacaagggcgtgaaggactggccctggtggaagctgttcaccaccgtgcggcccctgattgaggtgcagctgtctgaggagcagatccggaacaaggatgaggagatccagcagctgcggagcaagctggagaaggccgagaaggagagaaatgagctgcggctgaacagcgaccggctggagagccgcatcagcgagctgaccagcgagctgacagatgagaggaacacaggagagagcgccagccagctgctggatgctgagacagctgagcggctgcgggcagagaaggagatgaaggagctgcagacccagtatgatgccctgaagaagcagatggaggtgatggagatggaggtgatggaggcccggctcatccgggctgctgagatcaatggagaggtggatgatgatgatgctggaggagagtggaggctgaagtatgaaagagctgtgcgggaggtggacttcaccaagaagaggctgcagcaggagtttgaggacaagctggaggtggagcagcagaacaagaggcagctggagcggcggctgggggacctgcaggccgacagcgaggagagccagagggccctgcagcagctgaagaagaagtgccagaggctgacagctgagctgcaggacaccaagctgcacctggagggccagcaggtgaggaaccacgagctggagaagaagcagaggagatttgattctgagctgagccaggcccacgaggaggcccagcgggagaagctgcagcgggagaagctgcagcgggagaaggacatgctgctggccgaggccttcagcctgaagcagcagctggaggagaaggacatggacattgctggcttcacccagaaggtggtgtccctggaggccgagctgcaggacatcagcagccaggagagcaaggatgaggccagcctggccaaggtgaagaagcagctgcgggacctggaggccaaggtgaaggaccaggaggaggagctggatgagcaggccggcaccatccagatgctggagcaggccaagctgcggctggagatggagatggagaggatgaggcagacccacagcaaggagatggagagcagagatgaggaggtggaggaggcccggcagagctgccagaagaagctgaagcagatggaggtgcagctggaggaggagtatgaggacaagcagaaggtgctgcgggagaagcgggagctggagggcaagctggccaccctgagtgaccaggtgaacagaagagactttgagagcgagaagaggctgaggaaggacctgaagaggaccaaggccctgctggctgatgcccagctgatgctggaccacctgaagaacagcgcccccagcaagcgggagatcgcccagctgaagaaccagctggaggagagcgagttcacctgtgccgctgctgtgaaggccaggaaggccatggaggtggagattgaggacctgcacctgcagattgatgacatcgccaaggccaagacagccctggaggagcagctgagccggctgcagcgggagaagaatgagatccagaaccggctggaggaggaccaggaggacatgaatgagctgatgaagaagcacaaggctgctgtggcccaggccagccgggacctggcccagatcaatgacctgcaggcccagctggaggaggccaacaaggagaagcaggagctgcaggagaagctgcaggccctgcagagccaggtggagttcctggagcagagcatggtggacaagagcctggtgtcccggcaggaggccaagatccgggagctggagacccggctggagtttgagaggacccaggtgaagaggctggagagcctggccagccggctgaaggagaacatggagaagctgacagaggagcgggaccagagaattgctgctgagaaccgggagaaggagcagaacaagaggctgcagaggcagctgcgggacaccaaggaggagatgggagagctggccaggaaggaggccgaggccagcaggaagaagcatgagctggagatggacctggagagcctggaggccgccaaccagagcctgcaggccgacctgaagctggccttcaagagaattggagacctgcaggccgccattgaagatgagatggagagtgatgaaaatgaagacctgatcaacagcctgcaggacatggtgaccaagtaccagaagaggaagaacaagctggagggggacagtgatgtggacagcgagctggaggacagagtggatggagtgaagtcctggctgagcaagaacaagggccccagcaaggccgccagtgatgatggcagcctgaagagcagcagccccaccagctactggaagagcctggccccagacagaagtgatgatgaacatgaccccctggacaacaccagccggccccgctacagccacagctacctgagtgacagcgacacagaggccaagctgacagagaccaatgcctag

SEQ ID NO: 160882 - DNA, 2808 bp, synthetic construct
  misc_feature 1..2808: note = Description of Artificial Sequence: Synthetic coding sequence
  source 1..2808: mol_type = other DNA
atgaggatgtaccggcagggctacccagaccacatggtgttttctgagttcagaagaagatttgatgtgctggccccccacctgaccaagaagcacggcaggaactacatcgtggtggatgagcggcgggctgtggaggagctgctggagtgcctggacctggagaagagcagctgctgcatgggcctgagcagggtcttcttccgggccggcaccctggcccggctggaggagcagagagatgagcagaccagcaggaacctgaccctcttccaggccgcctgccggggctacctggcccggcagcacttcaagaagaggaagatccaggacctggccatccgctgtgtgcagaagaacatcaagaagaacaagggcgtgaaggactggccctggtggaagctgttcaccaccgtgcggcccctgattgaggtgcagctgtctgaggagcagatccggaacaaggatgaggagatccagcagctgcggagcaagctggagaaggccgagaaggagagaaatgagctgcggctgaacagcgaccggctggagagccgcatcagcgagctgaccagcgagctgacagatgagaggaacacaggagagagcgccagccagctgctggatgctgagacagctgagcggctgcgggcagagaaggagatgaaggagctgcagacccagtatgatgccctgaagaagcagatggaggtgatggagatggaggtgatggaggcccggctcatccgggctgctgagatcaatggagaggtggatgatgatgatgctggaggagagtggaggctgaagtatgaaagagctgtgcgggaggtggacttcaccaagaagaggctgcagcaggagtttgaggacaagctggaggtggagcagcagaacaagaggcagctggagcggcggctgggggacctgcaggccgacagcgaggagagccagagggccctgcagcagctgaagaagaagtgccagaggctgacagctgagctgcaggacaccaagctgcacctggagggccagcaggtgaggaaccacgagctggagaagaagcagaggagatttgattctgagctgagccaggcccacgaggaggcccagcgggagaagctgcagcgggagaagctgcagcgggagaaggacatgctgctggccgaggccttcagcctgaagcagcagctggaggagaaggacatggacattgctggcttcacccagaaggtggtgtccctggaggccgagctgcaggacatcagcagccaggagagcaaggatgaggccagcctggccaaggtgaagaagcagctgcgggacctggaggccaaggtgaaggaccaggaggaggagctggatgagcaggccggcaccatccagatgctggagcaggccaagctgcggctggagatggagatggagaggatgaggcagacccacagcaaggagatggagagcagagatgaggaggtggaggaggcccggcagagctgccagaagaagctgaagcagatggaggtgcagctggaggaggagtatgaggacaagcagaaggtgctgcgggagaagcgggagctggagggcaagctggccaccctgagtgaccaggtgaacagaagagactttgagagcgagaagaggctgaggaaggacctgaagaggaccaaggccctgctggctgatgcccagctgatgctggaccacctgaagaacagcgcccccagcaagcgggagatcgcccagctgaagaaccagctggaggagagcgagttcacctgtgccgctgctgtgaaggccaggaaggccatggaggtggagattgaggacctgcacctgcagattgatgacatcgccaaggccaagacagccctggaggagcagctgagccggctgcagcgggagaagaatgagatccagaaccggctggaggaggaccaggaggacatgaatgagctgatgaagaagcacaaggctgctgtggcccaggccagccgggacctggcccagatcaatgacctgcaggcccagctggaggaggccaacaaggagaagcaggagctgcaggagaagctgcaggccctgcagagccaggtggagttcctggagcagagcatggtggacaagagcctggtgtcccggcaggaggccaagatccgggagctggagacccggctggagtttgagaggacccaggtgaagaggctggagagcctggccagccggctgaaggagaacatggagaagctgacagaggagcgggaccagagaattgctgctgagaaccgggagaaggagcagaacaagaggctgcagaggcagctgcgggacaccaaggaggagatgggagagctggccaggaaggaggccgaggccagcaggaagaagcatgagctggagatggacctggagagcctggaggccgccaaccagagcctgcaggccgacctgaagctggccttcaagagaattggagacctgcaggccgccattgaagatgagatggagagtgatgaaaatgaagacctgatcaacagcgagggggacagtgatgtggacagcgagctggaggacagagtggatggagtgaagtcctggctgagcaagaacaagggccccagcaaggccgccagtgatgatggcagcctgaagagcagcagccccaccagctactggaagagcctggccccagacagaagtgatgatgaacatgaccccctggacaacaccagccggccccgctacagccacagctacctgagtgacagcgacacagaggccaagctgacagagaccaatgcctag

SEQ ID NO: 160883 - DNA, 6120 bp, synthetic construct
  misc_feature 1..6120: note = Description of Artificial Sequence: Synthetic coding sequence
  source 1..6120: mol_type = other DNA
atgttcaacctgatgaagaaggacaaggacaaggatggcggcaggaaggagaagaaggagaagaaggagaagaaggagaggatgtctgctgctgagctgcggagcctggaggagatgagcctgcggcggggcttcttcaacctgaacagaagcagcaagcgggagagcaagacccggctggagatcagcaaccccatccccatcaaggtggccagcggcagtgacctgcacctgacagacatcgacagcgacagcaacagaggcagcgtcatcctggacagcggccacctgagcacagccagcagcagtgatgacctgaagggggaggagggcagcttccggggctctgtgctgcagagagctgccaagtttggcagcctggccaagcagaacagccagatgattgtgaagcgcttctccttcagccagaggagcagagatgaaagtgccagcgagaccagcaccccatctgagcacagcgctgcccccagcccccaggtggaggtgaggaccctggagggccagctggtgcagcaccctggccctggcatccccaggcctggccacaggagccgggcccctgagctggtgaccaagaagtttcctgtggacctgcggctgccccctgtggtgcccctgcccccacccaccctgcgggagctggagctgcagaggcggcccaccggggactttggcttcagcctgcggaggaccaccatgctggaccggggccctgagggccaggcctgcagaagagtggtgcactttgctgagcctggagctggcaccaaggacctggccctgggcctggtgcctggggaccggctggtggagatcaatggccacaacgtggagagcaagagcagagatgagatcgtggagatgatccggcagagcggggacagcgtgcggctgaaggtgcagcccatccctgagctgtctgagctgagccgctcctggctgcggtctggagagggcccccggcgggagcccagtgatgccaagacagaggagcagattgctgctgaggaggcctggaatgaaacagagaaggtgtggctggtgcacagagatggcttcagcctggccagccagctgaagtctgaggagctgaacctgcctgagggcaaggtgcgggtgaagctggaccatgatggagccatcctggatgtggatgaagatgatgtggagaaggccaatgcccccagctgtgaccggctggaggacctggccagcctggtgtacctgaatgaatcttctgtgctgcacaccctgcggcagagatatggagccagcctgctgcacacctacgccggccccagcctgctggtgctgggccccaggggggccccagctgtgtacagcgagaaggtgatgcacatgttcaagggctgccggcgggaggacatggccccccacatctatgctgtggcccagacagcctaccgggccatgctgatgagccggcaggaccagagcatcatcctgctgggcagcagcggcagcggcaagaccaccagctgccagcacctggtgcagtacctggccaccatcgccggcatcagcggcaacaaggtgttttctgtggagaagtggcaggccctgtacaccctgctggaggccttcggcaacagccccaccatcatcaatggaaatgccacccgcttcagccagatcctgagcctggactttgaccaggccggccaggtggccagcgccagcatccagaccatgctgctggagaagctgcgggtggcccggcggcctgccagcgaggccaccttcaacgtgttctactacctgctggcctgtggagatggcaccctgaggacagagctgcacctgaaccacctggccgagaacaacgtgtttggcatcgtgcccctggccaagccagaggagaagcagaaggccgcccagcagttcagcaagctgcaggccgccatgaaggtgctgggcatcagcccagatgagcagaaggcctgctggttcatcctggccgccatctaccacctgggcgctgctggggccaccaaggaggccgctgaggccggcaggaagcagtttgcccggcatgagtgggcccagaaggccgcctacctgctgggctgcagcctggaggagctgagcagcgccatcttcaagcaccagcacaagggcggcaccctgcagaggagcaccagcttccggcagggccctgaggagagcggcctgggagatggcaccggccccaagctgagcgccctggagtgcctggagggcatggctgctggcctgtacagcgagctgttcaccctgctggtgtccctggtgaacagagccctgaagagcagccagcacagcctgtgcagcatgatgattgtggacaccccaggcttccagaaccctgagcagggcggcagcgcccggggggccagctttgaggagctgtgccacaactacacccaggaccggctgcagaggctcttccacgagaggacctttgtgcaggagctggagcgctacaaggaggagaacatcgagctggcctttgatgacctggagcccccaacagatgacagcgtggccgctgtggaccaggccagccaccagagcctggtgcgcagcctggccaggacagatgaggcccggggcctgctgtggctgctggaggaggaggccctggtgcctggggccagcgaggacaccctgctggagcggctcttctcctactacggcccccaggagggggacaagaagggccagagccccctgctgcacagcagcaagccccaccacttcctgctgggccacagccacggcaccaactgggtggagtacaacgtgacaggctggctgaactacaccaagcagaacccagccacccagaatgccccccggctgctgcaggacagccagaagaagatcatcagcaacctcttcctgggccgggccggcagcgccaccgtgctgagcggcagcattgctggcctggagggcggcagccagctggccctgcggcgggccacctccatgaggaagaccttcaccaccggcatggctgctgtgaagaagaagagcctgtgcatccagatgaagctgcaggtggatgccctgattgacaccatcaagaagagcaagctgcactttgtgcactgcttcctgcctgtggccgagggctgggccggggagcccaggtctgccagcagccggcgggtgagcagcagcagcgagctggacctgcccagcggggaccactgtgaggccggcctgctgcagctggatgtgcccctgctgcggacccagctgcggggcagccggctgctggatgccatgaggatgtaccggcagggctacccagaccacatggtgttttctgagttcagaagaagatttgatgtgctggccccccacctgaccaagaagcacggcaggaactacatcgtggtggatgagcggcgggctgtggaggagctgctggagtgcctggacctggagaagagcagctgctgcatgggcctgagcagggtcttcttccgggccggcaccctggcccggctggaggagcagagagatgagcagaccagcaggaacctgaccctcttccaggccgcctgccggggctacctggcccggcagcacttcaagaagaggaagatccaggacctggccatccgctgtgtgcagaagaacatcaagaagaacaagggcgtgaaggactggccctggtggaagctgttcaccaccgtgcggcccctgattgaggtgcagctgtctgaggagcagatccggaacaaggatgaggagatccagcagctgcggagcaagctggagaaggccgagaaggagagaaatgagctgcggctgaacagcgaccggctggagagccgcatcagcgagctgaccagcgagctgacagatgagaggaacacaggagagagcgccagccagctgctggatgctgagacagctgagcggctgcgggcagagaaggagatgaaggagctgcagacccagtatgatgccctgaagaagcagatggaggtgatggagatggaggtgatggaggcccggctcatccgggctgctgagatcaatggagaggtggatgatgatgatgctggaggagagtggaggctgaagtatgaaagagctgtgcgggaggtggacttcaccaagaagaggctgcagcaggagtttgaggacaagctggaggtggagcagcagaacaagaggcagctggagcggcggctgggggacctgcaggccgacagcgaggagagccagagggccctgcagcagctgaagaagaagtgccagaggctgacagctgagctgcaggacaccaagctgcacctggagggccagcaggtgaggaaccacgagctggagaagaagcagaggagatttgattctgagctgagccaggcccacgaggaggcccagcgggagaagctgcagcgggagaagctgcagcgggagaaggacatgctgctggccgaggccttcagcctgaagcagcagctggaggagaaggacatggacattgctggcttcacccagaaggtggtgtccctggaggccgagctgcaggacatcagcagccaggagagcaaggatgaggccagcctggccaaggtgaagaagcagctgcgggacctggaggccaaggtgaaggaccaggaggaggagctggatgagcaggccggcaccatccagatgctggagcaggccaagctgcggctggagatggagatggagaggatgaggcagacccacagcaaggagatggagagcagagatgaggaggtggaggaggcccggcagagctgccagaagaagctgaagcagatggaggtgcagctggaggaggagtatgaggacaagcagaaggtgctgcgggagaagcgggagctggagggcaagctggccaccctgagtgaccaggtgaacagaagagactttgagagcgagaagaggctgaggaaggacctgaagaggaccaaggccctgctggctgatgcccagctgatgctggaccacctgaagaacagcgcccccagcaagcgggagatcgcccagctgaagaaccagctggaggagagcgagttcacctgtgccgctgctgtgaaggccaggaaggccatggaggtggagattgaggacctgcacctgcagattgatgacatcgccaaggccaagacagccctggaggagcagctgagccggctgcagcgggagaagaatgagatccagaaccggctggaggaggaccaggaggacatgaatgagctgatgaagaagcacaaggctgctgtggcccaggccagccgggacctggcccagatcaatgacctgcaggcccagctggaggaggccaacaaggagaagcaggagctgcaggagaagctgcaggccctgcagagccaggtggagttcctggagcagagcatggtggacaagagcctggtgtcccggcaggaggccaagatccgggagctggagacccggctggagtttgagaggacccaggtgaagaggctggagagcctggccagccggctgaaggagaacatggagaagctgacagaggagcgggaccagagaattgctgctgagaaccgggagaaggagcagaacaagaggctgcagaggcagctgcgggacaccaaggaggagatgggagagctggccaggaaggaggccgaggccagcaggaagaagcatgagctggagatggacctggagagcctggaggccgccaaccagagcctgcaggccgacctgaagctggccttcaagagaattggagacctgcaggccgccattgaagatgagatggagagtgatgaaaatgaagacctgatcaacagcgagggggacagtgatgtggacagcgagctggaggacagagtggatggagtgaagtcctggctgagcaagaacaagggccccagcaaggccgccagtgatgatggcagcctgaagagcagcagccccaccagctactggaagagcctggccccagacagaagtgatgatgaacatgaccccctggacaacaccagccggccccgctacagccacagctacctgagtgacagcgacacagaggccaagctgacagagaccaatgcctag

SEQ ID NO: 160884 - DNA, 6009 bp, synthetic construct
  misc_feature 1..6009: note = Description of Artificial Sequence: Synthetic coding sequence
  source 1..6009: mol_type = other DNA
atgttcaacctgatgaagaaggacaaggacaaggatggcggcaggaaggagaagaaggagaagaaggagaagaaggagaggatgtctgctgctgagctgcggagcctggaggagatgagcctgcggcggggcttcttcaacctgaacagaagcagcaagcgggagagcaagacccggctggagatcagcaaccccatccccatcaaggtggccagcggcagtgacctgcacctgacagacatcgacagcgacagcaacagaggcagcgtcatcctggacagcggccacctgagcacagccagcagcagtgatgacctgaagggggaggagggcagcttccggggctctgtgctgcagagagctgccaagtttggcagcctggccaagcagaacagccagatgattgtgaagcgcttctccttcagccagaggagcagagatgaaagtgccagcgagaccagcaccccatctgagcacagcgctgcccccagcccccaggtggaggtgaggaccctggagggccagctggtgcagcaccctggccctggcatccccaggcctggccacaggagccgggcccctgagctggtgaccaagaagtttcctgtggacctgcggctgccccctgtggtgcccctgcccccacccaccctgcgggagctggagctgcagaggcggcccaccggggactttggcttcagcctgcggaggaccaccatgctggaccggggccctgagggccaggcctgcagaagagtggtgcactttgctgagcctggagctggcaccaaggacctggccctgggcctggtgcctggggaccggctggtggagatcaatggccacaacgtggagagcaagagcagagatgagatcgtggagatgatccggcagagcggggacagcgtgcggctgaaggtgcagcccatccctgagctgtctgagctgagccgctcctggctgcggtctggagagggcccccggcgggagcccagtgatgccaagacagaggagcagattgctgctgaggaggcctggaatgaaacagagaaggtgtggctggtgcacagagatggcttcagcctggccagccagctgaagtctgaggagctgaacctgcctgagggcaaggtgcgggtgaagctggaccatgatggagccatcctggatgtggatgaagatgatgtggagaaggccaatgcccccagctgtgaccggctggaggacctggccagcctggtgtacctgaatgaatcttctgtgctgcacaccctgcggcagagatatggagccagcctgctgcacacctacgccggccccagcctgctggtgctgggccccaggggggccccagctgtgtacagcgagaaggtgatgcacatgttcaagggctgccggcgggaggacatggccccccacatctatgctgtggcccagacagcctaccgggccatgctgatgagccggcaggaccagagcatcatcctgctgggcagcagcggcagcggcaagaccaccagctgccagcacctggtgcagtacctggccaccatcgccggcatcagcggcaacaaggtgttttctgtggagaagtggcaggccctgtacaccctgctggaggccttcggcaacagccccaccatcatcaatggaaatgccacccgcttcagccagatcctgagcctggactttgaccaggccggccaggtggccagcgccagcatccagaccatgctgctggagaagctgcgggtggcccggcggcctgccagcgaggccaccttcaacgtgttctactacctgctggcctgtggagatggcaccctgaggacagagctgcacctgaaccacctggccgagaacaacgtgtttggcatcgtgcccctggccaagccagaggagaagcagaaggccgcccagcagttcagcaagctgcaggccgccatgaaggtgctgggcatcagcccagatgagcagaaggcctgctggttcatcctggccgccatctaccacctgggcgctgctggggccaccaaggaggccgctgaggccggcaggaagcagtttgcccggcatgagtgggcccagaaggccgcctacctgctgggctgcagcctggaggagctgagcagcgccatcttcaagcaccagcacaagggcggcaccctgcagaggagcaccagcttccggcagggccctgaggagagcggcctgggagatggcaccggccccaagctgagcgccctggagtgcctggagggcatggctgctggcctgtacagcgagctgttcaccctgctggtgtccctggtgaacagagccctgaagagcagccagcacagcctgtgcagcatgatgattgtggacaccccaggcttccagaaccctgagcagggcggcagcgcccggggggccagctttgaggagctgtgccacaactacacccaggaccggctgcagaggctcttccacgagaggacctttgtgcaggagctggagcgctacaaggaggagaacatcgagctggcctttgatgacctggagcccccaacagatgacagcgtggccgctgtggaccaggccagccaccagagcctggtgcgcagcctggccaggacagatgaggcccggggcctgctgtggctgctggaggaggaggccctggtgcctggggccagcgaggacaccctgctggagcggctcttctcctactacggcccccaggagggggacaagaagggccagagccccctgctgcacagcagcaagccccaccacttcctgctgggccacagccacggcaccaactgggtggagtacaacgtgacaggctggctgaactacaccaagcagaacccagccacccagaatgccccccggctgctgcaggacagccagaagaagatcatcagcaacctcttcctgggccgggccggcagcgccaccgtgctgagcggcagcattgctggcctggagggcggcagccagctggccctgcggcgggccacctccatgaggaagaccttcaccaccggcatggctgctgtgaagaagaagagcctgtgcatccagatgaagctgcaggtggatgccctgattgacaccatcaagaagagcaagctgcactttgtgcactgcttcctgcctgtggccgagggctgggccggggagcccaggtctgccagcagccggcgggtgagcagcagcagcgagctggacctgcccagcggggaccactgtgaggccggcctgctgcagctggatgtgcccctgctgcggacccagctgcggggcagccggctgctggatgccatgaggatgtaccggcagggctacccagaccacatggtgttttctgagttcagaagaagatttgatgtgctggccccccacctgaccaagaagcacggcaggaactacatcgtggtggatgagcggcgggctgtggaggagctgctggagtgcctggacctggagaagagcagctgctgcatgggcctgagcagggtcttcttccgggccggcaccctggcccggctggaggagcagagagatgagcagaccagcaggaacctgaccctcttccaggccgcctgccggggctacctggcccggcagcacttcaagaagaggaagatccaggacctggccatccgctgtgtgcagaagaacatcaagaagaacaagggcgtgaaggactggccctggtggaagctgttcaccaccgtgcggcccctgattgaggtgcagctgtctgaggagcagatccggaacaaggatgaggagatccagcagctgcggagcaagctggagaaggccgagaaggagagaaatgagctgcggctgaacagcgaccggctggagagccgcatcagcgagctgaccagcgagctgacagatgagaggaacacaggagagagcgccagccagctgctggatgctgagacagctgagcggctgcgggcagagaaggagatgaaggagctgcagacccagtatgatgccctgaagaagcagatggaggtgatggagatggaggtgatggaggcccggctcatccgggctgctgagatcaatggagaggtggatgatgatgatgctggaggagagtggaggctgaagtatgaaagagctgtgcgggaggtggacttcaccaagaagaggctgcagcaggagtttgaggacaagctggaggtggagcagcagaacaagaggcagctggagcggcggctgggggacctgcaggccgacagcgaggagagccagagggccctgcagcagctgaagaagaagtgccagaggctgacagctgagctgcaggacaccaagctgcacctggagggccagcaggtgaggaaccacgagctggagaagaagcagaggagatttgattctgagctgagccaggcccacgaggaggcccagcgggagaagctgcagcgggagaagctgcagcgggagaaggacatgctgctggccgaggccttcagcctgaagcagcagctggaggagaaggacatggacattgctggcttcacccagaaggtggtgtccctggaggccgagctgcaggacatcagcagccaggagagcaaggatgaggccagcctggccaaggtgaagaagcagctgcgggacctggaggccaaggtgaaggaccaggaggaggagctggatgagcaggccggcaccatccagatgctggagcagctgaagcagatggaggtgcagctggaggaggagtatgaggacaagcagaaggtgctgcgggagaagcgggagctggagggcaagctggccaccctgagtgaccaggtgaacagaagagactttgaaagtgagaagaggctgaggaaggacctgaagaggaccaaggccctgctggctgatgcccagctgatgctggaccacctgaagaacagcgcccccagcaagcgggagatcgcccagctgaagaaccagctggaggagagcgagttcacctgtgccgctgctgtgaaggccaggaaggccatggaggtggagattgaggacctgcacctgcagattgatgacatcgccaaggccaagacagccctggaggagcagctgagccggctgcagcgggagaagaatgagatccagaaccggctggaggaggaccaggaggacatgaatgagctgatgaagaagcacaaggctgctgtggcccaggccagccgggacctggcccagatcaatgacctgcaggcccagctggaggaggccaacaaggagaagcaggagctgcaggagaagctgcaggccctgcagagccaggtggagttcctggagcagagcatggtggacaagagcctggtgtcccggcaggaggccaagatccgggagctggagacccggctggagtttgagaggacccaggtgaagaggctggagagcctggccagccggctgaaggagaacatggagaagctgacagaggagcgggaccagagaattgctgctgaaaatcgggagaaggagcagaacaagaggctgcagaggcagctgcgggacaccaaggaggagatgggagagctggccaggaaggaggccgaggccagcaggaagaagcatgagctggagatggacctggagagcctggaggccgccaaccagagcctgcaggccgacctgaagctggccttcaagagaattggagacctgcaggccgccattgaagatgagatggagagtgatgaaaatgaagatctcatcaacagcgagggggacagtgatgtggacagcgagctggaggacagagtggatggagtgaagtcctggctgagcaagaacaagggccccagcaaggccgccagtgatgatggcagcctgaagagcagcagccccaccagctactggaagagcctggccccagacagaagtgatgatgaacatgaccccctggacaacaccagccggccccgctacagccacagctacctgagtgacagcgacacagaggccaagctgacagagaccaatgcctag

SEQ ID NO: 160885 - DNA, 2808 bp, synthetic construct; identical to SEQ ID NO: 160882
  misc_feature 1..2808: note = Description of Artificial Sequence: Synthetic coding sequence
  source 1..2808: mol_type = other DNA

SEQ ID NO: 160886 - DNA, 963 bp, synthetic construct
  misc_feature 1..963: note = Description of Artificial Sequence: Synthetic coding sequence
  source 1..963: mol_type = other DNA
atgacctttgtgctgctgagcagcagccagctggaggagcagctgagccggctgcagcgggagaagaatgagatccagaaccggctggaggaggaccaggaggacatgaatgagctgatgaagaagcacaaggctgctgtggcccaggccagccgggacctggcccagatcaatgacctgcaggcccagctggaggaggccaacaaggagaagcaggagctgcaggagaagctgcaggccctgcagagccaggtggagttcctggagcagagcatggtggacaagagcctggtgtcccggcaggaggccaagatccgggagctggagacccggctggagtttgagaggacccaggtgaagaggctggagagcctggccagccggctgaaggagaacatggagaagctgacagaggagcgggaccagagaattgctgctgaaaatcgggagaaggagcagaacaagaggctgcagaggcagctgcgggacaccaaggaggagatgggagagctggccaggaaggaggccgaggccagcaggaagaagcatgagctggagatggacctggagagcctggaggccgccaaccagagcctgcaggccgacctgaagctggccttcaagagaattggagacctgcaggccgccattgaagatgagatggagagtgatgaaaatgaagatctcatcaacagcgagggggacagtgatgtggacagcgagctggaggacagagtggatggagtgaagtcctggctgagcaagaacaagggccccagcaaggccgccagtgatgatggcagcctgaagagcagcagccccaccagctactggaagagcctggccccagacagaagtgatgatgaacatgaccccctggacaacaccagccggccccgctacagccacagctacctgagtgacagcgacacagaggccaagctgacagagaccaatgcctag

SEQ ID NO: 160887 - DNA, 7704 bp, synthetic construct
  misc_feature 1..7704: note = Description of Artificial Sequence: Synthetic coding sequence
  source 1..7704: mol_type = other DNA
atggccatcagcagccggctggccctgtgggagcagaagatccgggaggaggacaagagccccccacccagcagccccccacccctcttcagcgtcatccctgggggcttcatcaagcagctggtgcggggcacagagaaggaggccaaggaggcccggcagaggaagcagctggccgtggccagccctgagcgggagatccctgagatcagcatcagccagcccaacagcaagagcagcagcggcaccaggagcggcagccagcagatcagccaggatgaccagagcagcagccctggcagcagtgacatcctgggcaaggagagcgagggcagccgcagcccagaccctgagcagatgaccagcatcaacggggagaaggcccaggagctgggcagcagcgccacccccaccaagaagacagtgcccttcaagaggggcgtgagaagaggagatgtgctgctgatggtggccaagctggaccctgacagcgccaagccagagaagacccacccccatgatgccccaccctgcaagaccagccccccagccacagacaccgggaaggagaagaagggggagaccagcaggaccccctgtggcagccaggccagcacagagatcctggcccccaaggccgagaagaccaggactggaggcctgggggaccccggccagggcaccgtggccctgaagaagggggaggagggccagagcatcgtgggcaagggcctgggcacccccaagaccacagagctgaaggaggccgagccccagggcaaggaccggcagggcacccggccccaggcccagggccctggagagggcgtgcggcctgggaaggccgagaaggagggcgctgagcccaccaacacagtggagaagggaaatgtgtccaaggatgtgggcagcgagggcaagcacgtgcggccccagatccctggcaggaagtggggcggcttcctgggccgccgcagcaagtgggatggcccccagaacaagaaggacaaggagggcgtgctgctgagcaaggccgagaagacaggagagccccagacccagatggagaagaccagccaggtgcagggcgagctgggagatgacctgaggatgggagagaaggccggggagctgcggagcaccaccgggaaggccggggagagctgggacaagaaggagaagatgggccagccccagggcaagtctggaaatgctggggaggcccggagccagacagagaagggctgtgaggcccccaaggaggtgtccaccatggtggagagccctgctgcccctgggaagggcggctggccaggcagccggggccaggaggccgaggagccctgcagcagagctggagatggagctggggccctggagacagagctggagggccccagccagcctgccctggagaaggatgctgagcggccccgcatcagaaaagaaaaccaggacggccctgccccccaggaggagggcaaaggaggccagagccgggacagcgaccaggccccagaagatcgctggtatgaagctgagaaggtgtggctggcccagaaggatggcttcaccctggccaccgtgctgaagccagatgagggcacagctgacctgcctgctggccgggtgcggctgtggattgatgctgacaagaccatcacagaggtggatgaggagcacgtgcaccgggccaaccccccagagctggaccaggtggaggacctggccagcctcatctctgtgaatgaatcttctgtgctgaacaccctgctgcagcgctacaaggcccagctgctgcacacctgcaccggccctgacctgattgtgctgcagccccggggccccagcgtgcccagcgctgggaaggtgcccaagggcagaagagatggcctgcctgcccacatcggctccatggcccagagggcctactgggccctgctgaaccagaggcgggaccagagcatcgtggccctgggctggagcggggccggcaagaccacctgctgtgagcaggtgctggagcacctggtgggcatggccggctctgtggatggccgggtgtctgtggagaagatccgggccaccttcaccgtgctgcgggcctttggatctgtgtccatggcccacagccgcagcgccacccgcttctccatggtgatgagcctggacttcaatgccaccggccgcatcacagctgcccagctgcagaccatgctgctggagaagagccgggtggcccggcagcctgagggggagagcaacttcctggtgttcagccagatgctggccggcctggacctggacctgaggacagagctgaacctgcaccagatggctgacagcagcagctttggcatgggcgtgtggagcaagccagaggacaagcagaaggctgctgctgcctttgcccagctgcagggcgccatggagatgctgggcatcagcgagagcgagcagagagctgtgtggagggtgctggccgccatctaccacctgggcgccgccggggcctgcaaggtgggcaggaagcagttcatgagatttgagtgggccaactatgctgctgaggccctgggctgtgaatatgaggagctgaacacagccaccttcaagcaccacctgcggcagatcatccagcagatgaccttcggccccagccgctggggcctggaggatgaggagaccagcagcggcctgaagatgactggagtggactgtgtggagggcatggccagcggcctgtaccaggagctgtttgctgctgtggtgtccctcatcaacagaagcttcagcagccaccacctgtccatggccagcatcatggtggtggacagccctggcttccagaaccccaggcaccagggcaaggaccgggccgccacctttgaggagctgtgccacaactatgcccacgagcggctgcagctgctcttctaccagaggacctttgtgtccaccctgcagcgctaccaggaggagggcgtgcctgtgcagtttgacctgcctgaccccagccctggcaccaccgtggccgtggtggaccagaaccccagccaggtgcggctgcctgctgggggcggggcccaggatgcccggggcctcttctgggtgctggatgaggaggtgcacgtggagggcagcagtgacagcgtggtgctggagcggctgtgtgccgcctttgagaagaagggggccggcacagagggcagcagcgccctgcggacctgtgagcagcccctgcagtgtgagatcttccaccagctgggctgggaccctgtgcgctatgacctgaccggctggctgcaccgggccaagcccaacctgagcgccctggatgccccccaggtgctgcaccagagcaagcgggaggagctgcggagcctcttccaggcccgggccaagctgccccctgtgtgcagagctgtggccggcctggagggcaccagccagcaggccctgcagaggagcaggatggtgcggaggacctttgccagcagcctggccgctgtgcggaggaaggccccctgcagccagatcaagctgcagatggatgccctgacctccatgatcaagaggagccggctgcacttcatccactgcctggtgcccaaccctgtggtggagagccgcagcggccaggagagccccccaccaccccagcccggccgggacaagccaggagctgggggccccctggccctggacatcccagccctgcgggtgcagctggccggcttccacatcctggaggccctgcggctgcacaggacaggctatgctgaccacatgggcctgacccgcttccggcggcagttccaggtgctggatgcccccctgctgaagaagctgatgagcaccagcgagggcattgatgagaggaaggctgtggaggagctgctggagaccctggacctggagaagaaggctgtggccgtgggccacagccaggtgttcctgaaggccggggtcatcagccggctggagaagcagcgggagaagctggtgtcccagagcatcgtgctcttccaggccgcctgcaagggcttcctgagccggcaggagttcaagaagctgaagatccggcggctggccgcccagtgcatccagaagaatgtggccgtgttcctggccgtgaaggactggccctggtggcagctgctgggcagcctgcagcccctgctgagcgccaccatcggcacagagcagctgcgggccaaggaggaggagctgaccaccctgcggaggaagctggagaagtctgagaagctgagaaatgagctgcggcagaacacagacctgctggagagcaagattgctgacctgaccagtgacctggctgatgagcgcttcaagggagatgtggcctgccaggtgctggagagcgagagagctgagcggctgcaggccttccgggaggtgcaggagctgaagagcaagcatgagcaggtgcagaagaagctgggagatgtgaacaagcagctggaggaggcccagcagaagatccagctgaatgacctggagaggaaccccaccggcggcgcagatgagtggcagatgagatttgactgtgcccagatggagaatgagttcctgaggaagaggctgcagcagtgtgaggagcggctggacagcgagctgacagccaggaaggagctggagcagaagctgggggagctgcagagcgcctatgatggagccaagaagatggcccaccagctgaagaggaagtgccaccacctgacctgtgacctggaggacacctgtgtgctgctggagaaccagcagagcaggaaccacgagctggagaagaagcagaagaagtttgacctgcagctggcccaggccctgggggagagcgtgtttgagaagggcctgcgggagaaggtgacccaggagaacacctctgtgcgctgggagctgggccagctgcagcagcagctgaagcagaaggagcaggaggccagccagctgaagcagcaggtggagatgctgcaggaccacaagcgggagctgctgggcagccccagcctgggggagaactgtgtggccggcctgaaggagcggctgtggaagctggagagcagcgccctggagcagcagaagatccagagccagcaggagaacaccatcaagcagctggagcagctgcggcagagatttgagctggagattgaaagaatgaagcagatgcaccagaaggaccgggaggaccaggaggaggagctggaggatgtgcggcagagctgccagaagaggctgcaccagctggagatgcagctggagcaggagtatgaggagaagcagatggtgctgcacgagaagcaggacctggagggcctcatcggcaccctgtgtgaccagatcggccaccgggactttgatgtggagaagaggctgcggcgggacctgcggaggacccacgccctgctgagtgatgtgcagctgctgctgggcaccatggaggatggcaagacctctgtgtccaaggaggagctggagaaggtgcacagccagctggagcagagcgaggccaagtgtgaggaggccctgaagacccagaaggtgctgacagctgacctggagagcatgcacagcgagctggagaacatgaccaggaacaagagcctggtggatgagcagctgtaccgcctgcagtttgagaaggctgacctgctgaagagaattgatgaggaccaggatgacctgaatgagctgatgcagaagcacaaggacctgattgcccagagcgctgctgacatcggccagatccaggagctgcagctgcagctggaggaggccaagaaggagaagcacaagctgcaggagcagctgcaggtggcccagatgagaattgagtacctggagcagagcacagtggaccgggccatcgtgtcccggcaggaggccgtcatctgtgacctggagaacaagacagagttccagaaggtgcagatcaagagatttgaggtgctggtgatccggctgcgggacagcctcatcaagatgggagaggagctgagccaggccgccaccagcgagagccagcagcgggagagcagccagtactaccagaggcggctggaggagctgaaggctgacatggaggagctggtgcagcgggaggccgaggccagccgccgctgcatggagctggagaagtatgtggaggagctggccgctgtgcggcagaccctgcagacagacctggagaccagcatcagaagaattgctgacctgcaggccgccctggaggaggtggccagcagtgacagcgacacagagagcgtgcagacagctgtggactgtggcagcagcggcaggaaggagatggacaacgtgtccatcctgagcagccagcctgagggcagcctgcagagctggctgagctgcaccctgagcctggccacagacaccatgaggacccccagccggcagagcgccaccagcagccgcatcctgagcccccgcatcaatgaggaggccggggacacagagaggacccagagcgccctggccctgagccgggcccggagcaccaacgtgcacagcaagaccagcggggacaagcctgtgagcccccactttgtgcggcggcagaagtactgccactttggagatggagaggtgctggccgtgcagaggaagagcacagagcggctggagcccgccagcagccccctggccagccgcagcaccaacaccagccccctgagccgggagaagctgcccagccccagcgctgccctgtctgaatttgtggagggcctgcggaggaagagggcccagaggggccagggcagcaccctgggcctggaggactggcccaccctgcccatctaccagaccaccggggccagcaccctgcggcggggccgggccggcagtgatgagggcaacctgagcctgcgggtgggcgccaagagccccctggagattgaaggagctgctgggggcctgctgcggagcaccagcctgaagtgcatcagcagtgatggagtgggcggcaccaccctgctgcctgagaagagcaagacccagttcagcagctgtgagagcctgctggagagccggcccagcatgggcaggaagctgagcagccccaccaccccccgggacatgctgctgagccccaccctgcggccccggcggcgctgcctggagagctctgtggatgatgctggctgcccagacctgggcaaggagcccctggtgttccagaaccggcagtttgcccacctgatggaggagcccctgggcagtgaccccttctcctggaagctgcccagcctggactatgaaaggaagaccaaggtggactttgatgacttcctgcctgccatcaggaagccccagacccccaccagcctggccggcagcgccaagggcggccaggacggcagccagaggagcagcatccactttgaaacagaggaggccaacagaagcttcctgagcggcatcaagaccatcctgaagaagagccctgagcccaaggaggaccctgcccacctgagtgacagcagcagcagcagcggcagcatcgtgtccttcaagtctgctgacagcatcaagagccggcccggcatcccccggctggccggagatggaggagagaggaccagccctgagcggcgggagcccggcaccggcaggaaggatgatgatgtggccagcatcatgaagaagtacctgcagaagtag

SEQ ID NO: 160888 - DNA, 7707 bp, synthetic construct
  misc_feature 1..7707: note = Description of Artificial Sequence: Synthetic coding sequence
  source 1..7707: mol_type = other DNA
atggccatcagcagccggctggccctgtgggagcagaagatccgggaggaggacaagagccccccacccagcagccccccacccctcttcagcgtcatccctgggggcttcatcaagcagctggtgcggggcacagagaaggaggccaaggaggcccggcagaggaagcagctggccgtggccagccctgagcgggagatccctgagatcagcatcagccagcccaacagcaagagcagcagcggcaccaggagcggcagccagcagatcagccaggatgaccagagcagcagccctggcagcagtgacatcctgggcaaggagagcgagggcagccgcagcccagaccctgagcagatgaccagcatcaacggggagaaggcccaggagctgggcagcagcgccacccccaccaagaagacagtgcccttcaagaggggcgtgagaagaggagatgtgctgctgatggtggccaagctggaccctgacagcgccaagccagagaagacccacccccatgatgccccaccctgcaagaccagccccccagccacagacaccgggaaggagaagaagggggagaccagcaggaccccctgtggcagccaggccagcacagagatcctggcccccaaggccgagaagaccaggactggaggcctgggggaccccggccagggcaccgtggccctgaagaagggggaggagggccagagcatcgtgggcaagggcctgggcacccccaagaccacagagctgaaggaggccgagccccagggcaaggaccggcagggcacccggccccaggcccagggccctggagagggcgtgcggcctgggaaggccgagaaggagggcgctgagcccaccaacacagtggagaagggaaatgtgtccaaggatgtgggcagcgagggcaagcacgtgcggccccagatccctggcaggaagtggggcggcttcctgggccgccgcagcaagtgggatggcccccagaacaagaaggacaaggagggcgtgctgctgagcaaggccgagaagacaggagagccccagacccagatggagaagaccagccaggtgcagggcgagctgggagatgacctgaggatgggagagaaggccggggagctgcggagcaccaccgggaaggccggggagagctgggacaagaaggagaagatgggccagccccagggcaagtctggaaatgctggggaggcccggagccagacagagaagggctgtgaggcccccaaggaggtgtccaccatggtggagagccctgctgcccctgggaagggcggctggccaggcagccggggccaggaggccgaggagccctgcagcagagctggagatggagctggggccctggagacagagctggagggccccagccagcctgccctggagaaggatgctgagcggccccgcatcagaaaagaaaaccaggacggccctgccccccaggaggagggcaaaggaggccagagccgggacagcgaccaggccccagaagatcgctggtatgaagctgagaaggtgtggctggcccagaaggatggcttcaccctggccaccgtgctgaagccagatgagggcacagctgacctgcctgctggccgggtgcggctgtggattgatgctgacaagaccatcacagaggtggatgaggagcacgtgcaccgggccaaccccccagagctggaccaggtggaggacctggccagcctcatctctgtgaatgaatcttctgtgctgaacaccctgctgcagcgctacaaggcccagctgctgcacacctgcaccggccctgacctgattgtgctgcagccccggggccccagcgtgcccagcgctgggaaggtgcccaagggcagaagagatggcctgcctgcccacatcggctccatggcccagagggcctactgggccctgctgaaccagaggcgggaccagagcatcgtggccctgggctggagcggggccggcaagaccacctgctgtgagcaggtgctggagcacctggtgggcatggccggctctgtggatggccgggtgtctgtggagaagatccgggccaccttcaccgtgctgcgggcctttggatctgtgtccatggcccacagccgcagcgccacccgcttctccatggtgatgagcctggacttcaatgccaccggccgcatcacagctgcccagctgcagaccatgctgctggagaagagccgggtggcccggcagcctgagggggagagcaacttcctggtgttcagccagatgctggccggcctggacctggacctgaggacagagctgaacctgcaccagatggctgacagcagcagctttggcatgggcgtgtggagcaagccagaggacaagcagaaggctgctgctgcctttgcccagctgcagggcgccatggagatgctgggcatcagcgagagcgagcagagagctgtgtggagggtgctggccgccatctaccacctgggcgccgccggggcctgcaaggtgggcaggaagcagttcatgagatttgagtgggccaactatgctgctgaggccctgggctgtgaatatgaggagctgaacacagccaccttcaagcaccacctgcggcagatcatccagcagatgaccttcggccccagccgctggggcctggaggatgaggagaccagcagcggcctgaagatgactggagtggactgtgtggagggcatggccagcggcctgtaccaggagctgtttgctgctgtggtgtccctcatcaacagaagcttcagcagccaccacctgtccatggccagcatcatggtggtggacagccctggcttccagaaccccaggcaccagggcaaggaccgggccgccacctttgaggagctgtgccacaactatgcccacgagcggctgcagctgctcttctaccagaggacctttgtgtccaccctgcagcgctaccaggaggagggcgtgcctgtgcagtttgacctgcctgaccccagccctggcaccaccgtggccgtggtggaccagaaccccagccagcaggtgcggctgcctgctgggggcggggcccaggatgcccggggcctcttctgggtgctggatgaggaggtgcacgtggagggcagcagtgacagcgtggtgctggagcggctgtgtgccgcctttgagaagaagggagctggaacagagggcagcagcgccctgcggacctgtgagcagcccctgcagtgtgagatcttccaccagctgggctgggaccctgtgcgctatgacctgaccggctggctgcaccgggccaagcccaacctgagcgccctggatgccccccaggtgctgcaccagagcaagcgggaggagctgcggagcctcttccaggcccgggccaagctgccccctgtgtgcagagctgtggccggcctggagggcaccagccagcaggccctgcagaggagcaggatggtgcggaggacctttgccagcagcctggccgctgtgcggaggaaggccccctgcagccagatcaagctgcagatggatgccctgacctccatgatcaagaggagccggctgcacttcatccactgcctggtgcccaaccctgtggtggagagccgcagcggccaggagagccccccaccaccccagcccggccgggacaagccaggggccggcggccccctggccctggacatcccagccctgcgggtgcagctggccggcttccacatcctggaggccctgcggctgcacaggacaggctacgccgaccacatgggcctgacccgcttccggcggcagttccaggtgctggatgcccccctgctgaagaagctgatgagcaccagcgagggcattgatgagaggaaggctgtggaggagctgctggagaccctggacctggagaagaaggctgtggccgtgggccacagccaggtgttcctgaaggccggggtcatcagccggctggagaagcagcgggagaagctggtgtcccagagcatcgtgctcttccaggccgcctgcaagggcttcctgagccggcaggagttcaagaagctgaagatccggcggctggccgcccagtgcatccagaagaatgtggccgtgttcctggccgtgaaggactggccctggtggcagctgctgggcagcctgcagcccctgctgagcgccaccatcggcacagagcagctgcgggccaaggaggaggagctgaccaccctgcggaggaagctggagaagtctgagaagctgagaaatgagctgcggcagaacacagacctgctggagagcaagattgctgacctgaccagtgacctggctgatgagcgcttcaagggagatgtggcctgccaggtgctggagagcgagcgggcagagcggctgcaggccttccgggaggtgcaggagctgaagagcaagcatgagcaggtgcagaagaagctgggagatgtgaacaagcagctggaggaggcccagcagaagatccagctgaatgacctggagaggaaccccactggaggagcagatgagtggcagatgagatttgactgtgcccagatggagaatgagttcctgaggaagaggctgcagcagtgtgaggagcggctggacagcgagctgacagccaggaaggagctggagcagaagctgggggagctgcagagcgcctatgatggagccaagaagatggcccaccagctgaagaggaagtgccaccacctgacctgtgacctggaggacacctgtgtgctgctggagaaccagcagagcagaaatcatgagctggagaagaagcagaagaagtttgacctgcagctggcccaggccctgggggagagcgtgtttgagaagggcctgcgggagaaggtgacccaggagaacacctctgtgcgctgggagctgggccagctgcagcagcagctgaagcagaaggagcaggaggccagccagctgaagcagcaggtggagatgctgcaggaccacaagcgggagctgctgggcagccccagcctgggggagaactgtgtggccggcctgaaggagcggctgtggaagctggagagcagcgccctggagcagcagaagatccagagccagcaggagaacaccatcaagcagctggagcagctgcggcagagatttgagctggagattgaaagaatgaagcagatgcaccagaaggaccgggaggaccaggaggaggagctggaggatgtgcggcagagctgccagaagaggctgcaccagctggagatgcagctggagcaggagtatgaggagaagcagatggtgctgcacgagaagcaggacctggagggcctgattggcaccctgtgtgaccagatcggccaccgggactttgatgtggagaagaggctgcggcgggacctgcggaggacccacgccctgctgagtgatgtgcagctgctgctgggcaccatggaggatggcaagacctctgtgtccaaggaggagctggagaaggtgcacagccagctggagcagagcgaggccaagtgtgaggaggccctgaagacccagaaggtgctgacagctgacctggagagcatgcacagcgagctggagaacatgaccaggaacaagagcctggtggatgagcagctgtaccgcctgcagtttgagaaggctgacctgctgaagagaattgatgaggaccaggatgacctgaatgagctgatgcagaagcacaaggacctgattgcccagagcgctgctgacatcggccagatccaggagctgcagctgcagctggaggaggccaagaaggagaagcacaagctgcaggagcagctgcaggtggcccagatgagaattgagtacctggagcagagcacagtggaccgggccatcgtgtcccggcaggaggccgtcatctgtgacctggagaacaagacagagttccagaaggtgcagatcaagagatttgaggtgctggtgatccggctgcgggacagcctcatcaagatgggagaggagctgagccaggccgccaccagcgagagccagcagcgggagagcagccagtactaccagaggcggctggaggagctgaaggctgacatggaggagctggtgcagcgggaggccgaggccagccgccgctgcatggagctggagaagtatgtggaggagctggccgctgtgcggcagaccctgcagacagacctggagaccagcatcagaagaattgctgacctgcaggccgccctggaggaggtggccagcagtgacagcgacacagaatctgtgcagacagctgtggactgtggcagcagcggcaggaaggagatggacaacgtgtccatcctgagcagccagcctgagggcagcctgcagagctggctgagctgcaccctgagcctggccacagacaccatgaggacccccagccggcagagcgccaccagcagccgcatcctgagcccccgcatcaatgaggaggccggggacacagagaggacccagagcgccctggccctgagccgggcccggagcaccaacgtgcacagcaagaccagcggggacaagcctgtgagcccccactttgtgcggcggcagaagtactgccactttggagatggagaggtgctggccgtgcagaggaagagcacagagcggctggagcccgccagcagccccctggccagccgcagcaccaacaccagccccctgagccgggagaagctgcccagccccagcgctgccctgtctgaatttgtggagggcctgcggaggaagagggcccagaggggccagggcagcaccctgggcctggaggactggcccaccctgcccatctaccagaccactggagccagcaccctgcggcggggccgggccggcagtgatgagggcaacctgagcctgcgggtgggcgccaagagccccctggagattgagggcgccgccggcggcctgctgcggagcaccagcctgaagtgcatcagcagtgatggagtgggcggcaccaccctgctgcctgagaagagcaagacccagttcagcagctgtgagagcctgctggagagccggcccagcatgggcaggaagctgagcagccccaccaccccccgggacatgctgctgagccccaccctgcggccccggcggcgctgcctggagagctctgtggatgatgctggctgcccagacctgggcaaggagcccctggtgttccagaaccggcagtttgcccacctgatggaggagcccctgggcagtgaccccttctcctggaagctgcccagcctggactatgaaaggaagaccaaggtggactttgatgacttcctgcctgccatcaggaagccccagacccccaccagcctggccggcagcgccaagggcggccaggacggcagccagaggagcagcatccactttgaaacagaggaggccaacagaagcttcctgagcggcatcaagaccatcctgaagaagagccctgagcccaaggaggaccctgcccacctgagtgacagcagcagcagcagcggcagcatcgtgtccttcaagtctgctgacagcatcaagagcaggcctggcatcccccggctggccggagatggaggagagaggaccagccctgagcggcgggagcccggcactggaaggaaggatgatgatgtggccagcatcatgaagaagtacctgcagaagtag

SEQ ID NO: 160889 - DNA, 7704 bp, synthetic construct; identical to SEQ ID NO: 160887
  misc_feature 1..7704: note = Description of Artificial Sequence: Synthetic coding sequence
  source 1..7704: mol_type = other DNA

SEQ ID NO: 160890 - DNA, 603 bp, synthetic construct
  misc_feature 1..603: note = Description of Artificial Sequence: Synthetic coding sequence
  source 1..603: mol_type = other DNA
atgggcaacagcaagagcggggccctgagcaaggagatcctggaggagctgcagctgaacaccaagttcagcgaggaggagctgtgctcctggtaccagagcttcctgaaggactgccccaccggccgcatcacccagcagcagttccagagcatctatgccaagttcttcccagacacagaccccaaggcctatgcccagcacgtgttccgcagctttgacagcaacctggatggcaccctggacttcaaggagtatgtgattgccctgcacatgaccacagctgggaagaccaaccagaagctggagtgggccttcagcctgtatgatgtggatggaaatggcaccatcagcaagaatgaggtgctggagatcgtgatggccatcttcaagatgatcaccccagaagatgtgaagctgctgcctgatgatgagaacaccccagagaagagagctgagaagatctggaagtactttgggaagaatgatgatgacaagctgacagagaaggagttcatcgagggcaccctggccaacaaggagatcctgcggctcatccagtttgagccccagaaggtgaaggagaagatgaagaatgcctag

SEQ ID NO: 160891 - DNA, 1884 bp, synthetic construct
  misc_feature 1..1884: note = Description of Artificial Sequence: Synthetic coding sequence
  source 1..1884: mol_type = other DNA
atgagcagtgacagcgagatggccatctttggagaggccgcccccttcctgaggaagtctgagcgggagagaattgaggcccagaacaagccctttgatgccaagacctctgtgtttgtggtggaccccaaggagagctttgtgaaggccaccgtgcagagccgggagggcggcaaggtgacagccaagacagaggccggggccaccgtgacagtgaaggatgaccaggtgttccccatgaacccccccaagtatgacaagattgaggacatggccatgatgacccacctgcacgagcctgctgtgctgtacaacctgaaggagagatatgctgcctggatgatctacacctacagcggcctcttctgtgtgacagtgaacccctacaagtggctgcctgtgtacaatgctgaggtggtgacagcctaccggggcaagaagaggcaggaggccccaccccacatcttcagcatcagtgacaatgcctaccagttcatgctgacagaccgggagaaccagagcatcctgatcaccggggagagcggggccggcaagacagtgaacaccaagagggtcatccagtactttgccaccatcgctgtgactggagagaagaagaaggaggaggtgaccagcggcaagatgcagggcaccctggaggaccagatcatcagcgccaaccccctgctggaggcctttggaaatgccaagacagtgagaaatgacaacagcagcagatttgggaagttcatccgcatccacttcggcaccaccgggaagctggccagcgctgacatcgagacctacctgctggagaagagccgggtgaccttccagctgaaggccgagaggagctaccacatcttctaccagatcatgagcaacaagaagccagacctgattgagatgctgctgatcaccaccaacccctatgactatgcctttgtgtcccagggcgagatcaccgtgcccagcattgatgaccaggaggagctgatggccacagattctgccatcgagatcctgggcttcaccagtgatgagcgggtgtccatctacaagctgaccggggctgtgatgcactacggcaacatgaagttcaagcagaagcagcgggaggagcaggccgagccagatggaacagaggtggccgacaaggccgcctacctgcagaacctgaacagcgctgacctgctgaaggccctgtgctacccccgggtgaaggtgggcaatgaatatgtgaccaagggccagacagtgcagcaggtgtacaatgctgtgggcgccctggccaaggctgtgtatgacaagatgttcctgtggatggtgacccgcatcaaccagcagctggacaccaagcagccccgggccaacagcgaggtggcccagtggaggaccaagtatgaaacagatgccatccagaggacagaggagctggaggaggccaagaagaagctggcccagaggctgcaggatgctgaggagcacgtggaggccgtgaatgccaagtgtgccagcctggagaagaccaagcagaggctgcagaatgaggtggaggacctgatgattgatgtggagaggaccaatgctgcctgtgccgccctggacaagaagcagaggaactttgacaagatcctggccgagtggaagcagaagtgtgaggagacccacgccgagctggaggccagccagaaggagagccgcagcctgagcacagagctgttcaagatcaagaatgcctatgaggagagcctggaccagctggagaccctgaagcgggagaacaagaacctgcagcaggagatcagtgacctgacagagcagattgctgagggcggcaagagaattcatgagctggagaagatcaagaagcaggtggagtag

SEQ ID NO: 160892 - DNA, 5919 bp, synthetic construct
  misc_feature 1..5919: note = Description of Artificial Sequence: Synthetic coding sequence
  source 1..5919: mol_type = other DNA
atggcccagaagggccagctgagtgatgatgagaagttcctgtttgtggacaagaacttcatcaacagccctgtggcccaggccgactgggccgccaagaggctggtgtgggtgcccagcgagaagcagggctttgaagctgccagcatcaaggaggagaagggagatgaggtggtggtggagctggtggagaatggcaagaaggtgacagtgggcaaggatgacatccagaagatgaacccccccaagttcagcaaggtggaggacatggccgagctgacctgcctgaatgaggcctctgtgctgcacaacctgcgggagcgctacttcagcggcctcatctacacctacagcggcctcttctgtgtggtggtgaacccctacaagcacctgcccatctacagcgagaagatcgtggacatgtacaagggcaagaagagacatgagatgccaccccacatctatgccatcgctgacacagcctaccgctccatgctgcaggaccgggaggaccagagcatcctgtgcacaggagagagcggggccggcaagacagagaacaccaagaaggtgatccagtacctggccgtggtggccagcagccacaagggcaagaaggacaccagcatcactggagagctggagaagcagctgctgcaggccaaccccatcctggaggcctttggaaatgccaagacagtgaagaatgacaacagcagcagatttgggaagttcatccgcatcaactttgatgtgacaggctacatcgtgggcgccaacatcgagacctacctgctggagaagagccgggccatccggcaggccagagatgagaggaccttccacatcttctactacatgattgctggggccaaggagaagatgagaagtgacctgctgctggagggcttcaacaactacaccttcctgagcaatggatttgtgcccatcccagctgcccaggatgatgagatgttccaggagaccgtggaggccatggccatcatgggcttcagcgaggaggagcagctgagcatcctgaaggtggtgtcctctgtgctgcagctgggcaacatcgtgttcaagaaggagaggaacacagaccaggcctccatgccagacaacacagctgcccagaaggtgtgccacctgatgggcatcaacgtgacagacttcaccaggagcatcctgaccccccgcatcaaggtgggcagagatgtggtgcagaaggcccagaccaaggagcaggccgactttgctgtggaggccctggccaaggccacctatgagcggctcttccgctggatcctgaccagggtgaacaaggccctggacaagacccaccggcagggcgccagcttcctgggcatcctggacattgctggctttgagatctttgaggtgaacagctttgagcagctgtgcatcaactacaccaatgagaagctgcagcagctgttcaaccacaccatgttcatcctggagcaggaggagtaccagcgggagggcatcgagtggaacttcatcgactttggcctggacctgcagccctgcatcgagctgattgaaagacccaacaaccccccaggagtgctggccctgctggatgaggagtgctggttccccaaggccacagacaagagctttgtggagaagctgtgcacagagcagggcagccaccccaagttccagaagcccaagcagctgaaggacaagacagagttcagcatcatccactacgccggcaaggtggactacaatgccagcgcctggctgaccaagaacatggaccccctgaatgacaacgtgaccagcctgctgaatgccagcagtgacaagtttgtggccgacctgtggaaggatgtggacagaattgtgggcctggaccagatggccaagatgacagagagcagcctgcccagcgccagcaagaccaagaagggcatgttcagaacagtgggccagctgtacaaggagcagctgggcaagctgatgaccaccctgaggaacaccacccccaactttgtgcgctgcatcatccccaaccacgagaagaggtctgggaagctggatgccttcctggtgctggagcagctgcgctgcaatggagtgctggagggcatccgcatctgccggcagggcttccccaacagaattgtgttccaggagttccggcagagatatgagatcctggccgccaatgccatccccaagggcttcatggatggcaagcaggcctgcatcctgatgatcaaggccctggagctggaccccaacctgtacagaattggccagagcaagatcttcttcagaactggagtgctggcccacctggaggaggagcgggacctgaagatcacagatgtgatcatggccttccaggccatgtgccggggctacctggccaggaaggcctttgccaagaggcagcagcagctgacagccatgaaggtgatccagaggaactgtgccgcctacctgaagctgaggaactggcagtggtggaggctcttcaccaaggtgaagcccctgctgcaggtgacccggcaggaggaggagatgcaggccaaggaggatgagctgcagaagaccaaggagcggcagcagaaggccgagaatgagctgaaggagctggagcagaagcacagccagctgacagaggagaagaacctgctgcaggagcagctgcaggccgagacagagctgtatgcagaggccgaggagatgagggtgcggctggccgccaagaagcaggagctggaggagatcctgcacgagatggaggcccggctggaggaggaggaggaccggggccagcagctgcaggccgagaggaagaagatggcccagcagatgctggacctggaggagcagctggaggaggaggaggccgcccggcagaagctgcagctggagaaggtgacagctgaggccaagatcaagaagctggaggatgagatcctggtgatggatgaccagaacaacaagctgagcaaggagaggaagctgctggaggagcgcatcagtgacctgaccaccaacctggccgaggaggaggagaaggccaagaacctgaccaagctgaagaacaagcatgagagcatgatcagcgagctggaggtgcggctgaagaaggaggagaagagccggcaggagctggagaagctgaagaggaagctggagggagatgccagtgacttccacgagcagattgctgacctgcaggcccagattgctgagctgaagatgcagctggccaagaaggaggaggagctgcaggccgccctggcccggctggatgatgaaattgcccagaagaacaatgccctgaagaagatccgggagctggagggccacatcagtgacctgcaggaggacctggacagcgagcgggccgccaggaacaaggccgagaagcagaagagggacctgggggaggagctggaggccctgaagacagagctggaggacaccctggacagcacagccacccagcaggagctgcgggccaagcgggagcaggaggtgacagtgctgaagaaggccctggatgaggagaccaggagccatgaggcccaggtgcaggagatgaggcagaagcacgcccaggccgtggaggagctgacagagcagctggagcagttcaagagggccaaggccaacctggacaagaacaagcagaccctggagaaggaaaatgctgacctggccggggagctgcgggtgctgggccaggccaagcaggaggtggagcacaagaagaagaagctggaggcccaggtgcaggagctgcagagcaaatgttctgatggagagcgggcccgggcagagctgaatgacaaggtgcacaagctgcagaatgaggtggagagcgtgacaggcatgctgaatgaagctgagggcaaggccatcaagctggccaaggatgtggccagcctgagcagccagctgcaggacacccaggagctgctgcaggaggagacccggcagaagctgaatgtgtccaccaagctgcggcagctggaggaggagaggaacagcctgcaggaccagctggatgaggagatggaggccaagcagaacctggagcggcacatcagcaccctgaacatccagctgagtgacagcaagaagaagctgcaggactttgccagcacagtggaggccctggaggagggcaagaagcgcttccagaaggagattgagaacctgacccagcagtatgaggagaaggctgctgcctatgacaagctggagaagaccaagaaccggctgcagcaggagctggatgacctggtggtggacctggacaaccagaggcagctggtgagcaacctggagaagaagcagaggaagtttgaccagctgctggccgaggagaagaacatcagcagcaaatatgcagatgagcgggacagagctgaggccgaggcccgggagaaggagaccaaggccctgagcctggcccgggccctggaggaggccctggaggccaaggaggagctggagaggaccaacaagatgctgaaggccgagatggaggacctggtgagcagcaaggatgatgtgggcaagaatgtgcatgagctggagaagagcaagagggccctggagacccagatggaggagatgaagacccagctggaggagctggaggatgagctgcaggccacagaagatgccaagctgcggctggaggtgaacatgcaggccctgaagggccagtttgagcgggacctgcaggccagagatgagcagaatgaggagaagaggcggcagctgcagaggcagctgcatgaatatgaaacagagctggaggatgagaggaagcagagggccctggccgctgctgccaagaagaagctggagggggacctgaaggacctggagctgcaggccgacagcgccatcaagggccgggaggaggccatcaagcagctgaggaagctgcaggcccagatgaaggacttccagcgggagctggaggatgcccgggccagcagagatgagatctttgccacagccaaggaaaatgagaagaaggccaagagcctggaggccgacctgatgcagctgcaggaggacctggccgctgctgagcgggccaggaagcaggccgacctggagaaggaggagctggccgaggagctggccagcagcctgagcggcagaaatgccctgcaggatgagaagaggcggctggaggcccgcatcgcccagctggaggaggagctggaggaggagcagggcaacatggaggccatgtctgacagagtgaggaaggccacccagcaggccgagcagctgagcaatgagctggccacagagaggagcacagcccagaagaatgaaagtgcccggcagcagctggagcggcagaacaaggagctgcggagcaagctgcacgagatggagggcgctgtgaagagcaagttcaagagcaccatcgccgccctggaggccaagatcgcccagctggaggagcaggtggagcaggaggcccgggagaagcaggccgccaccaagagcctgaagcagaaggacaagaagctgaaggagatcctgctgcaggtggaggatgagaggaagatggccgagcagtacaaggagcaggccgagaagggaaatgcccgggtgaagcagctgaagaggcagctggaggaggccgaggaggagagccagaggatcaatgccaacagaaggaagctgcagcgggagctggatgaggccacagagagcaatgaggccatgggccgggaggtgaatgccctgaagagcaagctgcggagaggaaatgagaccagctttgtgcccagccgccgcagcggcggcagaagagtgattgaaaatgctgatggcagcgaggaggagacagacaccagagatgctgacttcaacggcaccaaggccagcgagtag

SEQ ID NO: 160893 - DNA, 5817 bp, synthetic construct
  misc_feature 1..5817: note = Description of Artificial Sequence: Synthetic coding sequence
  source 1..5817: mol_type = other DNA
atggcccagaagggccagctgagtgatgatgagaagttcctgtttgtggacaagaacttcatcaacagccctgtggcccaggccgactgggccgccaagaggctggtgtgggtgcccagcgagaagcagggctttgaagctgccagcatcaaggaggagaagggagatgaggtggtggtggagctggtggagaatggcaagaaggtgacagtgggcaaggatgacatccagaagatgaacccccccaagttcagcaaggtggaggacatggccgagctgacctgcctgaatgaggcctctgtgctgcacaacctgcgggagcgctacttcagcggcctcatctacacctacagcggcctcttctgtgtggtggtgaacccctacaagcacctgcccatctacagcgagaagatcgtggacatgtacaagggcaagaagagacatgagatgccaccccacatctatgccatcgctgacacagcctaccgctccatgctgcaggaccgggaggaccagagcatcctgtgcacaggagagagcggggccggcaagacagagaacaccaagaaggtgatccagtacctggccgtggtggccagcagccacaagggcaagaaggacaccagcatcactggagagctggagaagcagctgctgcaggccaaccccatcctggaggcctttggaaatgccaagacagtgaagaatgacaacagcagcagatttgggaagttcatccgcatcaactttgatgtgacaggctacatcgtgggcgccaacatcgagacctacctgctggagaagagccgggccatccggcaggccagagatgagaggaccttccacatcttctactacatgattgctggggccaaggagaagatgagaagtgacctgctgctggagggcttcaacaactacaccttcctgagcaatggatttgtgcccatcccagctgcccaggatgatgagatgttccaggagaccgtggaggccatggccatcatgggcttcagcgaggaggagcagctgagcatcctgaaggtggtgtcctctgtgctgcagctgggcaacatcgtgttcaagaaggagaggaacacagaccaggcctccatgccagacaacacagctgcccagaaggtgtgccacctgatgggcatcaacgtgacagacttcaccaggagcatcctgaccccccgcatcaaggtgggcagagatgtggtgcagaaggcccagaccaaggagcaggccgactttgctgtggaggccctggccaaggccacctatgagcggctcttccgctggatcctgaccagggtgaacaaggccctggacaagacccaccggcagggcgccagcttcctgggcatcctggacattgctggctttgagatctttgaggtgaacagctttgagcagctgtgcatcaactacaccaatgagaagctgcagcagctgttcaaccacaccatgttcatcctggagcaggaggagtaccagcgggagggcatcgagtggaacttcatcgactttggcctggacctgcagccctgcatcgagctgattgaaagacccaacaaccccccaggagtgctggccctgctggatgaggagtgctggttccccaaggccacagacaagagctttgtggagaagctgtgcacagagcagggcagccaccccaagttccagaagcccaagcagctgaaggacaagacagagttcagcatcatccactacgccggcaaggtggactacaatgccagcgcctggctgaccaagaacatggaccccctgaatgacaacgtgaccagcctgctgaatgccagcagtgacaagtttgtggccgacctgtggaaggatgtggacagaattgtgggcctggaccagatggccaagatgacagagagcagcctgcccagcgccagcaagaccaagaagggcatgttcagaacagtgggccagctgtacaaggagcagctgggcaagctgatgaccaccctgaggaacaccacccccaactttgtgcgctgcatcatccccaaccacgagaagaggtctgggaagctggatgccttcctggtgctggagcagctgcgctgcaatggagtgctggagggcatccgcatctgccggcagggcttccccaacagaattgtgttccaggagttccggcagagatatgagatcctggccgccaatgccatccccaagggcttcatggatggcaagcaggcctgcatcctgatgatcaaggccctggagctggaccccaacctgtacagaattggccagagcaagatcttcttcagaactggagtgctggcccacctggaggaggagcgggacctgaagatcacagatgtgatcatggccttccaggccatgtgccggggctacctggccaggaaggcctttgccaagaggcagcagcagctgacagccatgaaggtgatccagaggaactgtgccgcctacctgaagctgaggaactggcagtggtggaggctcttcaccaaggtgaagcccctgctgcaggtgacccggcaggaggaggagatgcaggccaaggaggatgagctgcagaagaccaaggagcggcagcagaaggccgagaatgagctgaaggagctggagcagaagcacagccagctgacagaggagaagaacctgctgcaggagcagctgcaggccgagacagagctgtatgcagaggccgaggagatgagggtgcggctggccgccaagaagcaggagctggaggagatcctgcacgagatggaggcccggctggaggaggaggaggaccggggccagcagctgcaggccgagaggaagaagatggcccagcagatgctggacctggaggagcagctggaggaggaggaggccgcccggcagaagctgcagctggagaaggtgacagctgaggccaagatcaagaagctggaggatgagatcctggtgatggatgaccagaacaacaagctgagcaaggagaggaagctgctggaggagcgcatcagtgacctgaccaccaacctggccgaggaggaggagaaggccaagaacctgaccaagctgaagaacaagcatgagagcatgatcagcgagctggaggtgcggctgaagaaggaggagaagagccggcaggagctggagaagctgaagaggaagctggagggagatgccagtgacttccacgagcagattgctgacctgcaggcccagattgctgagctgaagatgcagctggccaagaaggaggaggagctgcaggccgccctggcccggctggatgatgaaattgcccagaagaacaatgccctgaagaagatccgggagctggagggccacatcagtgacctgcaggaggacctggacagcgagcgggccgccaggaacaaggccgagaagcagaagagggacctgggggaggagctggaggccctgaagacagagctggaggacaccctggacagcacagccacccagcaggagctgcgggccaagcgggagcaggaggtgacagtgctgaagaaggccctggatgaggagaccaggagccatgaggcccaggtgcaggagatgaggcagaagcacgcccaggccgtggaggagctgacagagcagctggagcagttcaagagggccaaggccaacctggacaagaacaagcagaccctggagaaggaaaatgctgacctggccggggagctgcgggtgctgggccaggccaagcaggaggtggagcacaagaagaagaagctggaggcccaggtgcaggagctgcagagcaaatgttctgatggagagcgggcccgggcagagctgaatgacaaggtgcacaagctgcagaatgaggtggagagcgtgacaggcatgctgaatgaagctgagggcaaggccatcaagctggccaaggatgtggccagcctgagcagccagctgcaggacacccaggagctgctgcaggaggagacccggcagaagctgaatgtgtccaccaagctgcggcagctggaggaggagaggaacagcctgcaggaccagctggatgaggagatggaggccaagcagaacctggagcggcacatcagcaccctgaacatccagctgagtgacagcaagaagaagctgcaggactttgccagcacagtggaggccctggaggagggcaagaagcgcttccagaaggagattgagaacctgacccagcagtatgaggagaaggctgctgcctatgacaagctggagaagaccaagaaccggctgcagcaggagctggatgacctggtggtggacctggacaaccagaggcagctggtgagcaacctggagaagaagcagaggaagtttgaccagctgctggccgaggagaagaacatcagcagcaaatatgcagatgagcgggacagagctgaggccgaggcccgggagaaggagaccaaggccctgagcctggcccgggccctggaggaggccctggaggccaaggaggagctggagaggaccaacaagatgctgaaggccgagatggaggacctggtgagcagcaaggatgatgtgggcaagaatgtgcatgagctggagaagagcaagagggccctggagacccagatggaggagatgaagacccagctggaggagctggaggatgagctgcaggccacagaagatgccaagctgcggctggaggtgaacatgcaggccctgaagggccagtttgagcgggacctgcaggccagagatgagcagaatgaggagaagaggcggcagctgcagaggcagctgcatgaatatgaaacagagctggaggatgagaggaagcagagggccctggccgctgctgccaagaagaagctggagggggacctgaaggacctggagctgcaggccgacagcgccatcaagggccgggaggaggccatcaagcagctgaggaagctgcaggcccagatgaaggacttccagcgggagctggaggatgcccgggccagcagagatgagatctttgccacagccaaggaaaatgagaagaaggccaagagcctggaggccgacctgatgcagctgcaggaggacctggccgctgctgagcgggccaggaagcaggccgacctggagaaggaggagctggccgaggagctggccagcagcctgagcggcagaaatgccctgcaggatgagaagaggcggctggaggcccgcatcgcccagctggaggaggagctggaggaggagcagggcaacatggaggccatgtctgacagagtgaggaaggccacccagcaggccgagcagctgagcaatgagctggccacagagaggagcacagcccagaagaatgaaagtgcccggcagcagctggagcggcagaacaaggagctgcggagcaagctgcacgagatggagggcgctgtgaagagcaagttcaagagcaccatcgccgccctggaggccaagatcgcccagctggaggagcaggtggagcaggaggcccgggagaagcaggccgccaccaagagcctgaagcagaaggacaagaagctgaaggagatcctgctgcaggtggaggatgagaggaagatggccgagcagtacaaggagcaggccgagaagggaaatgcccgggtgaagcagctgaagaggcagctggaggaggccgaggaggagagccagaggatcaatgccaacagaaggaagctgcagcgggagctggatgaggccacagagagcaatgaggccatgggccgggaggtgaatgccctgaagagcaagctgcggggccccccaccccaggagaccagccagtag

SEQ ID NO: 160894 - DNA, 6090 bp, synthetic construct
  misc_feature 1..6090: note = Description of Artificial Sequence: Synthetic coding sequence
  source 1..6090: mol_type = other DNA
atggcccagaagggccagctgagtgatgatgagaagttcctgtttgtggacaagaacttcatcaacagccctgtggcccaggccgactgggccgccaagaggctggtgtgggtgcccagcgagaagcagggctttgaagctgccagcatcaaggaggagaagggagatgaggtggtggtggagctggtggagaatggcaagaaggtgacagtgggcaaggatgacatccagaagatgaacccccccaagttcagcaaggtggaggacatggccgagctgacctgcctgaatgaggcctctgtgctgcacaacctgcgggagcgctacttcagcggcctcatctacacctacagcggcctcttctgtgtggtggtgaacccctacaagcacctgcccatctacagcgagaagatcgtggacatgtacaagggcaagaagagacatgagatgccaccccacatctatgccatcgctgacacagcctaccgctccatgctgcaggaccgggaggaccagagcatcctgtgcacaggagagagcggggccggcaagacagagaacaccaagaaggtgatccagtacctggccgtggtggccagcagccacaagggcaagaaggacaccagcatcacagagggccccagcttctggagaggagagctggagaagcagctgctgcaggccaaccccatcctggaggcctttggaaatgccaagacagtgaagaatgacaacagcagcagatttgggaagttcatccgcatcaactttgatgtgacaggctacatcgtgggcgccaacatcgagacctacctgctggagaagagccgggccatccggcaggccagagatgagaggaccttccacatcttctactacatgattgctggggccaaggagaagatgagaagtgacctgctgctggagggcttcaacaactacaccttcctgagcaatggatttgtgcccatcccagctgcccaggatgatgagatgttccaggagaccgtggaggccatggccatcatgggcttcagcgaggaggagcagctgagcatcctgaaggtggtgtcctctgtgctgcagctgggcaacatcgtgttcaagaaggagaggaacacagaccaggcctccatgccagacaacacagctgcccagaaggtgtgccacctgatgggcatcaacgtgacagacttcaccaggagcatcctgaccccccgcatcaaggtgggcagagatgtggtgcagaaggcccagaccaaggagcaggccgactttgctgtggaggccctggccaaggccacctatgaaagactcttccgctggatcctgaccagggtgaacaaggccctggacaagacccaccggcagggcgccagcttcctgggcatcctggacattgctggctttgagatctttgaggtgaacagctttgagcagctgtgcatcaactacaccaatgagaagctgcagcagctgttcaaccacaccatgttcatcctggagcaggaggagtaccagcgggagggcatcgagtggaacttcatcgactttggcctggacctgcagccctgcatcgagctgattgagcggcccaacaaccccccaggagtgctggccctgctggatgaggagtgctggttccccaaggccacagacaagagctttgtggagaagctgtgcacagagcagggcagccaccccaagttccagaagcccaagcagctgaaggacaagacagagttcagcatcatccactacgccggcaaggtggactacaatgccagcgcctggctgaccaagaacatggaccccctgaatgacaacgtgaccagcctgctgaatgccagcagtgacaagtttgtggccgacctgtggaaggatgtggaccgcatcgtgggcctggaccagatggccaagatgacagagagcagcctgcccagcgccagcaagaccaagaagggcatgttcagaacagtgggccagctgtacaaggagcagctgggcaagctgatgaccaccctgaggaacaccacccccaactttgtgcgctgcatcatccccaaccacgagaagaggtctgggaagctggatgccttcctggtgctggagcagctgcgctgcaatggagtgctggagggcatccgcatctgccggcagggcttccccaaccgcatcgtgttccaggagttccggcagagatatgagatcctggccgccaatgccatccccaagggcttcatggatggcaagcaggcctgcatcctgatgatcaaggccctggagctggaccccaacctgtaccgcatcggccagagcaagatcttcttcagaactggagtgctggcccacctggaggaggagcgggacctgaagatcacagatgtgatcatggccttccaggccatgtgccggggctacctggccaggaaggcctttgccaagaggcagcagcagctgacagccatgaaggtgatccagaggaactgtgccgcctacctgaagctgaggaactggcagtggtggaggctcttcaccaaggtgaagcccctgctgcaggtgacccggcaggaggaggagatgcaggccaaggaggatgagctgcagaagaccaaggagcggcagcagaaggcagaaaatgagctgaaggagctggagcagaagcacagccagctgacagaggagaagaacctgctgcaggagcagctgcaggccgagacagagctgtatgcagaggccgaggagatgagggtgcggctggccgccaagaagcaggagctggaggagatcctgcacgagatggaggcccggctggaggaggaggaggaccggggccagcagctgcaggccgagaggaagaagatggcccagcagatgctggacctggaggagcagctggaggaggaggaggccgcccggcagaagctgcagctggagaaggtgacagctgaggccaagatcaagaagctggaggatgagatcctggtgatggatgaccagaacaacaagctgagcaaggagaggaagctgctggaggagcgcatcagtgacctgaccaccaacctggccgaggaggaggagaaggccaagaacctgaccaagctgaagaacaagcatgagagcatgatcagcgagctggaggtgcggctgaagaaggaggagaagagccggcaggagctggagaagctgaagaggaagctggagggagatgccagtgacttccacgagcagattgctgacctgcaggcccagattgctgagctgaagatgcagctggccaagaaggaggaggagctgcaggccgccctggcccggctggatgatgagatcgcccagaagaacaatgccctgaagaagatccgggagctggagggccacatcagtgacctgcaggaggacctggacagcgagagagctgccaggaacaaggccgagaagcagaagagggacctgggggaggagctggaggccctgaagacagagctggaggacaccctggacagcacagccacccagcaggagctgcgggccaagcgggagcaggaggtgacagtgctgaagaaggccctggatgaggagaccaggagccatgaggcccaggtgcaggagatgaggcagaagcacgcccaggccgtggaggagctgacagagcagctggagcagttcaagagggccaaggccaacctggacaagaacaagcagaccctggagaaggaaaatgctgacctggccggggagctgcgggtgctgggccaggccaagcaggaggtggagcacaagaagaagaagctggaggcccaggtgcaggagctgcagagcaagtgcagtgatggagagcgggcccgggcagagctgaatgacaaggtgcacaagctgcagaatgaggtggagagcgtgacaggcatgctgaatgaggccgagggcaaggccatcaagctggccaaggatgtggccagcctgagcagccagctgcaggacacccaggagctgctgcaggaggagacccggcagaagctgaatgtgtccaccaagctgcggcagctggaggaggagaggaacagcctgcaggaccagctggatgaggagatggaggccaagcagaacctggagcggcacatcagcaccctgaacatccagctgagtgacagcaagaagaagctgcaggactttgccagcacagtggaggccctggaggagggcaagaagcgcttccagaaggagattgagaacctgacccagcagtatgaggagaaggccgccgcctatgacaagctggagaagaccaagaaccggctgcagcaggagctggatgacctggtggtggacctggacaaccagaggcagctggtgagcaacctggagaagaagcagaggaagtttgaccagctgctggccgaggagaagaacatcagcagcaaatatgcagatgagcgggacagagctgaggccgaggcccgggagaaggagaccaaggccctgagcctggcccgggccctggaggaggccctggaggccaaggaggagctggagaggaccaacaagatgctgaaggccgagatggaggacctggtgagcagcaaggatgatgtgggcaagaatgtgcatgagctggagaagagcaagagggccctggagacccagatggaggagatgaagacccagctggaggagctggaggatgagctgcaggccacagaagatgccaagctgcggctggaggtgaacatgcaggccctgaagggccagtttgagcgggacctgcaggccagagatgagcagaatgaggagaagaggcggcagctgcagaggcagctgcacgagtatgaaacagagctggaggatgagaggaagcagagggccctggccgccgccgccaagaagaagctggagggggacctgaaggacctggagctgcaggccgacagcgccatcaagggccgggaggaggccatcaagcagctgaggaagctgcaggcccagatgaaggacttccagcgggagctggaggatgcccgggccagcagagatgagatctttgccacagccaaggaaaatgagaagaaggccaagagcctggaggccgacctgatgcagctgcaggaggacctggccgctgctgagcgggccaggaagcaggccgacctggagaaggaggagctggccgaggagctggccagcagcctgtctggaagaaatgccctgcaggatgagaagaggcggctggaggccagaattgcccagctggaggaggagctggaggaggagcagggcaacatggaggccatgtctgacagagtgaggaaggccacccagcaggccgagcagctgagcaatgagctggccacagagaggagcacagcccagaagaatgaaagtgcccggcagcagctggagcggcagaacaaggagctgcggagcaagctgcacgagatggagggcgctgtgaagagcaagttcaagagcaccatcgccgccctggaggccaagatcgcccagctggaggagcaggtggagcaggaggcccgggagaagcaggccgccaccaagagcctgaagcagaaggacaagaagctgaaggagatcctgctgcaggtggaggatgagaggaagatggccgagcagtacaaggagcaggccgagaagggaaatgcccgggtgaagcagctgaagaggcagctggaggaggccgaggaggagagccagaggatcaatgccaacagaaggaagctgcagcgggagctggatgaggccacagagagcaatgaggccatgggccgggaggtgaatgccctgaagagcaagctgcggggccccccccacaggaagctgcggagtgatgcccctggagaggagacccggcccctgtccttcctgctggagggcctggaggatgtggagctgctgaagatgcagatggtgctgcggaggaagaggaccctggagacccagacctccatggagcccaggcctgtgaacaagcagctgagcacagtgctgcaccacggcaagaagaccaagaaccagaacaagcagaccaagaagacccagcagcagcccaggaccaagcagaacccagctgactgcacctag

SEQ ID NO: 160895 - DNA, 5940 bp, synthetic construct
  misc_feature 1..5940: note = Description of Artificial Sequence: Synthetic coding sequence
  source 1..5940: mol_type = other DNA
atggcccagaagggccagctgagtgatgatgagaagttcctgtttgtggacaagaacttcatcaacagccctgtggcccaggccgactgggccgccaagaggctggtgtgggtgcccagcgagaagcagggctttgaagctgccagcatcaaggaggagaagggagatgaggtggtggtggagctggtggagaatggcaagaaggtgacagtgggcaaggatgacatccagaagatgaacccccccaagttcagcaaggtggaggacatggccgagctgacctgcctgaatgaggcctctgtgctgcacaacctgcgggagcgctacttcagcggcctcatctacacctacagcggcctcttctgtgtggtggtgaacccctacaagcacctgcccatctacagcgagaagatcgtggacatgtacaagggcaagaagagacatgagatgccaccccacatctatgccatcgctgacacagcctaccgctccatgctgcaggaccgggaggaccagagcatcctgtgcacaggagagagcggggccggcaagacagagaacaccaagaaggtgatccagtacctggccgtggtggccagcagccacaagggcaagaaggacaccagcatcacccagggccccagctttgcctacggggagctggagaagcagctgctgcaggccaaccccatcctggaggcctttggaaatgccaagacagtgaagaatgacaacagcagcagatttgggaagttcatccgcatcaactttgatgtgacaggctacatcgtgggcgccaacatcgagacctacctgctggagaagagccgggccatccggcaggccagagatgagaggaccttccacatcttctactacatgattgctggggccaaggagaagatgagaagtgacctgctgctggagggcttcaacaactacaccttcctgagcaatggatttgtgcccatcccagctgcccaggatgatgagatgttccaggagaccgtggaggccatggccatcatgggcttcagcgaggaggagcagctgagcatcctgaaggtggtgtcctctgtgctgcagctgggcaacatcgtgttcaagaaggagaggaacacagaccaggcctccatgccagacaacacagctgcccagaaggtgtgccacctgatgggcatcaacgtgacagacttcaccaggagcatcctgaccccccgcatcaaggtgggcagagatgtggtgcagaaggcccagaccaaggagcaggccgactttgctgtggaggccctggccaaggccacctatgaaagactcttccgctggatcctgaccagggtgaacaaggccctggacaagacccaccggcagggcgccagcttcctgggcatcctggacattgctggctttgagatctttgaggtgaacagctttgagcagctgtgcatcaactacaccaatgagaagctgcagcagctgttcaaccacaccatgttcatcctggagcaggaggagtaccagcgggagggcatcgagtggaacttcatcgactttggcctggacctgcagccctgcatcgagctgattgagcggcccaacaaccccccaggagtgctggccctgctggatgaggagtgctggttccccaaggccacagacaagagctttgtggagaagctgtgcacagagcagggcagccaccccaagttccagaagcccaagcagctgaaggacaagacagagttcagcatcatccactacgccggcaaggtggactacaatgccagcgcctggctgaccaagaacatggaccccctgaatgacaacgtgaccagcctgctgaatgccagcagtgacaagtttgtggccgacctgtggaaggatgtggaccgcatcgtgggcctggaccagatggccaagatgacagagagcagcctgcccagcgccagcaagaccaagaagggcatgttcagaacagtgggccagctgtacaaggagcagctgggcaagctgatgaccaccctgaggaacaccacccccaactttgtgcgctgcatcatccccaaccacgagaagaggtctgggaagctggatgccttcctggtgctggagcagctgcgctgcaatggagtgctggagggcatccgcatctgccggcagggcttccccaaccgcatcgtgttccaggagttccggcagagatatgagatcctggccgccaatgccatccccaagggcttcatggatggcaagcaggcctgcatcctgatgatcaaggccctggagctggaccccaacctgtaccgcatcggccagagcaagatcttcttcagaactggagtgctggcccacctggaggaggagcgggacctgaagatcacagatgtgatcatggccttccaggccatgtgccggggctacctggccaggaaggcctttgccaagaggcagcagcagctgacagccatgaaggtgatccagaggaactgtgccgcctacctgaagctgaggaactggcagtggtggaggctcttcaccaaggtgaagcccctgctgcaggtgacccggcaggaggaggagatgcaggccaaggaggatgagctgcagaagaccaaggagcggcagcagaaggcagaaaatgagctgaaggagctggagcagaagcacagccagctgacagaggagaagaacctgctgcaggagcagctgcaggccgagacagagctgtatgcagaggccgaggagatgagggtgcggctggccgccaagaagcaggagctggaggagatcctgcacgagatggaggcccggctggaggaggaggaggaccggggccagcagctgcaggccgagaggaagaagatggcccagcagatgctggacctggaggagcagctggaggaggaggaggccgcccggcagaagctgcagctggagaaggtgacagctgaggccaagatcaagaagctggaggatgagatcctggtgatggatgaccagaacaacaagctgagcaaggagaggaagctgctggaggagcgcatcagtgacctgaccaccaacctggccgaggaggaggagaaggccaagaacctgaccaagctgaagaacaagcatgagagcatgatcagcgagctggaggtgcggctgaagaaggaggagaagagccggcaggagctggagaagctgaagaggaagctggagggagatgccagtgacttccacgagcagattgctgacctgcaggcccagattgctgagctgaagatgcagctggccaagaaggaggaggagctgcaggccgccctggcccggctggatgatgagatcgcccagaagaacaatgccctgaagaagatccgggagctggagggccacatcagtgacctgcaggaggacctggacagcgagagagctgccaggaacaaggccgagaagcagaagagggacctgggggaggagctggaggccctgaagacagagctggaggacaccctggacagcacagccacccagcaggagctgcgggccaagcgggagcaggaggtgacagtgctgaagaaggccctggatgaggagaccaggagccatgaggcccaggtgcaggagatgaggcagaagcacgcccaggccgtggaggagctgacagagcagctggagcagttcaagagggccaaggccaacctggacaagaacaagcagaccctggagaaggaaaatgctgacctggccggggagctgcgggtgctgggccaggccaagcaggaggtggagcacaagaagaagaagctggaggcccaggtgcaggagctgcagagcaagtgcagtgatggagagcgggcccgggcagagctgaatgacaaggtgcacaagctgcagaatgaggtggagagcgtgacaggcatgctgaatgaggccgagggcaaggccatcaagctggccaaggatgtggccagcctgagcagccagctgcaggacacccaggagctgctgcaggaggagacccggcagaagctgaatgtgtccaccaagctgcggcagctggaggaggagaggaacagcctgcaggaccagctggatgaggagatggaggccaagcagaacctggagcggcacatcagcaccctgaacatccagctgagtgacagcaagaagaagctgcaggactttgccagcacagtggaggccctggaggagggcaagaagcgcttccagaaggagattgagaacctgacccagcagtatgaggagaaggccgccgcctatgacaagctggagaagaccaagaaccggctgcagcaggagctggatgacctggtggtggacctggacaaccagaggcagctggtgagcaacctggagaagaagcagaggaagtttgaccagctgctggccgaggagaagaacatcagcagcaaatatgcagatgagcgggacagagctgaggccgaggcccgggagaaggagaccaaggccctgagcctggcccgggccctggaggaggccctggaggccaaggaggagctggagaggaccaacaagatgctgaaggccgagatggaggacctggtgagcagcaaggatgatgtgggcaagaatgtgcatgagctggagaagagcaagagggccctggagacccagatggaggagatgaagacccagctggaggagctggaggatgagctgcaggccacagaagatgccaagctgcggctggaggtgaacatgcaggccctgaagggccagtttgagcgggacctgcaggccagagatgagcagaatgaggagaagaggcggcagctgcagaggcagctgcacgagtatgaaacagagctggaggatgagaggaagcagagggccctggccgccgccgccaagaagaagctggagggggacctgaaggacctggagctgcaggccgacagcgccatcaagggccgggaggaggccatcaagcagctgaggaagctgcaggcccagatgaaggacttccagcgggagctggaggatgcccgggccagcagagatgagatctttgccacagccaaggaaaatgagaagaaggccaagagcctggaggccgacctgatgcagctgcaggaggacctggccgctgctgagcgggccaggaagcaggccgacctggagaaggaggagctggccgaggagctggccagcagcctgtctggaagaaatgccctgcaggatgagaagaggcggctggaggccagaattgcccagctggaggaggagctggaggaggagcagggcaacatggaggccatgtctgacagagtgaggaaggccacccagcaggccgagcagctgagcaatgagctggccacagagaggagcacagcccagaagaatgaaagtgcccggcagcagctggagcggcagaacaaggagctgcggagcaagctgcacgagatggagggcgctgtgaagagcaagttcaagagcaccatcgccgccctggaggccaagatcgcccagctggaggagcaggtggagcaggaggcccgggagaagcaggccgccaccaagagcctgaagcagaaggacaagaagctgaaggagatcctgctgcaggtggaggatgagaggaagatggccgagcagtacaaggagcaggccgagaagggaaatgcccgggtgaagcagctgaagaggcagctggaggaggccgaggaggagagccagaggatcaatgccaacagaaggaagctgcagcgggagctggatgaggccacagagagcaatgaggccatgggccgggaggtgaatgccctgaagagcaagctgcggagaggaaatgagaccagctttgtgcccagcagaagaagtggcggccggcgggtgattgaaaatgctgatggcagcgaggaggagacagacaccagagatgctgacttcaacggcaccaaggccagcgagtag

SEQ ID NO: 160896 - DNA, 5838 bp, synthetic construct
  misc_feature 1..5838: note = Description of Artificial Sequence: Synthetic coding sequence
  source 1..5838: mol_type = other DNA
atggcccagaagggccagctgagtgatgatgagaagttcctgtttgtggacaagaacttcatcaacagccctgtggcccaggccgactgggccgccaagaggctggtgtgggtgcccagcgagaagcagggctttgaagctgccagcatcaaggaggagaagggagatgaggtggtggtggagctggtggagaatggcaagaaggtgacagtgggcaaggatgacatccagaagatgaacccccccaagttcagcaaggtggaggacatggccgagctgacctgcctgaatgaggcctctgtgctgcacaacctgcgggagcgctacttcagcggcctcatctacacctacagcggcctcttctgtgtggtggtgaacccctacaagcacctgcccatctacagcgagaagatcgtggacatgtacaagggcaagaagagacatgagatgccaccccacatctatgccatcgctgacacagcctaccgctccatgctgcaggaccgggaggaccagagcatcctgtgcacaggagagagcggggccggcaagacagagaacaccaagaaggtgatccagtacctggccgtggtggccagcagccacaagggcaagaaggacaccagcatcacccagggccccagctttgcctacggggagctggagaagcagctgctgcaggccaaccccatcctggaggcctttggaaatgccaagacagtgaagaatgacaacagcagcagatttgggaagttcatccgcatcaactttgatgtgacaggctacatcgtgggcgccaacatcgagacctacctgctggagaagagccgggccatccggcaggccagagatgagaggaccttccacatcttctactacatgattgctggggccaaggagaagatgagaagtgacctgctgctggagggcttcaacaactacaccttcctgagcaatggatttgtgcccatcccagctgcccaggatgatgagatgttccaggagaccgtggaggccatggccatcatgggcttcagcgaggaggagcagctgagcatcctgaaggtggtgtcctctgtgctgcagctgggcaacatcgtgttcaagaaggagaggaacacagaccaggcctccatgccagacaacacagctgcccagaaggtgtgccacctgatgggcatcaacgtgacagacttcaccaggagcatcctgaccccccgcatcaaggtgggcagagatgtggtgcagaaggcccagaccaaggagcaggccgactttgctgtggaggccctggccaaggccacctatgaaagactcttccgctggatcctgaccagggtgaacaaggccctggacaagacccaccggcagggcgccagcttcctgggcatcctggacattgctggctttgagatctttgaggtgaacagctttgagcagctgtgcatcaactacaccaatgagaagctgcagcagctgttcaaccacaccatgttcatcctggagcaggaggagtaccagcgggagggcatcgagtggaacttcatcgactttggcctggacctgcagccctgcatcgagctgattgagcggcccaacaaccccccaggagtgctggccctgctggatgaggagtgctggttccccaaggccacagacaagagctttgtggagaagctgtgcacagagcagggcagccaccccaagttccagaagcccaagcagctgaaggacaagacagagttcagcatcatccactacgccggcaaggtggactacaatgccagcgcctggctgaccaagaacatggaccccctgaatgacaacgtgaccagcctgctgaatgccagcagtgacaagtttgtggccgacctgtggaaggatgtggaccgcatcgtgggcctggaccagatggccaagatgacagagagcagcctgcccagcgccagcaagaccaagaagggcatgttcagaacagtgggccagctgtacaaggagcagctgggcaagctgatgaccaccctgaggaacaccacccccaactttgtgcgctgcatcatccccaaccacgagaagaggtctgggaagctggatgccttcctggtgctggagcagctgcgctgcaatggagtgctggagggcatccgcatctgccggcagggcttccccaaccgcatcgtgttccaggagttccggcagagatatgagatcctggccgccaatgccatccccaagggcttcatggatggcaagcaggcctgcatcctgatgatcaaggccctggagctggaccccaacctgtaccgcatcggccagagcaagatcttcttcagaactggagtgctggcccacctggaggaggagcgggacctgaagatcacagatgtgatcatggccttccaggccatgtgccggggctacctggccaggaaggcctttgccaagaggcagcagcagctgacagccatgaaggtgatccagaggaactgtgccgcctacctgaagctgaggaactggcagtggtggaggctcttcaccaaggtgaagcccctgctgcaggtgacccggcaggaggaggagatgcaggccaaggaggatgagctgcagaagaccaaggagcggcagcagaaggcagaaaatgagctgaaggagctggagcagaagcacagccagctgacagaggagaagaacctgctgcaggagcagctgcaggccgagacagagctgtatgcagaggccgaggagatgagggtgcggctggccgccaagaagcaggagctggaggagatcctgcacgagatggaggcccggctggaggaggaggaggaccggggccagcagctgcaggccgagaggaagaagatggcccagcagatgctggacctggaggagcagctggaggaggaggaggccgcccggcagaagctgcagctggagaaggtgacagctgaggccaagatcaagaagctggaggatgagatcctggtgatggatgaccagaacaacaagctgagcaaggagaggaagctgctggaggagcgcatcagtgacctgaccaccaacctggccgaggaggaggagaaggccaagaacctgaccaagctgaagaacaagcatgagagcatgatcagcgagctggaggtgcggctgaagaaggaggagaagagccggcaggagctggagaagctgaagaggaagctggagggagatgccagtgacttccacgagcagattgctgacctgcaggcccagattgctgagctgaagatgcagctggccaagaaggaggaggagctgcaggccgccctggcccggctggatgatgagatcgcccagaagaacaatgccctgaagaagatccgggagctggagggccacatcagtgacctgcaggaggacctggacagcgagagagctgccaggaacaaggccgagaagcagaagagggacctgggggaggagctggaggccctgaagacagagctggaggacaccctggacagcacagccacccagcaggagctgcgggccaagcgggagcaggaggtgacagtgctgaagaaggccctggatgaggagaccaggagccatgaggcccaggtgcaggagatgaggcagaagcacgcccaggccgtggaggagctgacagagcagctggagcagttcaagagggccaaggccaacctggacaagaacaagcagaccctggagaaggaaaatgctgacctggccggggagctgcgggtgctgggccaggccaagcaggaggtggagcacaagaagaagaagctggaggcccaggtgcaggagctgcagagcaagtgcagtgatggagagcgggcccgggcagagctgaatgacaaggtgcacaagctgcagaatgaggtggagagcgtgacaggcatgctgaatgaggccgagggcaaggccatcaagctggccaaggatgtggccagcctgagcagccagctgcaggacacccaggagctgctgcaggaggagacccggcagaagctgaatgtgtccaccaagctgcggcagctggaggaggagaggaacagcctgcaggaccagctggatgaggagatggaggccaagcagaacctggagcggcacatcagcaccctgaacatccagctgagtgacagcaagaagaagctgcaggactttgccagcacagtggaggccctggaggagggcaagaagcgcttccagaaggagattgagaacctgacccagcagtatgaggagaaggccgccgcctatgacaagctggagaagaccaagaaccggctgcagcaggagctggatgacctggtggtggacctggacaaccagaggcagctggtgagcaacctggagaagaagcagaggaagtttgaccagctgctggccgaggagaagaacatcagcagcaaatatgcagatgagcgggacagagctgaggccgaggcccgggagaaggagaccaaggccctgagcctggcccgggccctggaggaggccctggaggccaaggaggagctggagaggaccaacaagatgctgaaggccgagatggaggacctggtgagcagcaaggatgatgtgggcaagaatgtgcatgagctggagaagagcaagagggccctggagacccagatggaggagatgaagacccagctggaggagctggaggatgagctgcaggccacagaagatgccaagctgcggctggaggtgaacatgcaggccctgaagggccagtttgagcgggacctgcaggccagagatgagcagaatgaggagaagaggcggcagctgcagaggcagctgcacgagtatgaaacagagctggaggatgagaggaagcagagggccctggccgccgccgccaagaagaagctggagggggacctgaaggacctggagctgcaggccgacagcgccatcaagggccgggaggaggccatcaagcagctgaggaagctgcaggcccagatgaaggacttccagcgggagctggaggatgcccgggccagcagagatgagatctttgccacagccaaggaaaatgagaagaaggccaagagcctggaggccgacctgatgcagctgcaggaggacctggccgctgctgagcgggccaggaagcaggccgacctggagaaggaggagctggccgaggagctggccagcagcctgtctggaagaaatgccctgcaggatgagaagaggcggctggaggccagaattgcccagctggaggaggagctggaggaggagcagggcaacatggaggccatgtctgacagagtgaggaaggccacccagcaggccgagcagctgagcaatgagctggccacagagaggagcacagcccagaagaatgaaagtgcccggcagcagctggagcggcagaacaaggagctgcggagcaagctgcacgagatggagggcgctgtgaagagcaagttcaagagcaccatcgccgccctggaggccaagatcgcccagctggaggagcaggtggagcaggaggcccgggagaagcaggccgccaccaagagcctgaagcagaaggacaagaagctgaaggagatcctgctgcaggtggaggatgagaggaagatggccgagcagtacaaggagcaggccgagaagggaaatgcccgggtgaagcagctgaagaggcagctggaggaggccgaggaggagagccagaggatcaatgccaacagaaggaagctgcagcgggagctggatgaggccacagagagcaatgaggccatgggccgggaggtgaatgccctgaagagcaagctgcggggccccccaccccaggagaccagccagtag

SEQ ID NO: 160897 - DNA, 5817 bp, synthetic construct; identical to SEQ ID NO: 160768
  misc_feature 1..5817: note = Description of Artificial Sequence: Synthetic coding sequence
  source 1..5817: mol_type = other DNA

SEQ ID NO: 160898 - DNA, 2001 bp, synthetic construct
  misc_feature 1..2001: note = Description of Artificial Sequence: Synthetic coding sequence
  source 1..2001: mol_type = other DNA
atgctgagccacatgctgtacaagaaggaaaatgccatcgacatcctgggcttcagcagcgaggagaaggtgggcatctacaagctgaccggggctgtgatgcactacggcaacatgaagttcaagcagaagcagcgggaggagcaggccgagccagatggaacagaggtggccgacaaggccggctacctgatgggcctgaacagcgctgagatgctgaagggcctgtgctgcccccgggtgaaggtgggcaatgaatatgtgaccaagggccagaatgtgcagcaggtgaccaacagcgtgggcgccctggccaaggctgtgtatgagaagatgttcctgtggatggtgacccgcatcaaccagcagctggacaccaagcagccccggcagtacttcatcggcgtgctggacattgctggctttgagatctttgacttcaacagcctggagcagctgtgcatcaacttcaccaatgagaagctgcagcagttcttcaaccaccacatgtttgtgctggagcaggaggagtacaagaaggagggcatcgagtgggagttcatcgactttggcatggacctggccgcctgcatcgagctgattgagaagcccatgggcatcttcagcatcctggaggaggagtgcatgttccccaaggccacagacaccagcttcaagaacaagctgtatgaccagcacctgggcaagagcaacaacttccagaagcccaagccagccaagggcaaggccgaggcccacttcagcctggtgcactacgccggcaccgtggactacaacattgctggctggctggacaagaacaaggaccccctgaatgaaacagtggtgggcctgtaccagaagagcagcctgaagctgctgtccttcctgttcagcaactatgctggagctgagaccggggacagcggcggcagcaagaagggcggcaagaagaagggcagcagcttccagacagtgtctgctgtgttccgggagaacctgaacaagctgatgaccaacctgcggagcacccacccccactttgtgcgctgcctgatccccaatgagaccaagaccccaggagtgatggaccactacctggtgatgcaccagctgcgctgcaatggagtgctggagggcatccgcatctgcaggaagggcttccccagccgcatcctgtatgctgacttcaagcagcgctaccgcatcctgaatgccagcgccatccctgagggccagttcatcgacagcaagaatgccagcgagaagctgctgaacagcattgatgtggaccgggagcagttccgctttggaaacaccaaggtgttcttcaaggccggcctgctgggcctgctggaggagatgagagatgagaagctggtgaccctgatgaccagcacccaggccgtgtgccggggctacctgatgagggtggagttcaagaagatgatggagcggcgggacagcatcttctgcatccagtacaacatccgctccttcatgaatgtgaagcactggccctggatgaacctcttcttcaagatcaagcccctgctgaagtctgctgaggccgagaaggagatggccaccatgaaggaggactttgagaggaccaaggaggagctggcccggtctgaggcccggaggaaggagctgacagagcggctggaggaggaggaggagatgaacagcgagctggtggccaagaagaggaacctggaggacaagtgcagcagcctgaagagggacattgatgacctggagctgaccctgaccaaggtggagaaggagaagcacgccacagagaacaaggtgaagaacctgtctgaggagatgacagccctggaggagaacatcagcaagctgaccaaggagaagaagagcctgcaggaggcccaccagcagaccctggatgacctgcaggtggaggaggacaaggtgaatggcctcatcaagatcaatgccaagctggagcagcagacagatgatgaaggagtgtag

SEQ ID NO: 160899 - DNA, 6111 bp, synthetic construct; identical to SEQ ID NO: 160769
  misc_feature 1..6111: note = Description of Artificial Sequence: Synthetic coding sequence
  source 1..6111: mol_type = other DNA

SEQ ID NO: 160900 - DNA, 4437 bp, synthetic construct
  misc_feature 1..4437: note = Description of Artificial Sequence: Synthetic coding sequence
  source 1..4437: mol_type = other DNA
atggctgctgtgaccatgtctgtgcccggcaggaaggccccacccaggcctggccctgtgcctgaggccgcccagcccttcctgttcaccccccggggccccagcgctgggggcggccctggcagcggcaccagcccccaggtggagtggacagcccggcggctggtgtgggtgcccagcgagctgcacggctttgaagctgctgccctgagagatgaaggagaggaggaggccgaggtggagctggccgagagcggccgccgcctgcggctgccccgggaccagatccagaggatgaacccccccaagttcagcaaggccgaggacatggccgagctgacctgcctgaatgaggcctctgtgctgcacaacctgcgggagcgctactacagcggcctcatctacacctacagcggcctcttctgtgtggtgatcaacccctacaagcagctgcccatctacacagaggccatcgtggagatgtaccggggcaagaagagacatgaggtgccccctcatgtgtatgctgtgacagagggcgcctaccgctccatgctgcaggaccgggaggaccagagcatcctgtgcacaggagagagcggggccggcaagacagagaacaccaagaaggtgatccagtacctggcccacgtggccagcagccccaagggcaggaaggagcccggggtgcctggagagctggagcggcagctgctgcaggccaaccccatcctggaggcctttggaaatgccaagacagtgaagaatgacaacagcagcagatttgggaagttcatccgcatcaactttgatgtggccggctacatcgtgggcgccaacatcgagacctacctgctggagaagagccgggccatccggcaggccaaggatgagtgcagcttccacatcttctaccagctgctgggcggggccggggagcagctgaaggctgacctgctgctggagccctgcagccactaccgcttcctgaccaacggccccagcagcagccctggccaggagcgggagctgttccaggagaccctggagagcctgcgggtgctgggcttcagccatgaggagatcatctccatgctgaggatggtgtctgctgtgctgcagtttggaaacatcgccctgaagcgggagaggaacacagaccaggccaccatgccagacaacacagctgcccagaagctgtgccgcctgctgggcctgggcgtgacagacttcagccgggccctgctgaccccccgcatcaaggtgggccgggactatgtgcagaaggcccagaccaaggagcaggccgactttgccctggaggccctggccaaggccacctatgaaagactcttccgctggctggtgctgcggctgaacagagccctggacaggagcccccggcagggcgccagcttcctgggcatcctggacattgctggctttgagatcttccagctgaacagctttgagcagctgtgcatcaactacaccaatgagaagctgcagcagctgttcaaccacaccatgtttgtgctggagcaggaggagtaccagcgggagggcatcccctggaccttcctggactttggcctggacctgcagccctgcatcgacctgattgaaagacctgccaaccccccaggcctgctggccctgctggatgaggagtgctggttccccaaggccacagacaagagctttgtggagaaggtggcccaggagcagggcggccaccccaagttccagaggcccaggcacctgcgggaccaggccgacttctctgtgctgcactacgccggcaaggtggactacaaggccaatgagtggctgatgaagaacatggaccccctgaatgacaacgtggccgccctgctgcaccagagcacagaccggctgacagctgagatctggaaggatgtggagggcatcgtgggcctggagcaggtgagcagcctgggagatggccccccaggcggccggccccggcggggcatgttcagaacagtgggccagctgtacaaggagagcctgagccggctgatggccaccctgagcaacaccaaccccagctttgtgcgctgcatcgtgcccaaccacgagaagagagctgggaagctggagccccggctggtgctggaccagctgcgctgcaatggagtgctggagggcatccgcatctgccggcagggcttccccaaccgcatcctcttccaggagttccggcagagatatgagatcctgaccccaaatgccatccccaagggcttcatggatggcaagcaggcctgtgagaagatgatccaggccctggagctggaccccaacctgtacagagtgggccagagcaagatcttcttccgggccggcgtgctggcccagctggaggaggagcgggacctgaaggtgacagacatcatcgtgtccttccaggccgccgcccggggctacctggcccggcgggccttccagaagaggcagcagcagcagagcgccctgcgggtgatgcagaggaactgtgccgcctacctgaagctgcggcactggcagtggtggaggctcttcaccaaggtgaagcccctgctgcaggtgacccggcaggatgaggtgctgcaggcccgggcccaggagctgcagaaggtgcaggagctgcagcagcagagcgcccgggaggtgggggagctgcagggccgggtggcccagctggaggaggagcgggcccggctggccgagcagctgcgggcagaggccgagctgtgtgccgaggccgaggagacccggggccgcctggccgccaggaagcaggagctggagctggtggtgtctgagctggaggcccgggtgggggaggaggaggagtgcagccggcagatgcagacagagaagaagaggctgcagcagcacatccaggagctggaggcccacctggaggccgaggagggcgcccggcagaagctgcagctggagaaggtgaccacagaggccaagatgaagaagtttgaggaggacctgctgctgctggaggaccagaacagcaagctgagcaagagcggcagctgctggaagatcgtgtggcccagcagccacccccggcagctgcggaggagaagaagaagccgggccagcatctcctatggcagcaacatgaggccccagagccagacctggagggaccggctgaggaaggaggagaagggccggcaggagctggagaagctgaagaggcggctggatggagagagcagcgagctgcaggagcagatggtggagcagcagcagagagctgaggagctgcgggcccagctgggcaggaaggaggaggagctgcaggccgccctggcccgggcagaagatgagggcggggcccgggcccagctgctgaagagcctgcgggaggcccaggccgccctggccgaggcccaggaggacctggagagcgagcgggtggcccggaccaaggccgagaagcagaggcgggacctgggggaggagctggaggccctgcggggggagctggaggacaccctggacagcaccaatgcccagcaggagctgcggagcaagcgggagcaggaggtgacagagctgaagaagaccctggaggaggagacccgcatccatgaagctgctgtgcaggagctgcggcagagacatggccaggccctgggggagctggccgagcagctggagcaggcccggcggggcaagggggcctgggagaagacccggctggccctggaggccgaggtgtctgagctgcgggcagagctgagcagcctgcagacagcccggcaggagggggagcagaggagaagaaggctggagctgcagctgcaggaggtgcagggccgggctggagatggagagcgggcccgggcagaggccgctgagaagctgcagagggcccaggccgagctggagaatgtgtctggggccctgaatgaggccgagagcaagaccatccggctgagcaaggagctgagcagcacagaggcccagctgcatgatgcccaggagctgctgcaggaggagacccgggccaagctggccctgggcagccgggtgcgggccatggaggccgaggccgccggcctgcgggagcagctggaggaggaggccgccgcccgggagagagctggccgggagctgcagacagcccaggcccagctgtctgagtggaggcggcggcaggaggaggaggccggggccctggaggccggggaggaggcccggcggcgggccgcccgggaggccgaggccctgacccagaggctggccgagaagacagaaacagtggaccggctggagcggggcagaagaaggctgcagcaggagctggatgatgccaccctgagcccagatgccctgacagatggagcccagccccccagcagcctggaccccaccggcccctgccccaggaacccagccctgtag

SEQ ID NO: 160901 - DNA, 5340 bp, synthetic construct
  misc_feature 1..5340: note = Description of Artificial Sequence: Synthetic coding sequence
  source 1..5340: mol_type = other DNA
atggctgctgtgaccatgtctgtgcccggcaggaaggccccacccaggcctggccctgtgcctgaggccgcccagcccttcctgttcaccccccggggccccagcgctgggggcggccctggcagcggcaccagcccccaggtggagtggacagcccggcggctggtgtgggtgcccagcgagctgcacggctttgaagctgctgccctgagagatgaaggagaggaggaggccgaggtggagctggccgagagcggccgccgcctgcggctgccccgggaccagatccagaggatgaacccccccaagttcagcaaggccgaggacatggccgagctgacctgcctgaatgaggcctctgtgctgcacaacctgcgggagcgctactacagcggcctcatctacacctacagcggcctcttctgtgtggtgatcaacccctacaagcagctgcccatctacacagaggccatcgtggagatgtaccggggcaagaagagacatgaggtgccccctcatgtgtatgctgtgacagagggcgcctaccgctccatgctgcaggaccgggaggaccagagcatcctgtgcacaggagagagcggggccggcaagacagagaacaccaagaaggtgatccagtacctggcccacgtggccagcagccccaagggcaggaaggagcccggggtgcctggagagctggagcggcagctgctgcaggccaaccccatcctggaggcctttggaaatgccaagacagtgaagaatgacaacagcagcagatttgggaagttcatccgcatcaactttgatgtggccggctacatcgtgggcgccaacatcgagacctacctgctggagaagagccgggccatccggcaggccaaggatgagtgcagcttccacatcttctaccagctgctgggcggggccggggagcagctgaaggctgacctgctgctggagccctgcagccactaccgcttcctgaccaacggccccagcagcagccctggccaggagcgggagctgttccaggagaccctggagagcctgcgggtgctgggcttcagccatgaggagatcatctccatgctgaggatggtgtctgctgtgctgcagtttggaaacatcgccctgaagcgggagaggaacacagaccaggccaccatgccagacaacacagctgcccagaagctgtgccgcctgctgggcctgggcgtgacagacttcagccgggccctgctgaccccccgcatcaaggtgggccgggactatgtgcagaaggcccagaccaaggagcaggccgactttgccctggaggccctggccaaggccacctatgaaagactcttccgctggctggtgctgcggctgaacagagccctggacaggagcccccggcagggcgccagcttcctgggcatcctggacattgctggctttgagatcttccagctgaacagctttgagcagctgtgcatcaactacaccaatgagaagctgcagcagctgttcaaccacaccatgtttgtgctggagcaggaggagtaccagcgggagggcatcccctggaccttcctggactttggcctggacctgcagccctgcatcgacctgattgaaagacctgccaaccccccaggcctgctggccctgctggatgaggagtgctggttccccaaggccacagacaagagctttgtggagaaggtggcccaggagcagggcggccaccccaagttccagaggcccaggcacctgcgggaccaggccgacttctctgtgctgcactacgccggcaaggtggactacaaggccaatgagtggctgatgaagaacatggaccccctgaatgacaacgtggccgccctgctgcaccagagcacagaccggctgacagctgagatctggaaggatgtggagggcatcgtgggcctggagcaggtgagcagcctgggagatggccccccaggcggccggccccggcggggcatgttcagaacagtgggccagctgtacaaggagagcctgagccggctgatggccaccctgagcaacaccaaccccagctttgtgcgctgcatcgtgcccaaccacgagaagagagctgggaagctggagccccggctggtgctggaccagctgcgctgcaatggagtgctggagggcatccgcatctgccggcagggcttccccaaccgcatcctcttccaggagttccggcagagatatgagatcctgaccccaaatgccatccccaagggcttcatggatggcaagcaggcctgtgagaagatgatccaggccctggagctggaccccaacctgtacagagtgggccagagcaagatcttcttccgggccggcgtgctggcccagctggaggaggagcgggacctgaaggtgacagacatcatcgtgtccttccaggccgccgcccggggctacctggcccggcgggccttccagaagaggcagcagcagcagagcgccctgcgggtgatgcagaggaactgtgccgcctacctgaagctgcggcactggcagtggtggaggctcttcaccaaggtgaagcccctgctgcaggtgacccggcaggatgaggtgctgcaggcccgggcccaggagctgcagaaggtgcaggagctgcagcagcagagcgcccgggaggtgggggagctgcagggccgggtggcccagctggaggaggagcgggcccggctggccgagcagctgcgggcagaggccgagctgtgtgccgaggccgaggagacccggggccgcctggccgccaggaagcaggagctggagctggtggtgtctgagctggaggcccgggtgggggaggaggaggagtgcagccggcagatgcagacagagaagaagaggctgcagcagcacatccaggagctggaggcccacctggaggccgaggagggcgcccggcagaagctgcagctggagaaggtgaccacagaggccaagatgaagaagtttgaggaggacctgctgctgctggaggaccagaacagcaagctgagcaagagcggcagctgctggaagatcgtgtggcccagcagccacccccggcagctgcggaggagaagaagaagccgggccagcatctcctatggcagcaacatgaggccccagagccagacctggagggaccggctgaggaaggaggagaagggccggcaggagctggagaagctgaagaggcggctggatggagagagcagcgagctgcaggagcagatggtggagcagcagcagagagctgaggagctgcgggcccagctgggcaggaaggaggaggagctgcaggccgccctggcccgggcagaagatgagggcggggcccgggcccagctgctgaagagcctgcgggaggcccaggccgccctggccgaggcccaggaggacctggagagcgagcgggtggcccggaccaaggccgagaagcagaggcgggacctgggggaggagctggaggccctgcggggggagctggaggacaccctggacagcaccaatgcccagcaggagctgcggagcaagcgggagcaggaggtgacagagctgaagaagaccctggaggaggagacccgcatccatgaagctgctgtgcaggagctgcggcagagacatggccaggccctgggggagctggccgagcagctggagcaggcccggcggggcaagggggcctgggagaagacccggctggccctggaggccgaggtgtctgagctgcgggcagagctgagcagcctgcagacagcccggcaggagggggagcagaggagaagaaggctggagctgcagctgcaggaggtgcagggccgggctggagatggagagcgggcccgggcagaggccgctgagaagctgcagagggcccaggccgagctggagaatgtgtctggggccctgaatgaggccctgctgagcagcaaggatgatgtgggcaagtctgtgcatgagctggagcgggcctgccgggtggccgagcaggccgccaatgacctgcgggcccaggtgacagagctggaggatgagctgacagctgctgaagatgccaagctgcggctggaggtgacagtgcaggccctgaagacccagcacgagcgggacctgcagggcagagatgaagctggggaggagcggcggcggcagctggccaagcagctgagagatgctgaggtggagagagatgaggagaggaagcagaggaccctggccgtggccgccaggaagaagctggagggggagctggaggagctgaaggcccagatggccagcgctggccagggcaaggaggaggccgtgaagcagctgaggaagatgcaggcccagatgaaggagctgtggagggaggtggaggagaccaggaccagccgggaggagatcttcagccagaaccgggagagcgagaagaggctgaagggcctggaggccgaggtgctgcggctgcaggaggagctggccgccagtgaccgggcccggcggcaggcccagcaggacagagatgagatggctgatgaggtggccaacggcaacctgagcaaggccgccatcctggaggagaagaggcagctggagggccgcctgggccagctggaggaggagctggaggaggagcagagcaacagcgagctgctgaatgaccgctacaggaagctgctgctgcaggtggagagcctgaccacagagctgtctgctgagaggagcttcagcgccaaggccgagagcggccggcagcagctggagcggcagatccaggagctgcggggccgcctgggggaggaggatgctggggcccgggcccggcacaagatgaccatcgccgccctggagagcaagctggcccaggccgaggagcagctggagcaggagacccgggagcgcatcctgagcggcaagctggtgcggcgggcagagaagaggctgaaggaggtggtgctgcaggtggaggaggagaggagagtggccgaccagctgcgggaccagctggagaagggcaacctgcgggtgaagcagctgaagaggcagctggaggaggccgaggaggaggccagccgggcccaggccggcagaagaaggctgcagcgggagctggaggatgtgacagagagcgctgagagcatgaaccgggaggtgaccaccctgaggaaccggctgcggcggggccccctgaccttcaccaccaggacagtgcggcaggtgttccggctggaggagggcgtggccagtgatgaggaggccgaggaggcccagcccggcagcggccccagccctgagcctgagggcagccccccagcccacccccagtag

SEQ ID NO: 160902 - DNA, 6087 bp, synthetic construct
  misc_feature 1..6087: note = Description of Artificial Sequence: Synthetic coding sequence
  source 1..6087: mol_type = other DNA
atggctgctgtgaccatgtctgtgcccggcaggaaggccccacccaggcctggccctgtgcctgaggccgcccagcccttcctgttcaccccccggggccccagcgctgggggcggccctggcagcggcaccagcccccaggtggagtggacagcccggcggctggtgtgggtgcccagcgagctgcacggctttgaagctgctgccctgagagatgaaggagaggaggaggccgaggtggagctggccgagagcggccgccgcctgcggctgccccgggaccagatccagaggatgaacccccccaagttcagcaaggccgaggacatggccgagctgacctgcctgaatgaggcctctgtgctgcacaacctgcgggagcgctactacagcggcctcatctacacctacagcggcctcttctgtgtggtgatcaacccctacaagcagctgcccatctacacagaggccatcgtggagatgtaccggggcaagaagagacatgaggtgccccctcatgtgtatgctgtgacagagggcgcctaccgctccatgctgcaggaccgggaggaccagagcatcctgtgcacaggagagagcggggccggcaagacagagaacaccaagaaggtgatccagtacctggcccacgtggccagcagccccaagggcaggaaggagcccggggtgcctggagagctggagcggcagctgctgcaggccaaccccatcctggaggcctttggaaatgccaagacagtgaagaatgacaacagcagcagatttgggaagttcatccgcatcaactttgatgtggccggctacatcgtgggcgccaacatcgagacctacctgctggagaagagccgggccatccggcaggccaaggatgagtgcagcttccacatcttctaccagctgctgggcggggccggggagcagctgaaggctgacctgctgctggagccctgcagccactaccgcttcctgaccaacggccccagcagcagccctggccaggagcgggagctgttccaggagaccctggagagcctgcgggtgctgggcttcagccatgaggagatcatctccatgctgaggatggtgtctgctgtgctgcagtttggaaacatcgccctgaagcgggagaggaacacagaccaggccaccatgccagacaacacagctgcccagaagctgtgccgcctgctgggcctgggcgtgacagacttcagccgggccctgctgaccccccgcatcaaggtgggccgggactatgtgcagaaggcccagaccaaggagcaggccgactttgccctggaggccctggccaaggccacctatgaaagactcttccgctggctggtgctgcggctgaacagagccctggacaggagcccccggcagggcgccagcttcctgggcatcctggacattgctggctttgagatcttccagctgaacagctttgagcagctgtgcatcaactacaccaatgagaagctgcagcagctgttcaaccacaccatgtttgtgctggagcaggaggagtaccagcgggagggcatcccctggaccttcctggactttggcctggacctgcagccctgcatcgacctgattgaaagacctgccaaccccccaggcctgctggccctgctggatgaggagtgctggttccccaaggccacagacaagagctttgtggagaaggtggcccaggagcagggcggccaccccaagttccagaggcccaggcacctgcgggaccaggccgacttctctgtgctgcactacgccggcaaggtggactacaaggccaatgagtggctgatgaagaacatggaccccctgaatgacaacgtggccgccctgctgcaccagagcacagaccggctgacagctgagatctggaaggatgagcacggcggcttccagcagttctccttcctgggcagcttcccccccagccccccaggcagcgctgagcgctgcagcagcgccatcagccccccaggagtggagggcatcgtgggcctggagcaggtgagcagcctgggagatggccccccaggcggccggccccggcggggcatgttcagaacagtgggccagctgtacaaggagagcctgagccggctgatggccaccctgagcaacaccaaccccagctttgtgcgctgcatcgtgcccaaccacgagaagagagctgggaagctggagccccggctggtgctggaccagctgcgctgcaatggagtgctggagggcatccgcatctgccggcagggcttccccaaccgcatcctcttccaggagttccggcagagatatgagatcctgaccccaaatgccatccccaagggcttcatggatggcaagcaggcctgtgagaagatgatccaggccctggagctggaccccaacctgtacagagtgggccagagcaagatcttcttccgggccggcgtgctggcccagctggaggaggagcgggacctgaaggtgacagacatcatcgtgtccttccaggccgccgcccggggctacctggcccggcgggccttccagaagaggcagcagcagcagagcgccctgcgggtgatgcagaggaactgtgccgcctacctgaagctgcggcactggcagtggtggaggctcttcaccaaggtgaagcccctgctgcaggtgacccggcaggatgaggtgctgcaggcccgggcccaggagctgcagaaggtgcaggagctgcagcagcagagcgcccgggaggtgggggagctgcagggccgggtggcccagctggaggaggagcgggcccggctggccgagcagctgcgggcagaggccgagctgtgtgccgaggccgaggagacccggggccgcctggccgccaggaagcaggagctggagctggtggtgtctgagctggaggcccgggtgggggaggaggaggagtgcagccggcagatgcagacagagaagaagaggctgcagcagcacatccaggagctggaggcccacctggaggccgaggagggcgcccggcagaagctgcagctggagaaggtgaccacagaggccaagatgaagaagtttgaggaggacctgctgctgctggaggaccagaacagcaagctgagcaaggagaggaagctgctggaggaccggctggccgagttcagcagccaggccgctgaggaggaggagaaggtgaagagcctgaacaagctgcggctgaagtatgaggccaccatcgctgacatggaggaccggctgaggaaggaggagaagggccggcaggagctggagaagctgaagaggcggctggatggagagagcagcgagctgcaggagcagatggtggagcagcagcagagagctgaggagctgcgggcccagctgggcaggaaggaggaggagctgcaggccgccctggcccgggcagaagatgaaggaggagcccgggcccagctgctgaagagcctgcgggaggcccaggccgccctggccgaggcccaggaggacctggagagcgagcgggtggcccggaccaaggccgagaagcagaggcgggacctgggggaggagctggaggccctgcggggggagctggaggacaccctggacagcaccaatgcccagcaggagctgcggagcaagcgggagcaggaggtgacagagctgaagaagaccctggaggaggagacccgcatccacgaggccgctgtgcaggagctgcggcagagacatggccaggccctgggggagctggccgagcagctggagcaggcccggcggggcaaaggagcctgggagaagacccggctggccctggaggccgaggtgtctgagctgcgggcagagctgagcagcctgcagacagcccggcaggagggggagcagaggagaagaaggctggagctgcagctgcaggaggtgcagggccgggctggagatggagagcgggcccgggcagaggccgctgagaagctgcagagggcccaggccgagctggagaatgtgtctggggccctgaatgaagctgagagcaagaccatccggctgagcaaggagctgagcagcacagaggcccagctgcatgatgcccaggagctgctgcaggaggagacccgggccaagctggccctgggcagccgggtgcgggccatggaggccgaggccgccggcctgcgggagcagctggaggaggaggccgccgcccgggagcgggccggccgggagctgcagacagcccaggcccagctgtctgagtggaggcggcggcaggaggaggaggccggggccctggaggccggggaggaggccaggagaagagctgcccgggaggccgaggccctgacccagaggctggccgagaagacagagaccgtggaccggctggagcggggcagaagaaggctgcagcaggagctggatgatgccaccatggacctggagcagcagaggcagctggtgtccaccctggagaagaagcagaggaagtttgaccagctgctggccgaggagaaggctgctgtgctgcgggctgtggaggagcgggagcgggcagaggccgagggccgggagcgggaggcccgggccctgagcctgacccgggccctggaggaggagcaggaggcccgggaggagctggagcggcagaacagagccctgcgggcagagctggaggccctgctgagcagcaaggatgatgtgggcaagtctgtgcatgagctggagcgggcctgccgggtggccgagcaggccgccaatgacctgcgggcccaggtgacagagctggaggatgagctgacagctgctgaagatgccaagctgcggctggaggtgacagtgcaggccctgaagacccagcacgagcgggacctgcagggcagagatgaggccggggaggagcggcggcggcagctggccaagcagctgagagatgctgaggtggagagagatgaggagaggaagcagaggaccctggccgtggccgccaggaagaagctggagggggagctggaggagctgaaggcccagatggccagcgctggccagggcaaggaggaggccgtgaagcagctgaggaagatgcaggcccagatgaaggagctgtggagggaggtggaggagaccaggaccagccgggaggagatcttcagccagaaccgggagagcgagaagaggctgaagggcctggaggccgaggtgctgcggctgcaggaggagctggccgccagtgaccgggcccggcggcaggcccagcaggacagagatgagatggctgatgaggtggccaatggaaacctgagcaaggccgccatcctggaggagaagaggcagctggagggccgcctgggccagctggaggaggagctggaggaggagcagagcaacagcgagctgctgaatgaccgctacaggaagctgctgctgcaggtggagagcctgaccacagagctgtctgctgagaggagcttcagcgccaaggccgagagcggccggcagcagctggagcggcagatccaggagctgcggggccgcctgggggaggaggatgctggggcccgggcccggcacaagatgaccatcgccgccctggagagcaagctggcccaggccgaggagcagctggagcaggagacccgggagcgcatcctgagcggcaagctggtgagaagagctgagaagaggctgaaggaggtggtgctgcaggtggaggaggagcggcgggtggccgaccagctgcgggaccagctggagaagggcaacctgcgggtgaagcagctgaagaggcagctggaggaggccgaggaggaggccagccgggcccaggccggcagaagaaggctgcagcgggagctggaggatgtgacagaatctgctgagagcatgaaccgggaggtgaccaccctgaggaaccggctgcggcggggccccctgaccttcaccaccaggacagtgcggcaggtgttccggctggaggagggcgtggccagtgatgaggaggccgaggaggcccagcccggcagcggccccagccctgagcctgagggcagccccccagcccacccccagtag

SEQ ID NO: 160903 - DNA, 6012 bp, synthetic construct
  misc_feature 1..6012: note = Description of Artificial Sequence: Synthetic coding sequence
  source 1..6012: mol_type = other DNA
atggctgctgtgaccatgtctgtgcccggcaggaaggccccacccaggcctggccctgtgcctgaggccgcccagcccttcctgttcaccccccggggccccagcgctgggggcggccctggcagcggcaccagcccccaggtggagtggacagcccggcggctggtgtgggtgcccagcgagctgcacggctttgaagctgctgccctgagagatgaaggagaggaggaggccgaggtggagctggccgagagcggccgccgcctgcggctgccccgggaccagatccagaggatgaacccccccaagttcagcaaggccgaggacatggccgagctgacctgcctgaatgaggcctctgtgctgcacaacctgcgggagcgctactacagcggcctcatctacacctacagcggcctcttctgtgtggtgatcaacccctacaagcagctgcccatctacacagaggccatcgtggagatgtaccggggcaagaagagacatgaggtgccccctcatgtgtatgctgtgacagagggcgcctaccgctccatgctgcaggaccgggaggaccagagcatcctgtgcacaggagagagcggggccggcaagacagagaacaccaagaaggtgatccagtacctggcccacgtggccagcagccccaagggcaggaaggagcccggggtgcctgcctctgtgtccacagtgtcctatggagagctggagcggcagctgctgcaggccaaccccatcctggaggcctttggaaatgccaagacagtgaagaatgacaacagcagcagatttgggaagttcatccgcatcaactttgatgtggccggctacatcgtgggcgccaacatcgagacctacctgctggagaagagccgggccatccggcaggccaaggatgagtgcagcttccacatcttctaccagctgctgggcggggccggggagcagctgaaggctgacctgctgctggagccctgcagccactaccgcttcctgaccaacggccccagcagcagccctggccaggagcgggagctgttccaggagaccctggagagcctgcgggtgctgggcttcagccatgaggagatcatctccatgctgaggatggtgtctgctgtgctgcagtttggaaacatcgccctgaagcgggagaggaacacagaccaggccaccatgccagacaacacagctgcccagaagctgtgccgcctgctgggcctgggcgtgacagacttcagccgggccctgctgaccccccgcatcaaggtgggccgggactatgtgcagaaggcccagaccaaggagcaggccgactttgccctggaggccctggccaaggccacctatgaaagactcttccgctggctggtgctgcggctgaacagagccctggacaggagcccccggcagggcgccagcttcctgggcatcctggacattgctggctttgagatcttccagctgaacagctttgagcagctgtgcatcaactacaccaatgagaagctgcagcagctgttcaaccacaccatgtttgtgctggagcaggaggagtaccagcgggagggcatcccctggaccttcctggactttggcctggacctgcagccctgcatcgacctgattgaaagacctgccaaccccccaggcctgctggccctgctggatgaggagtgctggttccccaaggccacagacaagagctttgtggagaaggtggcccaggagcagggcggccaccccaagttccagaggcccaggcacctgcgggaccaggccgacttctctgtgctgcactacgccggcaaggtggactacaaggccaatgagtggctgatgaagaacatggaccccctgaatgacaacgtggccgccctgctgcaccagagcacagaccggctgacagctgagatctggaaggatgtggagggcatcgtgggcctggagcaggtgagcagcctgggagatggccccccaggcggccggccccggcggggcatgttcagaacagtgggccagctgtacaaggagagcctgagccggctgatggccaccctgagcaacaccaaccccagctttgtgcgctgcatcgtgcccaaccacgagaagagagctgggaagctggagccccggctggtgctggaccagctgcgctgcaatggagtgctggagggcatccgcatctgccggcagggcttccccaaccgcatcctcttccaggagttccggcagagatatgagatcctgaccccaaatgccatccccaagggcttcatggatggcaagcaggcctgtgagaagatgatccaggccctggagctggaccccaacctgtacagagtgggccagagcaagatcttcttccgggccggcgtgctggcccagctggaggaggagcgggacctgaaggtgacagacatcatcgtgtccttccaggccgccgcccggggctacctggcccggcgggccttccagaagaggcagcagcagcagagcgccctgcgggtgatgcagaggaactgtgccgcctacctgaagctgcggcactggcagtggtggaggctcttcaccaaggtgaagcccctgctgcaggtgacccggcaggatgaggtgctgcaggcccgggcccaggagctgcagaaggtgcaggagctgcagcagcagagcgcccgggaggtgggggagctgcagggccgggtggcccagctggaggaggagcgggcccggctggccgagcagctgcgggcagaggccgagctgtgtgccgaggccgaggagacccggggccgcctggccgccaggaagcaggagctggagctggtggtgtctgagctggaggcccgggtgggggaggaggaggagtgcagccggcagatgcagacagagaagaagaggctgcagcagcacatccaggagctggaggcccacctggaggccgaggagggcgcccggcagaagctgcagctggagaaggtgaccacagaggccaagatgaagaagtttgaggaggacctgctgctgctggaggaccagaacagcaagctgagcaaggagaggaagctgctggaggaccggctggccgagttcagcagccaggccgctgaggaggaggagaaggtgaagagcctgaacaagctgcggctgaagtatgaggccaccatcgctgacatggaggaccggctgaggaaggaggagaagggccggcaggagctggagaagctgaagaggcggctggatggagagagcagcgagctgcaggagcagatggtggagcagcagcagagagctgaggagctgcgggcccagctgggcaggaaggaggaggagctgcaggccgccctggcccgggcagaagatgagggcggggcccgggcccagctgctgaagagcctgcgggaggcccaggccgccctggccgaggcccaggaggacctggagagcgagcgggtggcccggaccaaggccgagaagcagaggcgggacctgggggaggagctggaggccctgcggggggagctggaggacaccctggacagcaccaatgcccagcaggagctgcggagcaagcgggagcaggaggtgacagagctgaagaagaccctggaggaggagacccgcatccatgaagctgctgtgcaggagctgcggcagagacatggccaggccctgggggagctggccgagcagctggagcaggcccggcggggcaagggggcctgggagaagacccggctggccctggaggccgaggtgtctgagctgcgggcagagctgagcagcctgcagacagcccggcaggagggggagcagaggagaagaaggctggagctgcagctgcaggaggtgcagggccgggctggagatggagagcgggcccgggcagaggccgctgagaagctgcagagggcccaggccgagctggagaatgtgtctggggccctgaatgaggccgagagcaagaccatccggctgagcaaggagctgagcagcacagaggcccagctgcatgatgcccaggagctgctgcaggaggagacccgggccaagctggccctgggcagccgggtgcgggccatggaggccgaggccgccggcctgcgggagcagctggaggaggaggccgccgcccgggagagagctggccgggagctgcagacagcccaggcccagctgtctgagtggaggcggcggcaggaggaggaggccggggccctggaggccggggaggaggcccggcggcgggccgcccgggaggccgaggccctgacccagaggctggccgagaagacagaaacagtggaccggctggagcggggcagaagaaggctgcagcaggagctggatgatgccaccatggacctggagcagcagaggcagctggtgtccaccctggagaagaagcagaggaagtttgaccagctgctggccgaggagaaggctgctgtgctgcgggctgtggaggagcgggagagagctgaggccgagggccgggagcgggaggcccgggccctgagcctgacccgggccctggaggaggagcaggaggcccgggaggagctggagcggcagaacagagccctgcgggcagagctggaggccctgctgagcagcaaggatgatgtgggcaagtctgtgcatgagctggagcgggcctgccgggtggccgagcaggccgccaatgacctgcgggcccaggtgacagagctggaggatgagctgacagctgctgaagatgccaagctgcggctggaggtgacagtgcaggccctgaagacccagcacgagcgggacctgcagggcagagatgaagctggggaggagcggcggcggcagctggccaagcagctgagagatgctgaggtggagagagatgaggagaggaagcagaggaccctggccgtggccgccaggaagaagctggagggggagctggaggagctgaaggcccagatggccagcgctggccagggcaaggaggaggccgtgaagcagctgaggaagatgcaggcccagatgaaggagctgtggagggaggtggaggagaccaggaccagccgggaggagatcttcagccagaaccgggagagcgagaagaggctgaagggcctggaggccgaggtgctgcggctgcaggaggagctggccgccagtgaccgggcccggcggcaggcccagcaggacagagatgagatggctgatgaggtggccaacggcaacctgagcaaggccgccatcctggaggagaagaggcagctggagggccgcctgggccagctggaggaggagctggaggaggagcagagcaacagcgagctgctgaatgaccgctacaggaagctgctgctgcaggtggagagcctgaccacagagctgtctgctgagaggagcttcagcgccaaggccgagagcggccggcagcagctggagcggcagatccaggagctgcggggccgcctgggggaggaggatgctggggcccgggcccggcacaagatgaccatcgccgccctggagagcaagctggcccaggccgaggagcagctggagcaggagacccgggagcgcatcctgagcggcaagctggtgcggcgggcagagaagaggctgaaggaggtggtgctgcaggtggaggaggagaggagagtggccgaccagctgcgggaccagctggagaagggcaacctgcgggtgaagcagctgaagaggcagctggaggaggccgaggaggaggccagccgggcccaggccggcagaagaaggctgcagcgggagctggaggatgtgacagagagcgctgagagcatgaaccgggaggtgaccaccctgaggaaccggctgcggcggggccccctgaccttcaccaccaggacagtgcggcaggtgttccggctggaggagggcgtggccagtgatgaggaggccgaggaggcccagcccggcagcggccccagccctgagcctgagggcagccccccagcccacccccagtag

SEQ ID NO: 160904 - DNA, 6111 bp, synthetic construct
  misc_feature 1..6111: note = Description of Artificial Sequence: Synthetic coding sequence
  source 1..6111: mol_type = other DNA
atggctgctgtgaccatgtctgtgcccggcaggaaggccccacccaggcctggccctgtgcctgaggccgcccagcccttcctgttcaccccccggggccccagcgctgggggcggccctggcagcggcaccagcccccaggtggagtggacagcccggcggctggtgtgggtgcccagcgagctgcacggctttgaagctgctgccctgagagatgaaggagaggaggaggccgaggtggagctggccgagagcggccgccgcctgcggctgccccgggaccagatccagaggatgaacccccccaagttcagcaaggccgaggacatggccgagctgacctgcctgaatgaggcctctgtgctgcacaacctgcgggagcgctactacagcggcctcatctacacctacagcggcctcttctgtgtggtgatcaacccctacaagcagctgcccatctacacagaggccatcgtggagatgtaccggggcaagaagagacatgaggtgccccctcatgtgtatgctgtgacagagggcgcctaccgctccatgctgcaggaccgggaggaccagagcatcctgtgcacaggagagagcggggccggcaagacagagaacaccaagaaggtgatccagtacctggcccacgtggccagcagccccaagggcaggaaggagcccggggtgcctgtgagcaacccagccctgggctggggcgagctggagcggcagctgctgcaggccaaccccatcctggaggcctttggaaatgccaagacagtgaagaatgacaacagcagcagatttgggaagttcatccgcatcaactttgatgtggccggctacatcgtgggcgccaacatcgagacctacctgctggagaagagccgggccatccggcaggccaaggatgagtgcagcttccacatcttctaccagctgctgggcggggccggggagcagctgaaggctgacctgctgctggagccctgcagccactaccgcttcctgaccaacggccccagcagcagccctggccaggagcgggagctgttccaggagaccctggagagcctgcgggtgctgggcttcagccatgaggagatcatctccatgctgaggatggtgtctgctgtgctgcagtttggaaacatcgccctgaagcgggagaggaacacagaccaggccaccatgccagacaacacagctgcccagaagctgtgccgcctgctgggcctgggcgtgacagacttcagccgggccctgctgaccccccgcatcaaggtgggccgggactatgtgcagaaggcccagaccaaggagcaggccgactttgccctggaggccctggccaaggccacctatgaaagactcttccgctggctggtgctgcggctgaacagagccctggacaggagcccccggcagggcgccagcttcctgggcatcctggacattgctggctttgagatcttccagctgaacagctttgagcagctgtgcatcaactacaccaatgagaagctgcagcagctgttcaaccacaccatgtttgtgctggagcaggaggagtaccagcgggagggcatcccctggaccttcctggactttggcctggacctgcagccctgcatcgacctgattgaaagacctgccaaccccccaggcctgctggccctgctggatgaggagtgctggttccccaaggccacagacaagagctttgtggagaaggtggcccaggagcagggcggccaccccaagttccagaggcccaggcacctgcgggaccaggccgacttctctgtgctgcactacgccggcaaggtggactacaaggccaatgagtggctgatgaagaacatggaccccctgaatgacaacgtggccgccctgctgcaccagagcacagaccggctgacagctgagatctggaaggatgagcacggcggcttccagcagttctccttcctgggcagcttcccccccagccccccaggcagcgctgagcgctgcagcagcgccatcagccccccaggagtggagggcatcgtgggcctggagcaggtgagcagcctgggagatggccccccaggcggccggccccggcggggcatgttcagaacagtgggccagctgtacaaggagagcctgagccggctgatggccaccctgagcaacaccaaccccagctttgtgcgctgcatcgtgcccaaccacgagaagagagctgggaagctggagccccggctggtgctggaccagctgcgctgcaatggagtgctggagggcatccgcatctgccggcagggcttccccaaccgcatcctcttccaggagttccggcagagatatgagatcctgaccccaaatgccatccccaagggcttcatggatggcaagcaggcctgtgagaagatgatccaggccctggagctggaccccaacctgtacagagtgggccagagcaagatcttcttccgggccggcgtgctggcccagctggaggaggagcgggacctgaaggtgacagacatcatcgtgtccttccaggccgccgcccggggctacctggcccggcgggccttccagaagaggcagcagcagcagagcgccctgcgggtgatgcagaggaactgtgccgcctacctgaagctgcggcactggcagtggtggaggctcttcaccaaggtgaagcccctgctgcaggtgacccggcaggatgaggtgctgcaggcccgggcccaggagctgcagaaggtgcaggagctgcagcagcagagcgcccgggaggtgggggagctgcagggccgggtggcccagctggaggaggagcgggcccggctggccgagcagctgcgggcagaggccgagctgtgtgccgaggccgaggagacccggggccgcctggccgccaggaagcaggagctggagctggtggtgtctgagctggaggcccgggtgggggaggaggaggagtgcagccggcagatgcagacagagaagaagaggctgcagcagcacatccaggagctggaggcccacctggaggccgaggagggcgcccggcagaagctgcagctggagaaggtgaccacagaggccaagatgaagaagtttgaggaggacctgctgctgctggaggaccagaacagcaagctgagcaaggagaggaagctgctggaggaccggctggccgagttcagcagccaggccgctgaggaggaggagaaggtgaagagcctgaacaagctgcggctgaagtatgaggccaccatcgctgacatggaggaccggctgaggaaggaggagaagggccggcaggagctggagaagctgaagaggcggctggatggagagagcagcgagctgcaggagcagatggtggagcagcagcagagagctgaggagctgcgggcccagctgggcaggaaggaggaggagctgcaggccgccctggcccgggcagaagatgaaggaggagcccgggcccagctgctgaagagcctgcgggaggcccaggccgccctggccgaggcccaggaggacctggagagcgagcgggtggcccggaccaaggccgagaagcagaggcgggacctgggggaggagctggaggccctgcggggggagctggaggacaccctggacagcaccaatgcccagcaggagctgcggagcaagcgggagcaggaggtgacagagctgaagaagaccctggaggaggagacccgcatccacgaggccgctgtgcaggagctgcggcagagacatggccaggccctgggggagctggccgagcagctggagcaggcccggcggggcaaaggagcctgggagaagacccggctggccctggaggccgaggtgtctgagctgcgggcagagctgagcagcctgcagacagcccggcaggagggggagcagaggagaagaaggctggagctgcagctgcaggaggtgcagggccgggctggagatggagagcgggcccgggcagaggccgctgagaagctgcagagggcccaggccgagctggagaatgtgtctggggccctgaatgaagctgagagcaagaccatccggctgagcaaggagctgagcagcacagaggcccagctgcatgatgcccaggagctgctgcaggaggagacccgggccaagctggccctgggcagccgggtgcgggccatggaggccgaggccgccggcctgcgggagcagctggaggaggaggccgccgcccgggagcgggccggccgggagctgcagacagcccaggcccagctgtctgagtggaggcggcggcaggaggaggaggccggggccctggaggccggggaggaggccaggagaagagctgcccgggaggccgaggccctgacccagaggctggccgagaagacagagaccgtggaccggctggagcggggcagaagaaggctgcagcaggagctggatgatgccaccatggacctggagcagcagaggcagctggtgtccaccctggagaagaagcagaggaagtttgaccagctgctggccgaggagaaggctgctgtgctgcgggctgtggaggagcgggagcgggcagaggccgagggccgggagcgggaggcccgggccctgagcctgacccgggccctggaggaggagcaggaggcccgggaggagctggagcggcagaacagagccctgcgggcagagctggaggccctgctgagcagcaaggatgatgtgggcaagtctgtgcatgagctggagcgggcctgccgggtggccgagcaggccgccaatgacctgcgggcccaggtgacagagctggaggatgagctgacagctgctgaagatgccaagctgcggctggaggtgacagtgcaggccctgaagacccagcacgagcgggacctgcagggcagagatgaggccggggaggagcggcggcggcagctggccaagcagctgagagatgctgaggtggagagagatgaggagaggaagcagaggaccctggccgtggccgccaggaagaagctggagggggagctggaggagctgaaggcccagatggccagcgctggccagggcaaggaggaggccgtgaagcagctgaggaagatgcaggcccagatgaaggagctgtggagggaggtggaggagaccaggaccagccgggaggagatcttcagccagaaccgggagagcgagaagaggctgaagggcctggaggccgaggtgctgcggctgcaggaggagctggccgccagtgaccgggcccggcggcaggcccagcaggacagagatgagatggctgatgaggtggccaatggaaacctgagcaaggccgccatcctggaggagaagaggcagctggagggccgcctgggccagctggaggaggagctggaggaggagcagagcaacagcgagctgctgaatgaccgctacaggaagctgctgctgcaggtggagagcctgaccacagagctgtctgctgagaggagcttcagcgccaaggccgagagcggccggcagcagctggagcggcagatccaggagctgcggggccgcctgggggaggaggatgctggggcccgggcccggcacaagatgaccatcgccgccctggagagcaagctggcccaggccgaggagcagctggagcaggagacccgggagcgcatcctgagcggcaagctggtgagaagagctgagaagaggctgaaggaggtggtgctgcaggtggaggaggagcggcgggtggccgaccagctgcgggaccagctggagaagggcaacctgcgggtgaagcagctgaagaggcagctggaggaggccgaggaggaggccagccgggcccaggccggcagaagaaggctgcagcgggagctggaggatgtgacagaatctgctgagagcatgaaccgggaggtgaccaccctgaggaaccggctgcggcggggccccctgaccttcaccaccaggacagtgcggcaggtgttccggctggaggagggcgtggccagtgatgaggaggccgaggaggcccagcccggcagcggccccagccctgagcctgagggcagccccccagcccacccccagtag

SEQ ID NO: 160905 - DNA, 5841 bp, synthetic construct
  misc_feature 1..5841: note = Description of Artificial Sequence: Synthetic coding sequence
  source 1..5841: mol_type = other DNA
atggtggagagctgcctgctgaccttccgggccttcttctggtggatcgccctgatcaagatggacctgagtgacctgggggaggccgccgccttcctgcggcgctctgaggccgagctgctgctgctgcaggccacagccctggatggcaagaagaagtgctggatcccagatggagaaaatgcctacatcgaggccgaggtgaagggctctgaagatgatggcaccgtcatcgtggagacagcagatggagagagcctgagcatcaaggaggacaagatccagcagatgaaccccccagagtttgagatgattgaggacatggccatgctgacccacctgaatgaggcctctgtgctgcacaccctgaagagaagatatggccagtggatgatctacacctacagcggcctcttctgtgtgaccatcaacccctacaagtggctgcctgtgtaccagaaggaggtgatggccgcctacaagggcaagagaagaagtgaggccccaccccacatctttgctgtggccaacaatgccttccaggacatgctgcacaaccgggagaaccagagcatcctcttcaccggggagagcggggccggcaagacagtgaacagcaagcacatcatccagtactttgccaccatcgccgccatgattgagagcaggaagaagcagggcgccctggaggaccagatcatgcaggccaacaccatcctggaggcctttggaaatgccaagaccctgagaaatgacaacagcagcagatttgggaagttcatccgcatgcactttggagcccggggcatgctgagctctgtggacatcgacatctacctgctggagaagagcagggtcatcttccagcaggccggggagaggaactaccacatcttctaccagatcctgagcggccagaaggagctgcatgacctgctgctggtgtctgccaaccccagcgacttccacttctgcagctgtggggctgtgacagtggagagcctggatgatgctgaggagctgctggccacagagcaggccatggacatcctgggcttcctgcctgatgagaagtatggctgctacaagctgactggagccatcatgcactttggaaacatgaagttcaagcagaagccccgggaggagcagctggaggctgatggaacagaaaatgctgacaaggccgccttcctgatgggcatcaacagcagcgagctggtgaagtgcctgatccacccccgcatcaaggtgggcaatgaatatgtgacccggggccagaccatcgagcaggtgacctgtgctgtgggcgccctgagcaagtccatgtatgaaagaatgttcaagtggctggtggcccgcatcaacagagccctggatgccaagctgagccggcagttcttcatcggcatcctggacatcactggatttgagatcctggagtacaacagcctggagcagctgtgcatcaacttcaccaatgagaagctgcagcagttcttcaactggcacatgtttgtgctggagcaggaggagtacaagaaggagagcattgagtgggtgtccattggatttggcctggacctgcaggcctgcatcgacctgattgagaagcccatgggcatcctgagcatcctggaggaggagtgcatgttccccaaggccacagacctgaccttcaagaccaagctgtttgacaaccactttgggaagtctgtgcacctgcagaagcccaagccagacaagaagaagtttgaggcccactttgagctggtgcactacgccggcgtggtgccctacaacatcagcggctggctggagaagaacaaggacctgctgaatgagaccgtggtggccgtgttccagaagagcagcaaccggctgctggccagcctgtttgagaactacatgagcacagattctgccatcccctttggagagaagaagaggaagaagggggccagcttccagacagtggccagcctgcacaaggagaacctgaacaagctgatgaccaacctgaagagcacagccccccactttgtgcgctgcatcaaccccaacgtgaacaagatccctggcatcctggacccctacctggtgctgcagcagctgcgctgcaatggagtgctggagggcacccgcatctgccgggagggcttccccaaccggctgcagtatgctgacttcaagcagcgctactgcatcctgaaccccaggaccttccccaagagcaagtttgtgagcagcaggaaggctgctgaggagctgctgggcagcctggagattgaccacacccagtaccgcttcggcatcaccaaggtgttcttcaaggccggcttcctgggccagctggaggccatcagagatgagcggctgagcaaggtgttcaccctcttccaggcccgggcccagggcaagctgatgaggatcaagttccagaagatcctggaggagagagatgccctgatcctgatccagtggaacatccgggccttcatggctgtgaagaactggccctggatgaggctcttcttcaagatcaagcccctggtgaagagcagcgaggtgggggaggaggtggccggcctgaaggaggagtgtgcccagctgcagaaggccctggagaagtctgagttccagcgggaggagctgaaggccaagcaggtgtccctgacccaggagaagaatgacctgatcctgcagctgcaggccgagcaggagaccctggccaacgtggaggagcagtgtgagtggctgatcaagagcaagatccagctggaggcccgggtgaaggagctgtctgagcgggtggaggaggaggaggagatcaacagcgagctgacagcccggggcaggaagctggaggatgagtgctttgagctgaagaaggagattgatgacctggagaccatgctggtgaagtctgagaaggagaagaggaccacagagcacaaggtgaagaacctgacagaggaggtggagttcctgaatgaagacatcagcaagctgaacagagctgccaaggtggtgcaggaggcccaccagcagaccctggatgacctgcacatggaggaggagaagctgagcagcctgagcaaggccaacctgaagctggagcagcaggtggatgagctggagggcgccctggagcaggagaggaaggccaggatgaactgtgagcgggagctgcacaagctggagggcaacctgaagctgaaccgggagagcatggagaacctggagagcagccagaggcacctggccgaggagctgaggaagaaggagctggagctgagccagatgaacagcaaggtggagaatgagaagggcctggtggcccagctgcagaagacagtgaaggagctgcagacccagatcaaggacctgaaggagaagctggaggccgagaggaccacccgggccaagatggagcgggagagagctgacctgacccaggacctggccgacctgaatgaaaggctggaggaggtgggcggcagcagcctggcccagctggagatcaccaagaagcaggagaccaagttccagaagctgcaccgggacatggaggaggccaccctgcactttgagaccaccagcgccagcctgaagaagagacatgctgacagcctggccgagctggagggccaggtggagaacctgcagcaggtgaagcagaagctggagaaggacaagagtgacctgcagctggaggtggatgacctgctgaccagggtggagcagatgacccgggccaaggccaatgctgagaagctgtgcaccctgtatgaggagcggctgcacgaggccacagccaagctggacaaggtgacccagctggccaatgacctggccgcccagaagaccaagctgtggagcgagagcggggagttcctgcggcggctggaggagaaggaggccctgatcaaccagctgagccgggagaagagcaacttcacccggcagatcgaggacctgcggggccagctggagaaggagaccaagagccagagcgccctggcccacgccctgcagaaggcccagagggactgtgacctgctgcgggagcagtatgaggaggagcaggaggtgaaggccgagctgcacaggaccctgagcaaggtgaatgctgagatggtgcagtggaggatgaagtatgagaacaacgtcatccagaggacagaggacctggaggatgccaagaaggagctggccatccggctgcaggaggccgctgaggccatgggcgtggccaatgccagaaatgccagcctggagcgggcccggcaccagctgcagctggagctgggagatgccctgagtgacctgggcaaggtgcgctctgctgctgcccggctggaccagaagcagctgcagagcggcaaggccctggccgactggaagcagaagcatgaggagagccaggccctgctggatgccagccagaaggaggtgcaggccctgagcacagagctgctgaagctgaagaacacctatgaggagagcatcgtgggccaggagaccctgcggcgggagaacaagaacctgcaggaggagatcagcaacctgaccaaccaggtgcgggagggcaccaagaacctgacagagatggagaaggtgaagaagctgattgaggaggagaagacagaggtgcaggtgaccctggaggagacagaaggagccctggagagaaatgaaagcaagatcctgcacttccagctggagctgctggaggccaaggccgagctggagaggaagctgtctgagaaggatgaggagattgagaacttccggaggaagcagcagtgcaccatcgacagcctgcagagcagcctggacagcgaggccaagagcagaattgaggtgacccggctgaagaagaagatggaggaggacctgaatgagatggagctgcagctgagctgtgccaaccggcaggtgtctgaggccaccaagagcctgggccagctgcagatccagatcaaggacctgcagatgcagctggatgacagcacccagctgaacagcgacctgaaggagcaggtggccgtggccgagaggaggaacagcctgctgcagagcgagctggaggacctgcggagcctgcaggagcagacagagcggggccgccgcctgtctgaggaggagctgctggaggccacagagcgcatcaacctcttctacacccagaacaccagcctgctgagccagaagaagaagctggaggctgatgtggccaggatgcagaaggaggccgaggaggtggtgcaggagtgccagaatgctgaggagaaggccaagaaggccgccatcgaggccgccaacctgtctgaggagctgaagaagaagcaggacaccatcgcccacctggagaggacccgggagaacatggagcagaccatcacagacctgcagaagaggctggccgaggccgagcagatggccctgatgggcagcaggaagcagatccagaagctggagagccgggtgcgggagctggagggggagctggagggggagatcagaagatctgctgaggcccagagaggagcccggcggctggagcgctgcatcaaggagctgacctaccaggccgaggaggacaagaagaacctgagcaggatgcagacccagatggacaagctgcagctgaaggtgcagaactacaagcagcaggtggaggtggccgagacccaggccaaccagtacctgagcaagtacaagaagcagcagcacgagctgaatgaggtgaaggagcgggcagaggtggccgagagccaggtgaacaagctgaagatcaaggcccgggagtttgggaagaaggtgcaggaggagtag

SEQ ID NO: 160906 - DNA, 5826 bp, synthetic construct
  misc_feature 1..5826: note = Description of Artificial Sequence: Synthetic coding sequence
  source 1..5826: mol_type = other DNA
atgagcagtgacagcgagctggccgtgtttggagaggccgcccccttcctgaggaagtctgagcgggagagaattgaggcccagaaccggccctttgatgccaagacctctgtgtttgtggccgagcccaaggagagctttgtgaagggcaccatccagagccgggagggcggcaaggtgacagtgaagacagagggcggggccaccctgactgtgaaggatgaccaggtgttccccatgaacccccccaagtatgacaagattgaggacatggccatgatgacccacctgcacgagcctgctgtgctgtacaacctgaaggagagatatgctgcctggatgatctacacctacagcggcctcttctgtgtgacagtgaacccctacaagtggctgcctgtgtacaagccagaggtggtgacagcctaccggggcaagaagaggcaggaggccccaccccacatcttcagcatcagtgacaatgcctaccagttcatgctgacagaccgggagaaccagagcatcctgatcaccggggagagcggggccggcaagacagtgaacaccaagagggtcatccagtactttgccaccatcgctgtgactggagagaagaagaaggaggagatcaccagcggcaagatccagggcaccctggaggaccagatcatcagcgccaaccccctgctggaggcctttggaaatgccaagacagtgagaaatgacaacagcagcagatttgggaagttcatccgcatccacttcggcaccaccgggaagctggccagcgctgacatcgagacctacctgctggagaagagccgggtggtgttccagctgaaggccgagaggagctaccacatcttctaccagatcaccagcaacaagaagccagagctgattgagatgctgctgatcaccaccaacccctatgactacccctttgtgtcccagggcgagatctctgtggccagcattgatgaccaggaggagctgatggccacagattctgccatcgacatcctgggcttcaccaatgaggagaaggtgtccatctacaagctgaccggggctgtgatgcactacggcaacctgaagttcaagcagaagcagcgggaggagcaggccgagccagatggaacagaggtggccgacaaggccgcctacctgcagagcctgaacagcgctgacctgctgaaggccctgtgctacccccgggtgaaggtgggcaatgaatatgtgaccaagggccagacagtggagcaggtgtccaatgctgtgggcgccctggccaaggctgtgtatgagaagatgttcctgtggatggtggcccgcatcaaccagcagctggacaccaagcagccccggcagtacttcatcggcgtgctggacattgctggctttgagatctttgacttcaacagcctggagcagctgtgcatcaacttcaccaatgagaagctgcagcagttcttcaaccaccacatgtttgtgctggagcaggaggagtacaagaaggagggcatcgagtggaccttcatcgactttggcatggacctggccgcctgcatcgagctgattgagaagcccatgggcatcttcagcatcctggaggaggagtgcatgttccccaaggccacagacaccagcttcaagaacaagctgtatgaccagcacctgggcaagagcgccaacttccagaagcccaaggtggtgaagggcaaggccgaggcccactttgccctgatccactacgccggcgtggtggactacaacatcaccggctggctggagaagaacaaggaccccctgaatgaaacagtggtgggcctgtaccagaagagcgccatgaagaccctggcccagctgttcagcggggcccagacagctgagggggagggcgccggcggcggggccaagaagggcggcaagaagaagggcagcagcttccagacagtgtctgccctcttccgggagaacctgaacaagctgatgaccaacctgcggagcacccacccccactttgtgcgctgcatcatccccaatgagaccaagacccctggggccatggagcacgagctggtgctgcaccagctgcgctgcaatggagtgctggagggcatccgcatctgcaggaagggcttccccagccgcatcctgtatgctgacttcaagcagcgctacaaggtgctgaatgccagcgccatccctgagggccagttcatcgacagcaagaaggccagcgagaagctgctggccagcattgatattgaccacacccagtacaagtttggccacaccaaggtgttcttcaaggccggcctgctgggcctgctggaggagatgagagatgacaagctggcccagctgatcaccaggacccaggcccgctgccggggcttcctggcccgggtggagtaccagaggatggtggagcggcgggaggccatcttctgcatccagtacaacatccgctccttcatgaatgtgaagcactggccctggatgaagctgttcttcaagatcaagcccctgctgaagtctgctgagacagagaaggagatggccaccatgaaggaggagttccagaagatcaaggatgagctggccaagtctgaggccaagaggaaggagctggaggagaagatggtgaccctgctgaaggagaagaatgacctgcagctgcaggtgcaggccgaggccgagggcctggctgatgctgaggagcgctgtgaccagctgatcaagaccaagatccagctggaggccaagatcaaggaggtgacagagcgggcagaagatgaggaggagatcaatgctgagctgacagccaagaagaggaagctggaggatgagtgcagcgagctgaagaaggacattgatgacctggagctgaccctggccaaggtggagaaggagaagcacgccacagagaacaaggtgaagaacctgacagaggagatggccggcctggatgagaccatcgccaagctgaccaaggagaagaaggccctgcaggaggcccaccagcagaccctggatgacctgcaggccgaggaggacaaggtgaacaccctgaccaaggccaagatcaagctggagcagcaggtggatgacctggagggcagcctggagcaggagaagaagctgaggatggacctggagcgggccaagaggaagctggagggggacctgaagctggcccaggagagcatcatggacattgaaaatgagaagcagcagctggatgagaagctgaagaagaaggagtttgagatcagcaacctgcagagcaagattgaagatgagcaggccctgggcatccagctgcagaagaagatcaaggagctgcaggccagaattgaggagctggaggaggagattgaggccgagcgggccagccgggccaaggccgagaagcagaggagtgacctgagccgggagctggaggagatcagcgagcggctggaggaggccggcggggccaccagcgcccagatcgagatgaacaagaagcgggaggccgagttccagaagatgagaagagacctggaggaggccaccctgcagcacgaggccacagctgccaccctgaggaagaagcatgctgacagcgtggccgagctgggggagcagattgacaacctgcagagggtgaagcagaagctggagaaggagaagtctgagatgaagatggagattgatgacctggccagcaatgtggagaccgtgtccaaggccaagggcaacctggagaagatgtgcaggaccctggaggaccagctgtctgagctgaagagcaaggaggaggagcagcagaggctcatcaatgacctgacagcccagaggggccgcctgcagacagagagcggggagttcagccggcagctggatgagaaggaggccctggtgtcccagctgagccggggcaagcaggccttcacccagcagatcgaggagctgaagaggcagctggaggaggagatcaaggccaagaatgccctggcccacgccctgcagagcagcagacatgactgtgacctgctgcgggagcagtatgaggaggagcaggagagcaaggccgagctgcagagggccctgagcaaggccaacacagaggtggcccagtggaggaccaagtatgaaacagatgccatccagaggacagaggagctggaggaggccaagaagaagctggcccagaggctgcaggccgctgaggagcacgtggaggccgtgaatgccaagtgtgccagcctggagaagaccaagcagaggctgcagaatgaggtggaggacctgatgctggatgtggagaggaccaatgctgcctgtgccgccctggacaagaagcagaggaactttgacaagatcctggccgagtggaagcagaagtgtgaggagacccatgctgagctggaggccagccagaaggaggcccggagcctgggcacagagctgttcaagatcaagaatgcctatgaggagagcctggaccagctggagaccctgaagcgggagaacaagaacctgcagcaggagatcagtgacctgacagagcagattgctgagggcggcaagaggatccacgagctggagaagatcaagaagcaggtggagcaggagaagtgtgagctgcaggccgccctggaggaggccgaggccagcctggagcacgaggagggcaagatcctgcgcatccagctggagctgaaccaggtgaagtctgaggtggacaggaagattgctgagaaggatgaggagattgaccagctgaagaggaaccacatcagaattgtggagagcatgcagagcaccctggatgctgagatccgcagcagaaatgatgccatccggctgaagaagaagatggagggggacctgaatgagatggagatccagctgaaccacgccaacaggatggctgctgaggccctgaggaactacagaaacacccagggcatcctgaaggacacccagatccacctggatgatgccctgcggagccaggaggacctgaaggagcagctggccatggtggagcggcgggccaacctgctgcaggccgagattgaggagctgcgggccaccctggagcagacagagaggagcaggaagattgctgagcaggagctgctggatgccagcgagcgggtgcagctgctgcacacccagaacaccagcctcatcaacaccaagaagaagctggagacagacatcagccagatgcagggcgagatggaggacatcctgcaggaggccagaaatgctgaggagaaggccaagaaggccatcacagatgctgccatgatggccgaggagctgaagaaggagcaggacaccagcgcccacctggagaggatgaagaagaacatggagcagacagtgaaggacctgcagctgcggctggatgaggccgagcagctggccctgaagggcggcaagaagcagatccagaagctggaggcccgggtgcgggagctggagggggaggtggagagcgagcagaagagaaatgctgaggccgtgaagggcctgaggaagcatgaaagaagagtgaaggagctgacctaccagacagaggaggacaggaagaacatcctgcggctgcaggacctggtggacaagctgcaggccaaggtgaagagctacaagaggcaggccgaggaggccgaggagcagagcaacaccaacctggccaagttcaggaagctgcagcacgagctggaggaggccgaggagagagctgacattgctgagagccaggtgaacaagctgcgggtgaagagccgggaggtgcacaccaaggtgatcagcgaggagtag

SEQ ID NO: 160907 - DNA, 5826 bp, synthetic construct; identical to SEQ ID NO: 160906
  misc_feature 1..5826: note = Description of Artificial Sequence: Synthetic coding sequence
  source 1..5826: mol_type = other DNA

SEQ ID NO: 160908 - DNA, 549 bp, synthetic construct
  misc_feature 1..549: note = Description of Artificial Sequence: Synthetic coding sequence
  source 1..549: mol_type = other DNA
atgagcagtgacagcgagctggccgtgtttggagaggccgcccccttcctgaggaagtctgagcgggagagaattgaggcccagaaccggccctttgatgccaagacctctgtgtttgtggccgagcccaaggagagctttgtgaagggcaccatccagagccgggagggcggcaaggtgacagtgaagacagagggcggggccaccctgactgtgaaggatgaccaggtgttccccatgaacccccccaagtatgacaagattgaggacatggccatgatgacccacctgcacgagcctgctgtgctgtacaacctgaaggagagatatgctgcctggatgatctacacctacagcggcctcttctgtgtgacagtgaacccctacaagtggctgcctgtgtacaagccagaggtggtgacagcctaccggggcaagaagaggcaggaggccccaccccacatcttcagcatcagtgacaatgcctaccagttcatgctgacagaccgggagaaccagagcatcctgatcaccggggagagcggctag

SEQ ID NO: 160909 - DNA, 405 bp, synthetic construct
  misc_feature 1..405: note = Description of Artificial Sequence: Synthetic coding sequence
  source 1..405: mol_type = other DNA
atgagcagtgacagcgagctggccgtgtttggagaggccgcccccttcctgaggaagtctgagcgggagagaattgaggcccagaaccggccctttgatgccaagacctctgtgtttgtggccgagcccaaggagagctttgtgaagggcaccatccagagccgggagggcggcaaggtgacagtgaagacagagggcggggccaccctgactgtgaaggatgaccaggtgttccccatgaacccccccaagtatgacaagattgaggacatggccatgatgacccacctgcacgagcctgctgtgctgtacaacctgaaggagagatatgctgcctggatgatctacacctacagcggcctcttctgtgtgacagtgaacccctacaagtggctgcctgtgtag

SEQ ID NO: 160910 - DNA, 2127 bp, synthetic construct
  misc_feature 1..2127: note = Description of Artificial Sequence: Synthetic coding sequence
  source 1..2127: mol_type = other DNA
atgagcagtgacagcgagctggccgtgtttggagaggccgcccccttcctgaggaagtctgagcgggagagaattgaggcccagaaccggccctttgatgccaagacctctgtgtttgtggccgagcccaaggagagctttgtgaagggcaccatccagagccgggagggcggcaaggtgacagtgaagacagagggcggggccaccctgactgtgaaggatgaccaggtgttccccatgaacccccccaagtatgacaagattgaggacatggccatgatgacccacctgcacgagcctgctgtgctgtacaacctgaaggagagatatgctgcctggatgatctacacctacagcggcctcttctgtgtgacagtgaacccctacaagtggctgcctgtgtacaagccagaggtggtgacagcctaccggggcaagaagaggcaggaggccccaccccacatcttcagcatcagtgacaatgcctaccagttcatgctgacagaccgggagaaccagagcatcctgatcaccggggagagcggggccggcaagacagtgaacaccaagagggtcatccagtactttgccaccatcgctgtgactggagagaagaagaaggaggagatcaccagcggcaagatccagggcaccctggaggaccagatcatcagcgccaaccccctgctggaggcctttggaaatgccaagacagtgagaaatgacaacagcagcagatttgggaagttcatccgcatccacttcggcaccaccgggaagctggccagcgctgacatcgagacctacctgctggagaagagccgggtggtgttccagctgaaggccgagaggagctaccacatcttctaccagatcaccagcaacaagaagccagagctgattgagatgctgctgatcaccaccaacccctatgactacccctttgtgtcccagggcgagatctctgtggccagcattgatgaccaggaggagctgatggccacagattctgccatcgacatcctgggcttcaccaatgaggagaaggtgtccatctacaagctgaccggggctgtgatgcactacggcaacctgaagttcaagcagaagcagcgggaggagcaggccgagccagatggaacagaggtggccgacaaggccgcctacctgcagagcctgaacagcgctgacctgctgaaggccctgtgctacccccgggtgaaggtgggcaatgaatatgtgaccaagggccagacagtggagcaggtgtccaatgctgtgggcgccctggccaaggctgtgtatgagaagatgttcctgtggatggtggcccgcatcaaccagcagctggacaccaagcagccccggcagtacttcatcggcgtgctggacattgctggctttgagatctttgacttcaacagcctggagcagctgtgcatcaacttcaccaatgagaagctgcagcagttcttcaaccaccacatgtttgtgctggagcaggaggagtacaagaaggagggcatcgagtggaccttcatcgactttggcatggacctggccgcctgcatcgagctgattgagaagcccatgggcatcttcagcatcctggaggaggagtgcatgttccccaaggccacagacaccagcttcaagaacaagctgtatgaccagcacctgggcaagagcgccaacttccagaagcccaaggtggtgaagggcaaggccgaggcccactttgccctgatccactacgccggcgtggtggactacaacatcaccggctggctggagaagaacaaggaccccctgaatgaaacagtggtgggcctgtaccagaagagcgccatgaagaccctggcccagctgttcagcggggcccagacagctgagggggagggcgccggcggcggggccaagaagggcggcaagaagaagggcagcagcttccagacagtgtctgccctcttccgggaggagcagagcaacaccaacctggccaagttcaggaagctgcagcacgagctggaggaggccgaggagagagctgacattgctgagagccaggtgaacaagctgcgggtgaagagccgggaggtgcacaccaaggtgatcagcgaggagtag

SEQ ID NO: 160911 - DNA, 5820 bp, synthetic construct
  misc_feature 1..5820: note = Description of Artificial Sequence: Synthetic coding sequence
  source 1..5820: mol_type = other DNA
atgagcagtgacagcgagatggccatctttggagaggccgcccccttcctgaggaagtctgagcgggagagaattgaggcccagaacaagccctttgatgccaagacctctgtgtttgtggtggaccccaaggagagctttgtgaaggccaccgtgcagagccgggagggcggcaaggtgacagccaagacagaggccggggccaccgtgacagtgaaggatgaccaggtgttccccatgaacccccccaagtatgacaagattgaggacatggccatgatgacccacctgcacgagcctgctgtgctgtacaacctgaaggagagatatgctgcctggatgatctacacctacagcggcctcttctgtgtgacagtgaacccctacaagtggctgcctgtgtacaatgctgaggtggtgacagcctaccggggcaagaagaggcaggaggccccaccccacatcttcagcatcagtgacaatgcctaccagttcatgctgacagaccgggagaaccagagcatcctgatcaccggggagagcggggccggcaagacagtgaacaccaagagggtcatccagtactttgccaccatcgctgtgactggagagaagaagaaggaggaggtgaccagcggcaagatgcagggcaccctggaggaccagatcatcagcgccaaccccctgctggaggcctttggaaatgccaagacagtgagaaatgacaacagcagcagatttgggaagttcatccgcatccacttcggcaccaccgggaagctggccagcgctgacatcgagacctacctgctggagaagagccgggtgaccttccagctgaaggccgagaggagctaccacatcttctaccagatcatgagcaacaagaagccagacctgattgagatgctgctgatcaccaccaacccctatgactatgcctttgtgtcccagggcgagatcaccgtgcccagcattgatgaccaggaggagctgatggccacagattctgccatcgagatcctgggcttcaccagtgatgagcgggtgtccatctacaagctgaccggggctgtgatgcactacggcaacatgaagttcaagcagaagcagcgggaggagcaggccgagccagatggaacagaggtggccgacaaggccgcctacctgcagaacctgaacagcgctgacctgctgaaggccctgtgctacccccgggtgaaggtgggcaatgaatatgtgaccaagggccagacagtgcagcaggtgtacaatgctgtgggcgccctggccaaggctgtgtatgacaagatgttcctgtggatggtgacccgcatcaaccagcagctggacaccaagcagccccggcagtacttcatcggcgtgctggacattgctggctttgagatctttgacttcaacagcctggagcagctgtgcatcaacttcaccaatgagaagctgcagcagttcttcaaccaccacatgtttgtgctggagcaggaggagtacaagaaggagggcatcgagtggaccttcatcgactttggcatggacctggccgcctgcatcgagctgattgagaagcccatgggcatcttcagcatcctggaggaggagtgcatgttccccaaggccacagacaccagcttcaagaacaagctgtatgagcagcacctgggcaagagcaacaacttccagaagcccaagccagccaagggcaagccagaggcccacttcagcctcatccactacgccggcaccgtggactacaacattgctggctggctggacaagaacaaggaccccctgaatgaaacagtggtgggcctgtaccagaagagcgccatgaagaccctggccctgctgtttgtgggcgccaccggggctgaggccgaggccggcggcggcaagaagggcggcaagaagaagggcagcagcttccagacagtgtctgccctcttccgggagaacctgaacaagctgatgaccaacctgcggagcacccacccccactttgtgcgctgcatcatccccaatgagaccaagacccctggggccatggagcacgagctggtgctgcaccagctgcgctgcaatggagtgctggagggcatccgcatctgcaggaagggcttccccagccgcatcctgtatgctgacttcaagcagcgctacaaggtgctgaatgccagcgccatccctgagggccagttcatcgacagcaagaaggccagcgagaagctgctgggcagcattgatattgaccacacccagtacaagtttggccacaccaaggtgttcttcaaggccggcctgctgggcctgctggaggagatgagagatgagaagctggcccagctgatcaccaggacccaggccatgtgccggggcttcctggcccgggtggagtaccagaagatggtggagcggcgggagagcatcttctgcatccagtacaacgtgcgggccttcatgaatgtgaagcactggccctggatgaagctgtacttcaagatcaagcccctgctgaagtctgctgagacagagaaggagatggccaacatgaaggaggagtttgagaagaccaaggaggagctggccaagacagaggccaagaggaaggagctggaggagaagatggtgaccctgatgcaggagaagaatgacctgcagctgcaggtgcaggccgaggccgacagcctggctgatgctgaggagcgctgtgaccagctgatcaagaccaagatccagctggaggccaagatcaaggaggtgacagagcgggcagaagatgaggaggagatcaatgctgagctgacagccaagaagaggaagctggaggatgagtgcagcgagctgaagaaggacattgatgacctggagctgaccctggccaaggtggagaaggagaagcacgccacagagaacaaggtgaagaacctgacagaggagatggccggcctggatgagaccatcgccaagctgaccaaggagaagaaggccctgcaggaggcccaccagcagaccctggatgacctgcaggccgaggaggacaaggtgaacaccctgaccaaggccaagatcaagctggagcagcaggtggatgacctggagggcagcctggagcaggagaagaagatccgcatggacctggagcgggccaagaggaagctggagggggacctgaagctggcccaggagagcaccatggacattgaaaatgacaagcagcagctggatgagaagctgaagaagaaggagtttgagatgagcggcctgcagagcaagattgaagatgagcaggccctgggcatgcagctgcagaagaagatcaaggagctgcaggccagaattgaggagctggaggaggagattgaggccgagcgggccagccgggccaaggccgagaagcagaggagtgacctgagccgggagctggaggagatcagcgagcggctggaggaggccggcggggccaccagcgcccagatcgagatgaacaagaagcgggaggccgagttccagaagatgagaagagacctggaggaggccaccctgcagcacgaggccacagctgccaccctgaggaagaagcatgctgacagcgtggccgagctgggggagcagattgacaacctgcagagggtgaagcagaagctggagaaggagaagtctgagatgaagatggagattgatgacctggccagcaacatggagaccgtgtccaaggccaagggcaacctggagaagatgtgccgggccctggaggaccagctgtctgagatcaagaccaaggaggaggagcagcagaggctcatcaatgacctgacagcccagagggcccggctgcagacagagagcggggagtacagccggcagctggatgagaaggacaccctggtgtcccagctgagccggggcaagcaggccttcacccagcagatcgaggagctgaagaggcagctggaggaggagatcaaggccaagagcgccctggcccacgccctgcagagcagcagacatgactgtgacctgctgcgggagcagtatgaggaggagcaggaggccaaggccgagctgcagagggccatgagcaaggccaacagcgaggtggcccagtggaggaccaagtatgaaacagatgccatccagaggacagaggagctggaggaggccaagaagaagctggcccagaggctgcaggatgctgaggagcacgtggaggccgtgaatgccaagtgtgccagcctggagaagaccaagcagaggctgcagaatgaggtggaggacctgatgattgatgtggagaggaccaatgctgcctgtgccgccctggacaagaagcagaggaactttgacaagatcctggccgagtggaagcagaagtgtgaggagacccatgctgagctggaggccagccagaaggagagccgcagcctgagcacagagctgttcaagatcaagaatgcctatgaggagagcctggaccagctggagaccctgaagcgggagaacaagaacctgcagcaggagatcagtgacctgacagagcagattgctgagggcggcaagaggatccacgagctggagaagatcaagaagcaggtggagcaggagaagtctgagctgcaggccgccctggaggaggccgaggccagcctggagcacgaggagggcaagatcctgcgcatccagctggagctgaaccaggtgaagtctgaggtggacaggaagattgctgagaaggatgaggagattgaccagatgaagaggaaccacatcagaattgtggagagcatgcagagcaccctggatgctgagatccgcagcagaaatgatgccatccggctgaagaagaagatggagggggacctgaatgagatggagatccagctgaaccacgccaacaggatggctgctgaggccctgaggaactacagaaacacccaggccatcctgaaggacacccagctgcacctggatgatgccctgcggagccaggaggacctgaaggagcagctggccatggtggagcggcgggccaacctgctgcaggccgagattgaggagctgcgggccaccctggagcagacagagaggagcaggaagattgctgagcaggagctgctggatgccagcgagcgggtgcagctgctgcacacccagaacaccagcctcatcaacaccaagaagaagctggagacagacatcagccagatccagggcgagatggaggacatcatccaggaggccagaaatgctgaggagaaggccaagaaggccatcacagatgctgccatgatggccgaggagctgaagaaggagcaggacaccagcgcccacctggagaggatgaagaagaacctggagcagacagtgaaggacctgcagcaccggctggatgaggccgagcagctggccctgaagggcggcaagaagcagatccagaagctggaggcccgggtgcgggagctggagggggaggtggagagcgagcagaagagaaatgtggaggccgtgaagggcctgaggaagcatgagaggaaggtgaaggagctgacctaccagacagaggaggacaggaagaacatcctgcggctgcaggacctggtggacaagctgcaggccaaggtgaagagctacaagaggcaggccgaggaggccgaggagcagagcaatgtgaacctgagcaagttccgccgcatccagcacgagctggaggaggccgaggagagagctgacattgctgagagccaggtgaacaagctgcgggtgaagagccgggaggtgcacaccaagatcatcagcgaggagtag

SEQ ID NO: 160912 - DNA, 5820 bp, synthetic construct
  misc_feature 1..5820: note = Description of Artificial Sequence: Synthetic coding sequence
  source 1..5820: mol_type = other DNA
atgagcagtgacagcgagatggccatctttggagaggccgcccccttcctgaggaagtctgagaaggagagaattgaggcccagaacaagccctttgatgccaagacctctgtgtttgtggtggaccccaaggagagctatgtgaaggccatcgtgcagagccgggagggcggcaaggtgacagccaagacagaggccggggccaccgtgacagtgaaggaggaccaggtgttctccatgaacccccccaagtatgacaagattgaggacatggccatgatgacccacctgcacgagcctgctgtgctgtacaacctgaaggagagatatgctgcctggatgatctacacctacagcggcctcttctgtgtgacagtgaacccctacaagtggctgcctgtgtacaaccctgaggtggtgacagcctaccggggcaagaagaggcaggaggccccaccccacatcttcagcatcagtgacaatgcctaccagttcatgctgacagaccgggagaaccagagcatcctgatcaccggggagagcggggccggcaagacagtgaacaccaagagggtcatccagtactttgccaccatcgctgtgactggagagaagaagaaggaggagcccgccagcggcaagatgcagggcaccctggaggaccagatcatcagcgccaaccccctgctggaggcctttggaaatgccaagacagtgagaaatgacaacagcagcagatttgggaagttcatccgcatccactttggagccaccgggaagctggccagcgctgacatcgagacctacctgctggagaagagccgggtgaccttccagctgaaggccgagaggagctaccacatcttctaccagatcctgagcaacaagaagccagagctgattgagatgctgctgatcaccaccaacccctatgactttgcctttgtgtcccagggcgagatcaccgtgcccagcattgatgaccaggaggagctgatggccacagattctgctgtggacatcctgggcttcaccgcagatgagaaggtggccatctacaagctgaccggggctgtgatgcactacggcaacatgaagttcaagcagaagcagcgggaggagcaggccgagccagatggaacagaggtggccgacaaggccgcctacctgaccagcctgaacagcgctgacctgctgaagagcctgtgctacccccgggtgaaggtgggcaatgaatttgtgaccaagggccagacagtgcagcaggtgtacaatgctgtgggcgccctggccaaggccatctatgagaagatgttcctgtggatggtgacccgcatcaaccagcagctggacaccaagcagccccggcagtacttcatcggcgtgctggacattgctggctttgagatctttgacttcaacagcctggagcagctgtgcatcaacttcaccaatgagaagctgcagcagttcttcaaccaccacatgtttgtgctggagcaggaggagtacaagaaggagggcatcgagtgggagttcatcgactttggcatggacctggccgcctgcatcgagctgattgagaagcccatgggcatcttcagcatcctggaggaggagtgcatgttccccaaggccacagacaccagcttcaagaacaagctgtatgagcagcacctgggcaagagcaacaacttccagaagcccaagccagccaagggcaagccagaggcccacttcagcctggtgcactacgccggcaccgtggactacaacattgctggctggctggacaagaacaaggaccccctgaatgaaacagtggtgggcctgtaccagaagagcgccatgaagaccctggccttcctgttcagcggggcccagacagctgaggccgagggcggcggcggcaagaagggcggcaagaagaagggcagcagcttccagacagtgtctgccctcttccgggagaacctgaacaagctgatgaccaacctgcggagcacccacccccactttgtgcgctgcatcatccccaatgagaccaagacccctggggccatggagcacgagctggtgctgcaccagctgcgctgcaatggagtgctggagggcatccgcatctgcaggaagggcttccccagccgcatcctgtatgctgacttcaagcagcgctacaaggtgctgaatgccagcgccatccctgagggccagttcatcgacagcaagaaggccagcgagaagctgctgggcagcattgaaattgaccacacccagtacaagtttggccacaccaaggtgttcttcaaggccggcctgctgggcaccctggaggagatgagagatgagaagctggcccagctgatcaccaggacccaggccatctgccggggcttcctgatgagggtggagttcaggaagatgatggagcggcgggagagcatcttctgcatccagtacaacatccgggccttcatgaatgtgaagcactggccctggatgaagctgtacttcaagatcaagcccctgctgaagtctgctgagacagagaaggagatggccaacatgaaggaggagtttgagaagaccaaggaggagctggccaagacagaggccaagaggaaggagctggaggagaagatggtgaccctgatgcaggagaagaatgacctgcagctgcaggtgcaggccgaggctgatgccctggctgatgctgaggagcgctgtgaccagctgatcaagaccaagatccagctggaggccaagatcaaggaggtgacagagcgggcagaagatgaggaggagatcaatgctgagctgacagccaagaagaggaagctggaggatgagtgcagcgagctgaagaaggacattgatgacctggagctgaccctggccaaggtggagaaggagaagcacgccacagagaacaaggtgaagaacctgacagaggagatggccggcctggatgagaccatcgccaagctgaccaaggagaagaaggccctgcaggaggcccaccagcagaccctggatgacctgcagatggaggaggacaaggtgaacaccctgaccaaggccaagaccaagctggagcagcaggtggatgacctggagggcagcctggagcaggagaagaagctgtgcatggacctggagcgggccaagaggaagctggagggggacctgaagctggcccaggagagcaccatggacacagaaaatgacaagcagcagctgaatgagaagctgaagaagaaggagtttgagatgagcaacctgcagggcaagattgaagatgagcaggccctggccatccagctgcagaagaagatcaaggagctgcaggccagaattgaggagctggaggaggagattgaggccgagcgggccagccgggccaaggccgagaagcagaggagtgacctgagccgggagctggaggagatcagcgagcggctggaggaggccggcggggccaccagcgcccagatcgagatgaacaagaagcgggaggccgagttccagaagatgagaagagacctggaggagagcaccctgcagcacgaggccacagctgctgccctgaggaagaagcatgctgacagcgtggccgagctgggggagcagattgacagcctgcagagggtgaagcagaagctggagaaggagaagtctgagctgaagatggagatcaatgacctggccagcaacatggagaccgtgtccaaggccaaggccaactttgagaagatgtgcaggaccctggaggaccagctgtctgagatcaagaccaaggaggaggagcagcagaggctcatcaatgagctgagcgcccagaaggcccggctgcacacagagagcggggagttcagccggcagctggatgagaaggatgccatggtgtcccagctgagccggggcaagcaggccttcacccagcagatcgaggagctgaagaggcagctggaggaggagaccaaggccaagagcaccctggcccacgccctgcagagcgcccggcatgactgtgacctgctgcgggagcagtatgaggaggagcaggaggccaaggccgagctgcagaggggcatgagcaaggccaacagcgaggtggcccagtggaggaccaagtatgaaacagatgccatccagaggacagaggagctggaggaggccaagaagaagctggcccagaggctgcaggatgctgaggagcacgtggaggccgtgaacagcaaatgtgccagcctggagaagaccaagcagaggctgcagaatgaggtggaggacctgatgattgatgtggagaggagcaatgctgcctgcatcgccctggacaagaagcagaggaactttgacaaggtgctggccgagtggaagcagaagtatgaggagacccaggccgagctggaggccagccagaaggagagccgcagcctgagcacagagctgttcaaggtgaagaatgcctatgaggagagcctggaccacctggagaccctgaagcgggagaacaagaacctgcagcaggagatcagtgacctgacagagcagattgctgagggcggcaagcacatccacgagctggagaaggtgaagaagcagctggaccacgagaagtctgagctgcagaccagcctggaggaggccgaggccagcctggagcacgaggagggcaagatcctgcgcatccagctggagctgaaccaggtgaagtcagaaattgacaggaagattgctgagaaggatgaggagctggaccagctgaagaggaaccacctgcgggtggtggagagcatgcagagcaccctggatgctgagatccgcagcagaaatgatgccctgcgcatcaagaagaagatggagggggacctgaatgagatggagatccagctgaaccacgccaaccggcaggccgctgaggccctgaggaacctgaggaacacccagggcatcctgaaggacacccagctgcacctggatgatgccatccggggccaggatgacctgaaggagcagctggccatggtggagcggcgggccaacctgatgcaggccgaggtggaggagctgcgggccagcctggagaggacagagcggggcaggaagatggccgagcaggagctgctggatgccagcgagcgggtgcagctgctgcacacccagaacaccagcctcatcaacaccaagaagaagctggagacagacatcagccagatccagggcgagatggaggacatcgtgcaggaggccagaaatgctgaggagaaggccaagaaggccatcacagatgctgccatgatggccgaggagctgaagaaggagcaggacaccagcgcccacctggagaggatgaagaagaacatggagcagacagtgaaggacctgcagctgcggctggatgaggccgagcagctggccctgaagggcggcaagaagcagatccagaagctggaggcccgggtgcgggagctggagagcgaggtggagagcgagcagaagcacaacgtggaggccgtgaagggcctgaggaagcatgaaagaagagtgaaggagctgacctaccagacagaggaggacaggaagaacatcctgcggctgcaggacctggtggacaagctgcagaccaaggtgaaggcctacaagaggcaggccgaggaggccgaggagcagagcaatgtgaacctggccaagttcaggaagctgcagcacgagctggaggaggccaaggagagagctgacattgctgagagccaggtgaacaagctgcgggtgaagagccgggaggtgcacaccaaggtgatcagcgaggagtag

SEQ ID NO: 160913 - DNA, 5820 bp, synthetic construct
  misc_feature 1..5820: note = Description of Artificial Sequence: Synthetic coding sequence
  source 1..5820: mol_type = other DNA
atgacagatgcccagatggctgactttggagctgctgcccagtacctgaggaagtctgagaaggagcggctggaggcccagacccggccctttgacatcagaacagagtgctttgtgcctgatgacaaggaggagtttgtgaaggccaagatcctgagccgggagggcggcaaggtgattgctgagacagaaaatggcaagacagtgacagtgaaggaggaccaggtgctgcagcagaacccccccaagtttgacaagattgaggacatggccatgctgaccttcctgcacgagcctgctgtgctcttcaacctgaaggagagatatgctgcctggatgatctacacctacagcggcctcttctgtgtgacagtgaacccctacaagtggctgcctgtgtacaatgctgaggtggtggccgcctaccggggcaagaagaggtctgaggccccaccccacatcttcagcatcagtgacaatgcctaccagtacatgctgacagaccgggagaaccagagcatcctgatcactggagagagcggggccggcaagacagtgaacaccaagagggtcatccagtactttgccagcattgctgccatcggggaccggggcaagaaggacaatgccaatgccaacaagggcaccctggaggaccagatcatccaggccaacccagccctggaggcctttggaaatgccaagacagtgagaaatgacaacagcagcagatttgggaagttcatccgcatccactttggagccaccgggaagctggccagcgctgacatcgagacctacctgctggagaagagcagggtcatcttccagctgaaggccgagaggaactaccacatcttctaccagatcctgagcaacaagaagccagagctgctggacatgctgctggtgaccaacaacccctatgactatgcctttgtgtcccagggcgaggtgtctgtggccagcattgatgattctgaggagctgatggccacagattctgcctttgatgtgctgggcttcaccagcgaggagaaggccggcgtgtacaagctgaccggggccatcatgcactacggcaacatgaagttcaagcagaagcagcgggaggagcaggccgagccagatggaacagaagatgctgacaagagcgcctacctgatgggcctgaacagcgctgacctgctgaagggcctgtgccacccccgggtgaaggtgggcaatgaatatgtgaccaagggccagagcgtgcagcaggtgtactacagcattggagccctggccaaggctgtgtatgagaagatgttcaactggatggtgacccgcatcaatgccaccctggagaccaagcagccccggcagtacttcatcggcgtgctggacattgctggctttgagatctttgacttcaacagctttgagcagctgtgcatcaacttcaccaatgagaagctgcagcagttcttcaaccaccacatgtttgtgctggagcaggaggagtacaagaaggagggcatcgagtggaccttcatcgactttggcatggacctgcaggcctgcatcgacctgattgagaagcccatgggcatcatgagcatcctggaggaggagtgcatgttccccaaggccacagacatgaccttcaaggccaagctgtatgacaaccacctgggcaagagcaacaacttccagaagcccaggaacatcaagggcaagcaggaggcccacttcagcctcatccactacgccggcaccgtggactacaacatcctgggctggctggagaagaacaaggaccccctgaatgaaacagtggtggccctgtaccagaagagcagcctgaagctgatggccaccctcttcagcagctatgccacagctgacaccggggacagcggcaagagcaaaggaggcaagaagaagggcagcagcttccagacagtgtctgccctgcaccgggagaacctgaacaagctgatgaccaacctgcggaccacccacccccactttgtgcgctgcatcatccccaatgaaaggaaggcccctggggtgatggacaaccccctggtgatgcaccagctgcgctgcaatggagtgctggagggcatccgcatctgcaggaagggcttccccaaccgcatcctgtatggagacttccggcagcgctaccgcatcctgaaccctgtggccatccctgagggccagttcatcgacagcaggaagggcacagagaagctgctgagcagcctggacatcgaccacaaccagtacaagtttggccacaccaaggtgttcttcaaggccggcctgctgggcctgctggaggagatgagagatgagcggctgagccgcatcatcaccaggatgcaggcccaggcccggggccagctgatgagaattgagttcaagaagatcgtggagaggagagatgccctgctggtgatccagtggaacatccgggccttcatgggcgtgaagaactggccctggatgaagctgtacttcaagatcaagcccctgctgaagtctgctgagacagagaaggagatggccaccatgaaggaggagtttggccgcatcaaggagaccctggagaagtctgaggcccggaggaaggagctggaggagaagatggtgtccctgctgcaggagaagaatgacctgcagctgcaggtgcaggccgagcaggacaacctgaatgatgctgaggagcgctgtgaccagctgatcaagaacaagatccagctggaggccaaggtgaaggagatgaatgaaaggctggaggatgaggaggagatgaatgctgagctgacagccaagaagaggaagctggaggatgagtgcagcgagctgaagaaggacattgatgacctggagctgaccctggccaaggtggagaaggagaagcacgccacagagaacaaggtgaagaacctgacagaggagatggccggcctggatgagatcatcgccaagctgaccaaggagaagaaggccctgcaggaggcccaccagcaggccctggatgacctgcaggtggaggaggacaaggtgaacagcctgagcaagagcaaggtgaagctggagcagcaggtggatgacctggagggcagcctggagcaggagaagaaggtgaggatggacctggagcgggccaagaggaagctggagggggacctgaagctgacccaggagagcatcatggacctggagaatgacaagctgcagctggaggagaagctgaagaagaaggagtttgacatcaaccagcagaacagcaagattgaagatgagcaggtgctggccctgcagctgcagaagaagctgaaggagaaccaggccagaattgaggagctggaggaggagctggaggccgagaggacagcccgggccaaggtggagaagctgcggagtgacctgagccgggagctggaggagatcagcgagcggctggaggaggccggcggggccacctctgtgcagatcgagatgaacaagaagcgggaggccgagttccagaagatgagaagagacctggaggaggccaccctgcagcacgaggccacagctgctgccctgaggaagaagcatgctgacagcgtggccgagctgggggagcagattgacaacctgcagagggtgaagcagaagctggagaaggagaagtctgagttcaagctggagctggatgatgtgaccagcaacatggagcagatcatcaaggccaaggccaacctggagaaggtgtccaggaccctggaggaccaggccaatgagtacagagtgaagctggaggaggcccagaggagcctgaatgacttcaccacccagagggccaagctgcagacagaaaatggagagctggcccggcagctggaggagaaggaggccctgatcagccagctgacccggggcaagctgagctacacccagcagatggaggacctgaagaggcagctggaggaggagggcaaggccaagaatgccctggcccacgccctgcagagcgcccggcatgactgtgacctgctgcgggagcagtatgaggaggagacagaggccaaggccgagctgcagagggtgctgagcaaggccaacagcgaggtggcccagtggaggaccaagtatgaaacagatgccatccagaggacagaggagctggaggaggccaagaagaagctggcccagaggctgcaggatgctgaggaggccgtggaggccgtgaatgccaagtgcagcagcctggagaagaccaagcaccggctgcagaatgaaattgaggacctgatggtggatgtggagaggagcaatgctgctgctgctgccctggacaagaagcagaggaactttgacaagatcctggccgagtggaagcagaagtatgaggagagccagagcgagctggagagcagccagaaggaggcccggagcctgagcacagagctgttcaagctgaagaatgcctatgaggagagcctggagcacctggagaccttcaagcgggagaacaagaacctgcaggaggagatcagtgacctgacagagcagctgggggagggcggcaagaatgtgcatgagctggagaaggtgaggaagcagctggaggtggagaagctggagctgcagagcgccctggaggaggccgaggccagcctggagcacgaggagggcaagatcctgcgggcccagctggagttcaaccagatcaaggccgagattgaaaggaagctggccgagaaggatgaggagatggagcaggccaagaggaaccaccagagggtggtggacagcctgcagaccagcctggatgctgagaccaggagcagaaatgaggtgctgcgggtgaagaagaagatggagggggacctgaatgagatggagatccagctgagccacgccaacaggatggctgctgaggcccagaagcaggtgaagagcctgcagagcctgctgaaggacacccagatccagctggatgatgctgtgcgggccaatgatgacctgaaggaaaatattgccatcgtggagaggaggaacaacctgctgcaggccgagctggaggagctgcgggctgtggtggagcagacagagaggagcaggaagctggccgagcaggagctgattgagaccagcgagcgggtgcagctgctgcacagccagaacaccagcctcatcaaccagaagaagaagatggagagtgacctgacccagctgcagagcgaggtggaggaggccgtgcaggagtgcagaaatgctgaggagaaggccaagaaggccatcacagatgctgccatgatggccgaggagctgaagaaggagcaggacaccagcgcccacctggagaggatgaagaagaacatggagcagaccatcaaggacctgcagcaccggctggatgaggccgagcagatcgccctgaagggcggcaagaagcagctgcagaagctggaggcccgggtgcgggagctggagggggagctggaggccgagcagaagagaaatgctgagagcgtgaagggcatgaggaagtcagaaagacgcatcaaggagctgacctaccagacagaggaggacaagaagaacctgctgcggctgcaggacctggtggacaagctgcagctgaaggtgaaggcctacaagaggcaggccgaggaggccgaggagcaggccaacaccaacctgagcaagttcaggaaggtgcagcacgagctggatgaggccgaggagagagctgacattgctgagagccaggtgaacaagctgcgggccaagagccgggacattggagccaagcagaagatgcatgatgaggagtag

SEQ ID NO: 160914 - DNA, 5820 bp, synthetic construct; identical to SEQ ID NO: 160913
  misc_feature 1..5820: note = Description of Artificial Sequence: Synthetic coding sequence
  source 1..5820: mol_type = other DNA

SEQ ID NO: 160915 - DNA, 5808 bp, synthetic construct
  misc_feature 1..5808: note = Description of Artificial Sequence: Synthetic coding sequence
  source 1..5808: mol_type = other DNA
atgggagacagcgagatggctgtgtttggagctgctgccccctacctgaggaagtctgagaaggagcggctggaggcccagacccggccctttgacctgaagaaggatgtgtttgtgcctgatgacaagcaggagtttgtgaaggccaagatcgtgtcccgggagggcggcaaggtgacagctgagacagaatatggcaagacagtgacagtgaaggaggaccaggtgatgcagcagaacccccccaagtttgacaagattgaggacatggccatgctgaccttcctgcacgagcctgctgtgctgtacaacctgaaggacagatatggctcctggatgatctacacctacagcggcctcttctgtgtgacagtgaacccctacaagtggctgcctgtgtacaccccagaggtggtggccgcctaccggggcaagaagaggtctgaggccccaccccacatcttcagcatcagtgacaatgcctaccagtacatgctgacagaccgggagaaccagagcatcctgatcactggagagagcggggccggcaagacagtgaacaccaagagggtcatccagtactttgctgtgattgctgccatcggggacaggagcaagaaggaccagagccctgggaagggcaccctggaggaccagatcatccaggccaacccagccctggaggcctttggaaatgccaagacagtgagaaatgacaacagcagcagatttgggaagttcatccgcatccactttggagccaccgggaagctggccagcgctgacatcgagacctacctgctggagaagagcagggtcatcttccagctgaaggccgagcgggactaccacatcttctaccagatcctgagcaacaagaagccagagctgctggacatgctgctgatcaccaacaacccctatgactatgccttcatcagccagggcgagaccaccgtggccagcattgatgatgctgaggagctgatggccacagacaatgcctttgatgtgctgggcttcaccagcgaggagaagaacagcatgtacaagctgactggagccatcatgcactttggaaacatgaagttcaagctgaagcagcgggaggagcaggccgagccagatggaacagaggaggccgacaagagcgcctacctgatgggcctgaacagcgctgacctgctgaagggcctgtgccacccccgggtgaaggtgggcaatgaatatgtgaccaagggccagaatgtgcagcaggtgatctatgccaccggggccctggccaaggctgtgtatgaaagaatgttcaactggatggtgacccgcatcaatgccaccctggagaccaagcagccccggcagtacttcatcggcgtgctggacattgctggctttgagatctttgacttcaacagctttgagcagctgtgcatcaacttcaccaatgagaagctgcagcagttcttcaaccaccacatgtttgtgctggagcaggaggagtacaagaaggagggcatcgagtggaccttcatcgactttggcatggacctgcaggcctgcatcgacctgattgagaagcccatgggcatcatgagcatcctggaggaggagtgcatgttccccaaggccacagacatgaccttcaaggccaagctgtttgacaaccacctgggcaagagcgccaacttccagaagcccaggaacatcaagggcaagccagaggcccacttcagcctcatccactacgccggcatcgtggactacaacatcatcggctggctgcagaagaacaaggaccccctgaatgagaccgtggtgggcctgtaccagaagagcagcctgaagctgctgagcaccctgtttgccaactatgctggagcagatgcccccatcgagaagggcaagggcaaggccaagaagggcagcagcttccagacagtgtctgccctgcaccgggagaacctgaacaagctgatgaccaacctgcggagcacccacccccactttgtgcgctgcatcatccccaatgagaccaagagccctggggtgatggacaaccccctggtgatgcaccagctgcgctgcaatggagtgctggagggcatccgcatctgcaggaagggcttccccaaccgcatcctgtatggagacttccggcagcgctaccgcatcctgaacccagctgccatccctgagggccagttcatcgacagcaggaaaggagctgagaagctgctgagcagcctggacatcgaccacaaccagtacaagtttggccacaccaaggtgttcttcaaggccggcctgctgggcctgctggaggagatgagagatgagcggctgagccgcatcatcacccgcatccaggcccagagccggggcgtgctggccaggatggagtacaagaagctgctggagcggcgggacagcctgctggtgatccagtggaacatccgggccttcatgggcgtgaagaactggccctggatgaagctgtacttcaagatcaagcccctgctgaagtctgctgagcgggagaaggagatggcctccatgaaggaggagttcacccggctgaaggaggccctggagaagtctgaggcccggaggaaggagctggaggagaagatggtgtccctgctgcaggagaagaatgacctgcagctgcaggtgcaggccgagcaggacaacctggctgatgctgaggagcgctgtgaccagctgatcaagaacaagatccagctggaggccaaggtgaaggagatgaatgaaaggctggaggatgaggaggagatgaatgctgagctgacagccaagaagaggaagctggaggatgagtgcagcgagctgaagagggacattgatgacctggagctgaccctggccaaggtggagaaggagaagcacgccacagagaacaaggtgaagaacctgacagaggagatggccggcctggatgagatcatcgccaagctgaccaaggagaagaaggccctgcaggaggcccaccagcaggccctggatgacctgcaggccgaggaggacaaggtgaacaccctgaccaaggccaaggtgaagctggagcagcaggtggatgacctggagggcagcctggagcaggagaagaaggtgaggatggacctggagcgggccaagaggaagctggagggggacctgaagctgacccaggagagcatcatggacctggagaatgacaagcagcagctggatgagcggctgaagaagaaggactttgagctgaatgccctgaatgccagaattgaagatgagcaggccctgggcagccagctgcagaagaagctgaaggagctgcaggccagaattgaggagctggaggaggagctggaggccgagaggacagcccgggccaaggtggagaagctgcggagtgacctgagccgggagctggaggagatcagcgagcggctggaggaggccggcggggccacctctgtgcagatcgagatgaacaagaagcgggaggccgagttccagaagatgagaagagacctggaggaggccaccctgcagcacgaggccacagctgctgccctgaggaagaagcatgctgacagcgtggccgagctgggggagcagattgacaacctgcagagggtgaagcagaagctggagaaggagaagtctgagttcaagctggagctggatgatgtgaccagcaacatggagcagatcatcaaggccaaggccaacctggagaagatgtgcaggaccctggaggaccagatgaatgagcacaggagcaaggccgaggagacccagaggtctgtgaatgacctgaccagccagagggccaagctgcagacagaaaatggagagctgagccggcagctggatgagaaggaggccctgatcagccagctgacccggggcaagctgacctacacccagcagctggaggacctgaagaggcagctggaggaggaggtgaaggccaagaatgccctggcccacgccctgcagagcgcccggcatgactgtgacctgctgcgggagcagtatgaggaggagacagaggccaaggccgagctgcagagggtgctgagcaaggccaacagcgaggtggcccagtggaggaccaagtatgaaacagatgccatccagaggacagaggagctggaggaggccaagaagaagctggcccagaggctgcaggaggccgaggaggccgtggaggccgtgaatgccaagtgcagcagcctggagaagaccaagcaccggctgcagaatgaaattgaggacctgatggtggatgtggagaggagcaatgctgctgctgctgccctggacaagaagcagaggaactttgacaagatcctggccgagtggaagcagaagtatgaggagagccagagcgagctggagagcagccagaaggaggcccggagcctgagcacagagctgttcaagctgaagaatgcctatgaggagagcctggagcacctggagaccttcaagcgggagaacaagaacctgcaggaggagatcagtgacctgacagagcagctgggcagcagcggcaagaccatccacgagctggagaaggtgaggaagcagctggaggccgagaagatggagctgcagagcgccctggaggaggccgaggccagcctggagcacgaggagggcaagatcctgcgggcccagctggagttcaaccagatcaaggccgagattgaaaggaagctggccgagaaggatgaggagatggagcaggccaagaggaaccacctgcgggtggtggacagcctgcagaccagcctggatgctgagaccaggagcagaaatgaggccctgcgggtgaagaagaagatggagggggacctgaatgagatggagatccagctgagccacgccaacaggatggctgctgaggcccagaagcaggtgaagagcctgcagagcctgctgaaggacacccagatccagctggatgatgctgtgcgggccaatgatgacctgaaggaaaatattgccatcgtggagaggaggaacaacctgctgcaggccgagctggaggagctgcgggctgtggtggagcagacagagaggagcaggaagctggccgagcaggagctgattgagaccagcgagcgggtgcagctgctgcacagccagaacaccagcctcatcaaccagaagaagaagatggatgctgacctgagccagctgcagacagaggtggaggaggccgtgcaggagtgcagaaatgctgaggagaaggccaagaaggccatcacagatgctgccatgatggccgaggagctgaagaaggagcaggacaccagcgcccacctggagaggatgaagaagaacatggagcagaccatcaaggacctgcagcaccggctggatgaggccgagcagatcgccctgaagggcggcaagaagcagctgcagaagctggaggcccgggtgcgggagctggagaatgagctggaggccgagcagaagagaaatgctgagagcgtgaagggcatgaggaagtcagaaagacgcatcaaggagctgacctaccagacagaggaggacaggaagaacctgctgcggctgcaggacctggtggacaagctgcagctgaaggtgaaggcctacaagaggcaggccgaggaggccgaggagcaggccaacaccaacctgagcaagttcaggaaggtgcagcacgagctggatgaggccgaggagagagctgacattgctgagagccaggtgaacaagctgcgggccaagagccgggacatcggcaccaagggcctgaatgaggagtag

SEQ ID NO: 160916 - DNA, 5823 bp, synthetic construct
  misc_feature 1..5823: note = Description of Artificial Sequence: Synthetic coding sequence
  source 1..5823: mol_type = other DNA
atgggagacagcgagatggctgtgtttggagctgctgccccctacctgaggaagtctgagaaggagcggctggaggcccagacccggccctttgacctgaagaaggatgtgtttgtgcctgatgacaagcaggagtttgtgaaggccaagatcgtgtcccgggagggcggcaaggtgacagctgagacagaatatggcaagacagtgacagtgaaggaggaccaggtgatgcagcagaacccccccaagtttgacaagattgaggacatggccatgctgaccttcctgcacgagcctgctgtgctgtacaacctgaaggacagatatggctcctggatgatctacacctacagcggcctcttctgtgtgacagtgaacccctacaagtggctgcctgtgtacaccccagaggtggtggccgcctaccggggcaagaagaggtctgaggccccaccccacatcttcagcatcagtgacaatgcctaccagtacatgctgacagaccgggagaaccagagcatcctgatcactggagagagcggggccggcaagacagtgaacaccaagagggtcatccagtactttgctgtgattgctgccatcggggacaggagcaagaaggaccagagccctgggaagggcaccctggaggaccagatcatccaggccaacccagccctggaggcctttggaaatgccaagacagtgagaaatgacaacagcagcagatttgggaagttcatccgcatccactttggagccaccgggaagctggccagcgctgacatcgagacctacctgctggagaagagcagggtcatcttccagctgaaggccgagcgggactaccacatcttctaccagatcctgagcaacaagaagccagagctgctggacatgctgctgatcaccaacaacccctatgactatgccttcatcagccagggcgagaccaccgtggccagcattgatgatgctgaggagctgatggccacagacaatgcctttgatgtgctgggcttcaccagcgaggagaagaacagcatgtacaagctgactggagccatcatgcactttggaaacatgaagttcaagctgaagcagcgggaggagcaggccgagccagatggaacagaggaggccgacaagagcgcctacctgatgggcctgaacagcgctgacctgctgaagggcctgtgccacccccgggtgaaggtgggcaatgaatatgtgaccaagggccagaatgtgcagcaggtgatctatgccaccggggccctggccaaggctgtgtatgaaagaatgttcaactggatggtgacccgcatcaatgccaccctggagaccaagcagccccggcagtacttcatcggcgtgctggacattgctggctttgagatctttgacttcaacagctttgagcagctgtgcatcaacttcaccaatgagaagctgcagcagttcttcaaccaccacatgtttgtgctggagcaggaggagtacaagaaggagggcatcgagtggaccttcatcgactttggcatggacctgcaggcctgcatcgacctgattgagaagcccatgggcatcatgagcatcctggaggaggagtgcatgttccccaaggccacagacatgaccttcaaggccaagctgtttgacaaccacctgggcaagagcgccaacttccagaagcccaggaacatcaagggcaagccagaggcccacttcagcctcatccactacgccggcatcgtggactacaacatcatcggctggctgcagaagaacaaggaccccctgaatgagaccgtggtgggcctgtaccagaagagcagcctgaagctgctgagcaccctgtttgccaactatgctggagcagatgcccccatcgagaagggcaagggcaaggccaagaagggcagcagcttccagacagtgtctgccctgcaccgggagaacctgaacaagctgatgaccaacctgcggagcacccacccccactttgtgcgctgcatcatccccaatgagaccaagagccctggggtgatggacaaccccctggtgatgcaccagctgcgctgcaatggagtgctggagggcatccgcatctgcaggaagggcttccccaaccgcatcctgtatggagacttccggcagcgctaccgcatcctgaacccagctgccatccctgagggccagttcatcgacagcaggaaaggagctgagaagctgctgagcagcctggacatcgaccacaaccagtacaagtttggccacaccaaggtgttcttcaaggccggcctgctgggcctgctggaggagatgagagatgagcggctgagccgcatcatcacccgcatccaggcccagagccggggcgtgctggccaggatggagtacaagaagctgctggagcggcgggacagcctgctggtgatccagtggaacatccgggccttcatgggcgtgaagaactggccctggatgaagctgtacttcaagatcaagcccctgctgaagtctgctgagcgggagaaggagatggcctccatgaaggaggagttcacccggctgaaggaggccctggagaagtctgaggcccggaggaaggagctggaggagaagatggtgtccctgctgcaggagaagaatgacctgcagctgcaggtgcaggccgagcaggacaacctggctgatgctgaggagcgctgtgaccagctgatcaagaacaagatccagctggaggccaaggtgaaggagatgaatgaaaggctggaggatgaggaggagatgaatgctgagctgacagccaagaagaggaagctggaggatgagtgcagcgagctgaagagggacattgatgacctggagctgaccctggccaaggtggagaaggagaagcacgccacagagaacaaggtgaagaacctgacagaggagatggccggcctggatgagatcatcgccaagctgaccaaggagaagaaggccctgcaggaggcccaccagcaggccctggatgacctgcaggccgaggaggacaaggtgaacaccctgaccaaggccaaggtgaagctggagcagcaggtggatgacctggagggcagcctggagcaggagaagaaggtgaggatggacctggagcgggccaagaggaagctggagggggacctgaagctgacccaggagagcatcatggacctggagaatgacaagcagcagctggatgagcggctgaagaagaaggactttgagctgaatgccctgaatgccagaattgaagatgagcaggccctgggcagccagctgcagaagaagctgaaggagctgcaggccagaattgaggagctggaggaggagctggaggccgagaggacagcccgggccaaggtggagaagctgcggagtgacctgagccgggagctggaggagatcagcgagcggctggaggaggccggcggggccacctctgtgcagatcgagatgaacaagaagcgggaggccgagttccagaagatgagaagagacctggaggaggccaccctgcagcacgaggccacagctgctgccctgaggaagaagcatgctgacagcgtggccgagctgggggagcagattgacaacctgcagagggtgaagcagaagctggagaaggagaagtctgagttcaagctggagctggatgatgccctgctgggcctgcccagcagcaacttcctgctgcccccacccctgagcgccaacctggagaagatgtgcaggaccctggaggaccagatgaatgagcacaggagcaaggccgaggagacccagaggtctgtgaatgacctgaccagccagagggccaagctgcagacagaaaatggagagctgagccggcagctggatgagaaggaggccctgatcagccagctgacccggggcaagctgacctacacccagcagctggaggacctgaagaggcagctggaggaggaggtgaaggccaagaatgccctggcccacgccctgcagagcgcccggcatgactgtgacctgctgcgggagcagtatgaggaggagacagaggccaaggccgagctgcagagggtgctgagcaaggccaacagcgaggtggcccagtggaggaccaagtatgaaacagatgccatccagaggacagaggagctggaggaggccaagaagaagctggcccagaggctgcaggaggccgaggaggccgtggaggccgtgaatgccaagtgcagcagcctggagaagaccaagcaccggctgcagaatgaaattgaggacctgatggtggatgtggagaggagcaatgctgctgctgctgccctggacaagaagcagaggaactttgacaagatcctggccgagtggaagcagaagtatgaggagagccagagcgagctggagagcagccagaaggaggcccggagcctgagcacagagctgttcaagctgaagaatgcctatgaggagagcctggagcacctggagaccttcaagcgggagaacaagaacctgcaggaggagatcagtgacctgacagagcagctgggcagcagcggcaagaccatccacgagctggagaaggtgaggaagcagctggaggccgagaagatggagctgcagagcgccctggaggaggccgaggccagcctggagcacgaggagggcaagatcctgcgggcccagctggagttcaaccagatcaaggccgagattgaaaggaagctggccgagaaggatgaggagatggagcaggccaagaggaaccacctgcgggtggtggacagcctgcagaccagcctggatgctgagaccaggagcagaaatgaggccctgcgggtgaagaagaagatggagggggacctgaatgagatggagatccagctgagccacgccaacaggatggctgctgaggcccagaagcaggtgaagagcctgcagagcctgctgaaggacacccagatccagctggatgatgctgtgcgggccaatgatgacctgaaggagaacatcgccatcgtggagaggaggaacaacctgctgcaggccgagctggaggagctgcgggctgtggtggagcagacagagaggagcaggaagctggccgagcaggagctgattgagaccagcgagcgggtgcagctgctgcacagccagaacaccagcctcatcaaccagaagaagaagatggatgctgacctgagccagctgcagacagaggtggaggaggccgtgcaggagtgcagaaatgctgaggagaaggccaagaaggccatcacagatgctgccatgatggccgaggagctgaagaaggagcaggacaccagcgcccacctggagaggatgaagaagaacatggagcagaccatcaaggacctgcagcaccggctggatgaagctgagcagatcgccctgaagggcggcaagaagcagctgcagaagctggaggcccgggtgcgggagctggagaatgagctggaggccgagcagaagagaaatgctgagagcgtgaagggcatgaggaagtctgagcggcgcatcaaggagctgacctaccagacagaggaggacaggaagaacctgctgcggctgcaggacctggtggacaagctgcagctgaaggtgaaggcctacaagaggcaggccgaggaggccgaggagcaggccaacaccaacctgagcaagttcaggaaggtgcagcacgagctggatgaagctgaggagagagctgacattgctgagagccaggtgaacaagctgcgggccaagagccgggacatcggcaccaagggcctgaatgaggagtag

SEQ ID NO: 160917 - DNA, 5814 bp, synthetic construct
  misc_feature 1..5814: note = Description of Artificial Sequence: Synthetic coding sequence
  source 1..5814: mol_type = other DNA
atgtctgccagcagtgatgctgagatggctgtgtttggagaggccgccccctacctgaggaagtctgagaaggagagaattgaggcccagaacaagccctttgatgccaagacctctgtgtttgtggccgagcccaaggagagctatgtgaagagcaccatccagagcaaggagggcggcaaggtgacagtgaagacagagggcggggccaccctgactgtgcgggaggaccaggtgttccccatgaacccccccaagtatgacaagattgaggacatggccatgatgacccacctgcacgagcccggggtgctgtacaacctgaaggagagatatgctgcctggatgatctacacctacagcggcctcttctgtgtgacagtgaacccctacaagtggctgcctgtgtacaagccagaggtggtggccgcctaccggggcaagaagaggcaggaggccccaccccacatcttcagcatcagtgacaatgcctaccagttcatgctgacagaccgggagaaccagagcatcctgatcaccggggagagcggggccggcaagacagtgaacaccaagagggtcatccagtactttgccaccatcgctgtgactggagagaagaagaaggatgagagcggcaagatgcagggcaccctggaggaccagatcatcagcgccaaccccctgctggaggcctttggaaatgccaagacagtgagaaatgacaacagcagcagatttgggaagttcatccgcatccacttcggcaccaccgggaagctggccagcgctgacatcgagacctacctgctggagaagagccgggtgaccttccagctgaaggccgagaggagctaccacatcttctaccagatcaccagcaacaagaagccagacctgattgagatgctgctgatcaccaccaacccctatgactatgcctttgtgtcccagggcgagatcaccgtgcccagcattgatgaccaggaggagctgatggccacagattctgccatcgacatcctgggcttcaccccagaggagaaggtgtccatctacaagctgaccggggctgtgatgcactacggcaacatgaagttcaagcagaagcagcgggaggagcaggccgagccagatggaacagaggtggccgacaaggccgcctacctgcagagcctgaacagcgctgacctgctgaaggccctgtgctacccccgggtgaaggtgggcaatgaatatgtgaccaagggccagacagtgcagcaggtgtacaatgctgtgggcgccctggccaaggctgtgtatgagaagatgttcctgtggatggtgacccgcatcaaccagcagctggacaccaagcagccccggcagtacttcatcggcgtgctggacattgctggctttgagatctttgacttcaacagcctggagcagctgtgcatcaacttcaccaatgagaagctgcagcagttcttcaaccaccacatgtttgtgctggagcaggaggagtacaagaaggagggcatcgagtggaccttcatcgactttggcatggacctggccgcctgcatcgagctgattgagaagcccctgggcatcttcagcatcctggaggaggagtgcatgttccccaaggccacagacaccagcttcaagaacaagctgtatgaccagcacctgggcaagagcgccaacttccagaagcccaaggtggtgaagggcaaggccgaggcccacttcagcctcatccactacgccggcaccgtggactacaacatcaccggctggctggacaagaacaaggaccccctgaatgacacagtggtgggcctgtaccagaagagcgccatgaagaccctggccagcctcttcagcacctacgccagcgctgaggccgacagcagcgccaagaagggggccaagaagaagggcagcagcttccagacagtgtctgccctcttccgggagaacctgaacaagctgatgaccaacctgcggagcacccacccccactttgtgcgctgcatcatccccaatgagaccaagacccctggggccatggagcacgagctggtgctgcaccagctgcgctgcaatggagtgctggagggcatccgcatctgcaggaagggcttccccagccgcatcctgtatggagacttcaagcagcgctacaaggtgctgaatgccagcgccatccctgagggccagttcatcgacagcaagaaggccagcgagaagctgctggccagcattgacatcgaccacacccagtacaagtttggccacaccaaggtgttcttcaaggccggcctgctgggcctgctggaggagatgagagatgagaagctggcccagatcatcaccaggacccaggccgtgtgccggggcttcctgatgagggtggagtaccagaagatgctgcagaggcgggaggccctcttctgcatccagtacaacgtgcgggccttcatgaatgtgaagcactggccctggatgaagctgttcttcaagatcaagcccctgctgaagtctgctgagacagagaaggagatggccaccatgaaggaggagttccagaagaccaaggatgagctggccaagtctgaggccaagaggaaggagctggaggagaagatggtgaccctgctgaaggagaagaatgacctgcagctgcaggtgcagagcgaggccgacagcctggctgatgctgaggagcgctgtgagcagctgatcaagaacaagatccagctggaggccaagatcaaggaggtgacagaaagagctgaggaggaggaggagatcaatgctgagctgacagccaagaagaggaagctggaggatgaatgttctgagctgaagaaggacattgatgacctggagctgaccctggccaaggtggagaaggagaagcacgccacagagaacaaggtgaagaacctgacagaggagatggccggcctggatgagaccatcgccaagctgagcaaggagaagaaggccctgcaggagacccaccagcagaccctggatgacctgcaggccgaggaggacaaggtgaacatcctgaccaaggccaagaccaagctggagcagcaggtggatgacctggagggcagcctggagcaggagaagaagctgaggatggacctggagcgggccaagaggaagctggagggggacctgaagctggcccaggagagcaccatggacatggagaatgacaagcagcagctggatgagaagctggagaagaaggagtttgagatcagcaacctgatcagcaagattgaagatgagcaggccgtggagatccagctgcagaagaagatcaaggagctgcaggcccgcatcgaggagctgggggaggagattgaagctgagcgggccagccgggccaaggccgagaagcagaggagtgacctgagccgggagctggaggagatcagcgagcggctggaggaggccggcggggccaccagcgcccaggtggagctgaacaagaagcgggaggccgagttccagaagctgcggcgggacctggaggaggccaccctgcagcacgaggccatggtggccgccctgaggaagaagcacgccgacagcatggccgagctgggggagcagattgacaacctgcagagggtgaagcagaagctggagaaggagaagtctgagctgaagatggagacagatgacctgagcagcaatgctgaggccatcagcaaggccaagggcaacctggagaagatgtgccgcagcctggaggaccaggtgtctgagctgaagaccaaggaggaggagcagcagaggctcatcaatgacctgacagcccagagggcccggctgcagacagaagctggggagtacagccggcagctggatgagaaggatgccctggtgtcccagctgagccgcagcaagcaggccagcacccagcagatcgaggagctgaagcaccagctggaggaggagaccaaggccaagaatgccctggcccacgccctgcagagcagcagacatgactgtgacctgctgcgggagcagtatgaggaggagcaggagggcaaggccgagctgcagagggccctgagcaaggccaacagcgaggtggcccagtggaggaccaagtatgaaacagatgccatccagaggacagaggagctggaggaggccaagaagaagctggcccagaggctgcaggaggccgaggagcacgtggaggccgtgaatgccaagtgtgccagcctggagaagaccaagcagaggctgcagaatgaggtggaggacctgatgctggatgtggagaggagcaatgctgcctgtgccgccctggacaagaagcagaggaactttgacaaggtgctgtctgagtggaagcagaagtatgaggagacccaggccgagctggaggccagccagaaggagagccgcagcctgagcacagagctgttcaaggtgaagaatgtgtatgaggagagcctggaccagctggagaccctgcggcgggagaacaagaacctgcagcaggagatcagtgacctgacagagcagattgctgagggcggcaagcagatccacgagctggagaagatcaagaagcaggtggagcaggagaagtgtgagatccaggccgccctggaggaggccgaggccagcctggagcacgaggagggcaagatcctgcgcatccagctggagctgaaccaggtgaagtctgaggtggacaggaagattgctgagaaggatgaggagattgaccagctgaagaggaaccacaccagggtggtggagaccatgcagagcaccctggatgctgagatccgcagcagaaatgatgccctgcgggtgaagaagaagatggagggggacctgaatgagatggagatccagctgaaccacgccaaccggctggccgctgagagcctgaggaactacagaaacacccagggcatcctgaaggagacccagctgcacctggatgatgccctgcggggccaggaggacctgaaggagcagctggccatcgtggagcggcgggccaacctgctgcaggccgagattgaggagctgtgggccaccctggagcagacagagaggagcaggaagattgctgagcaggagctgctggatgccagcgagcgggtgcagctgctgcacacccagaacaccagcctcatcaacaccaagaagaagctggagaatgatgtgtcccagctgcagagcgaggtggaggaggtgatccaggagagcagaaatgctgaggagaaggccaagaaggccatcacagatgctgccatgatggccgaggagctgaagaaggagcaggacaccagcgcccacctggagaggatgaagaagaacctggagcagacagtgaaggacctgcagcaccggctggatgaagctgagcagctggccctgaagggcggcaagaagcagatccagaagctggaggcccgggtgcgggagctggagggggaggtggagaatgagcagaagagaaatgctgaggccgtgaagggcctgaggaagcatgagcggcgggtgaaggagctgacctaccagacagaggaggacaggaagaatgtgctgcggctgcaggacctggtggacaagctgcaggccaaggtgaagagctacaagaggcaggccgaggaggccgaggagcagagcaatgccaacctgagcaagttcaggaagctgcagcacgagctggaggaggccgaggagagagctgacattgctgagagccaggtgaacaagctgcgggtgaagagccgggaggtgcacaccaagatctctgctgagtag

SEQ ID NO: 160918 - DNA, 5814 bp, synthetic construct; identical to SEQ ID NO: 160917
  misc_feature 1..5814: note = Description of Artificial Sequence: Synthetic coding sequence
  source 1..5814: mol_type = other DNA

SEQ ID NO: 160919 - DNA, 453 bp, synthetic construct
  misc_feature 1..453: note = Description of Artificial Sequence: Synthetic coding sequence
  source 1..453: mol_type = other DNA
atgtccttctctgctgaccagattgctgagttcaaggaggccttcctgctgtttgacagaactggagacagcaagatcaccctgagccaggtgggagatgtgctgcgggccctgggcaccaaccccaccaatgctgaggtgaggaaggtgctgggcaaccccagcaatgaggagctgaatgccaagaagattgaatttgagcagttcctgcccatgatgcaggccatcagcaacaacaaggaccaggccacctatgaggactttgtggagggcctgcgggtgtttgacaaggagggcaatggcaccgtgatgggcgctgagctgcggcacgtgctggccaccctgggggagaagatgaaggaggaggaggtggaggccctgatggccggccaggaggacagcaatggctgcatcaactatgaggcctttgtgaagcacatcatgagcatctag

SEQ ID NO: 160920 - DNA, 585 bp, synthetic construct
  misc_feature 1..585: note = Description of Artificial Sequence: Synthetic coding sequence
  source 1..585: mol_type = other DNA
atggcccccaagaaggatgtgaagaagcctgtggccgctgctgctgctgccccagccccagccccagccccagccccagccccagccccagccaagcccaaggaggagaagattgacctgagcgccatcaagattgagttcagcaaggagcagcaggatgagttcaaggaggccttcctgctgtttgacagaactggagacagcaagatcaccctgagccaggtgggagatgtgctgcgggccctgggcaccaaccccaccaatgctgaggtgaggaaggtgctgggcaaccccagcaatgaggagctgaatgccaagaagattgaatttgagcagttcctgcccatgatgcaggccatcagcaacaacaaggaccaggccacctatgaggactttgtggagggcctgcgggtgtttgacaaggagggcaatggcaccgtgatgggcgctgagctgcggcacgtgctggccaccctgggggagaagatgaaggaggaggaggtggaggccctgatggccggccaggaggacagcaatggctgcatcaactatgaggcctttgtgaagcacatcatgagcatctag

SEQ ID NO: 160921 - DNA, 519 bp, synthetic construct; identical to SEQ ID NO: 160813
  misc_feature 1..519: note = Description of Artificial Sequence: Synthetic coding sequence
  source 1..519: mol_type = other DNA

SEQ ID NO: 160922 - DNA, 519 bp, synthetic construct; identical to SEQ ID NO: 160813
  misc_feature 1..519: note = Description of Artificial Sequence: Synthetic coding sequence
  source 1..519: mol_type = other DNA

SEQ ID NO: 160923 - DNA, 519 bp, synthetic construct; identical to SEQ ID NO: 160813
  misc_feature 1..519: note = Description of Artificial Sequence: Synthetic coding sequence
  source 1..519: mol_type = other DNA

SEQ ID NO: 160924 - DNA, 519 bp, synthetic construct; identical to SEQ ID NO: 160813
  misc_feature 1..519: note = Description of Artificial Sequence: Synthetic coding sequence
  source 1..519: mol_type = other DNA

SEQ ID NO: 160925 - DNA, 627 bp, synthetic construct
  misc_feature 1..627: note = Description of Artificial Sequence: Synthetic coding sequence
  source 1..627: mol_type = other DNA
atggccctgggccagaagctgttcatcaccatgagcagaggagctggccgcctgcagggcaccctgtgggccctggtgttcctgggcatcctggtgggcatggtggtgcccagccctgctggcacccgggccaacaacaccctgctggacagccggggctggggcaccctgctgagccgcagcagagctggcctggccggggagattgctggggtgaactgggagagcggctacctggtgggcatcaagaggcagaggcggctgtactgcaatgtgggcatcggcttccacctgcaggtgctgcctgatggccgcatcagcggcacccatgaggagaacccctacagcctgctggagatcagcacagtggagcggggcgtggtgtccctgtttggagtgcgcagcgccctgtttgtggccatgaacagcaagggccgcctgtatgccacccccagcttccaggaggagtgcaagttccgggagaccctgctgcccaacaactacaatgcctatgaaagtgacctgtaccagggcacctacatcgccctgagcaaatatggccgggtgaagaggggcagcaaggtgagccccatcatgacagtgacccacttcctgccccgcatctag

SEQ ID NO: 160926 - DNA, 588 bp, synthetic construct
  misc_feature 1..588: note = Description of Artificial Sequence: Synthetic coding sequence
  source 1..588: mol_type = other DNA
atggcccccaagaagccagagcccaagaaggatgatgccaaggccgcccccaaggccgccccagccccagcccctcctcctgagcctgagcggcccaaggaggtggagtttgatgccagcaagatcaagattgagttcaccccagagcagatcgaggagttcaaggaggccttcatgctgtttgacaggacccccaagtgtgagatgaagatcacctacggccagtgtggagatgtgctgcgggccctgggccagaaccccacccaggccgaggtgctgcgggtgctgggcaagccccggcaggaggagctgaacaccaagatgatggactttgagaccttcctgcccatgctgcagcacatcagcaagaacaaggacaccggcacctatgaagattttgtggagggcctgcgggtgtttgacaaggagggcaatggaacagtgatgggcgctgagctgcggcacgtgctggccaccctgggggagcggctgacagaagatgaggtggagaagctgatggccggccaggaggacagcaatggctgcatcaactatgaggcctttgtgaagcacatcatgagcagctag

SEQ ID NO: 160927 - DNA, 588 bp, synthetic construct; identical to SEQ ID NO: 160926
  misc_feature 1..588: note = Description of Artificial Sequence: Synthetic coding sequence
  source 1..588: mol_type = other DNA

SEQ ID NO: 160928 - DNA, 141 bp, synthetic construct
  misc_feature 1..141: note = Description of Artificial Sequence: Synthetic coding sequence
  source 1..141: mol_type = other DNA
atggcccccaagaagccagagcccaagaaggatgatgccaaggccgcccccaaggccgccccagccccagcccctcctcctgagcctgagcggcccaaggaggtggagtttgatgccagcaagatcaagattgagttctag

SEQ ID NO: 160929 - DNA, 594 bp, synthetic construct
  misc_feature 1..594: note = Description of Artificial Sequence: Synthetic coding sequence
  source 1..594: mol_type = other DNA
atggcccccaagaagccagagcccaagaaggaggccgccaagccagccccagccccagccccagccccagccccagccccagccccagcccctgaggcccccaaggagcccgcctttgaccccaagtctgtgaagattgacttcaccgctgaccagatcgaggagttcaaggaggccttcagcctgtttgacaggacccccaccggggagatgaagatcacctacggccagtgtggagatgtgctgcgggccctgggccagaaccccaccaatgctgaggtgctgcgggtgctgggcaagcccaagccagaggagatgaatgtgaagatgctggactttgagaccttcctgcccatcctgcagcacatcagcaggaacaaggagcagggcacctatgaagattttgtggagggcctgcgggtgtttgacaaggagagcaatggaacagtgatgggcgctgagctgcggcacgtgctggccaccctgggggagaagatgacagaagctgaggtggagcagctgctggccggccaggaggatgccaacggctgcatcaactatgaggcctttgtgaagcacatcatgagcggctag

SEQ ID NO: 160930 - DNA, 594 bp, synthetic construct; identical to SEQ ID NO: 160929
  misc_feature 1..594: note = Description of Artificial Sequence: Synthetic coding sequence
  source 1..594: mol_type = other DNA

SEQ ID NO: 160931 - DNA, 264 bp, synthetic construct
  misc_feature 1..264: note = Description of Artificial Sequence: Synthetic coding sequence
  source 1..264: mol_type = other DNA
cctgaggcccccaaggagcccgcctttgaccccaagtctgtgaaggtgattggctgcccctgccccaggagccagagccatggagctgtgattgacttcaccgctgaccagatcgaggagttcaaggaggccttcatgggcgctgagctgcggcacgtgctggccaccctggtgatcaagagcgcccccccacccaagcccacagctggggagaagatgacagaggccgaggtggagcagctgctggccggccaggaggactag

SEQ ID NO: 160932 - DNA, 522 bp, synthetic construct
  misc_feature 1..522: note = Description of Artificial Sequence: Synthetic coding sequence
  source 1..522: mol_type = other DNA
atggccagcaggaagaccaagaagaaggagggcggggccctgcgggcccagagggccagcagcaatgtgttcagcaactttgagcagacccagatccaggagttcaaggaggccttcaccctgatggaccagaacagagatggcttcatcgacaaggaggacctgaaggacacctacgccagcctgggcaagaccaacgtgaaggatgatgagctggatgccatgctgaaggaggccagcggccccatcaacttcaccatgttcctgaacctgtttggagagaagctgtctggaacagatgctgaggagaccatcctgaatgccttcaagatgctggaccctgatggcaagggcaagatcaacaaggagtacatcaagaggctgctgatgagccaggccgacaagatgacagctgaggaggtggaccagatgttccagtttgccagcattgatgtggccggcaacctggactacaaggccctgtcctatgtgatcacccatggagaggagaaggaggagtag

SEQ ID NO: 160933 - DNA, 399 bp, synthetic construct
  misc_feature 1..399: note = Description of Artificial Sequence: Synthetic coding sequence
  source 1..399: mol_type = other DNA
atggaccagaacagagatggcttcatcgacaaggaggacctgaaggacacctacgccagcctgggcaagaccaacgtgaaggatgatgagctggatgccatgctgaaggaggccagcggccccatcaacttcaccatgttcctgaacctgtttggagagaagctgagcggcacagatgctgaggagaccatcctgaatgccttcaagatgctggaccctgatggcaagggcaagatcaacaaggagtacatcaagaggctgctgatgagccaggccgacaagatgacagctgaggaggtggaccagatgttccagtttgccagcattgatgtggccggcaacctggactacaaggccctgtcctatgtgatcacccacggggaggagaaggaggagtag

SEQ ID NO: 160934 - DNA, 399 bp, synthetic construct; identical to SEQ ID NO: 160933
  misc_feature 1..399: note = Description of Artificial Sequence: Synthetic coding sequence
  source 1..399: mol_type = other DNA

SEQ ID NO: 160935 - DNA, 399 bp, synthetic construct; identical to SEQ ID NO: 160933
  misc_feature 1..399: note = Description of Artificial Sequence: Synthetic coding sequence
  source 1..399: mol_type = other DNA

SEQ ID NO: 160936 - DNA, 456 bp, synthetic construct
  misc_feature 1..456: note = Description of Artificial Sequence: Synthetic coding sequence
  source 1..456: mol_type = other DNA
atgtgtgacttcacagaggaccagacagctgagttcaaggaggccttccagctgtttgacagaactggagatggcaagatcctgtacagccagtgtggagatgtgatgagggccctgggccagaaccccaccaatgctgaggtgctgaaggtgctgggcaaccccaagagtgatgagatgaatgtgaaggtgctggactttgagcacttcctgcccatgctgcagacagtggccaagaacaaggaccagggcacctatgaagattatgtggagggcctgcgggtgtttgacaaggagggcaatggaacagtgatgggcgctgagatcagacatgtgctggtgaccctgggggagaagatgacagaggaggaggtggagatgctggtggccggccacgaggacagcaatggctgcatcaactatgaggagctggtgaggatggtgctgaatggatag

SEQ ID NO: 160937 - DNA, 456 bp, synthetic construct
  misc_feature 1..456: note = Description of Artificial Sequence: Synthetic coding sequence
  source 1..456: mol_type = other DNA
atgtgtgacttcacagaggaccagacagctgagttcaaggaggccttccagctgtttgacagaactggagatggcaagatcctgtacagccagtgtggagatgtgatgagggccctgggccagaaccccaccaatgctgaggtgctgaaggtgctgggcaaccccaagagtgatgagatgaatgtgaaggtgctggactttgagcacttcctgcccatgctgcagacagtggccaagaacaaggaccagggcacctatgaagattatgtggagggcctgcgggtgtttgacaaggagggcaatggaacagtgatgggcgctgagatcagacatgtgctggtgaccctgggggagaagatgacagaggaggaggtggagatgctggtggccggccacgaggacagcaatggctgcatcaactatgaggcctttgtgcgccacatcctgagcggctag

SEQ ID NO: 160938 - DNA, 456 bp, synthetic construct; identical to SEQ ID NO: 160937
  misc_feature 1..456: note = Description of Artificial Sequence: Synthetic coding sequence
  source 1..456: mol_type = other DNA

SEQ ID NO: 160939 - DNA, 1491 bp, synthetic construct
  misc_feature 1..1491: note = Description of Artificial Sequence: Synthetic coding sequence
  source 1..1491: mol_type = other DNA
atgagctccatggaggagatccaggtggagctgcagtgtgccgacctgtggaagcgcttccatgacattggaacagagatgatcatcaccaaggccggccgcaggatgtttcctgccatgagggtgaagatcaccggcctggacccccaccagcagtactacatcgccatggacatcgtgcctgtggacaacaagcgctaccgctacgtgtaccacagcagcaagtggatggtggccggaaatgctgacagccctgtgcccccccgggtgtacatccacccagacagcctggccagcggggacacctggatgaggcaggtggtgtcctttgacaagctgaagctgaccaacaatgagctggatgaccagggccacatcatcctgcacagcatgcacaagtaccagccccgggtgcacgtgatcaggaaggacttcagcagtgacctgagccccaccaagcctgtgcctgtgggagatggagtgaagaccttcaacttccctgagaccgtcttcaccaccgtgacagcctaccagaaccagcagatcacccggctgaagattgacaggaacccctttgccaagggcttccgggacagcggcaggaacagaacaggcctggaggccatcatggagacctacgccttctggaggcctcctgtgaggaccctgacctttgaggacttcaccaccatgcagaagcagcagggcggcagcacaggcaccagccccaccaccagcagcacaggcacccccagccccagcgccagcagccacctgctgagccccagctgcagcccccccaccttccacctggcccccaacaccttcaacgtgggctgccgggagagccagctgtgcaacctgaacctgagtgactacccaccctgtgcccggagcaacatggccgccctgcagagctacccaggcctgagtgacagcggctacaaccggctgcagagcggcaccaccagcgccacccagcccagcgagaccttcatgccccagaggacccccagcctcatcagcggcatccccaccccacccagcctgcccggcaacagcaagatggaggcctatggaggccagctgggcagcttccccaccagccagttccagtatgtgatgcaggccggaaatgctgccagcagcagcagcagcccccacatgtttggaggcagccacatgcagcagagcagctacaatgccttcagcctgcacaacccctacaacctgtatggctacaacttccccaccagcccccggctggccgccagccctgagaagctgagcgccagccagagcaccctgctgtgcagcagccccagcaatggagccttcggggagcggcagtacctgcccagcggcatggagcacagcatgcacatgatcagccccagccccaacaaccagcaggccaccaacacctgtgatggccggcagtatggagctgtgcccggcagcagcagccagatgtctgtgcacatggtgtag

SEQ ID NO: 160940 - DNA, 627 bp, synthetic construct
  misc_feature 1..627: note = Description of Artificial Sequence: Synthetic coding sequence
  source 1..627: mol_type = other DNA
atgccacccaagaaggatgtgcctgtgaagaagccagctggccccagcatcagcaagccagctgccaagccagctgctgctggggcccccccagccaagaccaaggccgagcctgctgtgccccaggccccccagaagacccaggagccccctgtggacctgagcaaggtggtgattgagttcaacaaggaccagctggaggagttcaaggaggcctttgagctgtttgacagagtgggagatggcaagatcctgtacagccagtgtggagatgtgatgagggccctgggccagaaccccaccaatgctgaggtgctgaaggtgctgggcaaccccaagagtgatgagctgaagagccggcgggtggactttgagaccttcctgcccatgctgcaggccgtggccaagaacagaggccagggcacctatgaggactacctggagggcttccgggtgtttgacaaggagggcaatggcaaggtgatgggcgctgagctgcggcacgtgctgaccaccctgggggagaagatgacagaggaggaggtggagaccgtgctggccggccacgaggacagcaatggctgcatcaactatgaggccttcctgaagcacatcctgtctgtgtag

SEQ ID NO: 160941 - DNA, 90 bp, synthetic construct
  misc_feature 1..90: note = Description of Artificial Sequence: Synthetic coding sequence
  source 1..90: mol_type = other DNA
atgccacccaagaaggatgtgcctgtgaagaagccagctggccccagcatcagcaagccagctgccaagccagctgctgctggggcctag

SEQ ID NO: 160942 - DNA, 627 bp, synthetic construct; identical to SEQ ID NO: 160940
  misc_feature 1..627: note = Description of Artificial Sequence: Synthetic coding sequence
  source 1..627: mol_type = other DNA

SEQ ID NO: 160943 - DNA, 3477 bp, synthetic construct
  misc_feature 1..3477: note = Description of Artificial Sequence: Synthetic coding sequence
  source 1..3477: mol_type = other DNA
atggctgctgtgcggggggcccccctgctgagctgcctgctggccctgctggccctgtgccctgggggccggccccagacagtgctgacagatgatgaaattgaggagttcctggagggcttcctgtctgagctggagcctgagcccagagaagatgatgtggaggcccctcctcctcctgagcccaccccccgggtgaggaaggcccaggccggcggcaagccaggcaagaggcctggaacagctgctgaggtgcccccagagaagaccaaggacaagggcaagaagggcaagaaggacaagggccccaaggtgcccaaggagagcctggagggcagcccccggccccccaagaagggcaaggagaagccacccaaggccaccaagaagcccaaggagaagccacccaaggccaccaagaagcccaaggagaagccacccaaggccaccaagaagcccaaggagaagccacccaaggccaccaagaagccacccagcggcaagaggcctcccatcctggcccccagcgagaccctggagtggcccctgcccccaccacccagccctggccctgaggagctgccccaggagggcggggcccccctgagcaacaactggcagaaccctggagaggagacccacgtggaggcccgggagcaccagcctgagcctgaggaggagacagagcagcccaccctggactacaatgaccagatcgagcgggaggactatgaagattttgagtacatccggcggcagaagcagccccggcccccacccagcagaagaagaagacctgagcgggtgtggccagagcccccagaggagaaggccccagccccagcccctgaggagagaattgagccccctgtgaagcccctgctgccccccctgcccccagactatggagatggctacgtgatccccaactatgatgacatggactactacttcggccccccaccaccccagaagccagatgctgagcggcagacagatgaggagaaggaggagctgaagaagcccaagaaggaggacagcagccccaaggaggagacagacaagtgggccgtggagaagggcaaggaccacaaggagcccaggaaaggagaggagctggaggaggagtggacccccacagagaaggtgaagtgcccccccatcggcatggagagccacagaattgaggacaaccagatccgggccagctccatgctgcggcacggcctgggcgcccagaggggccgcctgaacatgcagacaggagccacagaagatgactactatgatggagcctggtgtgccgaggatgatgcccggacccagtggattgaggtggacaccaggaggaccacccgcttcaccggggtcatcacccagggccgggacagcagcatccatgatgactttgtgaccaccttctttgtgggcttcagcaatgacagccagacctgggtgatgtacaccaacggctatgaggagatgaccttccacggcaatgtggacaaggacacccctgtgctgtctgagctgcctgagcctgtggtggcccgcttcatccgcatctaccccctgacctggaatggcagcctgtgcatgaggctggaggtgctgggctgcagcgtggcccctgtgtacagctactatgcccagaatgaggtggtggccacagatgacctggacttccgccaccacagctacaaggacatgaggcagctgatgaaggtggtgaatgaggagtgccccaccatcaccaggacctacagcctgggcaagagcagccggggcctgaagatctatgccatggagatcagtgacaaccctggagaacatgagctgggggagcctgagttccgctacacagctggcatccatggaaatgaggtgctgggccgggagctgctgctgctgctgatgcagtacctgtgccgggagtacagagatggcaacccccgggtgcgcagcctggtgcaggacacccgcatccacctggtgcccagcctgaacccagatggctatgaggtggccgcccagatgggcagcgagtttggaaactgggccctgggcctgtggacagaggagggctttgacatctttgaggacttcccagacctgaacagcgtgctgtggggcgctgaggagaggaagtgggtgccctacagagtgcccaacaacaacctgcccatccctgagcgctacctgagcccagatgccaccgtgtccacagaggtgcgggccatcatcgcctggatggagaagaacccctttgtgctgggcgccaacctgaatggaggagagcggctggtgtcctacccctatgacatggcccggacccccacccaggagcagctgctggccgccgccatggctgctgcccggggagaagatgaagatgaggtgtctgaggcccaggagaccccagaccacgccatcttccgctggctggccatcagctttgccagcgcccacctgaccctgacagagccctaccggggcggctgccaggcccaggactacacaggaggcatgggcatcgtgaatggagccaagtggaaccccaggacaggcaccatcaatgacttctcctacctgcacaccaactgcctggagctgtccttctacctgggctgtgacaagttcccccatgagagcgagctgccccgggagtgggagaacaacaaggaggccctgctgaccttcatggagcaggtgcaccggggcatcaagggcgtggtgacagatgagcagggcatccccatcgccaatgccaccatctctgtgtctggcatcaaccacggcgtgaagacagccagcggcggggactactggaggatcctgaaccctggagagtacagagtgacagcccatgctgagggctacaccccatctgccaagacctgcaatgtggactatgacattggagccacccagtgcaacttcatcctggcccggagcaactggaagaggatccgggagatcatggccatgaatggaaaccggcccatcccccacatcgaccccagccggcccatgaccccccagcagaggcggctgcagcagaggcggctgcagcaccggctgcggctgcgggcccagatgaggctgcggcggctgaatgccaccaccaccctgggcccccacacagtgccccccaccctgcccccagccccagccaccaccctgagcaccaccatcgagccctggggcctcatcccccccaccacagctggctgggaggagagcgagacagagacctacacagaggtggtgacagaatttggaacagaggtggagcctgagtttggcaccaaggtggagcctgagtttgagacccagctggagcctgagtttgagacccagctggagcctgagtttgaggaggaggaggaggaggagaaggaggaggagatcgccaccggccaggccttccccttcaccaccgtggagacctacacagtgaactttggagacttctag

SEQ ID NO: 160944 - DNA, 447 bp, synthetic construct
  misc_feature 1..447: note = Description of Artificial Sequence: Synthetic coding sequence
  source 1..447: mol_type = other DNA
atgtttgagcaggcccagatccaggagttcaaggaggccttcagctgcatcgaccagaacagagatggcatcatctgcaaggctgacctgcgggagacctacagccagctgggcaaggtgtctgtgcctgaggaggagctggatgccatgctgcaggagggcaagggccccatcaacttcaccgtcttcctgaccctgtttggagagaagctgaatggaacagatcctgaggaggccatcctgagcgccttcaggatgtttgaccccagcggcaagggcgtggtgaacaaggatgagttcaagcagctgctgctgacccaggccgacaagttctccccagctgaggtggagcagatgtttgccctgacccccatggacctggccggcaacatcgactacaagagcctgtgctacatcatcacccatggagatgagaaggaggagtag

SEQ ID NO: 160945 - DNA, 1128 bp, synthetic construct
  misc_feature 1..1128: note = Description of Artificial Sequence: Synthetic coding sequence
  source 1..1128: mol_type = other DNA
atgcagaagctgcagctgtgtgtgtacatctacctgttcatgctgattgtggccggccctgtggacctgaatgaaaattctgagcagaaggaaaatgtggagaaggagggcctgtgcaatgcctgcacctggaggcagaacaccaagagcagcagaattgaggccatcaagatccagatcctgagcaagctgcggctggagacagcccccaacatcagcaaggatgtgatccggcagctgctgcccaaggccccacccctgcgggagctgattgaccagtatgatgtgcagagagatgacagcagtgatggcagcctggaggatgatgactaccacgccaccacagagaccatcatcaccatgcccacagaaagtgacttcctgatgcaggtggatggcaagcccaagtgctgcttcttcaagttcagcagcaagatccagtacaacaaggtggtgaaggcccagctgtggatctacctgcggcctgtggagacccccaccaccgtgtttgtgcagatcctgcggctcatcaagcccatgaaggatggcacccgctacacaggcatccgcagcctgaagctggacatgaaccctggcaccggcatctggcagagcattgatgtgaagacagtgctgcagaactggctgaagcagcctgagagcaacctgggcatcgagatcaaggccctggatgaaaatggacatgacctggccgtgaccttccctggccctggagaagatggcctgaaccccttcctggaggtgaaggtgacagacacccccaagaggagcagaagagactttggcctggactgtgatgagcacagcacagagagccgctgctgccgctaccccctgactgtggactttgaggccttcggctgggactggatcatcgcccccaagcgctacaaggccaactactgcagcggggagtgtgaatttgtgttcctgcagaagtacccccacacccacctggtgcaccaggccaacccccggggcagcgctggcccctgctgcacccccaccaagatgagccccatcaacatgctgtacttcaacgggaaggagcagatcatctacggcaagatcccagccatggtggtggacagatgtggctgcagctag

SEQ ID NO: 160946 - DNA, 1497 bp, synthetic construct
  misc_feature 1..1497: note = Description of Artificial Sequence: Synthetic coding sequence
  source 1..1497: mol_type = other DNA
atgttcaactatgaaagacccaagcacttcatccagagccagaacccctgtggcagccggctgcagcccccaggccctgagaccagcagcttcagcagccagaccaagcagagcagcatcatcatccagccccggcagtgcacagagcagcgcttcagcgccagcagcaccctgagcagccacatcaccatgagcagcagcgccttccctgccagccccaagcagcacgccggcagcaaccctggccagagggtgaccaccacctacaaccagagccctgccagcttcctgagcagcatcctgcccagccagcctgactacaacagcagcaagatccccagcgccatggacagcaactaccagcagagcagcgctggccagcccatcaatgccaagcccagccagacagccaatgccaagcccatccccaggaccccagaccacgagatccagggcagcaaggaggccctgatccaggacctggagaggaagctgaagtgcaaggacaccctgctgcacaacggcaaccagaggctgacctatgaggagaagatggcccggcggctgctgggcccccagaatgctgctgctgtgttccaggcccaggatgattctggggcccaggacagccagcagcacaacagcgagcacgcccggctgcaggtgcccaccagccaggtgcgcagccgcagcaccagcagaggagatgtgaatgaccaggatgccatccaggagaagttctacccaccccgcttcatccaggtgcctgagaacatgagcattgatgagggccgcttctgcaggatggacttcaaggtgtctggcctgcctgccccagatgtgtcctggtacctgaatggccgcacagtgcagagtgatgacctgcacaagatgattgtgtctgagaagggcctgcacagcctcatctttgaggtggtgcgggccagtgatgctggggcctatgcctgtgtggccaagaacagagctggggaggccaccttcaccgtgcagctggatgtgctggccaaggagcacaagagggcccccatgttcatctacaagccccagagcaagaaggtgctggagggggacagcgtgaagctggagtgccagatcagcgccatccccccacccaagctgttctggaagaggaacaatgagatggtgcagttcaacacagaccgcatcagcctgtaccaggacaacacaggccgggtgaccctgctgatcaaggatgtgaacaagaaggatgctggctggtacacagtgtctgctgtgaatgaagctggggtgaccacctgcaacacccggctggatgtgacagcccggcccaaccagaccctgcctgcccccaagcagctgcgggtgcggcccaccttcagcaagtacctggccctgaatggcaagggcctgaatgtgaagcaggccttcaaccctgagggggagttccagaggctggccgcccagagcggcctgtatgaaagtgaggagctgtag

SEQ ID NO: 160947 - DNA, 945 bp, synthetic construct
  misc_feature 1..945: note = Description of Artificial Sequence: Synthetic coding sequence
  source 1..945: mol_type = other DNA
atggcccggcggctgctgggcccccagaatgctgctgctgtgttccaggcccaggatgattctggggcccaggacagccagcagcacaacagcgagcacgcccggctgcaggtgcccaccagccaggtgcgcagccgcagcaccagcagaggagatgtgaatgaccaggatgccatccaggagaagttctacccaccccgcttcatccaggtgcctgagaacatgagcattgatgagggccgcttctgcaggatggacttcaaggtgtctggcctgcctgccccagatgtgtcctggtacctgaatggccgcacagtgcagagtgatgacctgcacaagatgattgtgtctgagaagggcctgcacagcctcatctttgaggtggtgcgggccagtgatgctggggcctatgcctgtgtggccaagaacagagctggggaggccaccttcaccgtgcagctggatgtgctggccaaggagcacaagagggcccccatgttcatctacaagccccagagcaagaaggtgctggagggggacagcgtgaagctggagtgccagatcagcgccatccccccacccaagctgttctggaagaggaacaatgagatggtgcagttcaacacagaccgcatcagcctgtaccaggacaacacaggccgggtgaccctgctgatcaaggatgtgaacaagaaggatgctggctggtacacagtgtctgctgtgaatgaagctggggtgaccacctgcaacacccggctggatgtgacagcccggcccaaccagaccctgcctgcccccaagcagctgcgggtgcggcccaccttcagcaagtacctggccctgaatggcaagggcctgaatgtgaagcaggccttcaaccctgagggggagttccagaggctggccgcccagagcggcctgtatgaaagtgaggagctgtag

SEQ ID NO: 160948 - DNA, 357 bp, synthetic construct
  misc_feature 1..357: note = Description of Artificial Sequence: Synthetic coding sequence
  source 1..357: mol_type = other DNA
atgtgtgacaaggagttcatgtgggccctgaagaatggagacctggatgaggtgaaggactatgtggccaagggggaggatgtgaacagaaccctggagggcggcaggaagcccctgcactacgccgctgactgtggccagctggagatcctggagttcctgctgctgaagggagctgacatcaatgccccagacaagcaccacatcacccccctgctgtctgctgtgtatgagggccacgtgtcctgtgtgaagctgctgctgagcaaaggagctgacaagacagtgaagggcccagatggcctgacagcctttgaggccacagacaaccaggccatcaaggccctgctgcagtag

SEQ ID NO: 160949 - DNA, 1812 bp, synthetic construct
  misc_feature 1..1812: note = Description of Artificial Sequence: Synthetic coding sequence
  source 1..1812: mol_type = other DNA
atggccagcgccagcaccagcaagtacaacagccacagcctggagaatgaaagcatcaagaggaccagcagagatggagtgaacagagacctgacagaggccgtgccccggctgcctggagagaccctcatcacagacaaggaggtgatctacatctgccccttcaacggccccatcaagggccgggtgtacatcaccaactaccgcctgtacctgcggagcctggagacagacagcagcctcatcctggatgtgcccctgggcgtcatcagcagaattgagaagatgggcggggccaccagcagaggagagaacagctatggcctggacatcacctgcaaggacatgaggaacctgcgctttgccctgaagcaggagggccacagccggcgggacatgtttgagatcctgaccaggtatgccttccccctggcccacagcctgcccctgtttgccttcctgaatgaggagaagttcaacgtggatggctggacagtgtacaaccctgtggaggagtaccgccggcagggcctgcccaaccaccactggaggatcaccttcatcaacaagtgctatgagctgtgtgacacctacccagccctgctggtggtgccctaccgggccagtgatgatgacctgcggcgggtggccaccttccgcagcaggaaccgcatccctgtgctgtcctggatccaccctgagaacaagacagtgattgtgcgctgcagccagcccctggtgggcatgtctgggaagaggaacaaggatgatgagaagtacctggatgtgatccgggagaccaacaagcagatcagcaagctgaccatctatgatgcccggcccagcgtgaatgctgtggccaacaaggccactggaggcggctatgaaagtgatgatgcctaccacaatgctgagctgttcttcctggacatccacaacatccacgtgatgagggagagcctgaagaaggtgaaggacatcgtgtacccaaatgtggaggagagccactggctgagcagcctggagagcacccactggctggagcacatcaagctggtgctgactggagccatccaggtggccgacaaggtgagcagcggcaagagctctgtgctggtgcactgcagtgatggctgggacagaacagcccagctgaccagcctggccatgctgatgctggacagcttctaccgcagcattgagggctttgagatcctggtgcagaaggagtggatcagctttggccacaagtttgccagccgcatcggccacggggacaagaaccacacagatgctgacaggagccccatcttcctgcagttcatcgactgtgtgtggcagatgagcaagcagttccccacagcctttgagttcaatgagcagttcctgatcatcatcctggaccacctgtacagctgccgcttcggcaccttcctgttcaactgtgagagcgcccgggagcggcagaaggtgacagagaggacagtgtccctgtggagcctcatcaacagcaacaaggagaagttcaagaaccccttctacaccaaggagatcaacagagtgctgtaccctgtggcctccatgaggcacctggagctgtgggtgaactactacatccgctggaacccccgcatcaagcagcagcagcccaaccctgtggagcagcgctacatggagctgctggccctgagagatgagtacatcaagaggctggaggagctgcagctggccaacagcgccaagctgagtgacccccccaccagccccagcagccccagccagatgatgccccacgtgcagacccacttctag

SEQ ID NO: 160950 - DNA, 1701 bp, synthetic construct
  misc_feature 1..1701: note = Description of Artificial Sequence: Synthetic coding sequence
  source 1..1701: mol_type = other DNA
atggccagcgccagcaccagcaagtacaacagccacagcctggagaatgaaagcatcaagaggaccagcagagatggagtgaacagagacctgacagaggccgtgccccggctgcctggagagaccctcatcacagacaaggaggtgatctacatctgccccttcaacggccccatcaagggccgggtgtacatcaccaactaccgcctgtacctgcggagcctggagacagacatgaggaacctgcgctttgccctgaagcaggagggccacagcagaagagacatgtttgagatcctgaccaggtatgccttccccctggcccacagcctgcccctgtttgccttcctgaatgaggagaagttcaacgtggatggctggacagtgtacaaccctgtggaggagtaccgccggcagggcctgcccaaccaccactggaggatcaccttcatcaacaagtgctatgagctgtgtgacacctacccagccctgctggtggtgccctaccgggccagtgatgatgacctgcggcgggtggccaccttccgcagcaggaaccgcatccctgtgctgtcctggatccaccctgagaacaagacagtcatcgtgcgctgcagccagcccctggtgggcatgtctgggaagaggaacaaggatgatgagaagtacctggatgtgatccgggagaccaacaagcagatcagcaagctgaccatctatgatgcccggcccagcgtgaatgctgtggccaacaaggccaccggcggcggctatgaaagtgatgatgcctaccacaatgctgagctgttcttcctggacatccacaacatccacgtgatgagggagagcctgaagaaggtgaaggacatcgtgtaccccaacgtggaggagagccactggctgagcagcctggagagcacccactggctggagcacatcaagctggtgctgaccggggccatccaggtggccgacaaggtgtcctctgggaagagctctgtgctggtgcactgcagtgatggctgggacagaacagcccagctgaccagcctggccatgctgatgctggacagcttctaccgcagcattgagggctttgagatcctggtgcagaaggagtggatcagctttggccacaagtttgccagcagaattggacatggagacaagaaccacacagatgctgacaggagccccatcttcctgcagttcatcgactgtgtgtggcagatgagcaagcagttccccacagcctttgagttcaatgagcagttcctgatcatcatcctggaccacctgtacagctgccgcttcggcaccttcctgttcaactgtgagagcgcccgggagcggcagaaggtgacagagaggacagtgtccctgtggagcctcatcaacagcaacaaggagaagttcaagaaccccttctacaccaaggagatcaacagagtgctgtaccctgtggcctccatgaggcacctggagctgtgggtgaactactacatccgctggaacccccgcatcaagcagcagcagcccaaccctgtggagcagcgctacatggagctgctggccctgagagatgagtacatcaagaggctggaggagctgcagctggccaacagcgccaagctgagtgacccccccaccagccccagcagccccagccagatgatgcctcatgtgcagacccacttctag

SEQ ID NO: 160951 - DNA, 1251 bp, synthetic construct
  misc_feature 1..1251: note = Description of Artificial Sequence: Synthetic coding sequence
  source 1..1251: mol_type = other DNA
atgggcggggccaccagcagaggagaaaattcctatggcctggacatcacctgcaaggacatgaggaacctgcgctttgccctgaagcaggagggccacagcagaagagacatgtttgagatcctgaccaggtatgccttccccctggcccacagcctgcccctgtttgccttcctgaatgaggagaagttcaacgtggatggctggacagtgtacaaccctgtggaggagtaccgccggcagggcctgcccaaccaccactggaggatcaccttcatcaacaagtgctatgagctgtgtgacacctacccagccctgctggtggtgccctaccgggccagtgatgatgacctgcggcgggtggccaccttccgcagcaggaaccgcatccctgtgctgtcctggatccaccctgagaacaagacagtcatcgtgcgctgcagccagcccctggtgggcatgtctgggaagaggaacaaggatgatgagaagtacctggatgtgatccgggagaccaacaagcagatcagcaagctgaccatctatgatgcccggcccagcgtgaatgctgtggccaacaaggccaccggcggcggctatgaaagtgatgatgcctaccacaatgctgagctgttcttcctggacatccacaacatccacgtgatgagggagagcctgaagaaggtgaaggacatcgtgtaccccaacgtggaggagagccactggctgagcagcctggagagcacccactggctggagcacatcaagctggtgctgaccggggccatccaggtggccgacaaggtgtcctctgggaagagctctgtgctggtgcactgcagtgatggctgggacagaacagcccagctgaccagcctggccatgctgatgctggacagcttctaccgcagcattgagggctttgagatcctggtgcagaaggagtggatcagctttggccacaagtttgccagcagaattggacatggagacaagaaccacacagatgctgacaggagccccatcttcctgcagttcatcgactgtgtgtggcagatgagcaagcagttccccacagcctttgagttcaatgagcagttcctgatcatcatcctggaccacctgtacagctgccgcttcggcaccttcctgttcaactgtgagagcgcccgggagcggcaggccctgcacttcctgagcctgagcctgtgccggcggctgcagaagggcctcttcctgtatggccactag

SEQ ID NO: 160952 - DNA, 1467 bp, synthetic construct
  misc_feature 1..1467: note = Description of Artificial Sequence: Synthetic coding sequence
  source 1..1467: mol_type = other DNA
atgaggaacctgcgctttgccctgaagcaggagggccacagcagaagagacatgtttgagatcctgaccaggtatgccttccccctggcccacagcctgcccctgtttgccttcctgaatgaggagaagttcaacgtggatggctggacagtgtacaaccctgtggaggagtaccgccggcagggcctgcccaaccaccactggaggatcaccttcatcaacaagtgctatgagctgtgtgacacctacccagccctgctggtggtgccctaccgggccagtgatgatgacctgcggcgggtggccaccttccgcagcaggaaccgcatccctgtgctgtcctggatccaccctgagaacaagacagtcatcgtgcgctgcagccagcccctggtgggcatgtctgggaagaggaacaaggatgatgagaagtacctggatgtgatccgggagaccaacaagcagatcagcaagctgaccatctatgatgcccggcccagcgtgaatgctgtggccaacaaggccaccggcggcggctatgaaagtgatgatgcctaccacaatgctgagctgttcttcctggacatccacaacatccacgtgatgagggagagcctgaagaaggtgaaggacatcgtgtaccccaacgtggaggagagccactggctgagcagcctggagagcacccactggctggagcacatcaagctggtgctgaccggggccatccaggtggccgacaaggtgtcctctgggaagagctctgtgctggtgcactgcagtgatggctgggacagaacagcccagctgaccagcctggccatgctgatgctggacagcttctaccgcagcattgagggctttgagatcctggtgcagaaggagtggatcagctttggccacaagtttgccagcagaattggacatggagacaagaaccacacagatgctgacaggagccccatcttcctgcagttcatcgactgtgtgtggcagatgagcaagcagttccccacagcctttgagttcaatgagcagttcctgatcatcatcctggaccacctgtacagctgccgcttcggcaccttcctgttcaactgtgagagcgcccgggagcggcagaaggtgacagagaggacagtgtccctgtggagcctcatcaacagcaacaaggagaagttcaagaaccccttctacaccaaggagatcaacagagtgctgtaccctgtggcctccatgaggcacctggagctgtgggtgaactactacatccgctggaacccccgcatcaagcagcagcagcccaaccctgtggagcagcgctacatggagctgctggccctgagagatgagtacatcaagaggctggaggagctgcagctggccaacagcgccaagctgagtgacccccccaccagccccagcagccccagccagatgatgcctcatgtgcagacccacttctag

SEQ ID NO: 160953 - DNA, 1998 bp, synthetic construct
  misc_feature 1..1998: note = Description of Artificial Sequence: Synthetic coding sequence
  source 1..1998: mol_type = other DNA
atggacaggcctgctgctgctgctgctgctggctgtgagggcggcggcggccccaaccctggccctgctgggggccggcggccccccagggctgctgggggcgccacagctggcagccggcagcccagcgtggagaccctggacagccccaccggcagccacgtggagtggtgcaagcagctgattgctgccaccatcagcagccagatcagcggctctgtgaccagtgaaaatgtgtcccgggactacaaggccctgagagatggcaacaagctggcccagatggaggaggcccccctcttccctggagagagcatcaaggccatcgtgaaggatgtgatgtacatctgccccttcatgggcgctgtgtctggcaccctgactgtgacagacttcaagctgtacttcaagaatgtggagcgggacccccacttcatcctggatgtgcccctgggcgtcatcagccgggtggagaagatcggggcccagagccatggagacaacagctgtggcatcgagatcgtgtgcaaggacatgaggaacctgcggctggcctacaagcaggaggagcagagcaagctgggcatctttgagaacctgaacaagcacgccttccccctgagcaatggccaggccctgtttgccttctcctacaaggagaagttccccatcaatggctggaaggtgtatgaccctgtgtctgagtacaagaggcagggcctgcccaatgaatcctggaagatcagcaagatcaacagcaactatgagttctgtgacacctacccagccatcatcgtggtgcccacctctgtgaaggatgatgacctgagcaaggtggccgccttccgggccaagggccgggtgcctgtgctgtcctggatccaccctgagagccaggccaccatcacccgctgcagccagcccctggtgggccccaatgacaagcgctgcaaggaggatgagaagtacctgcagaccatcatggatgccaatgcccagagccacaagctgatcatctttgatgcccggcagaacagcgtggccgacaccaacaagaccaagggcggcggctatgagagcgagagcgcctacccaaatgctgagctggtgttcctggagatccacaacatccacgtgatgagggagagcctgaggaagctgaaggagatcgtgtaccccagcattgatgaggcccgctggctgagcaatgtggatggcacccactggctggagtacatccgcatgctgctggccggggctgtgagaattgctgacaagattgaaagtggcaagacctctgtggtggtgcactgcagtgatggctgggacagaacagcccagctgaccagcctggccatgctgatgctggacagctactaccgcaccatcaagggctttgagaccctggtggagaaggagtggatcagctttggccacagatttgccctgcgggtgggccatggaaatgacaaccacgcagatgctgacaggagccccatcttcctgcagtttgtggactgtgtgtggcagatgacccggcagttccccagcgcctttgagttcaatgagctgttcctgatcaccatcctggaccacctgtacagctgcctgtttggcaccttcctgtgcaactgtgagcagcagcgcttcaaggaggatgtgtacaccaagaccatcagcctgtggagctacatcaacagccagctggatgagttcagcaaccccttctttgtgaactatgaaaatcatgtgctgtaccctgtggccagcctgagccacctggagctgtgggtgaactactacgtgcgctggaaccccaggatgaggccccagatgcccatccaccagaacctgaaggagctgctggccgtgcgggcagagctgcagaagagggtggagggcctgcagcgggaggtggccaccagggctgtgagcagcagcagcgagcggggcagcagccccagccacagcgccacctctgtgcacacctctgtgtag

SEQ ID NO: 160954 - DNA, 264 bp, synthetic construct
  misc_feature 1..264: note = Description of Artificial Sequence: Synthetic coding sequence
  source 1..264: mol_type = other DNA
atggaggaggcccccctcttccctggagagagcatcaaggccatcgtgaaggatgtgatgtacatctgccccttcatgggcgctgtgtctggcaccctgactgtgacagacttcaagctgtacttcaagaatgtggagcgggacccccacttcatcctggatgtgcccctgggcgtcatcagccgggtggagaagatcggggcccagagccatggagacaacagctgtggcatcgagatcgtgtgcaaggacatgaggaactag

SEQ ID NO: 160955 - DNA, 264 bp, synthetic construct; identical to SEQ ID NO: 160954
  misc_feature 1..264: note = Description of Artificial Sequence: Synthetic coding sequence
  source 1..264: mol_type = other DNA

SEQ ID NO: 160956 - DNA, 273 bp, synthetic construct
  misc_feature 1..273: note = Description of Artificial Sequence: Synthetic coding sequence
  source 1..273: mol_type = other DNA
atggaggaggcccccctcttccctggagagagcatcaaggccatcgtgaaggatgtgatgtacatctgccccttcatgggcgctgtgtctggcaccctgactgtgacagacttcaagctgtacttcaagaatgtggagcgggacccccacttcatcctggatgtgcccctgggcgtcatcagccgggtggagaagatcggggcccagagccatggagacaacagctgtggcatcgagatcgtgtgcaaggacatgaggaacctgcggctgtag

SEQ ID NO: 160957 - DNA, 2022 bp, synthetic construct
  misc_feature 1..2022: note = Description of Artificial Sequence: Synthetic coding sequence
  source 1..2022: mol_type = other DNA
atggacaggcctgctgctgctgctgctgctggctgtgagggcggcggcggccccaaccctggccctgctgggggccggcggccccccagggctgctgggggcgccacagctggcagccggcagcccagcgtggagaccctggacagccccaccggcagccacgtggagtggtgcaagcagctgattgctgccaccatcagcagccagatcagcggctctgtgaccagtgaaaatgtgtcccgggactacaaggtgttcagaagaccagacctgcgggccctgagagatggcaacaagctggcccagatggaggaggcccccctcttccctggagagagcatcaaggccatcgtgaaggatgtgatgtacatctgccccttcatgggcgctgtgtctggcaccctgactgtgacagacttcaagctgtacttcaagaatgtggagcgggacccccacttcatcctggatgtgcccctgggcgtcatcagccgggtggagaagatcggggcccagagccatggagacaacagctgtggcatcgagatcgtgtgcaaggacatgaggaacctgcggctggcctacaagcaggaggagcagagcaagctgggcatctttgagaacctgaacaagcacgccttccccctgagcaatggccaggccctgtttgccttctcctacaaggagaagttccccatcaatggctggaaggtgtatgaccctgtgtctgagtacaagaggcagggcctgcccaatgaatcctggaagatcagcaagatcaacagcaactatgagttctgtgacacctacccagccatcatcgtggtgcccacctctgtgaaggatgatgacctgagcaaggtggccgccttccgggccaagggccgggtgcctgtgctgtcctggatccaccctgagagccaggccaccatcacccgctgcagccagcccctggtgggccccaatgacaagcgctgcaaggaggatgagaagtacctgcagaccatcatggatgccaatgcccagagccacaagctgatcatctttgatgcccggcagaacagcgtggccgacaccaacaagaccaagggcggcggctatgagagcgagagcgcctacccaaatgctgagctggtgttcctggagatccacaacatccacgtgatgagggagagcctgaggaagctgaaggagatcgtgtaccccagcattgatgaggcccgctggctgagcaatgtggatggcacccactggctggagtacatccgcatgctgctggccggggctgtgagaattgctgacaagattgaaagtggcaagacctctgtggtggtgcactgcagtgatggctgggacagaacagcccagctgaccagcctggccatgctgatgctggacagctactaccgcaccatcaagggctttgagaccctggtggagaaggagtggatcagctttggccacagatttgccctgcgggtgggccatggaaatgacaaccacgcagatgctgacaggagccccatcttcctgcagtttgtggactgtgtgtggcagatgacccggcagttccccagcgcctttgagttcaatgagctgttcctgatcaccatcctggaccacctgtacagctgcctgtttggcaccttcctgtgcaactgtgagcagcagcgcttcaaggaggatgtgtacaccaagaccatcagcctgtggagctacatcaacagccagctggatgagttcagcaaccccttctttgtgaactatgaaaatcatgtgctgtaccctgtggccagcctgagccacctggagctgtgggtgaactactacgtgcgctggaaccccaggatgaggccccagatgcccatccaccagaacctgaaggagctgctggccgtgcgggcagagctgcagaagagggtggagggcctgcagcgggaggtggccaccagggctgtgagcagcagcagcgagcggggcagcagccccagccacagcgccacctctgtgcacacctctgtgtag

SEQ ID NO: 160958 - DNA, 1707 bp, synthetic construct
  misc_feature 1..1707: note = Description of Artificial Sequence: Synthetic coding sequence
  source 1..1707: mol_type = other DNA
atggacaggcctgctgctgctgctgctgctggctgtgagggcggcggcggccccaaccctggccctgctgggggccggcggccccccagggctgctgggggcgccacagctggcagccggcagcccagcgtggagaccctggacagccccaccggcagccacgtggagtggtgcaagcagctgattgctgccaccatcagcagccagatcagcggctctgtgaccagtgaaaatgtgtcccgggactacaaggccctgagagatggcaacaagctggcccagatggaggaggcccccctcttccctggagagagcatcaaggccatcgtgaaggatgtgatgtacatctgccccttcatgggcgctgtgtctggcaccctgactgtgacagacttcaagctgtacttcaagaatgtggagcgggacccccacttcatcctggatgtgcccctgggcgtcatcagccgggtggagaagatcggggcccagagccatggagacaacagctgtggcatcgagatcgtgtgcaaggacatgaggaacctgcggctggcctacaagcaggaggagcagagcaagctgggcatctttgagaacctgaacaagcacgccttccccctgagcaatggccaggccctgtttgccttctcctacaaggagaagttccccatcaatggctggaaggtgtatgaccctgtgtctgagtacaagaggcagggcctgcccaatgaatcctggaagatcagcaagatcaacagcaactatgagttctgtgacacctacccagccatcatcgtggtgcccacctctgtgaaggatgatgacctgagcaaggtggccgccttccgggccaagggccgggtgcctgtgctgtcctggatccaccctgagagccaggccaccatcacccgctgcagccagcccctggtgggccccaatgacaagcgctgcaaggaggatgagaagtacctgcagaccatcatggatgccaatgcccagagccacaagctgatcatctttgatgcccggcagaacagcgtggccgacaccaacaagaccaagggcggcggctatgagagcgagagcgcctacccaaatgctgagctggtgttcctggagatccacaacatccacgtgatgagggagagcctgaggaagctgaaggagatcgtgtaccccagcattgatgaggcccgctggctgagcaatgtggatggcacccactggctggagtacatccgcatgctgctggccggggctgtgagaattgctgacaagattgaaagtggcaagacctctgtggtggtgcactgcagtgatggctgggacagaacagcccagctgaccagcctggccatgctgatgctggacagctactaccgcaccatcaagggctttgagaccctggtggagaaggagtggatcagctttggccacagatttgccctgcgggtgggccatggaaatgacaaccacgcagatgctgacaggagccccatcttcctgcagtttgtggactgtgtgtggcagatgacccggcagttccccagcgcctttgagttcaatgagctgttcctgatcaccatcctggaccacctgtacagctgcctgtttggcaccttcctgtgcaactgtgagcagcagcgcttcaaggaggcctggggcgccggcacccagagggcccggggcagcctgcggagcaggtag

SEQ ID NO: 160959 - DNA, 444 bp, synthetic construct
  misc_feature 1..444: note = Description of Artificial Sequence: Synthetic coding sequence
  source 1..444: mol_type = other DNA
atggaggaggcccccctcttccctggagagagcatcaaggccatcgtgaaggatgtgatgtacatctgccccttcatgggcgctgtgtctggcaccctgactgtgacagacttcaagctgtacttcaagaatgtggagcgggacccccacttcatcctggatgtgcccctgggcgtcatcagccgggtggagaagatcggggcccagagccatggagacaacagctgtggcatcgagatcgtgtgcaaggacatgaggaacctgcggctggcctacaagcaggaggagcagagcaagctgggcatctttgagaacctgaacaagcacgccttccccctgagcaatggccaggccctgtttgccttctcctacaaggagaagttccccatcaatggctggaaggtgtatgaccctgtgtctgagtacaagaggcagggcctgtag

SEQ ID NO: 160960 - DNA, 1182 bp, synthetic construct
  misc_feature 1..1182: note = Description of Artificial Sequence: Synthetic coding sequence
  source 1..1182: mol_type = other DNA
atgtacatctgccccttcatgggcgctgtgtctggcaccctgactgtgacagacttcaagctgtacttcaagaatgtggagcgggacccccacttcatcctggatgtgcccctgggcgtcatcagccgggtggagaagattggagcccagagccacggggacaacagctgtggcattgaaattgtgtgcaaggacatgaggaacctgcggctggcctacaagcaggaggagcagagcaagctgggcatctttgagaacctgaacaagcacgccttccccctgagcaatggccaggccctgtttgccttctcctacaaggagaagttccccatcaatggctggaaggtgtatgaccctgtgtctgagtacaagaggcagggcctgcccaatgaatcctggaagatcagcaagatcaacagcaactatgagttctgtgacacctacccagccatcatcgtggtgcccacctctgtgaaggatgatgacctgagcaaggtggccgccttccgggccaagggccgggtgcctgtgctgtcctggatccaccctgagagccaggccaccatcacccgctgcagccagcccctggtgggccccaatgacaagcgctgcaaggaggatgagaagtacctgcagaccatcatggatgccaatgcccagagccacaagctgatcatctttgatgcccggcagaacagcgtggccgacaccaacaagatgctgctggccggggctgtgagaattgctgacaagattgagagcggcaagacctctgtggtggtgcactgcagtgatggctgggacagaacagcccagctgaccagcctggccatgctgatgctggacagctactaccgcaccatcaagggctttgagaccctggtggagaaggagtggatcagctttggccacagatttgccctgcgggtgggccacggcaatgacaaccacgcagatgctgacaggagccccatcttcctgcagtttgtggactgtgtgtggcagatgacccggcagttccccagcgcctttgagttcaatgaactcttcctgatcaccatcctggaccacctgtacagctgcctgtttggcaccttcctgtgcaactgtgagcagcagcgcttcaaggaggcctggggcgccggcacccagagggcccggggcagcctgcggagcaggtag

SEQ ID NO: 160961 - DNA, 1716 bp, synthetic construct
  misc_feature 1..1716: note = Description of Artificial Sequence: Synthetic coding sequence
  source 1..1716: mol_type = other DNA
atggaggaggcccccctcttccctggagagagcatcaaggccatcgtgaaggatgtgatgtacatctgccccttcatgggcgctgtgtctggcaccctgactgtgacagacttcaagctgtacttcaagaatgtggagcgggacccccacttcatcctggatgtgcccctgggcgtcatcagccgggtggagaagatcggggcccagagccatggagacaacagctgtggcatcgagatcgtgtgcaaggacatgaggaacctgcggctggcctacaagcaggaggagcagagcaagctgggcatctttgagaacctgaacaagcacgccttccccctgagcaatggccaggccctgtttgccttctcctacaaggagaagttccccatcaatggctggaaggtgtatgaccctgtgtctgagtacaagaggcagggcctgcccaatgaatcctggaagatcagcaagatcaacagcaactatgagttctgtgacacctacccagccatcatcgtggtgcccacctctgtgaaggatgatgacctgagcaaggtggccgccttccgggccaagggccgggtgcctgtgctgtcctggatccaccctgagagccaggccaccatcacccgctgcagccagcccctggtgggccccaatgacaagcgctgcaaggaggatgagaagtacctgcagaccatcatggatgccaatgcccagagccacaagctgatcatctttgatgcccggcagaacagcgtggccgacaccaacaagaccaagggcggcggctatgagagcgagagcgcctacccaaatgctgagctggtgttcctggagatccacaacatccacgtgatgagggagagcctgaggaagctgaaggagatcgtgtaccccagcattgatgaggcccgctggctgagcaatgtggatggcacccactggctggagtacatccgcatgctgctggccggggctgtgagaattgctgacaagattgaaagtggcaagacctctgtggtggtgcactgcagtgatggctgggacagaacagcccagctgaccagcctggccatgctgatgctggacagctactaccgcaccatcaagggctttgagaccctggtggagaaggagtggatcagctttggccacagatttgccctgcgggtgggccatggaaatgacaaccacgcagatgctgacaggagccccatcttcctgcagtttgtggactgtgtgtggcagatgacccggcagttccccagcgcctttgagttcaatgagctgttcctgatcaccatcctggaccacctgtacagctgcctgtttggcaccttcctgtgcaactgtgagcagcagcgcttcaaggaggatgtgtacaccaagaccatcagcctgtggagctacatcaacagccagctggatgagttcagcaaccccttctttgtgaactatgaaaatcatgtgctgtaccctgtggccagcctgagccacctggagctgtgggtgaactactacgtgcgctggaaccccaggatgaggccccagatgcccatccaccagaacctgaaggagctgctggccgtgcgggcagagctgcagaagagggtggagggcctgcagcgggaggtggccaccagggctgtgagcagcagcagcgagcggggcagcagccccagccacagcgccacctctgtgcacacctctgtgtag

SEQ ID NO: 160962 - DNA, 1092 bp, synthetic construct
  misc_feature 1..1092: note = Description of Artificial Sequence: Synthetic coding sequence
  source 1..1092: mol_type = other DNA
atggacaggcctgctgctgctgctgctgctggctgtgagggcggcggcggccccaaccctggccctgctgggggccggcggccccccagggctgctgggggcgccacagctggcagccggcagcccagcgtggagaccctggacagccccaccggcagccacgtggagtggtgcaagcagctgattgctgccaccatcagcagccagatcagcggctctgtgaccagtgaaaatgtgtcccgggactacaaggccctgagagatggcaacaagctggcccagatggaggaggcccccctcttccctggagagagcatcaaggccatcgtgaaggatgtgatgtacatctgccccttcatgggcgctgtgtctggcaccctgactgtgacagacttcaagctgtacttcaagaatgtggagcgggacccccacttcatcctggatgtgcccctgggcgtcatcagccgggtggagaagatcggggcccagagccatggagacaacagctgtggcatcgagatcgtgtgcaaggacatgaggaacctgcggctggcctacaagcaggaggagcagagcaagctgggcatctttgagaacctgaacaagcacgccttccccctgagcaatggccaggccctgtttgccttctcctacaaggagaagttccccatcaatggctggaaggtgtatgaccctgtgtctgagtacaagaggcagggcctgcccaatgaatcctggaagatcagcaagatcaacagcaactatgagttctgtgacacctacccagccatcatcgtggtgcccacctctgtgaaggatgatgacctgagcaaggtggccgccttccgggccaagggccgggtgcctgtgctgtcctggatccaccctgagagccaggccaccatcacccgctgcagccagcccctggtgggccccaatgacaagcgctgcaaggaggatgagaagtacctgcagaccatcatggatgccaatgcccagagccacaagctgatcatctttgatgcccggcagaacagcgtggccgacaccaacaagctgtggtaccaggacacagccagcctgatggagtag

SEQ ID NO: 160963 - DNA, 1998 bp, synthetic construct; identical to SEQ ID NO: 160953
  misc_feature 1..1998: note = Description of Artificial Sequence: Synthetic coding sequence
  source 1..1998: mol_type = other DNA

SEQ ID NO: 160964 - DNA, 1914 bp, synthetic construct
  misc_feature 1..1914: note = Description of Artificial Sequence: Synthetic coding sequence
  source 1..1914: mol_type = other DNA
atgctgggcaagggcgtggtgggcggcggcggcggcaccaaggcccccaagcccagctttgtgtcctatgtgcggcctgaggagatccacaccaatgagaaggaggtgacagagaaggaggtgaccctgcacctgctgcctggagagcagctgctgtgtgaggccagcacagtgctgaagtatgtgcaggaggacagctgccagcacggcgtgtatggccgcctggtgtgcacagacttcaagatcgccttcctgggagatgatgagagcgccctggacaatgatgagacccagttcaagaacaaggtgattggagaaaatgacatcaccctgcactgtgtggaccagatctacggcgtgtttgatgagaagaagaagaccctgtttggccagctgaagaagtacccagagaagctgatcatccactgcaaggacctgcgggtcttccagttctgcctgcgctacaccaaggaggaggaggtgaagagaattgtgtctggcatcatccaccacacccaggcccccaagctgctgaagaggctcttcctgttctcctatgccacagctgcccagaacaacacagtgacagaccccaagaaccacacagtgatgtttgacaccctgaaggactggtgctgggagctggagaggaccaagggcaacatgaagtacaaggctgtgtctgtgaatgaaggctacaaggtgtgtgagcggctgcctgcctactttgtggtgcccacccccctgcctgaggagaatgtgcagcgcttccagggccacggcatccccatctggtgctggagctgccacaatggaagtgccctgctgaagatgtctgccctgcccaaggagcaggatgatggcatcctgcagatccagaagagcttcctggatggcatctacaagaccatccacaggcctccctatgaaattgtgaagacagaggacctgagcagcaacttcctgagcctgcaggagatccagacagcctacagcaagttcaagcagctgttcctgattgacaacagcacagagttctgggacacagacatcaagtggttcagcctgctggagagcagctcctggctggacatcatccgccgctgcctgaagaaggccatcgagatcacagagtgcatggaggcccagaacatgaatgtgctgctgctggaggagaatgccagtgacctgtgctgcctgatcagcagcctggtgcagctgatgatggacccccactgcaggaccagaattggcttccagagcctcatccagaaggagtgggtgatgggcggccactgcttcctggaccgctgcaaccacctgcggcagaatgacaaggaggagcaccagaggcagctgagcctgcccctgacccagagcaagagcagccccaagaggggcttcttccgggaggagacagaccacctgatcaagaacctgctgggcaagaggatcagcaagctgatcaacagcagtgatgagctgcaggacaacttccgggagttctatgacagctggcacagcaagagcacagactaccacggcctgctgctgccccacatcgagggccctgagatcaaggtgtgggcccagcgctacctgcgctggatccctgaggcccagatcctgggcggcggccaggtggccaccctgagcaagctgctggagatgatggaggaggtgcagagcctgcaggagaagattgatgagcggcaccacagccagcaggccccccaggccgaggccccctgcctgctgagaaattctgcccggctgagcagcctcttcccctttgccctgctgcagaggcacagcagcaagcctgtgctgcccaccagcggctggaaggccctgggagatgaagatgacctggccaagcgggaggatgaatttgtggacctgggagatgtgtag

SEQ ID NO: 160965 - DNA, 2082 bp, synthetic construct
  misc_feature 1..2082: note = Description of Artificial Sequence: Synthetic coding sequence
  source 1..2082: mol_type = other DNA
atgctgggcaagggcgtggtgggcggcggcggcggcaccaaggcccccaagcccagctttgtgtcctatgtgcggcctgaggagatccacaccaatgagaaggaggtgacagagaaggaggtgaccctgcacctgctgcctggagagcagctgctgtgtgaggccagcacagtgctgaagtatgtgcaggaggacagctgccagcacggcgtgtatggccgcctggtgtgcacagacttcaagatcgccttcctgggagatgatgagagcgccctggacaatgatgagacccagttcaagaacaaggtgattggagaaaatgacatcaccctgcactgtgtggaccagatctacggcgtgtttgatgagaagaagaagaccctgtttggccagctgaagaagtacccagagaagctgatcatccactgcaaggacctgcgggtcttccagttctgcctgcgctacaccaaggaggaggaggtgaagagaattgtgtctggcatcatccaccacacccaggcccccaagctgctgaagaggctcttcctgttctcctatgccacagctgcccagaacaacacagtgacagaccccaagaaccacacagtgatgtttgacaccctgaaggactggtgctgggagctggagaggaccaagggcaacatgaagtacaaggctgtgtctgtgaatgaaggctacaaggtgtgtgagcggctgcctgcctactttgtggtgcccacccccctgcctgaggagaatgtgcagcgcttccagggccacggcatccccatctggtgctggagctgccacaatggaagtgccctgctgaagatgtctgccctgcccaaggagcaggatgatggcatcctgcagatccagaagagcttcctggatggcatctacaagaccatccacaggcctccctatgaaattgtgaagacagaggacctgagcagcaacttcctgagcctgcaggagatccagacagcctacagcaagttcaagcagctgttcctgattgacaacagcacagagttctgggacacagacatcaagtggttcagcctgctggagagcagctcctggctggacatcatccgccgctgcctgaagaaggccatcgagatcacagagtgcatggaggcccagaacatgaatgtgctgctgctggaggagaatgccagtgacctgtgctgcctgatcagcagcctggtgcagctgatgatggacccccactgcaggaccagaattggcttccagagcctcatccagaaggagtgggtgatgggcggccactgcttcctggaccgctgcaaccacctgcggcagaatgacaaggaggaggtgcctgtgttcctgctcttcctggactgtgtgtggcagctggtgcaccagcaccccccagcctttgagttcacagagacctacctgactgtgctgagtgacagcctgtacatccccatcttcagcaccttcttcttcaacagcccccaccagaaggacaccaacatgcaccagaggcagctgagcctgcccctgacccagagcaagagcagccccaagaggggcttcttccgggaggagacagaccacctgatcaagaacctgctgggcaagaggatcagcaagctgatcaacagcagtgatgagctgcaggacaacttccgggagttctatgacagctggcacagcaagagcacagactaccacggcctgctgctgccccacatcgagggccctgagatcaaggtgtgggcccagcgctacctgcgctggatccctgaggcccagatcctgggcggcggccaggtggccaccctgagcaagctgctggagatgatggaggaggtgcagagcctgcaggagaagattgatgagcggcaccacagccagcaggccccccaggccgaggccccctgcctgctgagaaattctgcccggctgagcagcctcttcccctttgccctgctgcagaggcacagcagcaagcctgtgctgcccaccagcggctggaaggccctgggagatgaagatgacctggccaagcgggaggatgaatttgtggacctgggagatgtgtag

SEQ ID NO: 160966 - DNA, 2244 bp, synthetic construct
  misc_feature 1..2244: note = Description of Artificial Sequence: Synthetic coding sequence
  source 1..2244: mol_type = other DNA
atgctgggcaagggcgtggtgggcggcggcggcggcaccaaggcccccaagcccagctttgtgtcctatgtgcggcctgaggagatccacaccaatgagaaggaggtgacagagaaggaggtgaccctgcacctgctgcctggagagcagctgctgtgtgaggccagcacagtgctgaagtatgtgcaggaggacagctgccagcacggcgtgtatggccgcctggtgtgcacagacttcaagatcgccttcctgggagatgatgagagcgccctggacaatgatgagacccagttcaagaacaaggtgattggagaaaatgacatcaccctgcactgtgtggaccagatctacggcgtgtttgatgagaagaagaagaccctgtttggccagctgaagaagtacccagagaagctgatcatccactgcaaggacctgcgggtcttccagttctgcctgcgctacaccaaggaggaggaggtgaagagaattgtgtctggcatcatccaccacacccaggcccccaagctgctgaagaggctcttcctgttctcctatgccacagctgcccagaacaacacagtgacagaccccaagaaccacacagtgatgtttgacaccctgaaggactggtgctgggagctggagaggaccaagggcaacatgaagtacaaggctgtgtctgtgaatgaaggctacaaggtgtgtgagcggctgcctgcctactttgtggtgcccacccccctgcctgaggagaatgtgcagcgcttccagggccacggcatccccatctggtgctggagctgccacaatggaagtgccctgctgaagatgtctgccctgcccaaggagcaggatgatggcatcctgcagatccagaagagcttcctggatggcatctacaagaccatccacaggcctccctatgaaattgtgaagacagaggacctgagcagcaacttcctgagcctgcaggagatccagacagcctacagcaagttcaagcagctgttcctgattgacaacagcacagagttctgggacacagacatcaagtggttcagcctgctggagagcagctcctggctggacatcatccgccgctgcctgaagaaggccatcgagatcacagagtgcatggaggcccagaacatgaatgtgctgctgctggaggagaatgccagtgacctgtgctgcctgatcagcagcctggtgcagctgatgatggacccccactgcaggaccagaattggcttccagagcctcatccagaaggagtgggtgatgggcggccactgcttcctggaccgctgcaaccacctgcggcagaatgacaaggaggaggtgcctgtgttcctgctcttcctggactgtgtgtggcagctggtgcaccagcaccccccagcctttgagttcacagagacctacctgactgtgctgagtgacagcctgtacatccccatcttcagcaccttcttcttcaacagcccccaccagaaggacaccaacatgggccgggagggccaggacacccagagcaagcccctgaacctgctgactgtgtgggactggagcgtgcagtttgagcccaaggcccagaccctgctgaagaaccccctgtatgtggagaagcccaagctggacaagggccagaggaagggcatgaggttcaagcaccagaggcagctgagcctgcccctgacccagagcaagagcagccccaagaggggcttcttccgggaggagacagaccacctgatcaagaacctgctgggcaagaggatcagcaagctgatcaacagcagtgatgagctgcaggacaacttccgggagttctatgacagctggcacagcaagagcacagactaccacggcctgctgctgccccacatcgagggccctgagatcaaggtgtgggcccagcgctacctgcgctggatccctgaggcccagatcctgggcggcggccaggtggccaccctgagcaagctgctggagatgatggaggaggtgcagagcctgcaggagaagattgatgagcggcaccacagccagcaggccccccaggccgaggccccctgcctgctgagaaattctgcccggctgagcagcctcttcccctttgccctgctgcagaggcacagcagcaagcctgtgctgcccaccagcggctggaaggccctgggagatgaagatgacctggccaagcgggaggatgaatttgtggacctgggagatgtgtag

SEQ ID NO: 160967 - DNA, 1953 bp, synthetic construct
  misc_feature 1..1953: note = Description of Artificial Sequence: Synthetic coding sequence
  source 1..1953: mol_type = other DNA
atggccggggcccgggctgctgctgctgctgccagcgctggcagcagcgccagcagcggcaaccagcccccccaggagctgggcctgggggagctgctggaggagttcagcaggacccagtaccgggccaaggatggcagcggcactggaggcagcaaggtggagagaattgagaagcgctgcctggagctgtttggccgggactactgcttcagcgtcatccccaacaccaacggggacatctgtggccactaccccaggcacatcgtgttcctggagtatgagagcagcgagaaggagaaggacacctttgagagcacagtgcaggtgtccaagctgcaggacctgatccacaggagcaagatggcccgctgccggggccgctttgtgtgccctgtgatcctcttcaagggcaagcacatctgccgcagcgccaccctggccggctggggcgagctgtatggccgcagcggctacaactacttcttcagcggcggcgcagatgatgcctgggcagatgtggaggatgtgacagaggaggactgtgccctgcggagcggggacacccacctgtttgacaaggtgcggggctatgacatcaagctgctgcgctacctgtctgtgaagtacatctgtgacctgatggtggagaacaagaaggtgaagtttggcatgaatgtgaccagcagcgagaaggtggacaaggcccagagatatgctgacttcaccctgctgagcatcccctacccaggctgtgagttcttcaaggagtacaaggaccgggactacatggccgagggcctcatcttcaactggaagcaggactatgtggatgcccccctgagcatcccagacttcctgacccacagcctgaacatcgactggagccagtaccagtgctgggacctggtgcagcagacccagaactacctgaagctgctgctgagcctggtgaacagtgatgatgacagcggcctgctggtgcactgcatcagcggctgggacaggacccccctcttcatcagcctgctgcggctgagcctgtgggcagatggcctcatccacaccagcctgaagcccacagagatcctgtacctgactgtggcctatgactggttcctgtttggccacatgctggtggaccggctgagcaaaggagaggagatcttcttcttctgcttcaacttcctgaagcacatcaccagcgaggagttcagcgccctgaagacccagaggaggaagagcctgcctgccagagatggcggcttcaccctggaggacatctgcatgctgcggaggaaggaccggggcagcaccaccagcctgggcagtgacttcagcctggtgatggagagcagccctggggccaccggcagcttcacctatgaggccgtggagctggtgcctgctggggcccccacccaggccgcctggaggaagagccacagcagcagcccccagagcgtgctgtggaaccggccccagcccagcgaggaccggctgcccagccagcagggcctggccgaggcccggagcagcagcagcagcagcagcaaccacagcgacaacttcttcaggatgggcagcagccccctggaggtgcccaagcccaggtctgtggaccaccccctgcccggcagcagcctgagcacagattatggctcctggcagatggtgacaggctgcggcagcatccaggagagagctgtgctgcacacagacagcagcctgcccttctccttcccagatgagctgcccaacagctgcctgctggccgccctgagtgaccgggagacccggctgcaggaggtgcgcagcgccttcctggccgcctacagcagcacagtgggcctgcgggctgtggcccccagccccagcggggccatcggcggcctgctggagcagtttgcccggggcgtgggcctgcggagcatcagcagcaatgccctgtag

SEQ ID NO: 160968 - DNA, 1617 bp, synthetic construct
  misc_feature 1..1617: note = Description of Artificial Sequence: Synthetic coding sequence
  source 1..1617: mol_type = other DNA
atggccggggcccgggctgctgctgctgctgccagcgctggcagcagcgccagcagcggcaaccagcccccccaggagctgggcctgggggagctgctggaggagttcagcaggacccagtaccgggccaaggatggcagcggcactggaggcagcaaggtggagagaattgagaagcgctgcctggagctgtttggccgggactactgcttcagcgtcatccccaacaccaacggggacatctgtggccactaccccaggcacatcgtgttcctggagtatgagagcagcgagaaggagaaggacacctttgagagcacagtgcaggtgtccaagctgcaggacctgatccacaggagcaagatggcccgctgccggggccgctttgtgtgccctgtgatcctcttcaagggcaagcacatctgccgcagcgccaccctggccggctggggcgagctgtatggccgcagcggctacaactacttcttcagcggcggcgcagatgatgcctgggcagatgtggaggatgtgacagaggaggactgtgccctgcggagcggggacacccacctgtttgacaaggtgcggggctatgacatcaagctgctgcgctacctgtctgtgaagtacatctgtgacctgatggtggagaacaagaaggtgaagtttggcatgaatgtgaccagcagcgagaaggtggacaaggcccagagatatgctgacttcaccctgctgagcatcccctacccaggctgtgagttcttcaaggagtacaaggaccgggactacatggccgagggcctcatcttcaactggaagcaggactatgtggatgcccccctgagcatcccagacttcctgacccacagcctgaacatcgactggagccagtaccagtgctgggacctggtgcagcagacccagaactacctgaagctgctgctgagcctggtgaacagtgatgatgacagcggcctgctggtgcactgcatcagcggctgggacaggacccccctcttcatcagcctgctgcggctgagcctgtgggcagatggcctcatccacaccagcctgaagcccacagagatcctgtacctgactgtggcctatgactggttcctgtttggccacatgctggtggaccggctgagcaaaggagaggagatcttcttcttctgcttcaacttcctgaagcacatcaccagcgaggagttcagcgccctgaagacccagaggaggaagagcctgcctgccagagatggcggcttcaccctggaggacatctgcatgctgcggaggaaggaccggggcagcaccaccagcctgggcagtgacttcagcctggtgatggagagcagccctggggccaccggcagcttcacctatgaggccgtggagctggtgcctgctggggcccccacccaggccgcctggctggccgccctgagtgaccgggagacccggctgcaggaggtgcgcagcgccttcctggccgcctacagcagcacagtgggcctgcgggctgtggcccccagccccagcggggccatcggcggcctgctggagcagtttgcccggggcgtgggcctgcggagcatcagcagcaatgccctgtag

SEQ ID NO: 160969 - DNA, 1797 bp, synthetic construct
  misc_feature 1..1797: note = Description of Artificial Sequence: Synthetic coding sequence
  source 1..1797: mol_type = other DNA
atggccggggcccgggctgctgctgctgctgccagcgctggcagcagcgccagcagcggcaaccagcccccccaggagctgggcctgggggagctgctggaggagttcagcaggacccagtaccgggccaaggatggcagcggcactggaggcagcaaggtggagagaattgagaagcgctgcctggagctgtttggccgggactactgcttcagcgtcatccccaacaccaacggggacatctgtggccactaccccaggcacatcgtgttcctggagtatgagagcagcgagaaggagaaggacacctttgagagcacagtgcaggtgtccaagctgcaggacctgatccacaggagcaagatggcccgctgccggggccgctttgtgtgccctgtgatcctcttcaagggcaagcacatctgccgcagcgccaccctggccggctggggcgagctgtatggccgcagcggctacaactacttcttcagcggcggcgcagatgatgcctgggcagatgtggaggatgtgacagaggaggactgtgccctgcggagcggggacacccacctgtttgacaaggtgcggggctatgacatcaagctgctgcgctacctgtctgtgaagtacatctgtgacctgatggtggagaacaagaaggtgaagtttggcatgaatgtgaccagcagcgagaaggtggacaaggcccagagatatgctgacttcaccctgctgagcatcccctacccaggctgtgagttcttcaaggagtacaaggaccgggactacatggccgagggcctcatcttcaactggaagcaggactatgtggatgcccccctgagcatcccagacttcctgacccacagcctgaacatcgactggagccagtaccagtgctgggacctggtgcagcagacccagaactacctgaagctgctgctgagcctggtgaacagtgatgatgacagcggcctgctggtgcactgcatcagcggctgggacaggacccccctcttcatcagcctgctgcggctgagcctgtgggcagatggcctcatccacaccagcctgaagcccacagagatcctgtacctgactgtggcctatgactggttcctgtttggccacatgctggtggaccggctgagcaaaggagaggagatcttcttcttctgcttcaacttcctgaagcacatcaccagcgaggagttcagcgccctgaagacccagaggaggaagagcctgcctgccagagatggcggcttcaccctggaggacatctgcatgctgcggaggaaggaccggggcagcaccaccagcctgggcagtgacttcagcctggtgatggagagcagccctggggccaccggcagcttcacctatgaggccgtggagctggtgcctgctggggcccccacccaggccgcctggaggaagagccacagcagcagcccccagagcgtgctgtggaaccggccccagcccagcgaggaccggctgcccagccagcagggcctggccgaggcccggagcagcagcagcagcagcagcaaccacagcgacaacttcttcaggatgggcagcagccccctggaggtgcccaagccccggctggccgccctgagtgaccgggagacccggctgcaggaggtgcgcagcgccttcctggccgcctacagcagcacagtgggcctgcgggctgtggcccccagccccagcggggccatcggcggcctgctggagcagtttgcccggggcgtgggcctgcggagcatcagcagcaatgccctgtag

SEQ ID NO: 160970 - DNA, 1563 bp, synthetic construct
  misc_feature 1..1563: note = Description of Artificial Sequence: Synthetic coding sequence
  source 1..1563: mol_type = other DNA
atggccggggcccgggctgctgctgctgctgccagcgctggcagcagcgccagcagcggcaaccagcccccccaggagctgggcctgggggagctgctggaggagttcagcaggacccagtaccgggccaaggatggcagcggcactggaggcagcaaggtggagagaattgagaagcgctgcctggagctgtttggccgggactactgcttcagcgtcatccccaacaccaacggggacatctgtggccactaccccaggcacatcgtgttcctggagtatgagagcagcgagaaggagaaggacacctttgagagcacagtgcaggtgtccaagctgcaggacctgatccacaggagcaagatggcccgctgccggggccgctttgtgtgccctgtgatcctcttcaagggcaagcacatctgccgcagcgccaccctggccggctggggcgagctgtatggccgcagcggctacaactacttcttcagcggcggcgcagatgatgcctgggcagatgtggaggatgtgacagaggaggactgtgccctgcggagcggggacacccacctgtttgacaaggtgcggggctatgacatcaagctgctgcgctacctgtctgtgaagtacatctgtgacctgatggtggagaacaagaaggtgaagtttggcatgaatgtgaccagcagcgagaaggtggacaaggcccagagatatgctgacttcaccctgctgagcatcccctacccaggctgtgagttcttcaaggagtacaaggaccgggactacatggccgagggcctcatcttcaactggaagcaggactatgtggatgcccccctgagcatcccagacttcctgacccacagcctgaacatcgactggagccagtaccagtgctgggacctggtgcagcagacccagaactacctgaagctgctgctgagcctggtgaacagtgatgatgacagcggcctgctggtgcactgcatcagcggctgggacaggacccccctcttcatcagcctgctgcggctgagcctgtgggcagatggcctcatccacaccagcctgaagcccacagagatcctgtacctgactgtggcctatgactggttcctgtttggccacatgctggtggaccggctgagcaaaggagaggagatcttcttcttctgcttcaacttcctgaagcacatcaccagcgaggagttcagcgccctgaagacccagaggaggaagagcctgcctgccagagatggcggcttcaccctggaggacatctgcatgctgcggaggaaggaccggggcagcaccaccagcctgggcagtgacttcagcctggtgatggagagcagccctggggccaccggcagcttcacctatgaaagaggagctggccccagccgcagcgccaacagcggcagcctggaggaggagcccctcatcctgagcacagaatgtcccctggagcccgccaccaccctgcggggccccctggccttccctgctggggccggcggcagccaggtgttccagctgctcttcctgaagcccttctag

SEQ ID NO: 160971 - DNA, 1932 bp, synthetic construct
  misc_feature 1..1932: note = Description of Artificial Sequence: Synthetic coding sequence
  source 1..1932: mol_type = other DNA
atggagaagagcagcagctgtgagagcctgggcagccagcctgctgctgcccggcccccatctgtggacagcctgagcagcgccagcaccagccacagcgagaacagcgtgcacaccaagagcgcctctgtggtgtccagtgacagcatcagcaccagcgctgacaacttctccccagacctgcgggtgctgcgggagagcaacaagctggccgagatggaggagccccccctgctgcccggggagaacatcaaggacatggccaaggatgtgacctacatctgccccttcaccggggctgtgcggggcaccctgactgtgaccaactaccgcctgtacttcaagtccatggagcgggaccccccatttgtgctggatgccagcctgggcgtcatcaacagagtggagaagattggaggagccagcagcagaggagagaacagctatggcctggagaccgtgtgcaaggacatccggaacctgcgctttgcccacaagccagagggccgcacccggcgcagcatctttgagaacctgatgaagtatgccttccctgtgagcaacaacctgcccctgtttgcctttgagtacaaggaggtgtttcctgaaaatggctggaagctgtatgaccccctgctggagtaccgccggcagggcatccccaatgaatcctggaggatcaccaagatcaatgaaagatatgagctgtgtgacacctacccagccctgctggtggtgcctgccaacatcccagatgaggagctgaagagggtggccagcttccgcagccggggccgcatccctgtgctgtcctggatccaccctgagagccaggccaccatcacccgctgcagccagcccatggtgggcgtgtctgggaagaggagcaaggaggatgagaagtacctgcaggccatcatggacagcaatgcccagagccacaagatcttcatctttgatgcccggcccagcgtgaatgctgtggccaacaaggccaagggcggcggctatgaaagtgaagatgcctaccagaatgctgagctggtgttcctggacatccacaacatccacgtgatgagggagagcctgaggaagctgaaggagatcgtgtaccccaacatcgaggagacccactggctgagcaacctggagagcacccactggctggagcacatcaagctgatcctggccggggccctgagaattgctgacaaggtggagagcggcaagacctctgtggtggtgcactgcagtgatggctgggacagaacagcccagctgaccagcctggccatgctgatgctggatggctactaccgcaccatccggggctttgaggtgctggtggagaaggagtggctgagctttggccaccgcttccagctgcgggtgggccacggggacaagaaccacgcagatgctgacaggagccctgtgttcctgcagttcatcgactgtgtgtggcagatgacccggcagttccccacagcctttgagttcaatgagtacttcctgatcaccatcctggaccacctgtacagctgcctgtttggcaccttcctgtgcaacagcgagcagcagaggggcaaggagaacctgcccaagaggacagtgtccctgtggagctacatcaacagccagctggaggacttcaccaaccccctgtatggcagctacagcaaccacgtgctgtaccctgtggcctccatgaggcacctggagctgtgggtgggctactacatccgctggaaccccaggatgaagccccaggagcccatccacaaccgctacaaggagctgctggccaagagagctgagctgcagaagaaggtggaggagctgcagcgggagatcagcaacagaagcaccagcagcagcgagcgggccagcagccctgcccagtgtgtgacccctgtgcagacagtggtgtag

SEQ ID NO: 160972 - DNA, 1716 bp, synthetic construct
  misc_feature 1..1716: note = Description of Artificial Sequence: Synthetic coding sequence
  source 1..1716: mol_type = other DNA
atggaggagccccccctgctgcccggggagaacatcaaggacatggccaaggatgtgacctacatctgccccttcaccggggctgtgcggggcaccctgactgtgaccaactaccgcctgtacttcaagtccatggagcgggaccccccatttgtgctggatgccagcctgggcgtcatcaacagagtggagaagattggaggagccagcagcagaggagagaacagctatggcctggagaccgtgtgcaaggacatccggaacctgcgctttgcccacaagccagagggccgcacccggcgcagcatctttgagaacctgatgaagtatgccttccctgtgagcaacaacctgcccctgtttgcctttgagtacaaggaggtgtttcctgaaaatggctggaagctgtatgaccccctgctggagtaccgccggcagggcatccccaatgaatcctggaggatcaccaagatcaatgaaagatatgagctgtgtgacacctacccagccctgctggtggtgcctgccaacatcccagatgaggagctgaagagggtggccagcttccgcagccggggccgcatccctgtgctgtcctggatccaccctgagagccaggccaccatcacccgctgcagccagcccatggtgggcgtgtctgggaagaggagcaaggaggatgagaagtacctgcaggccatcatggacagcaatgcccagagccacaagatcttcatctttgatgcccggcccagcgtgaatgctgtggccaacaaggccaagggcggcggctatgaaagtgaagatgcctaccagaatgctgagctggtgttcctggacatccacaacatccacgtgatgagggagagcctgaggaagctgaaggagatcgtgtaccccaacatcgaggagacccactggctgagcaacctggagagcacccactggctggagcacatcaagctgatcctggccggggccctgagaattgctgacaaggtggagagcggcaagacctctgtggtggtgcactgcagtgatggctgggacagaacagcccagctgaccagcctggccatgctgatgctggatggctactaccgcaccatccggggctttgaggtgctggtggagaaggagtggctgagctttggccaccgcttccagctgcgggtgggccacggggacaagaaccacgcagatgctgacaggagccctgtgttcctgcagttcatcgactgtgtgtggcagatgacccggcagttccccacagcctttgagttcaatgagtacttcctgatcaccatcctggaccacctgtacagctgcctgtttggcaccttcctgtgcaacagcgagcagcagaggggcaaggagaacctgcccaagaggacagtgtccctgtggagctacatcaacagccagctggaggacttcaccaaccccctgtatggcagctacagcaaccacgtgctgtaccctgtggcctccatgaggcacctggagctgtgggtgggctactacatccgctggaaccccaggatgaagccccaggagcccatccacaaccgctacaaggagctgctggccaagagagctgagctgcagaagaaggtggaggagctgcagcgggagatcagcaacagaagcaccagcagcagcgagcgggccagcagccctgcccagtgtgtgacccctgtgcagacagtggtgtag

SEQ ID NO: 160973 - DNA, 1716 bp, synthetic construct; identical to SEQ ID NO: 160972
  misc_feature 1..1716: note = Description of Artificial Sequence: Synthetic coding sequence
  source 1..1716: mol_type = other DNA

SEQ ID NO: 160974 - DNA, 1716 bp, synthetic construct; identical to SEQ ID NO: 160972
  misc_feature 1..1716: note = Description of Artificial Sequence: Synthetic coding sequence
  source 1..1716: mol_type = other DNA

SEQ ID NO: 160975 - DNA, 981 bp, synthetic construct
  misc_feature 1..981: note = Description of Artificial Sequence: Synthetic coding sequence
  source 1..981: mol_type = other DNA
atgctggccgtggccctgaccatcctgagcgccagcaccagccacagtgaaaattctgtgcacaccaagagcgcctctgtggtgtccagtgacagcatcagcaccagcgctgacaacttctccccagacctgcgggtgctgcgggagagcaacaagctggccgagatggaggagccccccctgctgcctggagagaacatcaaggacatggccaaggatgtgacctacatctgccccttcaccggggctgtgcggggcaccctgactgtgaccaactaccgcctgtacttcaagtccatggagcgggaccccccatttgtgctggatgccagcctgggcgtcatcaacagagtggagaagattggaggagccagcagcagaggagaaaattcctatggcctggagaccgtgtgcaaggacatccggaacctgcgctttgcccacaagccagagggccgcaccaggaggagcatctttgagaacctgatgaagtatgccttccctgtgagcaacaacctgcccctgtttgcctttgagtacaaggaggtgtttcctgaaaatggctggaagctgtatgaccccctgctggagtaccgccggcagggcatccccaatgaatcctggaggatcaccaagatcaatgaaagatatgagctgtgtgacacctacccagccctgctggtggtgcctgccaacatcccagatgaggagctgaagagggtggccagcttccgcagccggggccgcatccctgtgctgtcctggatccaccctgagagccaggccaccatcacccgctgcagccagcccatggtgggcgtgtctgggaagaggagcaaagaagatgagaagtacctgcaggccatcatggacagcaatgcccagagccacaagatcttcatctttgatgcccggcccagcgtgaatgctgtggccaacaaggccaagggcggcggctatgaaagtgaagatgcctactag

SEQ ID NO: 160976 - DNA, 3513 bp, synthetic construct
  misc_feature 1..3513: note = Description of Artificial Sequence: Synthetic coding sequence
  source 1..3513: mol_type = other DNA
atggatgaggagaccaggcacagcctggagtgcatccaggccaaccagatcttccccaggaagcagctgatccgggaggatgagaacctgcaggtgcccttcctggagctgcacggggagagcacagaatttgtgggccgggcagaagatgccatcatcgccctgagcaactaccgcctgcacatcaagttcaaggagagcctggtgaatgtgcccctgcagctgattgagagcgtggagtgccgggacatcttccagctgcacctgacctgcaaggactgcaaggtgatccgctgccagttcagcacctttgagcagtgccaggagtggctgaagaggctgaacaatgccatccggcccccagccaagattgaagatctcttctcctttgcctaccacgcctggtgcatggaggtgtatgccagcgagaaggagcagcacggggacctgtgcaggcctggagagcacgtgaccagccgcttcaagaatgaggtggagaggatgggctttgacatgaacaatgcctggaggatcagcaacatcaatgagaagtacaagctgtgtggcagctacccccaggagctgattgtgcctgcctggatcacagacaaggagctggagagcgtgtcctccttccgctcctggaagaggatcccagctgtgatctaccgccaccagagcaatggagctgtgattgcccgctgtggccagcctgaggtgtcctggtggggctggagaaatgctgatgatgagcacctggtgcagagcgtggccaaggcctgtgccagtgacagccgcagcagcggcagcaagctgagcaccaggaacaccagccgggacttccccaatggaggagacctgagtgatgtggagtttgacagcagcctgagcaatgccagcggggctgagagcctggccatccagccccagaagctgctgatcctggatgcccggagctatgctgctgctgtggccaacagagccaagggcggcggctgtgagtgcccagagtactaccccaactgtgaggtggtgttcatgggcatggccaacatccacagcatccgccgctccttccagagcctgcggctgctgtgcacccagatgccagaccccggcaactggctgagcgccctggagagcaccaagtggctgcaccacctgtctgtgctgctgaagagcgccctgctggtggtgcatgctgtggaccaggaccagaggcctgtgctggtgcactgcagtgatggctgggacaggaccccccagatcgtggccctggccaagctgctgctggacccctactaccgcaccatcgagggcttccaggtgctggtggagatggagtggctggactttggccacaagtttgctgacagatgtggccacggggagaacagtgatgacctgaatgaacgctgccctgtgttcctgcagtggctggactgtgtgcaccagctgcagaggcagttcccctgcagctttgagttcaatgaggccttcctggtgaagctggtgcagcacacctacagctgcctgtttggcaccttcctgtgcaacaatgccaaggagcggggggagaagcacacccaggagaggacctgcagcgtgtggagcctgctgcgggccggcaacaaggccttcaagaacctgctgtacagcagccagagcgaggccgtgctgtaccctgtgtgccacgtgaggaacctgatgctgtggagcgctgtgtacctgccctgccccagccccaccacccctgtggatgacagctgtgccccctacccagcccctggcaccagcccagatgatcctcccctgagccggctgcccaagaccaggagctatgacaacctgaccacagcctgtgacaacacagtgcccctggccagccgccgctgcagcgaccccagcctgaatgagaagtggcaggagcacagaagaagcctggagctgagcagcctggccggccctggagaggaccccctgtctgctgacagcctgggcaagcccaccagggtgcctggaggagctgagctgtctgtggccgccggcgtggccgagggccagatggagaacatcctgcaggaggccaccaaggaggagagcggcgtggaggagcccgcccaccgggccggcatcgagatccaggagggcaaggaggaccccctgctggagaaggagagcaggaggaagaccccagaggccagcgccatcggcctgcaccaggaccctgagctgggagatgctgccctgcggagccacctggacatgtcctggcccctcttcagccagggcatcagcgagcagcagagcggcctgtctgtgctgctgagcagcctgcaggtgcccccaagaggagaggacagcctggaggtgcctgtggagcagttccgcatcgaggagattgctgagggccgggaggaggccgtgctgcccatccctgtggatgccaaggtgggctacggcaccagccagagctgcagcctgctgcccagccaggtgccctttgagacccggggccccaacgtggacagcagcacagacatgctggtggaggacaaggtgaagtctgtgtctggcccccagggccaccacaggagctgcctggtgaacagcggcaaggaccggctgccccagaccatggagcccagccccagcgagaccagcctggtggagcggccccaggtgggctctgtggtgcacaggaccagcctgggcagcaccctgagcctgaccaggagcccctgtgccctgcccctggccgagtgcaaggagggcctggtgtgcaatggagcccctgagacagaaaatagagccagcgagcagcccccaggcctgagcaccctgcagatgtaccccaccccaaatggccactgtgccaacggggaggccggccgcagcaaggacagcctgagccggcagctgagcgccatgagctgcagcagcgcccacctgcacagcaggaacctgcaccacaagtggctgcacagccacagcggccggcccagcgccaccagcagcccagaccagcccagccgcagccacctggatgatgatggcatgtctgtgtacacagacaccatccagcagaggctgcggcagatcgagagcggccaccagcaggaggtggagaccctgaagaagcaggtgcaggagctgaagagccggctggagagccagtacctgaccagcagcctgcacttcaacggggactttggagatgaggtgatgacccgctggctgcctgaccacctggccgcccactgctacgcctgtgacagcgccttctggctggccagcaggaagcaccactgccgggacacagacagagtggaccagacctggaactgtggaaatgtgttctgcagcagctgctgcaaccagaaggtgcctgtgcccagccagcagctgtttgagcccagccgggtgtgcaagagctgctacagcagcctgcaccccaccagcagcagcattgacctggagctggacaagcccatcgccgccaccagcaactag

SEQ ID NO: 160977 - DNA, 3486 bp, synthetic construct
  misc_feature 1..3486: note = Description of Artificial Sequence: Synthetic coding sequence
  source 1..3486: mol_type = other DNA
atggatgaggagaccaggcacagcctggagtgcatccaggccaaccagatcttccccaggaagcagctgatccgggaggatgagaacctgcaggtgcccttcctggagctgcacggggagagcacagaatttgtgggccgggcagaagatgccatcatcgccctgagcaactaccgcctgcacatcaagttcaaggagagcctggtgaatgtgcccctgcagctgattgagagcgtggagtgccgggacatcttccagctgcacctgacctgcaaggactgcaaggtgatccgctgccagttcagcacctttgagcagtgccaggagtggctgaagaggctgaacaatgccatccggcccccagccaagattgaagatctcttctcctttgcctaccacgcctggtgcatggaggtgtatgccagcgagaaggagcagcacggggacctgtgcaggcctggagagcacgtgaccagccgcttcaagaatgaggtggagaggatgggctttgacatgaacaatgcctggaggatcagcaacatcaatgagaagtacaagctgtgtggcagctacccccaggagctgattgtgcctgcctggatcacagacaaggagctggagagcgtgtcctccttccgctcctggaagaggatcccagctgtgatctaccgccaccagagcaatggagctgtgattgcccgctgtggccagcctgaggtgtcctggtggggctggagaaatgctgatgatgagcacctggtgcagagcgtggccaaggcctgtgccagtgacagccgcagcagcggcagcaagctgagcaccaggaacaccagccgggacttccccaatggaggagacctgagtgatgtggagtttgacagcagcctgagcaatgccagcggggctgagagcctggccatccagccccagaagctgctgatcctggatgcccggagctatgctgctgctgtggccaacagagccaagggcggcggctgtgagtgcccagagtactaccccaactgtgaggtggtgttcatgggcatggccaacatccacagcatccgccgctccttccagagcctgcggctgctgtgcacccagatgccagaccccggcaactggctgagcgccctggagagcaccaagtggctgcaccacctgtctgtgctgctgaagagcgccctgctggtggtgcatgctgtggaccaggaccagaggcctgtgctggtgcactgcagtgatggctgggacaggaccccccagatcgtggccctggccaagctgctgctggacccctactaccgcaccatcgagggcttccaggtgctggtggagatggagtggctggactttggccacaagtttgctgacagatgtggccacggggagaacagtgatgacctgaatgaacgctgccctgtgttcctgcagtggctggactgtgtgcaccagctgcagaggcagttcccctgcagctttgagttcaatgaggccttcctggtgaagctggtgcagcacacctacagctgcctgtttggcaccttcctgtgcaacaatgccaaggagcggggggagaagcacacccaggagaggacctgcagcgtgtggagcctgctgcgggccggcaacaaggccttcaagaacctgctgtacagcagccagagcgaggccgtgctgtaccctgtgtgccacgtgaggaacctgatgctgtggagcgctgtgtacctgccctgccccagccccaccacccctgtggatgacagctgtgccccctacccagcccctggcaccagcccagatgatcctcccctgagccggctgcccaagaccaggagctatgacaacctgaccacagcctgtgacaacacagtgcccctggccagccgccgctgcagcgaccccagcctgaatgagaagtggcaggagcacagaagaagcctggagctgagcagcctggccggccctggagaggaccccctgtctgctgacagcctgggcaagcccaccagggtgcctggaggagctgagctgtctgtggccgccggcgtggccgagggccagatggagaacatcctgcaggaggccaccaaggaggagagcggcgtggaggagcccgcccaccgggccggcatcgagatccaggagggcaaggaggaccccctgctggagaaggagagcaggaggaagaccccagaggccagcgccatcggcctgcaccaggaccctgagctgggagatgctgccctgcggagccacctggacatgtcctggcccctcttcagccagggcatcagcgagcagcagagcggcctgtctgtgctgctgagcagcctgcaggtgcccccaagaggagaggacagcctggaggtgcctgtggagcagttccgcatcgaggagattgctgagggccgggaggaggccgtgctgcccatccctgtggatgccaaggtgggctacggcaccagccagagctgcagcctgctgcccagccaggtgccctttgagacccggggccccaacgtggacagcagcacagacatgctggtggaggacaaggtgaagtctgtgtctggcccccagggccaccacaggagctgcctggtgaacagcggcaaggaccggctgccccagaccatggagcccagccccagcgagaccagcctggtggagcggccccaggtgggctctgtggtgcacaggaccagcctgggcagcaccctgagcctgaccaggagcccctgtgccctgcccctggccgagtgcaaggagggcctggtgtgcaatggagcccctgagacagaaaatagagccagcgagcagcccccaggcctgagcaccctgcagatgtaccccaccccaaatggccactgtgccaacggggaggccggccgcagcaaggacagcctgagccggcagctgagcgccatgagctgcagcagcgcccacctgcacagcaggaacctgcaccacaagtggctgcacagccacagcggccggcccagcgccaccagcagcccagaccagcccagccgcagccacctggatgatgatggcatgtctgtgtacacagacaccatccagcagaggctgcggcagatcgagagcggccaccagcaggaggtggagaccctgaagaagcaggtgcaggagctgaagagccggctggagagccagtacctgaccagcagcctgcacttcaacggggactttggagatgaggtgatgacccgctggctgcctgaccacctggccgcccactgctacgcctgtgacagcgccttctggctggccagcaggaagcaccactgcaggaactgtggaaatgtgttctgcagcagctgctgcaaccagaaggtgcctgtgcccagccagcagctgtttgagcccagccgggtgtgcaagagctgctacagcagcctgcaccccaccagcagcagcattgacctggagctggacaagcccatcgccgccaccagcaactag

SEQ ID NO: 160978 - DNA, 3597 bp, synthetic construct
  misc_feature 1..3597: note = Description of Artificial Sequence: Synthetic coding sequence
  source 1..3597: mol_type = other DNA
atggatgaggagaccaggcacagcctggagtgcatccaggccaaccagatcttccccaggaagcagctgatccgggaggatgagaacctgcaggtgcccttcctggagctgcacggggagagcacagaatttgtgggccgggcagaagatgccatcatcgccctgagcaactaccgcctgcacatcaagttcaaggagagcctggtgaatgtgcccctgcagctgattgagagcgtggagtgccgggacatcttccagctgcacctgacctgcaaggactgcaaggtgatccgctgccagttcagcacctttgagcagtgccaggagtggctgaagaggctgaacaatgccatccggcccccagccaagattgaagatctcttctcctttgcctaccacgcctggtgcatggaggtgtatgccagcgagaaggagcagcacggggacctgtgcaggcctggagagcacgtgaccagccgcttcaagaatgaggtggagaggatgggctttgacatgaacaatgcctggaggatcagcaacatcaatgagaagtacaagctgtgtggcagctacccccaggagctgattgtgcctgcctggatcacagacaaggagctggagagcgtgtcctccttccgctcctggaagaggatcccagctgtgatctaccgccaccagagcaatggagctgtgattgcccgctgtggccagcctgaggtgtcctggtggggctggagaaatgctgatgatgagcacctggtgcagagcgtggccaaggcctgtgccagtgacagccgcagcagcggcagcaagctgagcaccaggaacaccagccgggacttccccaatggaggagacctgagtgatgtggagtttgacagcagcctgagcaatgccagcggggctgagagcctggccatccagccccagaagctgctgatcctggatgcccggagctatgctgctgctgtggccaacagagccaagggcggcggctgtgagtgcccagagtactaccccaactgtgaggtggtgttcatgggcatggccaacatccacagcatccgccgctccttccagagcctgcggctgctgtgcacccagatgccagaccccggcaactggctgagcgccctggagagcaccaagtggctgcaccacctgtctgtgctgctgaagagcgccctgctggtggtgcatgctgtggaccaggaccagaggcctgtgctggtgcactgcagtgatggctgggacaggaccccccagatcgtggccctggccaagctgctgctggacccctactaccgcaccatcgagggcttccaggtgctggtggagatggagtggctggactttggccacaagtttgctgacagatgtggccacggggagaacagtgatgacctgaatgaacgctgccctgtgttcctgcagtggctggactgtgtgcaccagctgcagaggcagttcccctgcagctttgagttcaatgaggccttcctggtgaagctggtgcagcacacctacagctgcctgtttggcaccttcctgtgcaacaatgccaaggagcggggggagaagcacacccaggagaggacctgcagcgtgtggagcctgctgcgggccggcaacaaggccttcaagaacctgctgtacagcagccagagcgaggccgtgctgtaccctgtgtgccacgtgaggaacctgatgctgtggagcgctgtgtacctgccctgccccagccccaccacccctgtggatgacagctgtgccccctacccagcccctggcaccagcccagatgatcctcccctgagccggctgcccaagaccaggagctatgacaacctgaccacagcctgtgacaacacagtgcccctggccagccgccgctgcagcgaccccagcctgaatgagaagtggcaggagcacagaagaagcctggagctgagcagcctggccggccctggagaggaccccctgtctgctgacagcctgggcaagcccaccagggtgcctggaggagctgagctgtctgtggccgccggcgtggccgagggccagatggagaacatcctgcaggaggccaccaaggaggagagcggcgtggaggagcccgcccaccgggccggcatcgagatccaggagggcaaggaggaccccctgctggagaaggagagcaggaggaagaccccagaggccagcgccatcggcctgcaccaggaccctgagctgggagatgctgccctgcggagccacctggacatgtcctggcccctcttcagccagggcatcagcgagcagcagagcggcctgtctgtgctgctgagcagcctgcaggtgcccccaagaggagaggacagcctggaggtgcctgtggagcagttccgcatcgaggagattgctgagggccgggaggaggccgtgctgcccatccctgtggatgccaaggtgggctacggcaccagccagagctgcagcctgctgcccagccaggtgccctttgagacccggggccccaacgtggacagcagcacagacatgctggtggaggacaaggtgaagtctgtgtctggcccccagggccaccacaggagctgcctggtgaacagcggcaaggaccggctgccccagaccatggagcccagccccagcgagaccagcctggtggagcggccccaggtgggctctgtggtgcacaggaccagcctgggcagcaccctgagcctgaccaggagcccctgtgccctgcccctggccgagtgcaaggagggcctggtgtgcaatggagcccctgagacagaaaatagagccagcgagcagcccccaggcctgagcaccctgcagatgtaccccaccccaaatggccactgtgccaacggggaggccggccgcagcaaggacagcctgagccggcagctgagcgccatgagctgcagcagcgcccacctgcacagcaggaacctgcaccacaagtggctgcacagccacagcggccggcccagcgccaccagcagcccagaccagcccagccgcagccacctggatgatgatggcatgtctgtgtacacagacaccatccagcagaggctgcggcagatcgagagcggccaccagcaggaggtggagaccctgaagaagcaggtgcaggagctgaagagccggctggagagccagtacctgaccagcagcctgcacttcaacggggactttggagatgaggtgaccagcatcccagattctgagagcaacctggaccagaactgcctgagccgctgcagcacagagatcttcagcgaggcctcctgggagcaggtggacaagcaggacacagagatgacccgctggctgcctgaccacctggccgcccactgctacgcctgtgacagcgccttctggctggccagcaggaagcaccactgcaggaactgtggaaatgtgttctgcagcagctgctgcaaccagaaggtgcctgtgcccagccagcagctgtttgagcccagccgggtgtgcaagagctgctacagcagcctgcaccccaccagcagcagcattgacctggagctggacaagcccatcgccgccaccagcaactag

SEQ ID NO: 160979 - DNA, 3513 bp, synthetic construct; identical to SEQ ID NO: 160976
  misc_feature 1..3513: note = Description of Artificial Sequence: Synthetic coding sequence
  source 1..3513: mol_type = other DNA

SEQ ID NO: 160980 - DNA, 420 bp, synthetic construct
  misc_feature 1..420: note = Description of Artificial Sequence: Synthetic coding sequence
  source 1..420: mol_type = other DNA
atggatgaggagaccaggcacagcctggagtgcatccaggccaaccagatcttccccaggaagcagctgatccgggaggatgagaacctgcaggtgcccttcctggagctgcacggggagagcacagaatttgtgggccgggcagaagatgccatcatcgccctgagcaactaccgcctgcacatcaagttcaaggagagcctggtgaatgtgcccctgcagctgattgagagcgtggagtgccgggacatcttccagctgcacctgacctgcaaggactgcaaggtgatccgctgccagttcagcacctttgagcagtgccaggagtggctgaagaggctgaacaatgccatccggcccccagccaagattgaagatctcttctcctttgcctaccacgcctggtgcatggaggtgtag

SEQ ID NO: 160981 - DNA, 3588 bp, synthetic construct
  misc_feature 1..3588: note = Description of Artificial Sequence: Synthetic coding sequence
  source 1..3588: mol_type = other DNA
atgggagaggagggcccccccagcctggagtacatccaggccaaggacctcttcccccccaaggagctggtgaaggaggaggagaacctgcaggtgcccttcaccgtgctgcagggcgagggcgtggagttcctgggccgggctgctgatgccctgattgccatcagcaactaccgcctgcacatcaagttcaaggacagcgtcatcaacgtgcccctgaggatgattgacagcgtggagagccgggacatgttccagctgcacatcagctgcaaggacagcaaggtggtgcgctgccacttcagcaccttcaagcagtgccaggagtggctgagccggctgagccgggccacagcccggcctgccaagccagaggacctgtttgcctttgcctaccacgcctggtgcctgggcctgacagaggaggaccagcacacccacctgtgccagcctggagagcacatccgctgccggcaggaggccgagctggccaggatgggctttgacctgcagaatgtgtggagggtgagccacatcaacagcaactacaagctgtgccccagctacccccagaagctgctggtgcctgtgtggatcacagacaaggagctggagaatgtggccagcttccgctcctggaagagaattcctgtggtggtgtaccgccacctgagaaatggagctgccatcgcccgctgcagccagcctgagatctcctggtggggctggagaaatgctgatgatgagtacctggtgaccagcatcgccaaggcctgtgccctggaccccggcacccgggccaccggcggcagcctgagcacaggcaacaatgacaccagcgaggcctgtgatgctgactttgacagcagcctgacagcctgcagcggcgtggagagcacagctgccccccagaagctgctgatcctggatgcccggagctacacagctgctgtggccaacagagccaagggcggcggctgtgaatgtgaggagtactaccccaactgtgaggtggtgttcatgggcatggccaacatccacgccatccggaacagcttccagtacctgcgggctgtgtgcagccagatgccagaccccagcaactggctgagcgccctggagagcaccaagtggctgcagcacctgtctgtgatgctgaaggctgctgtgctggtggccaacacagtggaccgggagggccggcctgtgctggtgcactgcagtgatggctgggacaggaccccccagatcgtggccctggccaagatcctgctggacccctactaccgcaccctggagggcttccaggtgctggtggagagtgactggctggactttggccacaagtttggagacagatgtggccaccaggagaatgtggaggaccagaatgagcagtgccctgtgttcctgcagtggctggacagcgtgcaccagctgctgaagcagttcccctgcctgtttgagttcaatgaggccttcctggtgaagctggtgcagcacacctacagctgcctgtatggcaccttcctggccaacaacccctgtgagcgggagaagaggaacatctacaagaggacctgcagcgtgtgggccctgctgcgggccggcaacaagaacttccacaacttcctgtacacccccagcagtgacatggtgctgcaccctgtgtgccacgtgcgggccctgcacctgtggacagctgtgtacctgcctgccagcagcccctgcaccctgggggaggagaacatggacctgtacctgagccctgtggcccagagccaggagttcagcggccgcagcctggaccggctgcccaagaccaggtccatggatgacctgctgagcgcctgtgacaccagcagccccctgaccaggaccagcagtgaccccaacctgaacaaccactgccaggaggtgcgggtgggcctggagccctggcacagcaaccctgagggcagcgagaccagctttgtggacagcggcgtgggcggcccccagcagacagtgggggaggtgggcctgcccccacccctgcccagcagccagaaggactacctgagcaacaagcccttcaagagccacaagagctgcagccccagctacaagctgctgaacacagctgtgccccgggagatgaagagcaacaccagtgaccctgagatcaaggtgctggaggagaccaagggccctgccccagaccccagcgcccaggatgagctgggccgcaccctggatggcatcggggagcccccagagcactgcccagagacagaggccgtgtctgccctgagcaaggtgatcagcaacaagtgtgatggagtgtgcaacttccctgagagcagccagaacagccccaccggcaccccccagcaggcccagcctgacagcatgctgggcgtgcccagcaaatgtgtgctggaccacagcctgagcacagtgtgcaaccccccatctgctgcctgccagacccccctggaccccagcacagacttcctgaaccaggaccccagcggctctgtggccagcatcagccaccaggagcagctgagctctgtgcctgacctgacccacggggaggaggacatcggcaagaggggcaacaacagaaatggccagctgctggagaaccccaggtttgggaagatgcccctggagctggtgaggaagcccatcagccagagccagatcagcgagttctccttcctgggcagcaactgggacagcttccagggcatggtgaccagcttccccagcggggaggccaccccccggcggctgctgtcctatggctgctgcagcaagaggcccaacagcaagcagatgagggccaccggcccctgctttggaggccagtgggcccagcgggagggcgtgaagagccctgtgtgcagcagccacagcaatggccactgcaccggccctgggggcaagaaccagatgtggctgagcagccaccccaagcaggtgagcagcaccaagcctgtgcccctgaactgccccagccctgtgccccccctgtacctggatgatgatggcctgcccttccccacagatgtgatccagcaccggctgcggcagatcgaggccggctacaagcaggaggtggagcagctgcggcggcaggtgcgggagctgcagatgaggctggacatccgccactgctgtgcccccccagctgagccccccatggactatgaagatgacttcacctgcctgaaggagagtgatggcagtgacacagaggactttggaagtgaccacagcgaggactgcctgtctgaggcctcctgggagcctgtggacaagaaggagacagaggtgacccgctgggtgcctgaccacatggccagccactgctacaactgtgactgtgagttctggctggccaagaggaggcaccactgcaggaactgtggaaatgtgttctgtgccggctgctgccacctgaagctgcccatcccagaccagcagctgtatgaccctgtgctggtgtgcaacagctgctatgagcacatccaggtgtcccgggcccgggagctgatgagccagcagctgaagaagcccatcgccacagccagcagctag

SEQ ID NO: 160982 - DNA, 570 bp, synthetic construct
  misc_feature 1..570: note = Description of Artificial Sequence: Synthetic coding sequence
  source 1..570: mol_type = other DNA
atgcctgtgtggaagctgccctggaagctgtctgagggcaagagaagagcccaggtggagggggaggacctcttccctgtggccatcagctttggccggcccaaggaggtgctgcccctgtacagcagcgagagccaccgcttcaccgtgctggagcccaacacagtgtccttcaacttcaagttctggaggaacatgtaccaccagtttgacaggaccctgcacccccggcagagcgtcttcaacatcatcatgaacatgaatgagcagaacaagcagctggagaaggacatcaaggacctggagagcaagatcaagcagaggaagaacaagcagacagatggcatcctgaccaaggagctgctgcacagcgtgcaccctgagagccccaacctgaagaccagcctgtgcttcaaggagcagaccctgctgcctgtgaatgatgccctgcggaccatcgagggcagcagccctgctgacaaccgctacagtgaatatgcagaggagttcagcaagtctgagcctgctgtggtgtccctggagtatggagtggccaggatgacctgctag

SEQ ID NO: 160983 - DNA, 1866 bp, synthetic construct
  misc_feature 1..1866: note = Description of Artificial Sequence: Synthetic coding sequence
  source 1..1866: mol_type = other DNA
atggagcacatccgcaccaccaaggtggagcaggtgaagctgctggaccgcttcagcaccagcaacaagagcctgaccggcaccctgtacctgacagccacccacctgctcttcatcgacagccaccagaaggagacctggatcctgcaccaccacatcgcctctgtggagaagctggccctgaccaccagcggctgccccctggtgatccagtgcaagaacttcagaacagtgcacttcatcgtgccccgggagcgggactgccacgacatctacaacagcctgctgcagctgagcaagcaggccaagtatgaggacctgtatgccttctcctacaaccccaagcagaatgattctgagcggctgcagggctggcagctgattgacctggccgaggagtacaagaggatgggcgtgcccaacagccactggcagctgagtgatgccaacagagactacaagatctgtgagacctacccccgggagctgtatgtgccccgcatcgccagcaagcccatcatcgtgggcagcagcaagttccgcagcaagggccgcttccctgtgctgagctactaccaccaggacaaggaggccgccatctgccgctgcagccagcccctgagcggcttcagcgcccgctgcctggaggatgagcacctgctgcaggccatcagcaaggccaaccctgtgaaccgctacatgtatgtgatggacacccggcccaagctgaatgccatggccaacagagctgctgggaagggctatgaaaatgaagacaactacagcaacatccgcttccagtttgtgggcatcgagaacatccacgtgatgaggagcagcctgcagaagctgctggaggtgaatggcaccaagggcctgtctgtgaatgacttctacagcggcctggagagcagcggctggctgcggcacatcaaggctgtgatggatgctgccatcttcctggccaaggccatcaccgtggagaatgcctctgtgctggtgcactgcagtgatggctgggacaggaccagccaggtgtgcagcctgggcagcctgctgctggacagctactaccgcaccatcaagggcttcatggtgctgattgagaaggactggatcagctttggccacaagttcagcgagcgctgtggccagctggatggagaccccaaggaggtgtcccctgtgttcacccagttcctggagtgtgtgtggcacctgacagagcagttcccccaggcctttgagttcagcgaggccttcctgctgcagatccacgagcacatccacagctgccagtttggaaacttcctgggcaactgccagaaggagcgggaggagctgaagctgaaggagaagacctacagcctgtggcccttcctgctggaggaccagaagaagtacctgaaccccctgtacagcagcgagagccaccgcttcaccgtgctggagcccaacacagtgtccttcaacttcaagttctggaggaacatgtaccaccagtttgacaggaccctgcacccccggcagagcgtcttcaacatcatcatgaacatgaatgagcagaacaagcagctggagaaggacatcaaggacctggagagcaagatcaagcagaggaagaacaagcagacagatggcatcctgaccaaggagctgctgcacagcgtgcaccctgagagccccaacctgaagaccagcctgtgcttcaaggagcagaccctgctgcctgtgaatgatgccctgcggaccatcgagggcagcagccctgctgacaaccgctacagtgaatatgcagaggagttcagcaagtctgagcctgctgtggtgtccctggagtatggagtggccaggatgacctgctag

SEQ ID NO: 160984 - DNA, 1647 bp, synthetic construct
  misc_feature 1..1647: note = Description of Artificial Sequence: Synthetic coding sequence
  source 1..1647: mol_type = other DNA
atggagcacatccgcaccaccaaggtggagcaggtgaagctgctggaccgcttcagcaccagcaacaagagcctgaccggcaccctgtacctgacagccacccacctgctcttcatcgacagccaccagaaggagacctggatcctgcaccaccacatcgcctctgtggagaagctggccctgaccaccagcggctgccccctggtgatccagtgcaagaacttcagaacagtgcacttcatcgtgccccgggagcgggactgccacgacatctacaacagcctgctgcagctgagcaagcaggccaagtatgaggacctgtatgccttctcctacaaccccaagcagaatgattctgagcggctgcagggctggcagctgattgacctggccgaggagtacaagaggatgggcgtgcccaacagccactggcagctgagtgatgccaacagagactacaagatctgtgagacctacccccgggagctgtatgtgccccgcatcgccagcaagcccatcatcgtgggcagcagcaagttccgcagcaagggccgcttccctgtgctgagctactaccaccaggacaaggaggccgccatctgccgctgcagccagcccctgagcggcttcagcgcccgctgcctggaggatgagcacctgctgcaggccatcagcaaggccaaccctgtgaaccgctacatgtatgtgatggacacccggcccaagctgaatgccatggccaacagagctgctgggaagggctatgaaaatgaagacaactacagcaacatccgcttccagtttgtgggcatcgagaacatccacgtgatgaggagcagcctgcagaagctgctggaggtgaatggcaccaagggcctgtctgtgaatgacttctacagcggcctggagagcagcggctggctgcggcacatcaaggctgtgatggatgctgccatcttcctggccaaggccatcaccgtggagaatgcctctgtgctggtgcactgcagtgatggctgggacaggaccagccaggtgtgcagcctgggcagcctgctgctggacagctactaccgcaccatcaagggcttcatggtgctgattgagaaggactggatcagctttggccacaagttcagcgagcgctgtggccagctggatggagaccccaaggaggtgtcccctgtgttcacccagttcctggagtgtgtgtggcacctgacagagcagttcccccaggcctttgagttcagcgaggccttcctgctgcagatccacgagcacatccacagctgccagtttggaaacttcctgggcaactgccagaaggagcgggaggagctgaagctgaaggagaagacctacagcctgtggcccttcctgctggaggaccagaagaagtacctgaaccccctgtacagcagcgagagccaccgcttcaccgtgctggagcccaacacagtgtccttcaacttcaagttctggaggaacatgtaccaccagtttgacaggaccctgcacccccggcagagcgtcttcaacatcatcatgaacatgaatgagcagaacaagcagctggagaaggacatcaaggacctggagagcctgaccagctacagcagcttcaagatcatcgtgggccagtag

SEQ ID NO: 160985 - DNA, 1647 bp, synthetic construct
  misc_feature 1..1647: note = Description of Artificial Sequence: Synthetic coding sequence
  source 1..1647: mol_type = other DNA
atggagcacatccgcaccaccaaggtggagcaggtgaagctgctggaccgcttcagcaccagcaacaagagcctgaccggcaccctgtacctgacagccacccacctgctcttcatcgacagccaccagaaggagacctggatcctgcaccaccacatcgcctctgtggagaagctggccctgaccaccagcggctgccccctggtgatccagtgcaagaacttcagaacagtgcacttcatcgtgccccgggagcgggactgccacgacatctacaacagcctgctgcagctgagcaagcaggccaagtatgaggacctgtatgccttctcctacaaccccaagcagaatgattctgagcggctgcagggctggcagctgattgacctggccgaggagtacaagaggatgggcgtgcccaacagccactggcagctgagtgatgccaacagagactacaagatctgtgagacctacccccgggagctgtatgtgccccgcatcgccagcaagcccatcatcgtgggcagcagcaagttccgcagcaagggccgcttccctgtgctgagctactaccaccaggacaaggaggccgccatctgccgctgcagccagcccctgagcggcttcagcgcccgctgcctggaggatgagcacctgctgcaggccatcagcaaggccaaccctgtgaaccgctacatgtatgtgatggacacccggcccaagctgaatgccatggccaacagagctgctgggaagggctatgaaaatgaagacaactacagcaacatccgcttccagtttgtgggcatcgagaacatccacgtgatgaggagcagcctgcagaagctgctggaggtgaatggcaccaagggcctgtctgtgaatgacttctacagcggcctggagagcagcggctggctgcggcacatcaaggctgtgatggatgctgccatcttcctggccaaggccatcaccgtggagaatgcctctgtgctggtgcactgcagtgatggctgggacaggaccagccaggtgtgcagcctgggcagcctgctgctggacagctactaccgcaccatcaagggcttcatggtgctgattgagaaggactggatcagctttggccacaagttcagcgagcgctgtggccagctggatggagaccccaaggaggtgtcccctgtgttcacccagttcctggagtgtgtgtggcacctgacagagcagttcccccaggcctttgagttcagcgaggccttcctgctgcagatccacgagcacatccacagctgccagtttggaaacttcctgggcaactgccagaaggagcgggaggagctgaagctgaaggagaagacctacagcctgtggcccttcctgctggaggaccagaagaagtacctgaaccccctgtacagcagcgagagccaccgcttcaccgtgctggagcccaacacagtgtccttcaacttcaagttctggaggaacatgtaccaccagtttgacaggaccctgcacccccggcagagcgtcttcaacatcatcatgaacatgaatgagcagaacaagcagctggagaaggacatcaaggacctggagagcttcaccagctttgctgctgcccgggtcatccagggccagtag

SEQ ID NO: 160986 - DNA, 1983 bp, synthetic construct
  misc_feature 1..1983: note = Description of Artificial Sequence: Synthetic coding sequence
  source 1..1983: mol_type = other DNA
atggagcacatccgcacccccaaggtggagaatgtgcggctggtggacagagtgagccccaagaaggccgccctgggcaccctgtacctgacagccacccacgtgatctttgtggagaacagcccagaccccaggaaggagacctggatcctgcacagccagatcagcaccatcgagaagcaggccaccacagccaccggctgccccctgctgatccgctgcaagaacttccagatcatccagctgatcatcccccaggagcgggactgccatgatgtgtacatcagcctcatccggctggcccggcctgtgaagtatgaggagctgtactgcttctccttcaaccccatgctggacaaggaggagcgggagcagggctgggtgctgattgacctgtctgaggagtacaccaggatgggcctgcccaaccactactggcagctgagtgatgtgaacagagactacagagtgtgtgacagctaccccacagagctgtatgtgcccaagagcgccacagcccacatcatcgtgggcagcagcaagttccgcagcagaagacgcttccctgtgctgagctactactacaaggacaaccacgccagcatctgccgcagcagccagcccctgagcggcttcagcgcccgctgcctggaggatgagcagatgctgcaggccatcaggaaggccaaccctggcagtgactttgtgtatgtggtggacacccggcccaagctgaatgccatggccaacagagctgctgggaagggctatgaaaatgaagacaactacagcaacatcaagttccagttcatcggcatcgagaacatccacgtgatgaggaacagcctgcagaagatgctggaggtgtgtgagctgaagagccccagcatgtctgacttcctgtggggcctggagaacagcggctggctgcggcacatcaaggccatcatggatgctggcatcttcatcgccaaggctgtgtctgaggagggcgcctctgtgctggtgcactgcagtgatggctgggacagaacagcccaggtgtgcagcgtggccagcctgctgctggacccccactaccgcaccctgaagggcttcatggtgctgattgagaaggactggatcagctttggccacaagttcaaccacagatatggcaacctggatggagaccccaaggagatcagccctgtgattgaccagttcattgaatgtgtgtggcagctgatggagcagttcccctgtgcctttgagttcaatgaacgcttcctgatccacatccagcaccacatctacagctgccagtttggaaacttcctgtgcaacagccagaaggagcggcgggagctgaagatccaggagaggacctacagcctgtgggcccacctgtggaagaacagagctgactacctgaaccccctcttccgggctgaccacagccagacccagggcaccctgcacctgcccaccaccccctgcaacttcatgtacaagttctggagcggcatgtacaacagatttgagaagggcatgcagccccggcagagcgtgacagactacctgatggctgtgaaggaggagacccagcagctggaggaggagctggaggccctggaggagcggctggagaagatccagaaggtgcagctgaactgcaccaaggtgaagagcaagcagagcgagcccagcaagcacagcggcttcagcaccagtgacaacagcatcgccaacaccccccaggactacagcggcaacatgaagagcttccccagccgcagccccagccagggagatgaagattctgccctgatcctgacccaggacaacctgaagagcagtgaccctgacctgagcgccaacagcgaccaggagagcggcgtggaggacctgagctgccgcagccccagcggcggggagcacgcccccagcgaggacagcggcaaggaccgggacagtgatgaagctgtgttcctgacagcctag

SEQ ID NO: 160987 - DNA, 756 bp, synthetic construct
  misc_feature 1..756: note = Description of Artificial Sequence: Synthetic coding sequence
  source 1..756: mol_type = other DNA
atggagcagttcccctgtgcctttgagttcaatgaacgcttcctgatccacatccagcaccacatctacagctgccagtttggaaacttcctgtgcaacagccagaaggagcggcgggagctgaagatccaggagaggacctacagcctgtgggcccacctgtggaagaacagagctgactacctgaaccccctcttccgggctgaccacagccagacccagggcaccctgcacctgcccaccaccccctgcaacttcatgtacaagttctggagcggcatgtacaacagatttgagaagggcatgcagccccggcagagcgtgacagactacctgatggctgtgaaggaggagacccagcagctggaggaggagctggaggccctggaggagcggctggagaagatccagaaggtgcagctgaactgcaccaaggtgaagagcaagcagagcgagcccagcaagcacagcggcttcagcaccagtgacaacagcatcgccaacaccccccaggactacagcggcaacatgaagagcttccccagccgcagccccagccagggagatgaggacagcgccctgatcctgacccaggacaacctgaagagcagtgaccctgacctgagcgccaacagcgaccaggagagcggcgtggaggacctgagctgccgcagccccagcggcggggagcacgcccccagtgaagattctgggaaggaccgggacagtgatgaggccgtgttcctgacagcctag

SEQ ID NO: 160988 - DNA, 1668 bp, synthetic construct
  misc_feature 1..1668: note = Description of Artificial Sequence: Synthetic coding sequence
  source 1..1668: mol_type = other DNA
atggagcacatccgcacccccaaggtggagaatgtgcggctggtggacagagtgagccccaagaaggccgccctgggcaccctgtacctgacagccacccacgtgatctttgtggagaacagcccagaccccaggaaggagacctggatcctgcacagccagatcagcaccatcgagaagcaggccaccacagccaccggctgccccctgctgatccgctgcaagaacttccagatcatccagctgatcatcccccaggagcgggactgccatgatgtgtacatcagcctcatccggctggcccggcctgtgaagtatgaggagctgtactgcttctccttcaaccccatgctggacaaggaggagcgggagcagggctgggtgctgattgacctgtctgaggagtacaccaggatgggcctgcccaaccactactggcagctgagtgatgtgaacagagactacagagtgtgtgacagctaccccacagagctgtatgtgcccaagagcgccacagcccacatcatcgtgggcagcagcaagttccgcagcagaagacgcttccctgtgctgagctactactacaaggacaaccacgccagcatctgccgcagcagccagcccctgagcggcttcagcgcccgctgcctggaggatgagcagatgctgcaggccatcaggaaggccaaccctggcagtgactttgtgtatgtggtggacacccggcccaagctgaatgccatggccaacagagctgctgggaagggctatgaaaatgaagacaactacagcaacatcaagttccagttcatcggcatcgagaacatccacgtgatgaggaacagcctgcagaagatgctggaggtgtgtgagctgaagagccccagcatgtctgacttcctgtggggcctggagaacagcggctggctgcggcacatcaaggccatcatggatgctggcatcttcatcgccaaggctgtgtctgaggagggcgcctctgtgctggtgcactgcagtgatggctgggacagaacagcccaggtgtgcagcgtggccagcctgctgctggacccccactaccgcaccctgaagggcttcatggtgctgattgagaaggactggatcagctttggccacaagttcaaccacagatatggcaacctggatggagaccccaaggagatcagccctgtgattgaccagttcattgaatgtgtgtggcagctgatggagcagttcccctgtgcctttgagttcaatgaacgcttcctgatccacatccagcaccacatctacagctgccagtttggaaacttcctgtgcaacagccagaaggagcggcgggagctgaagatccaggagaggacctacagcctgtgggcccacctgtggaagaacagagctgactacctgaaccccctcttccgggctgaccacagccagacccagggcaccctgcacctgcccaccaccccctgcaacttcatgtacaagttctggagcggcatgtacaacagatttgagaagggcatgcagccccggcagagcgtgacagactacctgatggctgtgaaggaggagacccagcagctggaggaggagctggaggccctggaggaggtgcgccacacctgctttgtgaacctcttctctgtgctgatctcctag

SEQ ID NO: 160989 - DNA, 1773 bp, synthetic construct
  misc_feature 1..1773: note = Description of Artificial Sequence: Synthetic coding sequence
  source 1..1773: mol_type = other DNA
ctggacctgctggtgcccaaggtggagaatgtgaagctggtggacagatatgtgtccaagaagccagccaacggcatcctgtacctgacagccacccacctgatctacgtggaggccagcggggccgccaggaaggagacctggatcgccctgcaccacatcgccaccgtggagaagctgcccatcaccagcctgggctgccccctgaccctgcgctgcaagaacttccgggtggcccactttgtgctggacagcgacctggtgtgccacgaggtgtacatcagcctgctgaagctgagccagcctgccctgcctgaggacctgtatgccttctcctacaaccccaagagcagcaaggagatgagggagagcggctggaagctgattgaccccatcagtgactttggaaggatgggcatccccaacagaaactggaccatcacagatgccaacatccgcttccgcttcatgggcatcgagaacatccacgtgatgaggagcagcctgcagaagctgctggaggtgtgtgagctgaagacccccaccatgtctgagttcctgagcggcctggagagcagcggctggctgcggcacatcaaggccatcatggatgctggcatcttcatcaccaaggctgtgaaggtggagaaggcctctgtgctggtgcactgcagtgatggctgggacagaacagcccaggtgtgcagcgtggccagcatcctgctggaccccttctaccgcaccttcaagggcctgatgatcctgattgagaaggagtggatctccatgggccacaagttcagccagagatgtggccacctggatggagacagcaaggaggtgagccccatcttcacccagttcctggactgcatctggcagctgatggagcagttcccctgtgcctttgagttcaatgaaaacttcctgctggagatccatgaccacgtgttcagctgccagtttggaaacttcctgggcaactgccagaaggaccgggaggacctgcgggtgtatgagaagacccacagcgtgtggcccttcctggtgcagaggaagccagacttcaggaaccccctgtacaagggcttcaccatgtatggagtgctgaaccccagcacagtgccctacaacatccagttctggtgtggcatgtacaacagatttgataaaggcctgcagcccaagcagagcatgctggagagcctgctggagatcaagaagcagagggccatgctggagacagatgtgcatgagctggagaagaagctgaaggtgagagatgagcccccagaggagatctgcacctgcagccagctgggcaacatcctgagccagcacctgggcagccccctgaccaaccccctgggcttcatgggcatcaacggggacctgaacaccctgatggagaatggcaccctgagccgggagggcggcctgcgggcccagatggaccaggtgaagagccagggcgctgacctgcaccacaactgctgtgaaattgtgggcagcctgcgggccatcaacatctctggagatgtgggcatcagcgaggccatgggcatcagcggggacatgtgcacctttgaggccaccggcttcagcaaggacctgggcatctgtggggccatggacatcagcgaggccaccggcatcagcggcaacctgggcatcagcgaggcccggggcttcagcggggacatgggcatcctgggggacaccggcatcagcaaggccagcaccaaggaggccgactacagcaagcaccagtag

SEQ ID NO: 160990 - DNA, 2115 bp, synthetic construct
  misc_feature 1..2115: note = Description of Artificial Sequence: Synthetic coding sequence
  source 1..2115: mol_type = other DNA
atggaccacatcaccgtgcccaaggtggagaatgtgaagctggtggaccgctacgtgtccaagaagccagccaacggcatcctgtacctgacagccacccacctgatctacgtggaggccagcggggccgccaggaaggagacctggatcgccctgcaccacatcgccaccgtggagaagctgcccatcaccagcctgggctgccccctgaccctgcgctgcaagaacttccgggtggcccactttgtgctggacagcgacctggtgtgccacgaggtgtacatcagcctgctgaagctgagccagcctgccctgcctgaggacctgtatgccttctcctacaaccccaagagcagcaaggagatgagggagagcggctggaagctgattgaccccatcagtgactttggccgcatgggcatccccaacagaaactggaccatcacagatgccaacagaaattatgagatctgcagcacctacccacctgagatcgtggtgcccaagtctgtgaccctgggcaccgtggtgggcagcagcaagttccgcagcaaggagcgggtgcctgtgctgagctacctgtacaaggaaaataatgctgccatctgccgctgcagccagcccctgagcggcttctacacccgctgtgtggatgatgagctgctgctggaggccatcagccagaccaaccctggcagccagttcatgtatgtggtggacacccggcccaagctgaatgccatggccaacagagctgctgggaagggctatgaaaatgaagacaactatgccaacatccgcttccgcttcatgggcatcgagaacatccacgtgatgaggagcagcctgcagaagctgctggaggtgtgtgagctgaagacccccaccatgtctgagttcctgagcggcctggagagcagcggctggctgcggcacatcaaggccatcatggatgctggcatcttcatcaccaaggctgtgaaggtggagaaggcctctgtgctggtgcactgcagtgatggctgggacagaacagcccaggtgtgcagcgtggccagcatcctgctggaccccttctaccgcaccttcaagggcctgatgatcctgattgagaaggagtggatctccatgggccacaagttcagccagagatgtggccacctggatggagacagcaaggaggtgagccccatcttcacccagttcctggactgcatctggcagctgatggagcagttcccctgtgcctttgagttcaatgaaaacttcctgctggagatccatgaccacgtgttcagctgccagtttggaaacttcctgggcaactgccagaaggaccgggaggacctgcgggtgtatgagaagacccacagcgtgtggcccttcctggtgcagaggaagccagacttcaggaaccccctgtacaagggcttcaccatgtatggagtgctgaaccccagcacagtgccctacaacatccagttctggtgtggcatgtacaacagatttgataaaggcctgcagcccaagcagagcatgctggagagcctgctggagatcaagaagcagagggccatgctggagacagatgtgcatgagctggagaagaagctgaaggtgagagatgagcccccagaggagatctgcacctgcagccagctgggcaacatcctgagccagcacctgggcagccccctgaccaaccccctgggcttcatgggcatcaacggggacctgaacaccctgatggagaatggcaccctgagccgggagggcggcctgcgggcccagatggaccaggtgaagagccagggcgctgacctgcaccacaactgctgtgaaattgtgggcagcctgcgggccatcaacatctctggagatgtgggcatcagcgaggccatgggcatcagcggggacatgtgcacctttgaggccaccggcttcagcaaggacctgggcatctgtggggccatggacatcagcgaggccaccggcatcagcggcaacctgggcatcagcgaggcccggggcttcagcggggacatgggcatcctgggggacaccggcatcagcaaggccagcaccaaggaggccgactacagcaagcaccagtag

SEQ ID NO: 160991 - DNA, 1527 bp, synthetic construct
  misc_feature 1..1527: note = Description of Artificial Sequence: Synthetic coding sequence
  source 1..1527: mol_type = other DNA
tgagattctgacctggtgtgccacgaggtgtacatcagcctgctgaagctgagccagcctgccctgcctgaggacctgtatgccttctcctacaaccccaagagcagcaaggagatgagggagagcggctggaagctgattgaccccatcagtgactttggaaggatgggcatccccaacagaaactggaccatcacagatgccaacatccgcttccgcttcatgggcatcgagaacatccacgtgatgaggagcagcctgcagaagctgctggaggtgtgtgagctgaagacccccaccatgtctgagttcctgagcggcctggagagcagcggctggctgcggcacatcaaggccatcatggatgctggcatcttcatcaccaaggctgtgaaggtggagaaggcctctgtgctggtgcactgcagtgatggctgggacagaacagcccaggtgtgcagcgtggccagcatcctgctggaccccttctaccgcaccttcaagggcctgatgatcctgattgagaaggagtggatctccatgggccacaagttcagccagagatgtggccacctggatggagacagcaaggaggtgagccccatcttcacccagttcctggactgcatctggcagctgatggagcagttcccctgtgcctttgagttcaatgaaaacttcctgctggagatccatgaccacgtgttcagctgccagtttggaaacttcctgggcaactgccagaaggaccgggaggacctgcgggtgtatgagaagacccacagcgtgtggcccttcctggtgcagaggaagccagacttcaggaaccccctgtacaagggcttcaccatgtatggagtgctgaaccccagcacagtgccctacaacatccagttctggtgtggcatgtacaacagatttgataaaggcctgcagcccaagcagagcatgctggagagcctgctggagatcaagaagcagagggccatgctggagacagatgtgcatgagctggagaagaagctgaaggtgagagatgagcccccagaggagatctgcacctgcagccagctgggcaacatcctgagccagcacctgggcagccccctgaccaaccccctgggcttcatgggcatcaacggggacctgaacaccctgatggagaatggcaccctgagccgggagggcggcctgcgggcccagatggaccaggtgaagagccagggcgctgacctgcaccacaactgctgtgaaattgtgggcagcctgcgggccatcaacatctctggagatgtgggcatcagcgaggccatgggcatcagcggggacatgtgcacctttgaggccaccggcttcagcaaggacctgggcatctgtggggccatggacatcagcgaggccaccggcatcagcggcaacctgggcatcagcgaggcccggggcttcagcggggacatgggcatcctgggggacaccggcatcagcaaggccagcaccaaggaggccgactacagcaagcaccagtag

SEQ ID NO: 160992 - DNA, 2082 bp, synthetic construct
  misc_feature 1..2082: note = Description of Artificial Sequence: Synthetic coding sequence
  source 1..2082: mol_type = other DNA
atggaccacatcaccgtgcccaaggtggagaatgtgaagctggtggaccgctacgtgtccaagaagccagccaacggcatcctgtacctgacagccacccacctgatctacgtggaggccagcggggccgccaggaaggagacctggatcgccctgcaccacatcgccaccgtggagaagctgcccatcaccagcctgggctgccccctgaccctgcgctgcaagaacttccgggtggcccactttgtgctggacagcgacctggtgtgccacgaggtgtacatcagcctgctgaagctgagccagcctgccctgcctgaggacctgtatgccttctcctacaaccccaagagcagcaaggagatgagggagagcggctggaagctgattgaccccatcagtgactttggccgcatgggcatccccaacagaaactggaccatcacagatgccaacagaaattatgagatctgcagcacctacccacctgagatcgtggtgcccaagtctgtgaccctgggcaccgtggtgggcagcagcaagttccgcagcaaggagcgggtgcctgtgctgagctacctgtacaaggaaaataatgctgccatctgccgctgcagccagcccctgagcggcttctacacccgctgtgtggatgatgagctgctgctggaggccatcagccagaccaaccctggcagccagttcatgtatgtggtggacacccggcccaagctgaatgccatggccaacagagctgctgggaagggctatgaaaatgaagacaactatgccaacatccgcttccgcttcatgggcatcgagaacatccacgtgatgaggagcagcctgcagaagctgctggaggtgtgtgagctgaagacccccaccatgtctgagttcctgagcggcctggagagcagcggctggctgcggcacatcaaggccatcatggatgctggcatcttcatcaccaaggctgtgaaggtggagaaggcctctgtgctggtgcactgcagtgatggctgggacagaacagcccaggtgtgcagcgtggccagcatcctgctggaccccttctaccgcaccttcaagggcctgatgatctggcacttcctggtgctgatcatgagaattgtgctgcagctggccaagatgaacctgatggacatcaccaagatcttcagcctgctgcagcctgacaaggaggaggaggacacagacacagaggagaagcaggccctgaaccaggccgtgtatgacaatgacagctacaccctggaccagctgctgcggcaggagcgctacaagcgcttcatcaacagccgcagcggctggggcgtgcccggcacccccctgcggctggccgccagctatggccacctgagctgcctgcaggtgctgctggcccacggggctgatgtggacagcctggatgtgaaggcccagacccccctcttcaccgctgtgagccacggccacctggactgtgtgcgggtgctgctggaggccggggccagccctgggggcagcatctacaacaactgcagccctgtgctgacagctgccagagatggagctgtggccatcctgcaggagctgctggaccacggggctgaggccaacgtgaaggccaagctgcctgtgtgggccagcaacatcgccagctgcagcggccccctgtacctggccgctgtgtatggccacctggactgcttccggctgctgctgctgcacggggctgaccctgactacaactgcacagaccagggcctgctggcccgggtgccccggcccaggaccctgctggagatctgcctgcaccacaactgtgagcctgagtacatccagctgctgattgactttggagccaacatctacctgcccagcctgagcctggacctgaccagccaggatgacaagggcatcgccctgctgctgcaggcccgggccacccccaggagcctgctgagccaggtgcggctggtggtgcggcgggccctgtgccaggccggccagccccaggccatcaaccagctggacatcccccccatgctgatctcctacctgaagcaccagctgtag

SEQ ID NO: 160993 - DNA, 861 bp, synthetic construct
  misc_feature 1..861: note = Description of Artificial Sequence: Synthetic coding sequence
  source 1..861: mol_type = other DNA
atgggcggggagaggtctggagtgcggggcaacaagatggctgctgctgagcccagccccaggagagtgggctttgtgggcgccggccgcatggccggggccatcgcccagggcctcatccgggccggcaaggtggaggcccagcacatcctggccagcgcccccacagacaggaacctgtgccacttccaggccctgggctgcaggaccacccacagcaaccaggaggtgctgcagagctgcctgctggtgatctttgccaccaagccccacgtgctgcctgctgtgctggccgaggtggcccctgtggtgaccacagagcacatcctggtgtctgtggccgccggcgtgtccctgagcaccctggaggagctgctgccccccaacaccagggtgctgcgggtgctgcccaacctgccctgtgtggtgcaggagggcgccatcgtgatggcccggggcagacatgtgggcagcagcgagaccaagctgctgcagcacctgctggaggcctgtggccgctgtgaggaggtgcctgaggcctacgtggacatccacacaggcctgagcggcagcggcgtggcctttgtgtgtgccttcagcgaggccctggccgagggcgctgtgaagatgggcatgcccagcagcctggcccacagaattgctgcccagaccctgctgggcacagccaagatgctgctgcacgagggccagcacccagcccagctgcggagtgatgtgtgcaccccaggcggcaccaccatctacggcctgcacgccctggagcagggcggcctgcgggccgccaccatgtctgctgtggaggccgccacctgccgggccaaggagctgagcaggaagtag

SEQ ID NO: 160994 - DNA, 900 bp, synthetic construct
  misc_feature 1..900: note = Description of Artificial Sequence: Synthetic coding sequence
  source 1..900: mol_type = other DNA
atgcccctgagcggcaccccagcccccaacaagaagaggaagagcagcaagctgatcatggagctgactggaggcggccaggagagcagcggcctgaacctgggcaagaagatctctgtgcccagagatgtgatgctggaggagctgagcctgctgaccaacagaggcagcaagatgttcaagctgcggcagatgagggtggagaagttcatctatgagaaccacccagatgtgttcagtgacagctccatggaccacttccagaagttcctgcccaccgtgggcggccagctgggcacagctggccagggcttctcctacagcaagagcaatggccggggcggcagccaggccggcggcagcggcagcgctggccagtatggcagtgaccagcagcaccacctgggcagcggcagcggggccggcggcaccggcggccctgctggccaggccggccggggcggcgctgctggaacagctggggtgggggagactggaagtggggaccaggccggcggggagggcaagcacatcaccgtcttcaagacctacatcagcccctgggagcgggccatgggcgtggacccccagcagaagatggagctgggcatcgacctgctggcctatggagccaaggccgagctgcccaagtacaagagcttcaacagaacagccatgccctacggcggctatgagaaggccagcaagaggatgaccttccagatgcccaagtttgacctgggccccctgctgtctgagcccctggtgctgtacaaccagaacctgagcaaccggcccagcttcaacagaacacccatcccctggctgagcagcggggagcctgtggactacaacgtggacatcggcatccccctggatggagaaacagaggagctgtag

SEQ ID NO: 160995 - DNA, 795 bp, synthetic construct
  misc_feature 1..795: note = Description of Artificial Sequence: Synthetic coding sequence
  source 1..795: mol_type = other DNA
atgctgagccacaacaccatgatgaagcagaggaagcagcaggccacagccatcatgaaggaggtgcatggaaatgatgtggatggcatggacctgggcaagaaggtgtccatcccccgggacatcatgctggaggagctgagccacctgagcaacagaggagcccggctcttcaagatgaggcagaggagaagtgacaagtacacctttgagaacttccagtaccagagccgggcccagatcaaccacagcatcgccatgcagaatggcaaggtggatggcagcaacctggagggcggcagccagcaggcccccctgaccccacccaacaccccagaccccaggagcccccccaacccagacaacatcgcccctggctacagcggccccctgaaggagatccccccagagaagttcaacaccacagctgtgcccaagtactaccagagcccctgggagcaggccatcagcaatgaccctgagctgctggaggccctgtaccccaagctgttcaagccagagggcaaggccgagctgcctgactaccgctccttcaacagagtggccaccccatttggaggctttgagaaggccagcaggatggtgaagttcaaggtgcctgactttgagctgctgctgctgacagacccccgcttcatgagctttgtgaaccccctgtctggaagaagaagcttcaacagaacacccaagggctggatcagcgagaacatccccatcgtcatcaccacagagcccacagatgacaccaccgtgcctgagagcgaggacctgtag

SEQ ID NO: 160996 - DNA, 756 bp, synthetic construct
  misc_feature 1..756: note = Description of Artificial Sequence: Synthetic coding sequence
  source 1..756: mol_type = other DNA
atgatccccaaggagcagaagggccctgtgatggccgccatgggagacctgacagagcctgtgcccaccctggacctgggcaagaagctgtctgtgccccaggacctgatgatggaggagctgagcctgaggaacaacagaggcagcctgctcttccagaagaggcagaggagagtgcagaagttcacctttgagctggccgccagccagagggccatgctggccggcagcgcccggaggaaggtgactggaacagctgagagcggcaccgtggccaatgccaatggacctgagggccccaactacagaagtgagctgcacatcttccctgccagccctggggccagcctgggcggccctgagggcgcccaccctgctgctgccccagctggctgtgtgcccagccccagcgccctggcccctggctacgccgagcccctgaagggcgtgcccccagagaagttcaaccacacagccatcagcaagggctaccgctgcccctggcaggagtttgtgtcctacagagactaccagagtgatggccgcagccacacccccagccccaatgactacagaaacttcaacaagacccctgtgccctttggaggccccctggtgggcggcaccttccccaggcctggcacccccttcatccctgagcccctgagcggcctggagctgctgcggctgcggcccagcttcaacagagtggcccagggctgggtgaggaacctgcctgagagcgaggagctgtag

SEQ ID NO: 160997 - DNA, 756 bp, synthetic construct; identical to SEQ ID NO: 160996
  misc_feature 1..756: note = Description of Artificial Sequence: Synthetic coding sequence
  source 1..756: mol_type = other DNA

SEQ ID NO: 160998 - DNA, 1989 bp, synthetic construct
  misc_feature 1..1989: note = Description of Artificial Sequence: Synthetic coding sequence
  source 1..1989: mol_type = other DNA
atggtggtgtctgaggtggacatcgccaaggctgaccctgctgctgccagccaccccctgctgctgaatggagatgccaccgtggcccagaagaaccctggctctgtggccgagaacaacctgtgcagccagtatgaggagaaggtgcggccctgcatcgacctgattgacagcctgcgggccctgggcgtggagcaggacctggccctgcctgccatcgccgtcatcggggaccagagcagcggcaagagctctgtgctggaggccctgtctggagtggccctgccccggggcagcggcatcgtgacccgctgccccctggtgctgaagctgaagaagctggtgaatgaagacaagtggaggggcaaggtgtcctaccaggactatgaaattgagatcagtgatgccagcgaggtggagaaggagatcaacaaggcccagaatgccatcgccggggagggcatgggcatcagccatgagctgatcaccctggagatcagcagcagagatgtgcctgacctgaccctgattgacctgcccggcatcaccagggtggccgtgggcaaccagcctgctgacatcggctacaagatcaagaccctcatcaagaagtacatccagaggcaggagaccatcagcctggtggtggtgcccagcaatgtggacatcgccaccacagaggccctgtccatggcccaggaggtggaccctgagggggacaggaccatcggcatcctgaccaagccagacctggtggacaagggcacagaggacaaggtggtggatgtggtgaggaacctggtgttccacctgaagaagggctacatgattgtgaagtgccggggccagcaggagatccaggaccagctgagcctgtctgaggccctgcagcgggagaagatcttctttgagaaccacccctacttccgggacctgctggaggagggcaaggccaccgtgccctgcctggccgagaagctgaccagcgagctgatcacccacatctgcaagagcctgcccctgctggagaaccagatcaaggagacccaccagaggatcacagaggagctgcagaagtatggagtggacatcccagaagatgaaaatgagaagatgttcttcctgattgacaaggtgaatgccttcaaccaggacatcacagccctgatgcagggcgaggagaccgtgggggaggaggacatccgcctcttcacccggctgcggcatgagttccacaagtggagcaccatcatcgagaacaacttccaggagggccacaagatcctgagcaggaagatccagaagtttgagaaccagtaccggggccgggagctgcccggctttgtgaactaccgcacctttgagaccatcgtgaagcagcagatcaaggccctggaggagcctgctgtggacatgctgcacacagtgacagacatggtgcggctggccttcacagatgtgtccatcaagaactttgaggagttcttcaacctgcacaggacagccaagagcaagattgaggacatccgggcagagcaggagcgggagggggagaagctgatccggctgcacttccagatggagcagatcgtgtactgccaggaccaggtgtacagaggagccctgcagaaggtgcgggagaaggagctggaggaggagaagaagaagaagtcctgggactttggagccttccagagcagcagcgccacagacagctccatggaggagatcttccagcacctgatggcctaccaccaggaggccagcaagaggatcagcagccacatccccctcatcatccagttcttcatgctgcagacctacggccagcagctgcagaaggccatgctgcagctgctgcaggacaaggacacctacagctggctgctgaaggagaggagtgacaccagtgacaagaggaagttcctgaaggagcggctggcccggctgacccaggcccggcggcggctggcccagtttcctggatag

SEQ ID NO: 160999 - DNA, 1989 bp, synthetic construct; identical to SEQ ID NO: 160998
  misc_feature 1..1989: note = Description of Artificial Sequence: Synthetic coding sequence
  source 1..1989: mol_type = other DNA

SEQ ID NO: 161000 - DNA, 207 bp, synthetic construct
  misc_feature 1..207: note = Description of Artificial Sequence: Synthetic coding sequence
  source 1..207: mol_type = other DNA
atggtggtgtctgaggtggacatcgccaaggctgaccctgctgctgccagccaccccctgctgctgaatggagatgccaccgtggcccagaagaaccctggctctgtggccgagaacaacctgtgcagccagtatgaggagaaggtgcggccctgcatcgacctgattgacagcctgcgggccctgggcgtggagcaggacctgtag

SEQ ID NO: 161001 - DNA, 606 bp, synthetic construct
  misc_feature 1..606: note = Description of Artificial Sequence: Synthetic coding sequence
  source 1..606: mol_type = other DNA
atggtggtgtctgaggtggacatcgccaaggctgaccctgctgctgccagccaccccctgctgctgaatggagatgccaccgtggcccagaagaaccctggctctgtggccgagaacaacctgtgcagccagtatgaggagaaggtgcggccctgcatcgacctgattgacagcctgcgggccctgggcgtggagcaggacctggccctgcctgccatcgccgtcatcggggaccagagcagcggcaagagctctgtgctggaggccctgtctggagtggccctgccccggggcagcggcatcgtgacccgctgccccctggtgctgaagctgaagaagctggtgaatgaagacaagtggaggggcaaggtgtcctaccaggactatgaaattgagatcagtgatgccagcgaggtggagaaggagatcaacaaggcccagaatgccatcgccggggagggcatgggcatcagccatgagctgatcaccctggagatcagcagcagagatgtgcctgacctgaccctgattgacctgcccggcatcaccagggtggccgtgggcaaccagcctgctgacatcggctacaagatcaagaccctgtag

SEQ ID NO: 161002 - DNA, 81 bp, synthetic construct
  misc_feature 1..81: note = Description of Artificial Sequence: Synthetic coding sequence
  source 1..81: mol_type = other DNA
atggtggtgtctgaggtggacatcgccaaggctgaccctgctgctgccagccaccccctgctgctgaatggagatgcctag

SEQ ID NO: 161003 - DNA, 594 bp, synthetic construct
  misc_feature 1..594: note = Description of Artificial Sequence: Synthetic coding sequence
  source 1..594: mol_type = other DNA
atggtggtgtctgaggtggacatcgccaaggctgaccctgctgctgccagccaccccctgctgctgaatggagatgccaccgtggcccagaagaaccctggctctgtggccgagaacaacctgtgcagccagtatgaggagaaggtgcggccctgcatcgacctgattgacagcctgcgggccctgggcgtggagcaggacctggccctgcctgccatcgccgtcatcggggaccagagcagcggcaagagctctgtgctggaggccctgtctggagtggccctgccccggggcagcggcatcgtgacccgctgccccctggtgctgaagctgaagaagctggtgaatgaagacaagtggaggggcaaggtgtcctaccaggactatgaaattgagatcagtgatgccagcgaggtggagaaggagatcaacaaggcccagaatgccatcgccggggagggcatgggcatcagccatgagctgatcaccctggagatcagcagcagagatgtgcctgacctgaccctgattgacctgcccggcatcaccagggtggccgtgggcaaccagcctgctgacatcggctacaagtag

SEQ ID NO: 161004 - DNA, 108 bp, synthetic construct
  misc_feature 1..108: note = Description of Artificial Sequence: Synthetic coding sequence
  source 1..108: mol_type = other DNA
atggtggtgtctgaggtggacatcgccaaggctgaccctgctgctgccagccaccccctgctgctgaatggagatgccaccgtggcccagaagaaccctggcagctag

SEQ ID NO: 161005 - DNA, 234 bp, synthetic construct
  misc_feature 1..234: note = Description of Artificial Sequence: Synthetic coding sequence
  source 1..234: mol_type = other DNA
atggtggtgtctgaggtggacatcgccaaggctgaccctgctgctgccagccaccccctgctgctgaatggagatgccaccgtggcccagaagaaccctggctctgtggccgagaacaacctgtgcagccagtatgaggagaaggtgcggccctgcatcgacctgattgacagcctgcgggccctgggcgtggagcaggacctggccctgcctgccatcgccgtcatcggctag

SEQ ID NO: 161006 - DNA, 1989 bp, synthetic construct; identical to SEQ ID NO: 160998
  misc_feature 1..1989: note = Description of Artificial Sequence: Synthetic coding sequence
  source 1..1989: mol_type = other DNA

SEQ ID NO: 161007 - DNA, 2148 bp, synthetic construct
  misc_feature 1..2148: note = Description of Artificial Sequence: Synthetic coding sequence
  source 1..2148: mol_type = other DNA
atgagcaaggcccacaagccctggccctacagaagaagaagccagttcagcagcaggaagtacctgaagaaggagatgaacagcttccagcagcagcccccacccttcggcaccgtgcccccccagatgatgttcccccccaactggcagggcgctgagaaggatgctgccttcctggccaaggacttcaacttcctgaccctgaacaaccagcccccacctggcaacagaagccagccccgggccatgggccctgagaacaacctgtacagccagtatgagcagaaggtgcggccctgcatcgacctgattgacagcctgcgggccctgggcgtggagcaggacctggccctgcctgccatcgccgtcatcggggaccagagcagcggcaagagctctgtgctggaggccctgtctggagtggccctgccccggggcagcggcatcgtgacccgctgccccctggtgctgaagctgaagaagcagccctgtgaggcctgggccggccgcatctcctacagaaacacagagctggagctgcaggaccccggccaggtggagaaggagatccacaaggcccagaatgtgatggctggaaatggccggggcatcagccatgagctgatcagcctggagatcaccagccctgaggtgcctgacctgaccatcatcgacctgcccggcatcaccagggtggccgtggacaaccagccccgggacatcggcctgcagatcaaggccctgatcaagaagtacatccagaggcagcagaccatcaacctggtggtggtgccctgcaatgtggacatcgccaccacagaggccctgtccatggcccacgaggtggaccctgagggggacaggaccatcggcatcctgaccaagccagacctgatggaccggggcacagagaagtctgtgatgaatgtggtgaggaacctgacctaccccctgaagaagggctacatgattgtgaagtgccggggccagcaggagatcaccaaccggctgagcctggccgaggccaccaagaaggagatcaccttcttccagacccacccctacttccgggtgctgctggaggagggcagcgccaccgtgccccggctggccgagcggctgaccacagagctgatcatgcacatccagaagagcctgcccctgctggagggccagatccgggagagccaccagaaggccacagaggagctgcggcgctgtggggctgacatccccagccaggaggccgacaagatgttcttcctgattgagaagatcaagatgttcaaccaggacatcgagaagctggtggagggggaggaggtggtgagagaaaatgagacccggctgtacaacaagatccgggaggacttcaagaactgggtgggcatcctggccaccaacacccagaaggtgaagaacatcatccacgaggaggtggagaagtatgagaagcagtaccggggcaaggagctgctgggctttgtgaactacaagacctttgagatcatcgtgcaccagtacatccagcagctggtggagcccgccctgtccatgctgcagaaggccatggagatcatccagcaggccttcatcaacgtggccaagaagcactttggagagttcttcaacctgaaccagacagtgcagagcaccatcgaggacatcaaggtgaagcacacagccaaggccgagaacatgatccagctgcagttcaggatggagcagatggtgttctgccaggaccagatctacagcgtggtgctgaagaaggtgcgggaggagatcttcaaccccctgggcacccccagccagaacatgaagctgaacagccacttccccagcaatgaatcttctgtgagcagcttcacagagatcggcatccacctgaatgcctacttcctggagaccagcaagaggctggccaaccagatccccttcatcatccagtacttcatgctgcgggagaatggagacagcctgcagaaggccatgatgcagatcctgcaggagaagaaccgctacagctggctgctgcaggagcagagcgagacagccaccaagaggcgcatcctgaaggagcgcatctaccgcctgacccaggcccggcatgccctgtgccagttcagcagcaaggagatccactag

SEQ ID NO: 161008 - DNA, 45 bp, synthetic construct; identical to SEQ ID NO: 90212
  misc_feature 1..45: note = Description of Artificial Sequence: Synthetic coding sequence
  source 1..45: mol_type = other DNA

SEQ ID NO: 161009 - DNA, 405 bp, synthetic construct
  misc_feature 1..405: note = Description of Artificial Sequence: Synthetic coding sequence
  source 1..405: mol_type = other DNA
atgagcaaggcccacaagccctggccctacagaagaagaagccagttcagcagcaggaagtacctgaagaaggagatgaacagcttccagcagcagcccccacccttcggcaccgtgcccccccagatgatgttcccccccaactggcagggcgctgagaaggatgctgccttcctggccaaggacttcaacttcctgaccctgaacaaccagcccccacctggcaacagaagccagccccgggccatgggccctgagaacaacctgtacagccagtatgagcagaaggtgcggccctgcatcgacctgattgacagcctgcgggccctgggcgtggagcaggacctggccctgcctgccatcgccgtcatcggggaccagagcagcggcaagagctctgtgtag

SEQ ID NO: 161010 - DNA, 378 bp, synthetic construct
  misc_feature 1..378: note = Description of Artificial Sequence: Synthetic coding sequence
  source 1..378: mol_type = other DNA
atgagcaaggcccacaagccctggccctacagaagaagaagccagttcagcagcaggaagtacctgaagaaggagatgaacagcttccagcagcagcccccacccttcggcaccgtgcccccccagatgatgttcccccccaactggcagggcgctgagaaggatgctgccttcctggccaaggacttcaacttcctgaccctgaacaaccagcccccacctggcaacagaagccagccccgggccatgggccctgagaacaacctgtacagccagtatgagcagaaggtgcggccctgcatcgacctgattgacagcctgcgggccctgggcgtggagcaggacctggccctgcctgccatcgccgtcatcggctag

SEQ ID NO: 161011 - DNA, 390 bp, synthetic construct
  misc_feature 1..390: note = Description of Artificial Sequence: Synthetic coding sequence
  source 1..390: mol_type = other DNA
atgagcaaggcccacaagccctggccctacagaagaagaagccagttcagcagcaggaagtacctgaagaaggagatgaacagcttccagcagcagcccccacccttcggcaccgtgcccccccagatgatgttcccccccaactggcagggcgctgagaaggatgctgccttcctggccaaggacttcaacttcctgaccctgaacaaccagcccccacctggcaacagaagccagccccgggccatgggccctgagaacaacctgtacagccagtatgagcagaaggtgcggccctgcatcgacctgattgacagcctgcgggccctgggcgtggagcaggacctggccctgcctgccatcgccgtcatcggggaccagagcagctag

SEQ ID NO: 161012 - DNA, 606 bp, synthetic construct
  misc_feature 1..606: note = Description of Artificial Sequence: Synthetic coding sequence
  source 1..606: mol_type = other DNA
atgagcaaggcccacaagccctggccctacagaagaagaagccagttcagcagcaggaagtacctgaagaaggagatgaacagcttccagcagcagcccccacccttcggcaccgtgcccccccagatgatgttcccccccaactggcagggcgctgagaaggatgctgccttcctggccaaggacttcaacttcctgaccctgaacaaccagcccccacctggcaacagaagccagccccgggccatgggccctgagaacaacctgtacagccagtatgagcagaaggtgcggccctgcatcgacctgattgacagcctgcgggccctgggcgtggagcaggacctggccctgcctgccatcgccgtcatcggggaccagagcagcggcaagagctctgtgctggaggccctgtctggagtggccctgccccggggcagcgcccagaatgtgatggctggaaatggccggggcatcagccatgagctgatcagcctggagatcaccagccctgaggtgcctgacctgaccatcatcgacctgcccggcatcaccagggtggccgtggacaaccagccccgggacatcggcctgcaggtgtcctag

SEQ ID NO: 161013 - DNA, 663 bp, synthetic construct
  misc_feature 1..663: note = Description of Artificial Sequence: Synthetic coding sequence
  source 1..663: mol_type = other DNA
atgaacatcagaaatgcccggcctgaggacctgatgaacatgcagcactgcaacctgctgtgcctgcctgagaactaccagatgaagtactacttctaccacggcctgtcctggccccagctgagctacatcgccgaggatgaaaatggcaagatcgtgggctacgtgctggccaagatggaggaggaccctgatgatgtgccccacggccacatcaccagcctggccgtgaagaggagccaccggcggctgggcctggcccagaagctgatggaccaggccagccgggccatgattgagaacttcaatgccaagtatgtgtccctgcacgtgaggaagaggatcagcgaggtggagcccaagtactatgcagatggagaagatgcctatgccatgaagagggacctgacccagatggctgatgagctgcggcggcacctggagctgaaggagaagggcagacatgtggtgctgggcgccatcgagaacaaggtggagagcaagggcaacagcccccccagcagtggagaggcctgccgggaggagaagggcctggccgctgaggacagcggcggggacagcaaggacctgtctgaggtgtctgagaccacagagagcacagatgtgaaggacagcagcgaggccagtgacagcgccagctag

SEQ ID NO: 161014 - DNA, 708 bp, synthetic construct
  misc_feature 1..708: note = Description of Artificial Sequence: Synthetic coding sequence
  source 1..708: mol_type = other DNA
atgaacatcagaaatgcccggcctgaggacctgatgaacatgcagcactgcaacctgctgtgcctgcctgagaactaccagatgaagtactacttctaccacggcctgtcctggccccagctgagctacatcgccgaggatgaaaatggcaagatcgtgggctacgtgctggccaagatggaggaggaccctgatgatgtgccccacggccacatcaccagcctggccgtgaagaggagccaccggcggctgggcctggcccagaagctgatggaccaggccagccgggccatgattgagaacttcaatgccaagtatgtgtccctgcacgtgaggaagagcaacagagctgccctgcacctgtacagcaacaccctgaacttccagatcagcgaggtggagcccaagtactatgcagatggagaagatgcctatgccatgaagagggacctgacccagatggctgatgagctgcggcggcacctggagctgaaggagaagggccgccacgtggtgctgggcgccatcgagaacaaggtggagagcaaaggaaacagcccccccagcagcggggaggcctgccgggaggagaagggcctggccgcagaagattctggaggagacagcaaggacctgtctgaggtgtctgagaccacagagagcacagatgtgaaggacagcagcgaggccagtgacagcgccagctag

SEQ ID NO: 161015 - DNA, 396 bp, synthetic construct
  misc_feature 1..396: note = Description of Artificial Sequence: Synthetic coding sequence
  source 1..396: mol_type = other DNA
atgaacatcagaaatgcccggcctgaggacctgatgaacatgcagcactgcaacctgctgtgcctgcctgagaactaccagatgaagtactacttctaccacggcctgtcctggccccagctgagctacatcgccgaggatgaaaatggcaagatcgtgggctacgtgctggccaagatggaggaggaccctgatgatgtgccccacggccacatcaccagcctggccgtgaagaggagccaccggcggctgggcctggcccagaagctgatggaccaggccagccgggccatgattgagaacttcaatgccaagtatgtgtccctgcacgtgaggaagaggtctgtgaagtggagccccaacaccatgcagatgggccgcacccccatgccctag

SEQ ID NO: 161016 - DNA, 534 bp, synthetic construct
  misc_feature 1..534: note = Description of Artificial Sequence: Synthetic coding sequence
  source 1..534: mol_type = other DNA
atgattgtggccgagatcaagaacagaaccaagatccacaaggaggatggagacatcctggccagcaacttctctgtggacacccaggtggcctacatcctgagcctgggcgtggtgaaggagttcaggaagcatggaattggcagcctgctgctggagagcctgaaggaccacatcagcaccacagcccaggaccactgcaaggccatctacctgcacgtgctgaccaccaacaacacagccatcaacttctatgagaacagagacttcaagcagcaccactacctgccctactactacagcatccggggcgtgctgaaggatggcttcacctacgtgctgtacatcaatggaggccaccccccctggaccatcctggactacatccagcacctgggcagcgccctggccagcctgagcccctgcagcatcccccaccgggtgtaccggcaggcccacagcctgctgtgcagcttcctgccctggagcggcatcagcagcaagtctggaattgagtacagcaggaccatgtag

SEQ ID NO: 161017 - DNA, 729 bp, synthetic construct
  misc_feature 1..729: note = Description of Artificial Sequence: Synthetic coding sequence
  source 1..729: mol_type = other DNA
atgacagaggtggtgcccagcagcgccctgtctgaggtgtccctgcggctgctgtgccatgatgacatcgacacagtgaagcacctgtgtggggactggttccccatcgagtacccagacagctggtacagagacatcaccagcaacaagaagttcttcagcctggccgccacctacagaggagccatcgtgggcatgattgtggccgagatcaagaacagaaccaagatccacaaggaggatggagacatcctggccagcaacttctctgtggacacccaggtggcctacatcctgagcctgggcgtggtgaaggagttcaggaagcacggcatcggcagcctgctgctggagagcctgaaggaccacatcagcaccacagcccaggaccactgcaaggccatctacctgcacgtgctgaccaccaacaacacagccatcaacttctatgaaaatagagacttcaagcagcaccactacctgccctactactacagcatccggggcgtgctgaaggatggcttcacctacgtgctgtacatcaatggaggccaccccccctggaccatcctggactacatccagcacctgggcagcgccctggccagcctgagcccctgcagcatcccccaccgggtgtaccggcaggcccacagcctgctgtgcagcttcctgccctggagcggcatcagcagcaagagcggcatcgagtacagcaggaccatgtag

SEQ ID NO: 161018 - DNA, 729 bp, synthetic construct; identical to SEQ ID NO: 161017
  misc_feature 1..729: note = Description of Artificial Sequence: Synthetic coding sequence
  source 1..729: mol_type = other DNA

SEQ ID NO: 161019 - DNA, 573 bp, synthetic construct
  misc_feature 1..573: note = Description of Artificial Sequence: Synthetic coding sequence
  source 1..573: mol_type = other DNA
atgacagaggtggtgcccagcagcgccctgtctgaggtgtccctgcggctgctgtgccatgatgacatcgacacagtgaagcacctgtgtggggactggttccccatcgagtacccagacagctggtacagagacatcaccagcaacaagaagttcttcagcctggccgccacctacagaggagccatcgtgggcatgattgtggccgagatcaagaacagaaccaagatccacaaggaggatggagacatcctggccagcaacttctctgtggacacccaggtggcctacatcctgagcctgggcgtggtgaaggagttcaggaagcacggcatcgagccccacggcctgcacccagcccctggcctgtgcaccagccagcctgagcccctgctgcacagcgcccagagcctgcccccaggcccccagcctgccctgcagctgcctgccatggtgggccacctgttccaggagtggcaccgggtgcagcctgaccacgtgatgtctgctggccagcccccacctggccccaccctgcggcccccagctgagcccgccttcctgagcatctag

SEQ ID NO: 161020 - DNA, 750 bp, synthetic construct
  misc_feature 1..750: note = Description of Artificial Sequence: Synthetic coding sequence
  source 1..750: mol_type = other DNA
atgttccccaggagaagaacagaaagaaggctgggggacaccggcaccaggaagaagatcgcctacaggaaggctgtgcctgggggcaggaaatgtggggccagcctgtcctgggagaagagcagccgggagtacccagacagctggtacagagacatcaccagcaacaagaagttcttcagcctggccgccacctacagaggagccatcgtgggcatgattgtggccgagatcaagaacagaaccaagatccacaaggaggatggagacatcctggccagcaacttctctgtggacacccaggtggcctacatcctgagcctgggcgtggtgaaggagttcaggaagcatggaattggcagcctgctgctggagagcctgaaggaccacatcagcaccacagcccaggaccactgcaaggccatctacctgcacgtgctgaccaccaacaacacagccatcaacttctatgagaacagagacttcaagcagcaccactacctgccctactactacagcatccggggcgtgctgaaggatggcttcacctacgtgctgtacatcaatggaggccaccccccctggaccatcctggactacatccagcacctgggcagcgccctggccagcctgagcccctgcagcatcccccaccgggtgtaccggcaggcccacagcctgctgtgcagcttcctgccctggagcggcatcagcagcaagtctggaattgagtacagcaggaccatgtag

SEQ ID NO: 161021 - DNA, 492 bp, synthetic construct
  misc_feature 1..492: note = Description of Artificial Sequence: Synthetic coding sequence
  source 1..492: mol_type = other DNA
atggccgtcatcctgggcatcttcggcaccgtgcagtaccgcagccgctacctgatcctgtatgctgcctggctggtgctgtgggtgggctggaatgccttcatcatctgcttctacctggaggtgggccagctgagccaggaccgggacttcatcatgaccttcaacaccagcctgcaccgctcctggtggatggagaatggacctggctgcctggtgacccctgtgctgaacagccggctggccctggaggaccaccacgtgatctctgtgacaggctgcctgctggactacccctacatcgaggccctgagcagcgccctgcagatcttcctggccctgtttggatttgtgtttgcctgctacgtgtccaaggtgttcctggaggaggaggacagctttgacttcatcggcggctttgacagctatggctaccaggccccccagaagaccagccacctgcagctgcagcccctgtacaccagcggctag

SEQ ID NO: 161022 - DNA, 624 bp, synthetic construct
  misc_feature 1..624: note = Description of Artificial Sequence: Synthetic coding sequence
  source 1..624: mol_type = other DNA
atgggcaaatgttctggccgctgcaccctggtggccttctgctgcctgcagctggtggccgccctggagcggcagatctttgacttcctgggctaccagtgggcccccatcctggccaacttcctgcacatcatggccgtcatcctgggcatcttcggcaccgtgcagtaccgcagccgctacctgatcctgtatgctgcctggctggtgctgtgggtgggctggaatgccttcatcatctgcttctacctggaggtgggccagctgagccaggaccgggacttcatcatgaccttcaacaccagcctgcaccgctcctggtggatggagaatggacctggctgcctggtgacccctgtgctgaacagccggctggccctggaggaccaccacgtgatctctgtgacaggctgcctgctggactacccctacatcgaggccctgagcagcgccctgcagatcttcctggccctgtttggatttgtgtttgcctgctacgtgtccaaggtgttcctggaggaggaggacagctttgacttcatcggcggctttgacagctatggctaccaggccccccagaagaccagccacctgcagctgcagcccctgtacaccagcggctag

SEQ ID NO: 161023 - DNA, 411 bp, synthetic construct
  misc_feature 1..411: note = Description of Artificial Sequence: Synthetic coding sequence
  source 1..411: mol_type = other DNA
atggccgtcatcctgggcatcttcggcaccgtgcagtaccgcagccgctacctgatcctggaccgggacttcatcatgaccttcaacaccagcctgcaccgctcctggtggatggagaatggacctggctgcctggtgacccctgtgctgaacagccggctggccctggaggaccaccacgtgatctctgtgacaggctgcctgctggactacccctacatcgaggccctgagcagcgccctgcagatcttcctggccctgtttggatttgtgtttgcctgctacgtgtccaaggtgttcctggaggaggaggacagctttgacttcatcggcggctttgacagctatggctaccaggccccccagaagaccagccacctgcagctgcagcccctgtacaccagcggctag

SEQ ID NO: 161024 - DNA, 567 bp, synthetic construct
  misc_feature 1..567: note = Description of Artificial Sequence: Synthetic coding sequence
  source 1..567: mol_type = other DNA
atgggctactgcagcggccgctgcaccctcatcttcatctgtggcatgcagctggtgtgtgtgctggagcggcagatctttgacttcctgggctaccagtgggcccccatcctggccaactttgtgcacatcatcatcgtcatcctgggcctgtttggcaccatccagtaccggccccgctacatcaccggctatgctgtgtggctggtgctgtgggtgacctggaatgtgtttgtgatctgcttctacctggaggccggggacctgagcaaggagacagacctgatcctgaccttcaacatctccatgcaccgctcctggtggatggagaatggacctggctgcaccgtgacctctgtgaccccagccccagactgggcccctgaggaccaccgctacatcaccgtgtctggctgcctgctggagtaccagtacatcgaggtggcccacagcagcctgcagatcgtgctggccgtgtctgtgggcagccagcccctgctgctggtgcccctgggcctcttctacttctgtgccaacagcgtgcacaccaacggcatctgtggctag

SEQ ID NO: 161025 - DNA, 627 bp, synthetic construct
  misc_feature 1..627: note = Description of Artificial Sequence: Synthetic coding sequence
  source 1..627: mol_type = other DNA
atgggctactgcagcggccgctgcaccctcatcttcatctgtggcatgcagctggtgtgtgtgctggagcggcagatctttgacttcctgggctaccagtgggcccccatcctggccaactttgtgcacatcatcatcgtcatcctgggcctgtttggcaccatccagtaccggccccgctacatcaccggctatgctgtgtggctggtgctgtgggtgacctggaatgtgtttgtgatctgcttctacctggaggccggggacctgagcaaggagacagacctgatcctgaccttcaacatctccatgcaccgctcctggtggatggagaatggacctggctgcaccgtgacctctgtgaccccagccccagactgggcccctgaggaccaccgctacatcaccgtgtctggctgcctgctggagtaccagtacatcgaggtggcccacagcagcctgcagatcgtgctggccctggccggcttcatctatgcctgctacgtggtgaagtgcatcacagaggaggaggacagctttgacttcatcggcggctttgacagctatggctaccagggcccccagaagaccagccacctgcagctgcagcccatgtacatgagcaagtag

SEQ ID NO: 161026 - DNA, 624 bp, synthetic construct
  misc_feature 1..624: note = Description of Artificial Sequence: Synthetic coding sequence
  source 1..624: mol_type = other DNA
atgggcatcatccgcttcctgctgctgtactgccccaccaacatcctgactgtgtgtgtgctggagcggcagatctttgacttcctgggctaccagtgggcccccatcctggccaactttgtgcacatcatcatcgtcatcctgggcctgtttggcaccatccagtaccggccccgctacatcaccggctatgctgtgtggctggtgctgtgggtgacctggaatgtgtttgtgatctgcttctacctggaggccggggacctgagcaaggagacagacctgatcctgaccttcaacatctccatgcaccgctcctggtggatggagaatggacctggctgcaccgtgacctctgtgaccccagccccagactgggcccctgaggaccaccgctacatcaccgtgtctggctgcctgctggagtaccagtacatcgaggtggcccacagcagcctgcagatcgtgctggccctggccggcttcatctatgcctgctacgtggtgaagtgcatcacagaggaggaggacagctttgacttcatcggcggctttgacagctatggctaccagggcccccagaagaccagccacctgcagctgcagcccatgtacatgagcaagtag

SEQ ID NO: 161027 - DNA, 576 bp, synthetic construct
  misc_feature 1..576: note = Description of Artificial Sequence: Synthetic coding sequence
  source 1..576: mol_type = other DNA
atgaagatcgtgtgtgtgctggagcggcagatctttgacttcctgggctaccagtgggcccccatcctggccaactttgtgcacatcatcatcgtcatcctgggcctgtttggcaccatccagtaccggccccgctacatcaccggctatgctgtgtggctggtgctgtgggtgacctggaatgtgtttgtgatctgcttctacctggaggccggggacctgagcaaggagacagacctgatcctgaccttcaacatctccatgcaccgctcctggtggatggagaatggacctggctgcaccgtgacctctgtgaccccagccccagactgggcccctgaggaccaccgctacatcaccgtgtctggctgcctgctggagtaccagtacatcgaggtggcccacagcagcctgcagatcgtgctggccctggccggcttcatctatgcctgctacgtggtgaagtgcatcacagaggaggaggacagctttgacttcatcggcggctttgacagctatggctaccagggcccccagaagaccagccacctgcagctgcagcccatgtacatgtag

SEQ ID NO: 161028 - DNA, 420 bp, synthetic construct
  misc_feature 1..420: note = Description of Artificial Sequence: Synthetic coding sequence
  source 1..420: mol_type = other DNA
atgggctactgcagcggccgctgcaccctcatcttcatctgtggcatgcagctggtgtgtgtgctggagcggcagatctttgacttcctgggctaccagtgggcccccatcctggccaactttgtgcacatcatcatcgtcatcctgggcctgtttggcaccatccagtaccggccccgctacatcaccggctatgctgtgtggctggtgctgtgggtgacctggaatgtgtttgtgatctgcttctacctggaggccggggacctgagcaagctggccggcttcatctatgcctgctacgtggtgaagtgcatcacagaggaggaggacagctttgacttcatcggcggctttgacagctatggctaccagggcccccagaagaccagccacctgcagctgcagcccatgtacatgtag

SEQ ID NO: 161029 - DNA, 594 bp, synthetic construct
  misc_feature 1..594: note = Description of Artificial Sequence: Synthetic coding sequence
  source 1..594: mol_type = other DNA
atgggctgctgcaccggccgctgcagcctcatctgcctgtgtgccctgcagctggtgtctgccctggagcggcagatctttgacttcctgggcttccagtgggcccccatcctgggcaacttcctgcacatcatcgtggtgatcctgggcctgtttggcaccatccagtaccggccccgctacatcatggtgtacacagtgtggacagccctgtgggtgacctggaatgtgttcatcatctgcttctacctggaggtgggcggcctgagcaaggacacagacctgatgaccttcaacatctctgtgcaccgctcctggtggagggagcacggccctggctgtgtgcggcgggtgctgccccccagcgcccacggcatgatggatgactacacctacgtgtctgtgacaggctgcatcgtggacttccagtacctggaggtgatccacagcgctgtgcagatcctgctgagcctggtgggctttgtgtatgcctgctacgtgatcagcatctccatggaggaggaggacacctacagctgtgacctgcaggtgtgcaagcacctgttcatccagatgctgcagatcatcgagtag

SEQ ID NO: 161030 - DNA, 594 bp, synthetic construct; identical to SEQ ID NO: 161029
  misc_feature 1..594: note = Description of Artificial Sequence: Synthetic coding sequence
  source 1..594: mol_type = other DNA

SEQ ID NO: 161031 - DNA, 486 bp, synthetic construct
  misc_feature 1..486: note = Description of Artificial Sequence: Synthetic coding sequence
  source 1..486: mol_type = other DNA
atgggctgctgcaccggccgctgcagcctcatctgcctgtgtgccctgcagctggtgtcctgggtgtttgaccggcagatcttcctgctgtccttccagtgggcccccatcctgggcaacttcctgcacatcatcgtggtgatcctgggcctgtttggcaccatccagtaccggccccgctacatcatggtgtacacagtgtggacagccctgtgggtgacctggaatgtgttcatcatctgcttctacctggaggtgggcggcctgagcaaggacacagacctgatgaccttcaacatctctgtgcaccgctcctggtggagggagcacggccctggctgtgtgcggcgggtgctgccccccagcgcccacggcatgatggatgactacacctacgtgtctgtgacaggctgcatcgtggacttccagtacctggaggtgatccacagcgctgtgcagatcctgctgagcatcttcttcctgtag

SEQ ID NO: 161032 - DNA, 627 bp, synthetic construct
  misc_feature 1..627: note = Description of Artificial Sequence: Synthetic coding sequence
  source 1..627: mol_type = other DNA
atgggcagctgcagcggccgctgtgccctggtggtgctgtgtgccttccagctggtggccgccctggagcggcaggtgtttgacttcctgggctaccagtgggcccccatcctggccaactttgtgcacatcatcatcgtcatcctgggcctgtttggcaccatccagtaccgcctgcgctacgtgatggtgtacaccctgtgggccgctgtgtgggtgacctggaatgtgttcatcatctgcttctacctggaggtgggcggcctgctgaaggacagcgagctgctgaccttcagcctgagccgccaccgctcctggtggagggagcgctggccaggctgcctgcacgaggaggtgcctgctgtgggcctgggcgccccccacggccaggccctggtgtctggggccggctgtgccctggagcccagctatgtggaggccctgcacagctgcctgcagatcctgattgccctgctgggctttgtgtgtggctgccaggtggtgtctgtgttcacagaggaggaggacagctttgacttcatcggcggctttgaccccttccccctgtaccacgtgaatgagaagcccagcagcctgctgagcaagcaggtgtacctgcctgcctag

SEQ ID NO: 161033 - DNA, 267 bp, synthetic construct
  misc_feature 1..267: note = Description of Artificial Sequence: Synthetic coding sequence
  source 1..267: mol_type = other DNA
atggccgagagccggggccgcctgtacctgtggatgtgcctggccgccgccctggccagcttcctgatgggcttcatggtgggctggttcatcaagcccctgaaggagaccaccacctctgtgcgctaccaccagagcatccgctggaagctggtgtctgagatgaaggccgagaacatcaagagcttcctgcggagcttcaccaagctgccccacctggccggcacagagcagaacttcctgctggccaagaagatccagacctag

SEQ ID NO: 161034 - DNA, 2223 bp, synthetic construct
  misc_feature 1..2223: note = Description of Artificial Sequence: Synthetic coding sequence
  source 1..2223: mol_type = other DNA
atggccgagagccggggccgcctgtacctgtggatgtgcctggccgccgccctggccagcttcctgatgggcttcatggtgggctggttcatcaagcccctgaaggagaccaccacctctgtgcgctaccaccagagcatccgctggaagctggtgtctgagatgaaggccgagaacatcaagagcttcctgcggagcttcaccaagctgccccacctggccggcacagagcagaacttcctgctggccaagaagatccagacccagtggaagaagtttggcctggacagcgccaagctggtgcactatgatgtgctgctgagctacccaaatgagaccaatgccaactacatcagcatcgtggatgagcacgagacagagatcttcaagaccagctacctggagcccccaccagatggctatgaaaatgtgaccaacatcgtgcccccctacaatgccttcagcgcccagggcatgcctgagggggacctggtgtatgtgaactatgccaggacagaggacttcttcaagctggagcgggagatgggcatcaactgcaccgggaagatcgtcatcgcccgctatggcaagatcttccggggcaacaaggtgaagaatgccatgctggccggggccatcggcatcatcctgtacagcgaccctgctgactactttgcccctgaggtgcagccctaccccaagggctggaacctgcctggaacagctgcccagagaggaaatgtgctgaacctgaatggagctggggaccccctgaccccaggctacccagccaaggagtacaccttccggctggatgtggaggagggcgtgggcatcccccgcatccctgtgcaccccatcggctacaatgatgctgagatcctgctgcgctacctgggcggcatcgcccccccagacaagtcctggaagggggccctgaatgtgtcctacagcatcggccctggcttcaccggcagtgacagcttcaggaaggtgaggatgcacgtgtacaacatcaacaagatcacccgcatctacaacgtggtgggcaccatccggggctctgtggagccagacagatatgtgatcctgggcggccaccgggacagctgggtgtttggagccatcgaccccaccagcggcgtggccgtgctgcaggagatcgcccggagctttgggaagctgatgagcaagggctggaggcccaggaggaccatcatctttgcctcctgggatgctgaggagtttggcctgctgggcagcacagagtgggccgaggagaatgtgaagatcctgcaggagaggagcatcgcctacatcaacagcgacagcagcattgagggcaactacaccctgcgggtggactgcacccccctgctgtaccagctggtgtacaagctgaccaaggagatccccagcccagatgatggctttgagagcaagagcctgtatgagagctggctggagaaggaccccagccctgagaacaagaacctgccccgcatcaacaagctgggcagcggcagtgactttgaggcctacttccagaggctgggcatcgccagcggccgggcccgctacaccaagaacaagaagacagacaagtacagcagctaccctgtgtaccacaccatctatgagacctttgagctggtggagaagttctatgaccccaccttcaagaagcagctgtctgtggcccagctgcggggggccctggtgtatgagctggtggacagcaagatcatccccttcaacatccaggactatgcagaggccctgaagaactatgctgccagcatctacaacctgagcaagaagcatgaccagcagctgacagaccatggagtgtcctttgacagcctcttctctgctgtgaagaacttcagcgaggccgccagtgacttccacaagaggctcatccaggtggacctgaacaaccccatcgctgtgaggatgatgaatgaccagctgatgctgctggagcgggccttcatcgaccccctgggcctgcccgggaagctgttctaccgccacatcatctttgcccccagcagccacaacaagtatgctggggagagcttccctggcatctatgatgccatctttgatattgagaacaaggccaacagccggctggcctggaaggaggtgaagaagcacatcagcattgctgccttcaccatccaggccgctgctggcaccctgaaggaggtgctgtag

SEQ ID NO: 161035 - DNA, 1635 bp, synthetic construct
  misc_feature 1..1635: note = Description of Artificial Sequence: Synthetic coding sequence
  source 1..1635: mol_type = other DNA
atgcagtggaccaaggtgctgggcctgggcctgggcgccgccgccctgctgggcctgggcatcatcctgggccactttgccatccccaagaaggccaacagcctggccccccaggacctggacctggagatcctggagaccgtgatgggccagctggatgcccaccgcatccgggagaacctgcgggagctgagccgggagccccacctggccagcagccccagagatgaggacctggtgcagctgctgctgcagcgctggaaggaccctgagagcggcctggacagcgctgaggccagcacctatgaggtgctgctgtccttccccagccaggagcagcccaacgtggtggacatcgtgggccccactggaggcatcatccacagctgccacaggacagaagaaaatgtgactggagagcagggcggcccagatgtggtgcagccctatgctgcctatgcccccagcggcaccccccagggcctgctggtgtatgccaacagaggagctgaggaggacttcaaggagctgcagacccagggcatcaagctggagggcaccatcgccctgaccaggtatggaggagtgggccgcggggccaaggctgtgaatgctgccaagcacggcgtggccggcgtgctggtgtacacagatcctgctgacatcaatgatggcctgagcagcccagatgagaccttccccaacagctggtacctgccccccagcggcgtggagcggggcagctactatgagtactttggagaccccctgaccccctacctgcctgctgtgcccagcagcttccgggtggacctggccaacgtgtctggcttcccccccatccccacccagcccatcggcttccaggatgcccgggacctgctgtgcaacctgaatggcaccctggccccagccacctggcagggcgccctgggctgccactaccgcctgggccctggcttccggccagatggagacttccctgctgacagccaggtgaatgtgtctgtgtacaaccggctggagctgaggaacagcagcaatgtgctgggcatcatcagaggagctgtggagccagaccgctacgtgctgtatggcaaccaccgggacagctgggtgcacggggctgtggaccccagcagcggcacagctgtgctgctggagctgagccgggtgctgggcaccctgctgaagaagggcacctggaggcccaggaggagcatcgtgtttgcctcctggggcgctgaggagtttggcctgattggcagcacagagttcacagaggagttcttcaacaagctgcaggagaggacagtggcctacatcaacgtggacatctctgtgtttgccaatgccaccctgcgggtgcagggcaccccacctgtgcagagcgtggtgttcagcgccaccaaggagatccgcagccctggccctggggacctgagcatctatgacaactggatccgctacttcaacagaagcagccctgtgtatggcctggtgccccgggcccggctgcagcccggcagcaccccacccaccacccagcccctgacccccctgaccatgtggaccagcttctggacccgggccagcgctgccatccggctgtggccaggccagaggggcgtgtag

SEQ ID NO: 161036 - DNA, 1569 bp, synthetic construct
  misc_feature 1..1569: note = Description of Artificial Sequence: Synthetic coding sequence
  source 1..1569: mol_type = other DNA
atgcagtggaccaaggtgctgggcctgggcctgggcgccgccgccctgctgggcctgggcatcatcctgggccactttgccatccccaagaaggccaacagcctggccccccaggacctggacctggagatcctggagaccgtgatgggccagctggatgcccaccgcatccgggagaacctgcgggagctgagccgggagccccacctggccagcagccccagagatgaggacctggtgcagctgctgctgcagcgctggaaggaccctgagagcggcctggacagcgctgaggccagcacctatgaggtgctgctgtccttccccagccaggagcagcccaacgtggtggacatcgtgggccccactggaggcatcatccacagctgccacaggacagaagaaaatgtgactggagagcagggcggcccagatgtggtgcagccctatgctgcctatgcccccagcggcaccccccagggcctgctggtgtatgccaacagaggagctgaggaggacttcaaggagctgcagacccagggcatcaagctggagggcaccatcgccctgaccaggtatggaggagtgggccgcggggccaaggctgtgaatgctgccaagcacggcgtggccggcgtgctggtgtacacagatcctgctgacatcaatgatggcctgagcagcccagatgagaccttccccaacagctggtacctgccccccagcggcgtggagcggggcagctactatgagtactttggagaccccctgaccccctacctgcctgctgtgcccagcagcttccgggtggacctggccaacgtgtctggcttcccccccatccccacccagcccatcggcttccaggatgcccgggacctgctgtgcaacctgaatggcaccctggccccagccacctggcagggcgccctgggctgccactaccgcctgggccctggcttccggccagatggagacttccctgctgacagccaggtgaatgtgtctgtgtacaaccggctggagctgaggaacagcagcaatgtgctgggcatcatcagaggagctgtggagccagaccgctacgtgctgtatggcaaccaccgggacagctgggtgcacggggctgtggaccccagcagcggcacagctgtgctgctggagctgagccgggtgctgggcaccctgctgaagaagggcacctggaggcccaggaggagcatcgtgtttgcctcctggggcgctgaggagtttggcctgattggcagcacagagttcacagaggagttcttcaacaagctgcaggagaggacagtggcctacatcaacgtggacatctctgtgtttgccaatgccaccctgcgggtgcagggcaccccacctgtgcagagcgtggtgttcagcgccaccaaggagatccgcagccctggccctggggacctgagcatctatgacaactggatccgctacttcaacagaagcagccctgtgtatggcctggtgccccggctgcagcagcccagcggctgcggccctgacagcggggagtgtgacagccctgcccagtag

SEQ ID NO: 161037 - DNA, 2223 bp, synthetic construct
  misc_feature 1..2223: note = Description of Artificial Sequence: Synthetic coding sequence
  source 1..2223: mol_type = other DNA
atgcagtggaccaaggtgctgggcctgggcctgggcgccgccgccctgctgggcctgggcatcatcctgggccactttgccatccccaagaaggccaacagcctggccccccaggacctggacctggagatcctggagaccgtgatgggccagctggatgcccaccgcatccgggagaacctgcgggagctgagccgggagccccacctggccagcagccccagagatgaggacctggtgcagctgctgctgcagcgctggaaggaccctgagagcggcctggacagcgctgaggccagcacctatgaggtgctgctgtccttccccagccaggagcagcccaacgtggtggacatcgtgggccccactggaggcatcatccacagctgccacaggacagaagaaaatgtgactggagagcagggcggcccagatgtggtgcagccctatgctgcctatgcccccagcggcaccccccagggcctgctggtgtatgccaacagaggagctgaggaggacttcaaggagctgcagacccagggcatcaagctggagggcaccatcgccctgaccaggtatggaggagtgggccgcggggccaaggctgtgaatgctgccaagcacggcgtggccggcgtgctggtgtacacagatcctgctgacatcaatgatggcctgagcagcccagatgagaccttccccaacagctggtacctgccccccagcggcgtggagcggggcagctactatgagtactttggagaccccctgaccccctacctgcctgctgtgcccagcagcttccgggtggacctggccaacgtgtctggcttcccccccatccccacccagcccatcggcttccaggatgcccgggacctgctgtgcaacctgaatggcaccctggccccagccacctggcagggcgccctgggctgccactaccgcctgggccctggcttccggccagatggagacttccctgctgacagccaggtgaatgtgtctgtgtacaaccggctggagctgaggaacagcagcaatgtgctgggcatcatcagaggagctgtggagccagaccgctacgtgctgtatggcaaccaccgggacagctgggtgcacggggctgtggaccccagcagcggcacagctgtgctgctggagctgagccgggtgctgggcaccctgctgaagaagggcacctggaggcccaggaggagcatcgtgtttgcctcctggggcgctgaggagtttggcctgattggcagcacagagttcacagaggagttcttcaacaagctgcaggagaggacagtggcctacatcaacgtggacatctctgtgtttgccaatgccaccctgcgggtgcagggcaccccacctgtgcagagcgtggtgttcagcgccaccaaggagatccgcagccctggccctggggacctgagcatctatgacaactggatccgctacttcaacagaagcagccctgtgtatggcctggtgcccagcctgggcagcctgggcgccggcagtgactatgccccctttgtgcacttcctgggcatcagctccatggacatcgcctacacctatgacaggagcaagaccagcgcccgcatctaccccacctaccacacagcctttgacacctttgattatgtggacaagttcctggaccccggcttcagcagccaccaggccgtggccaggacagctggcagcgtcatcctgcggctgagtgacagcttcttcctgcccctgaaggtgtctgactacagcgagaccctgcggagcttcctgcaggccgcccagcaggacctgggcgccctgctggagcagcacagcatcagcctgggccccctggtgacagctgtggagaagtttgaggccgaggccgccgccctgggccagaggatcagcaccctgcagaagggcagcccagaccccctgcaggtgaggatgctgaatgaccagctgatgctgctggagaggaccttcctgaacccccgggccttccctgaggagcgctactacagccacgtgctgtgggcccccaggactggatctgtggtgaccttccctggcctgagcaatgcctgcagccgggcccgggacacagccagcggcagcgaggcctgggccgaggtgcagaggcagctgagcatcgtggtgacagccctggagggcgctgctgccaccctgcggcctgtggccgacctgtag

SEQ ID NO: 161038 - DNA, 2220 bp, synthetic construct
  misc_feature 1..2220: note = Description of Artificial Sequence: Synthetic coding sequence
  source 1..2220: mol_type = other DNA
atgcagtggaccaaggtgctgggcctgggcctgggcgccgccgccctgctgggcctgggcatcatcctgggccactttgccatccccaagaaggccaacagcctggccccccaggacctggacctggagatcctggagaccgtgatgggccagctggatgcccaccgcatccgggagaacctgcgggagctgagccgggagccccacctggccagcagccccagagatgaggacctggtgcagctgctgctgcagcgctggaaggaccctgagagcggcctggacagcgctgaggccagcacctatgaggtgctgctgtccttccccagccaggagcagcccaacgtggtggacatcgtgggccccactggaggcatcatccacagctgccacaggacagaagaaaatgtgactggagagcagggcggcccagatgtggtgcagccctatgctgcctatgcccccagcggcaccccccagggcctgctggtgtatgccaacagaggagctgaggaggacttcaaggagctgcagacccagggcatcaagctggagggcaccatcgccctgaccaggtatggaggagtgggccgcggggccaaggctgtgaatgctgccaagcacggcgtggccggcgtgctggtgtacacagatcctgctgacatcaatgatggcctgagcagcccagatgagaccttccccaacagctggtacctgccccccagcggcgtggagcggggcagctactatgagtactttggagaccccctgaccccctacctgcctgctgtgcccagcagcttccgggtggacctggccaacgtgtctggcttcccccccatccccacccagcccatcggcttccaggatgcccgggacctgctgtgcaacctgaatggcaccctggccccagccacctggcagggcgccctgggctgccactaccgcctgggccctggcttccggccagatggagacttccctgctgacagccaggtgaatgtgtctgtgtacaaccggctggagctgaggaacagcagcaatgtgctgggcatcatcagaggagctgtggagccagaccgctacgtgctgtatggcaaccaccgggacagctgggtgcacggggctgtggaccccagcagcggcacagctgtgctgctggagctgagccgggtgctgggcaccctgctgaagaagggcacctggaggcccaggaggagcatcgtgtttgcctcctggggcgctgaggagtttggcctgattggcagcacagagttcacagaggagttcttcaacaagctgcaggagaggacagtggcctacatcaacgtggacatctctgtgtttgccaatgccaccctgcgggtgcagggcaccccacctgtgcagagcgtggtgttcagcgccaccaaggagatccgcagccctggccctggggacctgagcatctatgacaactggatccgctacttcaacagaagcagccctgtgtatggcctggtgcccagcctgggcagcctgggcgccggcagtgactatgccccctttgtgcacttcctgggcatcagctccatggacatcgcctacacctatgacaggagcaagaccagcgcccgcatctaccccacctaccacacagcctttgacacctttgattatgtggacaagttcctggaccccggcttcagcagccaccaggccgtggccaggacagctggcagcgtcatcctgcggctgagtgacagcttcttcctgcccctgaaggtgtctgactacagcgagaccctgcggagcttcctgcaggccgcccagcaggacctgggcgccctgctggagcagcacagcatcagcctgggccccctggtgacagctgtggagaagtttgaggccgaggccgccgccctgggccagaggatcagcaccctgcagaagggcagcccagaccccctgcaggtgaggatgctgaatgaccagctgatgctgctggagaggaccttcctgaacccccgggccttccctgaggagcgctactacagccacgtgctgtgggccccccggggcctgcggagccacatccctggcctgagcaatgcctgcagccgggcccgggacacagccagcggcagcgaggcctgggccgaggtgcagaggcagctgagcatcgtggtgacagccctggagggcgccgccgccaccctgcggcctgtggccgacctgtag

SEQ ID NO: 161039 - DNA, 405 bp, synthetic construct
  misc_feature 1..405: note = Description of Artificial Sequence: Synthetic coding sequence
  source 1..405: mol_type = other DNA
atggagatcagcaagaagatcaagacccagtggaccagcctgggcctggaggatgtgcagtttgtgaactacagcgtgctgctggacctgcccggccccagccccagcacagtgaccctgagcagcagcggccagtgcttccaccccaacggccagccctgcagcgaggaggccaggaaggacagcagccaggacctgctgtacagctatgctgcctacagcgccaagggcaccctgaaggccgaggtgattgatgtgtcctatggcatggctgatgacctgaagaggatcaggaagatcaagaatgtgaccaaccagatcgccctgctgaagctgggcaagctgcccctgctgtacaagatgaaggtgctggacaaggctgaccagaccagccccctgtactag

SEQ ID NO: 161040 - DNA, 2388 bp, synthetic construct
  misc_feature 1..2388: note = Description of Artificial Sequence: Synthetic coding sequence
  source 1..2388: mol_type = other DNA
atgggagaaaatgaggccagcctgcccaacaccagcctgcagggcaagaagatggcctaccagaaggtgcatgctgaccagagggcccctggccacagccagtacctggacaatgatgacctgcaggccacagccctggacctggagtgggacatggagaaggagctggaggagagcggctttgaccagttccagctggatggagctgagaaccagaacctgggccacagcgagaccatcgacctgaacctggacagcatccagcctgccaccagccccaagggccgcttccagaggctgcaggaggagagtgactacatcacccactacaccaggtctgcccccaagagcaaccgctgcaacttctgccacgtgctgaagatcctgtgcacagccaccatcctcttcatcttcggcatcctgattggctactacgtgcacaccaactgccccagtgatgcccccagcagcggcaccgtggacccccagctgtaccaggagatcctgaagaccatccaggccgaggacatcaagaagagcttcaggaacctggtgcagctgtacaagaatgaagatgacatggagatcagcaagaagatcaagacccagtggaccagcctgggcctggaggatgtgcagtttgtgaactacagcgtgctgctggacctgcccggccccagccccagcacagtgaccctgagcagcagcggccagtgcttccaccccaacggccagccctgcagcgaggaggccaggaaggacagcagccaggacctgctgtacagctatgctgcctacagcgccaagggcaccctgaaggccgaggtgattgatgtgtcctatggcatggctgatgacctgaagaggatcaggaagatcaagaatgtgaccaaccagatcgccctgctgaagctgggcaagctgcccctgctgtacaagctgagcagcctggagaaggccggctttggaggagtgctgctgtacatcgacccctgtgacctgcccaagacagtgaaccccagccatgacaccttcatggtgtccctgaaccctggaggagaccccagcaccccaggctaccccagcgtggatgagagcttccggcagagccgcagcaacctgaccagcctgctggtgcagcccatcagcgcccccctggtggccaagctgatcagcagccccaaggcccggaccaagaatgaggcctgcagcagcctggagctgcccaacaatgagatccgggtggtgtccatgcaggtgcagacagtgaccaagctgaagacagtgaccaacgtggtgggctttgtgatgggcctgaccagcccagaccgctacatcatcgtgggcagccaccaccacacagcccacagctacaacggccaggagtgggccagcagcacagccatcatcacagccttcatccgggccctgatgagcaaggtgaagaggggctggaggccagacaggaccatcgtgttctgctcctggggcggcacagcctttggaaacatcggcagctatgagtggggcgaggacttcaagaaggtgctgcagaagaatgtggtggcctacatcagcctgcacagccccatccggggcaacagcagcctgtaccctgtggccagccccagcctgcagcagctggtggtggagaagaacaacttcaactgcacccggcgggcccagtgcccagagaccaacatcagcagcatccagatccagggagatgctgactacttcatcaaccacctgggcgtgcccatcgtgcagtttgcctatgaggacatcaagaccctggagggccccagcttcctgtctgaggcccgcttcagcacccgggccaccaagattgaggagatggaccccagcttcaacctgcacgagaccatcaccaagctgagcggggaggtgatcctgcagatcgccaatgaacctgtgctgcccttcaatgccctggacatcgccctggaggtgcagaacaacctgaagggggaccagcccaacacccaccagctgctggccatggccctgcggctgcgggagagcgctgagctgttccagagtgatgagatgaggcctgccaatgaccccaaggagcgggcccccatccgcatccgcatgctgaatgacatcctgcaggacatggagaagagcttcctggtgaagcaggcccctcctggcttctacagaaacatcctgtaccacctggatgagaagaccagccgcttcagcatcctgattgaggcctgggagcactgcaagcccctggccagcaatgagaccctgcaggaggccctgtctgaggtgctgaacagcatcaacagcgcccaggtgtacttcaaggccggcctggatgtgttcaagtctgtgctggatggcaagaactag

SEQ ID NO: 161041 - DNA, 1236 bp, synthetic construct
  misc_feature 1..1236: note = Description of Artificial Sequence: Synthetic coding sequence
  source 1..1236: mol_type = other DNA
atgctgctgaagacagtgctgctgctgggccacgtggcccaggtgctgatgctggacaatggcctgctgcagaccccacccatgggctggctggcctgggagcgcttccgctgcaacatcaactgtgatgaggaccccaagaactgcatcagcgagcagctgttcatggagatggctgacaggatggcccaggacggctggagggacatgggctacacctacctgaacattgatgactgctggattggaggaagagatgccagcggccgcctgatgccagaccccaagcgcttcccccacggcatccccttcctggccgactatgtgcacagcctgggcctgaagctgggcatctatgctgacatgggcaacttcacctgcatgggctacccaggcaccaccctggacaaggtggtgcaggatgcccagacctttgctgagtggaaggtggacatgctgaagctggatggctgcttcagcaccccagaggagcgggcccagggctaccccaagatggccgccgccctgaatgccaccggccggcccatcgccttcagctgctcctggccagcctatgagggcggcctgcccccccgggtgaactacagcctgctggccgacatctgcaacctgtggagaaattatgatgacatccaggacagctggtggagcgtgctgagcatcctgaactggtttgtggagcaccaggacatcctgcagcctgtggccggccctggccactggaatgaccctgacatgctgctgattggcaactttggcctgagcctggagcagagccgggcccagatggccctgtggacagtgctggccgcccccctgctgatgagcacagacctgcggaccatcagcgcccagaacatggacatcctgcagaaccccctgatgatcaagatcaaccaggaccccctgggcatccagggccgccgcatccacaaggagaagagcctcatcgaggtgtacatgaggcccctgagcaacaaggccagcgccctggtgttcttcagctgcaggacagacatgccctaccgctaccacagcagcctgggccagctgaacttcaccggcagcgtcatctatgaggcccaggatgtgtacagcggggacatcatcagcggcctgagagatgagaccaacttcaccgtcatcatcaaccccagcggcgtggtgatgtggtacctgtaccccatcaagaacctggagatgagccagcagtag

SEQ ID NO: 161042 - DNA, 1236 bp, synthetic construct; identical to SEQ ID NO: 161041
  misc_feature 1..1236: note = Description of Artificial Sequence: Synthetic coding sequence
  source 1..1236: mol_type = other DNA

SEQ ID NO: 161043 - DNA, 1236 bp, synthetic construct; identical to SEQ ID NO: 161041
  misc_feature 1..1236: note = Description of Artificial Sequence: Synthetic coding sequence
  source 1..1236: mol_type = other DNA

SEQ ID NO: 161044 - DNA, 1035 bp, synthetic construct
  misc_feature 1..1035: note = Description of Artificial Sequence: Synthetic coding sequence
  source 1..1035: mol_type = other DNA
atggccgccatctatggaggagtggagggcggcggcaccaggtctgaggtgctgctggtgtctgaagatggcaagatcctggccgaggctgatggcctgagcaccaaccactggctgattggaacagacaagtgtgtggagcgcatcaatgagatggtgaacagagccaagaggaaggccggcgtggaccccctggtgcccctgcggagcctgggcctgagcctgagcggcggggaccaggaggatgctggccgcatcctgattgaggagctgcgggaccgcttcccctacctgtctgagagctacctgatcaccacagatgctgctggcagcatcgccacagccaccccagatggcggcgtggtgctgatctctggaacaggcagcaactgccgcctcatcaacccagatggcagcgagagcggctgcggcggctggggccacatgatgggagatgagggcagcgcctactggatcgcccaccaggccgtgaagatcgtgtttgacagcattgacaacctggaggccgcccctcatgacatcggctacgtgaagcaggccatgttccactacttccaggtgcctgaccggctgggcatcctgacccacctgtacagagactttgacaagtgccgctttgctggcttctgcaggaagattgctgagggcgcccagcagggcgaccccctgagccgctacatcttcaggaaggccggggagatgctgggccgccacatcgtggccgtgctgcctgagattgatcctgtgctcttccagggcaagattggcctgcccatcctgtgtgtgggctctgtgtggaagtcctgggagctgctgaaggagggcttcctgctggccctgacccagggccgggagatccaggcccagaacttcttcagcagcttcaccctgatgaagctgcggcacagcagcgccctgggcggggccagcctgggcgcccggcacatcggccacctgctgcccatggactacagcgccaatgccatcgccttctacagctacaccttctcctag

SEQ ID NO: 161045 - DNA, 1173 bp, synthetic construct
  misc_feature 1..1173: note = Description of Artificial Sequence: Synthetic coding sequence
  source 1..1173: mol_type = other DNA
atgaggaccaggacaggcagccagctggccgcccgggaggtgactggaagtggagctgtgccccggcagctggagggccgccgctgccaggccggcagagatgccaacggcggcaccagcagtgatggcagcagctccatggccgccatctatggaggagtggagggcggcggcaccaggtctgaggtgctgctggtgtctgaagatggcaagatcctggccgaggctgatggcctgagcaccaaccactggctgattggaacagacaagtgtgtggagcgcatcaatgagatggtgaacagagccaagaggaaggccggcgtggaccccctggtgcccctgcggagcctgggcctgagcctgagcggcggggaccaggaggatgctggccgcatcctgattgaggagctgcgggaccgcttcccctacctgtctgagagctacctgatcaccacagatgctgctggcagcatcgccacagccaccccagatggcggcgtggtgctgatctctggaacaggcagcaactgccgcctcatcaacccagatggcagcgagagcggctgcggcggctggggccacatgatgggagatgagggcagcgcctactggatcgcccaccaggccgtgaagatcgtgtttgacagcattgacaacctggaggccgcccctcatgacatcggctacgtgaagcaggccatgttccactacttccaggtgcctgaccggctgggcatcctgacccacctgtacagagactttgacaagtgccgctttgctggcttctgcaggaagattgctgagggcgcccagcagggcgaccccctgagccgctacatcttcaggaaggccggggagatgctgggccgccacatcgtggccgtgctgcctgagattgatcctgtgctcttccagggcaagattggcctgcccatcctgtgtgtgggctctgtgtggaagtcctgggagctgctgaaggagggcttcctgctggccctgacccagggccgggagatccaggcccagaacttcttcagcagcttcaccctgatgaagctgcggcacagcagcgccctgggcggggccagcctgggcgcccggcacatcggccacctgctgcccatggactacagcgccaatgccatcgccttctacagctacaccttctcctag

SEQ ID NO: 161046 - DNA, 1548 bp, synthetic construct
  misc_feature 1..1548: note = Description of Artificial Sequence: Synthetic coding sequence
  source 1..1548: mol_type = other DNA
atggccaccagcacaggccgctggctgctgctgcggctggccctgtttggcttcctgtgggaggccagcggcggcctggacagcggggccagcagagatgatgacctgctgctgccctacccccgggcccgggcccggctgccccgggactgcaccagggtgcgggccggcaaccgggagcacgagagctggcccccacctccagccaccccaggagctgggggcctggccgtgaggacctttgtgagccacttccgggacagagctgtggccggccacctgaccagggctgtggagcccctgcggaccttctctgtgctggagcccggcggccctgggggctgtgccgccaggagaagagccaccgtggaggagacagcccgggctgctgactgccgggtggcccagaatggaggcttcttcaggatgaacagcggagaatgtctgggcaatgtggtgtctgatgaaagaagagtgagcagcagcggcggcctgcagaatgcccagtttggcatcagaagagatggcaccctggtgacaggctacctgtctgaggaggaggtgctggacacagagaacccctttgtgcagctgctgagcggcgtggtgtggctgatcagaaatggcagcatctacatcaatgaaagccaggccacagaatgtgatgagacccaggagaccggcagcttcagcaagtttgtgaatgtcatcagcgccaggacagccatcggccatgacaggaagggccagctggtgctcttccacgcagatggccagacagagcagaggggcatcaacctgtgggagatggccgagttcctgctgaagcaggatgtggtgaatgccatcaacctggatggcggcggcagcgccacctttgtgctgaatggcaccctggccagctaccccagcgaccactgccaggacaacatgtggcgctgcccccggcaggtgtccacagtggtgtgtgtgcatgagccccgctgccagcccccagactgccacggccacggcacctgtgtggatggccactgccagtgcaccggccacttctggaggggccctggctgtgatgagctggactgtggccccagcaactgcagccagcacggcctgtgcacagagaccggctgccgctgtgatgctggctggacaggcagcaactgcagcgaggagtgccccctgggctggcacggccctggctgccagaggccctgcaagtgtgagcaccactgcccctgtgaccccaagacaggcaactgcagcgtgtcccgggtgaagcagtgcctgcagcccccagaggccaccctgcgggccggggagctgtccttcttcaccaggacagcctggctggccctgaccctggccctggccttcctgctgctgatcagcacagctgccaacctgagcctgctgctgagcagagctgagaggaacagaaggctgcatggagactatgcctaccaccccctgcaggagatgaatggagagcccctggccgctgagaaggagcagcccggcggggcccacaaccccttcaaggactag

SEQ ID NO: 161047 - DNA, 1446 bp, synthetic construct
  misc_feature 1..1446: note = Description of Artificial Sequence: Synthetic coding sequence
  source 1..1446: mol_type = other DNA
atggccaccagcacaggccgctggctgctgctgcggctggccctgtttggcttcctgtgggaggccagcggcggcctggacagcggggccagcagagatgatgacctgctgctgccctacccccgggcccgggcccggctgccccgggactgcaccagggtgcgggccggcaaccgggagcacgagagctggcccccacctccagccaccccaggagctgggggcctggccgtgaggacctttgtgagccacttccgggacagagctgtggccggccacctgaccagggctgtggagcccctgcggaccttctctgtgctggagcccggcggccctgggggctgtgccgccaggagaagagccaccgtggaggagacagcccgggctgctgactgccgggtggcccagaatggaggcttcttcaggatgaacagcggagaatgtctgggcaatgtggtgtctgatgaaagaagagtgagcagcagcggcggcctgcagaatgcccagtttggcatcagaagagatggcaccctggtgacaggctacctgtctgaggaggaggtgctggacacagagaacccctttgtgcagctgctgagcggcgtggtgtggctgatcagaaatggcagcatctacatcaatgaaagccaggccacagaatgtgatgagacccaggagaccggcagcttcagcaagtttgtgaatgtcatcagcgccaggacagccatcggccatgacaggaagggccagctggtgctcttccacgcagatggccagacagagcagaggggcatcaacctgtgggagatggccgagttcctgctgaagcaggatgtggtgaatgccatcaacctggatggcggcggcagcgccacctttgtgctgaatggcaccctggccagctaccccagcgaccactgccaggacaacatgtggcgctgcccccggcaggtgtccacagtggtgtgtgtgcatgagccccgctgccagcccccagactgccacggccacggcacctgtgtggatggccactgccagtgcaccggccacttctggaggggccctggctgtgatgagctggactgtggccccagcaactgcagccagcacggcctgtgcacagagaccggctgccgctgtgatgctggctggacaggcagcaactgcagcgaggtgaagcagtgcctgcagcccccagaggccaccctgcgggccggggagctgtccttcttcaccaggacagcctggctggccctgaccctggccctggccttcctgctgctgatcagcacagctgccaacctgagcctgctgctgagcagagctgagaggaacagaaggctgcatggagactatgcctaccaccccctgcaggagatgaatggagagcccctggccgctgagaaggagcagcccggcggggcccacaaccccttcaaggactag

SEQ ID NO: 161048 - DNA, 2514 bp, synthetic construct
  misc_feature 1..2514: note = Description of Artificial Sequence: Synthetic coding sequence
  source 1..2514: mol_type = other DNA
atggccgagcccagccaggcccccaccccagccccagctgcccagccccggcccctgcagagccctgccccagcccccacccccaccccagcccccagccctgccagcgcccccatccccacccccaccccagccccagccccagccccagctgctgccccagctggcagcacaggcaccggcggccctggggtgggcagcggcggggccggcagcggcggggaccctgcccggcccggcctgagccagcagcagagggccagccagaggaaggcccaggtgcggggcctgccccgggccaagaagctggagaagctgggcgtcttcagcgcctgcaaggccaatgagacctgcaagtgcaatggctggaagaaccccaagccacccacagcccccaggatggacctgcagcagcctgctgccaacctgtctgagctgtgccgcagctgtgagcaccccctggccgaccacgtgagccacctggagaatgtgtctgaagatgagatcaaccggctgctgggcatggtggtggatgtggagaacctcttcatgtctgtgcacaaggaggaggacacagacaccaagcaggtgtacttctacctgttcaagctgctgaggaagtgcatcctgcagatgaccaggcctgtggtggagggcagcctgggcagccccccatttgagaagcccaacatcgagcagggcgtgctgaactttgtgcagtacaagttcagccacctggccccccgggagcggcagaccatgtttgagctgagcaagatgttcctgctgtgcctgaactactggaagctggagaccccagcccagttccggcagaggagccaggctgaagatgtggccacctacaaggtgaactacacccgctggctgtgctactgccacgtgccccagagctgtgacagcctgcccaggtatgagaccacccacgtgtttggccgcagcctgctgcggagcatcttcaccgtgacccggcggcagctgctggagaagttccgggtggagaaggacaagctggtgcctgagaagaggaccctcatcctgacccacttccccaagttcctgtccatgctggaggaggagatctacggggccaacagccccatctgggagagcggcttcaccatgccacccagcgagggcacccagctggtgcccaggcctgcctctgtgtctgctgctgtggtgcccagcacccccatcttcagccccagcatgggcggcggcagcaacagcagcctgagcctggacagcgctggagctgagcccatgcctggagagaagaggaccctgcctgagaacctgaccctggaggatgccaagaggctgcgggtgatgggagacatccccatggagctggtgaatgaggtgatgctgaccatcacagatcctgctgccatgctgggccctgagaccagcctgctgagcgccaatgctgccagagatgaaacagcccggctggaggagcggcggggcatcatcgagttccacgtgattggcaacagcctgacccccaaggccaacagaagagtgctgctgtggctggtgggcctgcagaatgtgttcagccaccagctgcccaggatgcccaaggagtacatcgcccggctggtgtttgaccccaagcacaagaccctggccctgatcaaggatggccgggtcatcggcggcatctgcttcaggatgttccccacccagggcttcacagagatcgtgttctgtgctgtgaccagcaatgagcaggtgaagggctacggcacccacctgatgaaccacctgaaggagtaccacatcaagcacaacatcctgtacttcctgacctatgcagatgaatatgccatcggctacttcaagaagcagggcttcagcaaggacatcaaggtgcccaagagccgctacctgggctacatcaaggactatgaaggagccaccctgatggagtgtgagctgaacccccgcatcccctacacagagctgagccacatcatcaagaagcagaaggagatcatcaagaagctgattgaaaggaagcaggcccagatcaggaaggtgtacccaggcctgagctgcttcaaggagggcgtgcggcagatccctgtggagagcgtgcccggcatccgggagaccggctggaagcccctgggcaaggagaagggcaaggagctgaaggaccctgaccagctgtacaccaccctgaagaacctgctggcccagatcaagagccaccccagcgcctggcccttcatggagcctgtgaagaagtctgaggccccagactactatgaggtgatccgcttccccatcgacctgaagaccatgacagagcggctgcggagccgctactacgtgaccaggaagctgtttgtggccgacctgcagagggtgattgccaactgccgggagtacaaccccccagacagcgagtactgccgctgtgccagcgccctggagaagttcttctacttcaagctgaaggagggcggcctgattgacaagtag

SEQ ID NO: 161049 - DNA, 1260 bp, synthetic construct
  misc_feature 1..1260: note = Description of Artificial Sequence: Synthetic coding sequence
  source 1..1260: mol_type = other DNA
ccccagtgctgcctgcacagccggggcatgttcccccggctgagccctgtggacacagaagctgtgtggctgctgcagggctggctgttccagcaccagccccagttctggggccctgcccagatccgggctgtgctgggcgctgtgccccggggccgcctgctggtgctggacctgtttgctgagagccagcctgtgtacaccaggacagccagcttccagggccagcccttcatctggtgcatgctgcacaactttggaggcaaccacggcctgtttggagccctggaggccgtgaatggaggccctgaggccgcccggctcttccccaacagcaccatggtgggcaccggcatggcccctgagggcatcagccagaatgaggtggtgtacagcctgatggccgagctgggctggaggaaggaccctgtgcctgacctggccgcctgggtgaccagctttgctgccaggagatatggagtgagccacccagatgctggggccgcctggaggctgctgctgcggtctgtgtacaactgcagcggggaggcctgccggggccacaacagaagccccctggtgagaagacccagcctgcagatgaacaccagcatctggtacaacagaagtgatgtgtttgaggcctggaggctgctgctgaccagcgcccccagcctggccaccagccctgccttccgctatgacctgctggacctgacccggcaggccgtgcaggagctggtgtccctgtactatgaggaggcccggagcgcctacctgagcaaggagctggccagcctgctgcgggccggcggcgtgctggcctatgagctgctgcctgccctggatgaggtgctggccagtgacagccgcttcctgctgggctcctggctggagcaggcccgggctgctgctgtgtctgaggccgaggccgacttctatgagcagaacagccgctaccagctgaccctgtggggccctgagggcaacatcctggactatgccaacaagcagctggccggcctggtggccaactactacaccccccgctggaggctcttcctggaggccctggtggacagcgtggcccagggcatccccttccagcagcaccagtttgacaagaatgtgttccagctggagcaggcctttgtgctgagcaagcagcgctaccccagccagcccaggggggacacagtggacctggccaagaagatcttcctgaagtactacccccgctgggtggccggctcctggtag

SEQ ID NO: 161050 - DNA, 963 bp, synthetic construct
  misc_feature 1..963: note = Description of Artificial Sequence: Synthetic coding sequence
  source 1..963: mol_type = other DNA
atggccttccccaagaagaagctgcagggcctggtggccgccaccatcacccccatgacagaaaatggagagatcaacttcagcgtcatcggccagtatgtggactacctggtgaaggagcagggcgtgaagaacatctttgtgaatggcaccaccggggagggcctgagcctgtctgtgtctgaaagacggcaggtggccgaggagtgggtgaccaagggcaaggacaagctggaccaggtgatcatccacgtgggcgccctgagcctgaaggagagccaggagctggcccagcacgccgctgagattggagcagatggcattgctgtgattgcccccttcttcctgaagccctggaccaaggacatcctgatcaacttcctgaaggaggtggccgccgccgccccagccctgcccttctactactaccacatcccagccctgactggagtgaagatccgggcagaggagctgctggatggcatcctggacaagatccccaccttccagggcctgaagttcagtgacacagacctgctggactttggccagtgtgtggaccagaaccggcagcagcagtttgccttcctgtttggagtggatgagcagctgctgagcgccctggtgatgggcgccactggagctgtgggcagcacctacaactacctgggcaagaagaccaaccagatgctggaggcctttgagcagaaggacttcagcctggccctgaactaccagttctgcatccagcgcttcatcaactttgtggtgaagctgggctttggagtgtcccagaccaaggccatcatgaccctggtgtctggcatccccatgggccccccccggctgcccctgcagaaggccagccgggagttcacagattctgctgaggccaagctgaagagcctggacttcctgtccttcacagacctgaaggatggcaacctggaggccggcagctag

SEQ ID NO: 161051 - DNA, 330 bp, synthetic construct
  misc_feature 1..330: note = Description of Artificial Sequence: Synthetic coding sequence
  source 1..330: mol_type = other DNA
atggccttccccaagaagaagctgcagggcctggtggccgccaccatcacccccatgacagaaaatggagagatcaacttcagcgtcatcggccagtatgtggactacctggtgaaggagcagggcgtgaagaacatctttgtgaatggcaccaccggggagggcctgagcctgtctgtgtctgaaagacggcaggtggccgaggagtgggtgaccaagggcaaggacaagagcaaccaccacaagctgggcaccatccgcaccacccagagccgccgcagcagcttccggcggcagctgaaggcctggcacagcggcagccacctgtag

SEQ ID NO: 161052 - DNA, 558 bp, synthetic construct
  misc_feature 1..558: note = Description of Artificial Sequence: Synthetic coding sequence
  source 1..558: mol_type = other DNA
atgagccgggcccctggcatcctggcctcctggaggcgggcccccagcctgtctgtgcagaagggcagccagacagcccggcacacctgccaccctgaggtgcccctgggcaactgcttcctgcctgtgtacaaggccagccccctgactgtgacccggctgtgggccgagcggctggaccaggtgatcatccacgtgggcgccctgagcctgaaggagagccaggagctggcccagcacgccgctgagatcggggctgatggcattgctgtgattgcccccttcttcctgaagccctggaccaaggacatcctgatcaacttcctgaaggaggtggccgctgctgccccagccctgcccttctactactaccacatcccagccctgactggagtgaagatccgggcagaggagctgctggatggcatcctggacaagatccccaccttccagggcctgaagttcagtgacacagacctgctggactttggccagtgtgtggaccagaaccggcagcagcagtttgccttcctgtttggagtggatgagcacctgtag

SEQ ID NO: 161053 - DNA, 723 bp, synthetic construct
  misc_feature 1..723: note = Description of Artificial Sequence: Synthetic coding sequence
  source 1..723: mol_type = other DNA
atggccttccccaagaagaagctgcagggcctggtggccgccaccatcacccccatgacagaaaatggagagatcaacttcagcgtcatcggccagtatgtggactacctggtgaaggagcagggcgtgaagaacatctttgtgaatggcaccaccggggagggcctgagcctgtctgtgtctgaaagacggcaggtggccgaggagtgggtgaccaagggcaaggacaagctggaccaggtgatcatccacgtgggcgccctgagcctgaaggagagccaggagctggcccagcacgccgctgagattggagcagatggcattgctgtgattgcccccttcttcctgaagccctggaccaaggacatcctgatcaacttcctgaaggaggtggccgccgccgccccagccctgcccttctactactaccacatcccagccctgactggagtgaagatccgggcagaggagctgctggatggcatcctggacaagatccccaccttccagggcctgaagttcagtgacacagacctgctggactttggccagtgtgtggaccagaaccggcagcagcagtttgccttcctgtttggagtggatgagttctgcatccagcgcttcatcaactttgtggtgaagctggagaacagcaagctgaaggtgtccaagaaccagaggaccctgcccctgggcaccaccaacttccccttcctgcactag

SEQ ID NO: 161054 - DNA, 963 bp, synthetic construct; identical to SEQ ID NO: 161050
  misc_feature 1..963: note = Description of Artificial Sequence: Synthetic coding sequence
  source 1..963: mol_type = other DNA

SEQ ID NO: 161055 - DNA, 906 bp, synthetic construct
  misc_feature 1..906: note = Description of Artificial Sequence: Synthetic coding sequence
  source 1..906: mol_type = other DNA
atgagccgggcccctggcatcctggcctcctggaggcgggcccccagcctgtctgtgcagaagggcagccagacagcccggcacacctgccaccctgaggtgcccctgggcaactgcttcctgcctgtgtacaaggccagccccctgactgtgacccggctgtgggccgagcggctggaccaggtgatcatccacgtgggcgccctgagcctgaaggagagccaggagctggcccagcacgccgctgagatcggggctgatggcattgctgtgattgcccccttcttcctgaagccctggaccaaggacatcctgatcaacttcctgaaggaggtggccgctgctgccccagccctgcccttctactactaccacatcccagccctgactggagtgaagatccgggcagaggagctgctggatggcatcctggacaagatccccaccttccagggcctgaagttcagtgacacagacctgctggactttggccagtgtgtggaccagaaccggcagcagcagtttgccttcctgtttggagtggatgagcagctgctgagcgccctggtgatgggcgccaccggggctgtgggcagcacctacaactacctgggcaagaagaccaaccagatgctggaggcctttgagcagaaggacttcagcctggccctgaactaccagttctgcatccagcgcttcatcaactttgtggtgaagctgggcttcggcgtgtcccagaccaaggccatcatgaccctggtgtctggcatccccatgggccccccccggctgcccctgcagaaggccagccgggagttcacagacagcgctgaggccaagctgaagagcctggacttcctgtccttcacagacctgaaggatggcaacctggaggccggcagctag

SEQ ID NO: 161056 - DNA, 723 bp, synthetic construct; identical to SEQ ID NO: 161053
  misc_feature 1..723: note = Description of Artificial Sequence: Synthetic coding sequence
  source 1..723: mol_type = other DNA

SEQ ID NO: 161057 - DNA, 624 bp, synthetic construct
  misc_feature 1..624: note = Description of Artificial Sequence: Synthetic coding sequence
  source 1..624: mol_type = other DNA
cgggagggccagaagggcagccagacagcccggcacacctgccaccctgaggtgcccctgggcaactgcttcctgcctgtgtacaaggccagccccctgactgtgacccggctgtgggccgagcggctggaccaggtgatcatccacgtgggcgccctgagcctgaaggagagccaggagctggcccagcacgccgctgagatcggggctgatggcattgctgtgattgcccccttcttcctgaagccctggaccaaggacatcctgatcaacttcctgaaggaggtggccgctgctgccccagccctgcccttctactactaccacatcccagccctgactggagtgaagaccaccgtggagtgcagcggagatggcagcaactggagcagcggccagttctgcatccagcgcttcatcaactttgtggtgaagctgggcttcggcgtgtcccagaccaaggccatcatgaccctggtgtctggcatccccatgggccccccccggctgcccctgcagaaggccagccgggagttcacagacagcgctgaggccaagctgaagagcctggacttcctgtccttcacagacctgaaggatggcaacctggaggccggcagctag

SEQ ID NO: 161058 - DNA, 747 bp, synthetic construct
  misc_feature 1..747: note = Description of Artificial Sequence: Synthetic coding sequence
  source 1..747: mol_type = other DNA
atgggcctgagccgggtgcgggctgtgttctttgacctggacaacaccctgattgacacagctggggccagcagaagaggcatgctggaggtgatcaagctgctgcagagcaagtaccactacaaggaggaggccgagatcatctgtgacaaggtgcaggtgaagctgagcaaagaatgcttccacccctacaacacctgcatcacagacctgcggaccagccactgggaggaggccatccaggagaccaagggcggggccgccaacaggaagctggccgaggagtgctacttcctgtggaagagcacccggctgcagcacatgaccctggccgaggatgtgaaggccatgctgacagagctgaggaaggaggtgcggctgctgctgctgaccaacggggaccggcagacccagcgggagaagattgaggcctgtgcctgccagagctactttgatgctgtggtggtgggcggggagcagcgggaggagaagccagcccccagcatcttctactactgctgcaacctgctgggcgtgcagcccggggactgtgtgatggtgggggacaccctggagacagacatccagggcggcctgaatgccggcctgaaggccaccgtgtggatcaacaagaatggcatcgtgcccctgaagagcagccctgtgccccactacatggtgtcctctgtgctggagctgcctgccctgctgcagagcattgactgcaaggtgtccatgagcacctag

SEQ ID NO: 161059 - DNA, 1515 bp, synthetic construct
  misc_feature 1..1515: note = Description of Artificial Sequence: Synthetic coding sequence
  source 1..1515: mol_type = other DNA
atggccgcccaggccctggccctgctgcgggaggtggcccggctggaggcccccctggaggagctgcgggccctgcacagcgtgctgcaggccgtgcccctgaatgagctgcggcagcaggccgctgagctgcggctgggccccctcttcagcctgctgaatgaaaaccaccgggagaagaccaccctgtgtgtgtccatcctggagcggctgctgcaggccatggagcctgtgcacgtggccaggaacctgcgggtggacctgcagaggggcctcatccacccagatgacagcgtgaagatcctgaccctgagccagatcggccgcatcgtggagaacagtgatgctgtgacagagatcctgaacaatgctgagctgctgaagcagatcgtgtactgcattggaggagagaacctgtctgtggccaaggccgccatcaagagcctgagccgcatcagcctgacccaggccggcctggaggccctgtttgagagcaacctgctggatgacctgaagtctgtgatgaagaccaatgacatcgtgcgctacagagtgtatgagctgatcatcgagatcagctctgtgtccccagagagcctgaactactgcaccaccagcggcctggtgacccagctgctgcgggagctgactggagaagatgtgctggtgcgggccacctgcatcgagatggtgaccagcctggcctacacccaccacggccggcagtacctggcccaggagggcgtcatcgaccagatcagcaacatcatcgtgggcgctgacagcgaccccttcagcagcttctacctgcccggctttgtgaagttctttggaaacctggccgtgatggacagcccccagcagatctgtgagcgctaccccatctttgtggagaaggtgtttgagatgattgagagccaggaccccaccatgattggagtggccgtggacacagtgggcatcctgggcagcaatgtggagggcaagcaggtgctgcagaagacaggcaccaggtttgagcggctgctgatgagaattggccaccagagcaagaatgcccctgtggagctgaagatccgctgcctggatgccatcagcagcctgctgtacctgcccccagagcagcagacagatgacctgctgaggatgacagagagctggttcagcagcctgagccgggaccccctggagctgttccggggcatcagcagccagcccttccctgagctgcactgtgccgccctgaaggtgttcaccgccatcgccaaccagccctgggcccagaagctgatgttcaacagccctggctttgtggagtatgtggtggacagatctgtggagcatgacaaggccagcaaggatgccaagtatgagctggtgaaggccctggccaacagcaagaccatcgccgagatctttggaaaccccaactacctgcggctgcggacctacctgtctgagggcccctactacgtgaagcctgtgtccaccacagctgtggagggcgctgagtag

SEQ ID NO: 161060 - DNA, 423 bp, synthetic construct
  misc_feature 1..423: note = Description of Artificial Sequence: Synthetic coding sequence
  source 1..423: mol_type = other DNA
atggtgctggtgctggactacagcggccggcccatggtgatcagcagcggcatgcagagcatggacaccatgaagcaggtgtaccagatcgtgaagcccctgaaccccaacttctgcttcctgcagtgcaccagcgcctaccccctgcagccagaagatgtgaacctgcgggtcatcagcgagtaccagaagctgttcccagacatccccatcggctacagcggccacgagaccggcatcgccatctctgtggccgctgtggccctgggcgccaaggtgctggagcggcacatcaccctggacaagacctggaagggcagtgaccacagcgccagcctggagcctggagagctggccgagctggtgcgctctgtgcggctggtggagcgggccctgggcagccccaccaagcagctgctgtag

SEQ ID NO: 161061 - DNA, 348 bp, synthetic construct
  misc_feature 1..348: note = Description of Artificial Sequence: Synthetic coding sequence
  source 1..348: mol_type = other DNA
gaagatgtgaacctgcgggtcatcagcgagtaccagaagctgttcccagacatccccatcggctacagcggccatgaaacaggaattgccatctctgtggccgctgtggccctgggcgccaaggtgctggagcggcacatcaccctggacaagacctggaagggcagtgaccacagcgccagcctggagcccggggagctggccgagctggtgcgctctgtgcggctggtggagcgggccctgggcagccccaccaagcagctgctgccctgtgagatggcctgcaatgagaaggtgtgcccagctggcctgtacagcgtgctgctgccctgtgtggagaagggctag

SEQ ID NO: 161062 - DNA, 873 bp, synthetic construct
  misc_feature 1..873: note = Description of Artificial Sequence: Synthetic coding sequence
  source 1..873: mol_type = other DNA
atggacatcgaggcctacctggagcgcatcggctacaagaagagcaggaacaagctggacctggagaccctgacagacatcctgcagcaccagatccgggctgtgccctttgagaacctgaacatccactgtggagatgccatggacctgggcctggaggccatctttgaccaggtggtgagaagaaacagaggaggctggtgcctgcaggtgaaccacctgctgtactgggccctgaccaccatcggctttgagaccaccatgctgggcggctacgtgtacagcaccccagccaagaagtacagcacaggcatgatccacctgctgctgcaggtgaccattgatggaagaaactacatcgtggatgctggcttcggccgcagctaccagatgtggcagcccctggagctgatcagcggcaaggaccagccccaggtgccctgtgtgttccggctgacagaagaaaatggcttctggtacctggaccagatcagaagagagcagtacatccccaatgaggagttcctgcacagcgacctgctggaggacagcaagtacaggaagatctacagcttcaccctgaagcccaggaccatcgaggactttgagagcatgaacacctacctgcagaccagccccagctctgtgttcaccagcaagagcttctgcagcctgcagaccccagatggagtgcactgcctggtgggcttcaccctgacccaccggcgcttcaactacaaggacaacacagacctgattgagttcaagaccctgtctgaggaggagattgagaaggtgctgaagaacatcttcaacatcagcctgcagaggaagctggtgcccaagcatggagaccgcttcttcaccatctag

SEQ ID NO: 161063 - DNA, 873 bp, synthetic construct; identical to SEQ ID NO: 161062
  misc_feature 1..873: note = Description of Artificial Sequence: Synthetic coding sequence
  source 1..873: mol_type = other DNA

SEQ ID NO: 161064 - DNA, 873 bp, synthetic construct; identical to SEQ ID NO: 161062
  misc_feature 1..873: note = Description of Artificial Sequence: Synthetic coding sequence
  source 1..873: mol_type = other DNA

SEQ ID NO: 161065 - DNA, 873 bp, synthetic construct; identical to SEQ ID NO: 161062
  misc_feature 1..873: note = Description of Artificial Sequence: Synthetic coding sequence
  source 1..873: mol_type = other DNA

SEQ ID NO: 161066 - DNA, 873 bp, synthetic construct; identical to SEQ ID NO: 161062
  misc_feature 1..873: note = Description of Artificial Sequence: Synthetic coding sequence
  source 1..873: mol_type = other DNA

SEQ ID NO: 161067 - DNA, 873 bp, synthetic construct; identical to SEQ ID NO: 161062
  misc_feature 1..873: note = Description of Artificial Sequence: Synthetic coding sequence
  source 1..873: mol_type = other DNA

SEQ ID NO: 161068 - DNA, 873 bp, synthetic construct; identical to SEQ ID NO: 161062
  misc_feature 1..873: note = Description of Artificial Sequence: Synthetic coding sequence
  source 1..873: mol_type = other DNA

SEQ ID NO: 161069 - DNA, 1059 bp, synthetic construct
  misc_feature 1..1059: note = Description of Artificial Sequence: Synthetic coding sequence
  source 1..1059: mol_type = other DNA
atgctgctgctgctgctgcacaaggaggccgccctggagccccagggccctgctgtgggctacaacagcctgcctgtgtctgatgaccaccacgtgtctggcatccaggccaggaagaagcagcagagcgtcttctggatcaagacagaggaccagcccaccttcaacctgctgaggaagggcatcatggacatcgaggcctacctggagcgcatcggctacaagaagagcaggaacaagctggacctggagaccctgacagacatcctgcagcaccagatccgggctgtgccctttgagaacctgaacatccactgtggagatgccatggacctgggcctggaggccatctttgaccaggtggtgagaagaaacagaggaggctggtgcctgcaggtgaaccacctgctgtactgggccctgaccaccatcggctttgagaccaccatgctgggcggctacgtgtacagcaccccagccaagaagtacagcacaggcatgatccacctgctgctgcaggtgaccattgatggaagaaactacatcgtggatgctggcttcggccgcagctaccagatgtggcagcccctggagctgatcagcggcaaggaccagccccaggtgccctgtgtgttccggctgacagaagaaaatggcttctggtacctggaccagatcagaagagagcagtacatccccaatgaggagttcctgcacagcgacctgctggaggacagcaagtacaggaagatctacagcttcaccctgaagcccaggaccatcgaggactttgagagcatgaacacctacctgcagaccagccccagctctgtgttcaccagcaagagcttctgcagcctgcagaccccagatggagtgcactgcctggtgggcttcaccctgacccaccggcgcttcaactacaaggacaacacagacctgattgagttcaagaccctgtctgaggaggagattgagaaggtgctgaagaacatcttcaacatcagcctgcagaggaagctggtgcccaagcatggagaccgcttcttcaccatctag

SEQ ID NO: 161070 - DNA, 873 bp, synthetic construct
  misc_feature 1..873: note = Description of Artificial Sequence: Synthetic coding sequence
  source 1..873: mol_type = other DNA
atggacatcgaggcctactttgagcgcatcggctacaagaacagcaggaacaagctggacctggagaccctgacagacatcctggagcaccagatccgggctgtgccctttgagaacctgaacatgcactgcggccaggccatggagctgggcctggaggccatctttgaccacatcgtgagaagaaacagaggaggctggtgcctgcaggtgaaccagctgctgtactgggccctgaccaccatcggcttccagaccaccatgctgggcggctacttctacatcccccctgtgaacaagtacagcacaggcatggtgcacctgctgctgcaggtgaccattgatggaagaaactacatcgtggatgctggcagcggcagcagcagccagatgtggcagcccctggagctgatcagcggcaaggaccagccccaggtgccctgcatcttctgcctgacagaggagcggggcatctggtacctggaccagatcagaagagagcagtacatcaccaacaaggagttcctgaacagccacctgctgcccaagaagaagcaccagaagatctacctgttcaccctggagcccaggaccatcgaggactttgagagcatgaacacctacctgcagaccagccccaccagcagcttcatcaccaccagcttctgcagcctgcagaccccagagggcgtgtactgcctggtgggcttcatcctgacctacaggaagttcaactacaaggacaacacagacctggtggagttcaagaccctgacagaggaggaggtggaggaggtgctgaggaacatcttcaagatcagcctgggcaggaacctggtgcccaagccaggagatggcagcctgaccatctag

SEQ ID NO: 161071 - DNA, 684 bp, synthetic construct
  misc_feature 1..684: note = Description of Artificial Sequence: Synthetic coding sequence
  source 1..684: mol_type = other DNA
atggccccctgccacatcaggaagtaccaggagagtgaccggcagtgggtggtgggcctgctgagccggggcatggccgagcacgccccagccaccttccggcagctgctgaagctgcccaggaccctcatcctgctgctgggcggccccctggccctgctgctggtgtctggctcctggctgctggccctggtgttcagcatcagcctcttccctgccctgtggttcctggccaagaagccctggacagaatatgtggacatgaccctgtgcacagacatgtctgacatcaccaagagctacctgtctgagcggggcagctgcttctgggtggccgagagcgaggagaaggtggtgggcatggtgggcgccctgcctgtggatgaccccaccctgcgggagaagaggctgcagctgttccacctgtttgtggacagcgagcaccggcggcagggcatcgccaaggccctggtgaggacagtgctgcagtttgcccgggaccagggctacagcgaggtgatcctggacaccggcaccatccagctgagcgccatggccctgtaccagagcatgggcttcaagaagacaggccagagcttcttctgtgtgtgggcccggctggtggccctgcacacagtgcacttcatctaccacctgcccagcagcaaggtgggcagcctgtag

SEQ ID NO: 161072 - DNA, 405 bp, synthetic construct
  misc_feature 1..405: note = Description of Artificial Sequence: Synthetic coding sequence
  source 1..405: mol_type = other DNA
atggctgacatcgagcagtactacatgaagcccccaggcagctgcttctgggtggccgtgctggatggaaatgtggtgggcatcgtggccgcccgggcccacgaggaggacaacacagtggagctgctgaggatgtctgtggacagccgcttccggggcaagggcatcgccaaggccctgggcaggaaggtgctggagtttgctgtggtgcacaactacagcgctgtggtgctgggcaccacagctgtgaaggtggccgcccacaagctgtatgagagcctgggcttccgccacatgggcgccagtgaccactacgtgctgcccggcatgaccctgagcctggccgagcggctcttcttccaggtgcgctaccaccgctaccgcctgcagctgcgggaggagtag

SEQ ID NO: 161073 - DNA, 909 bp, synthetic construct
  misc_feature 1..909: note = Description of Artificial Sequence: Synthetic coding sequence
  source 1..909: mol_type = other DNA
atgcactgcggccccccagacatggtgtgtgagaccaagatcgtggccgctgaggaccacgaggccctgcccggggccaagaaggatgccctgctggccgctgctggggccatgtggccacccctgcctgctgcccctggccctgctgctgcccccccagcccctcctccagcccctgtggcccagccccacggcggggccggcggggccggccccccaggcggccggggcgtgtgcatccgggagttccgggctgctgagcaggaggccgcccggcgcatcttctatgatggcatcatggagcgcatccccaacacagccttccggggcctgcggcagcacccccgggcccagctgctgtatgccctgctggccgccctgtgctttgctgtgagccgcagcctgctgctgacctgcctggtgcctgctgccctgctgggcctgcgctactactacagcaggaaggtgatccgggcctacctggagtgtgccctgcacacagacatggctgacatcgagcagtactacatgaagcccccaggcagctgcttctgggtggccgtgctggatggaaatgtggtgggcatcgtggccgcccgggcccacgaggaggacaacacagtggagctgctgaggatgtctgtggacagccgcttccggggcaagggcatcgccaaggccctgggcaggaaggtgctggagtttgctgtggtgcacaactacagcgctgtggtgctgggcaccacagctgtgaaggtggccgcccacaagctgtatgagagcctgggcttccgccacatgggcgccagtgaccactacgtgctgcccggcatgaccctgagcctggccgagcggctcttcttccaggtgcgctaccaccgctaccgcctgcagctgcgggaggagtag

SEQ ID NO: 161074 - DNA, 1182 bp, synthetic construct
  misc_feature 1..1182: note = Description of Artificial Sequence: Synthetic coding sequence
  source 1..1182: mol_type = other DNA
atggatgaaaatgaaagcaaccagagcctgatgaccagcagccagtaccccaaggaggccgtgaggaagaggcagaacagcgccagaaattctggggccagtgacagcagccgcttcagcaggaagagcttcaagctggactaccgcctggaggaggatgtgaccaagagcaagaagggcaaggatggccgctttgtgaacccctggcccacctggaagaaccccagcatccccaacgtgctgcgctggctgatcatggagaaggaccacagctctgtgcccagcagcaaggaggagctggacaaggagctgcctgtgctgaagccctacttcatcaccaaccctgaggaggccggcgtgcgggaggccggcctgcgggtgacctggctgggccacgccaccgtgatggtggagatggatgagctgatcttcctgacagaccccatcttcagcagccgggccagccccagccagtacatgggccccaagcgcttccgccgcagcccctgcaccatcagcgagctgccccccattgatgctgtgctgatcagccacaaccactatgaccacctggactacaacagcgtgattgccctgaatgaaagatttggaaatgagctgcgctggtttgtgcccctgggcctgctggactggatgcagaagtgtggctgtgaaaatgtcatcgagctggactggtgggaggagaactgtgtgcccggccatgacaaggtgacctttgtgttcacccccagccagcactggtgcaagaggaccctgatggatgacaacaaggtgctgtggggctcctggagcgtgctgggcccctggaaccgcttcttctttgctggggacaccggctactgcccagcctttgaggagatcggcaagcgcttcggcccctttgacctggccgccatccccatcggggcctatgagccccgctggttcatgaagtaccagcacgtggaccctgaggaggccgtgcgcatccacacagatgtgcagaccaagaagtccatggccatccactggggcacctttgccctggccaatgagcactacctggagccccctgtgaagctgaatgaggccctggagagatatggcctgaatgctgaggacttctttgtgctgaagcacggggagagccgctacctgaacaatgatgatgagaacttctag

SEQ ID NO: 161075 - DNA, 375 bp, synthetic construct
  misc_feature 1..375: note = Description of Artificial Sequence: Synthetic coding sequence
  source 1..375: mol_type = other DNA
atggatgaaaatgaaagcaaccagagcctgatgaccagcagccagtaccccaaggaggccgtgaggaagaggcagaacagcgccagaaattctggggccagtgacagcagccgcttcagcaggaagagcttcaagctggactaccgcctggaggaggatgtgaccaagagcaagaagggcaaggatggccgctttgtgaacccctggcccacctggaagaaccccagcatccccaacgtgctgcgctggctgatcatggagaaggaccacagctctgtgcccagcagcaaggaggagctggacaaggagctgcctgtgctgaagccctacttcatcaccaaccctgaggaggccggcgtgcgggaggccggctag

SEQ ID NO: 161076 - DNA, 1182 bp, synthetic construct; identical to SEQ ID NO: 161074
  misc_feature 1..1182: note = Description of Artificial Sequence: Synthetic coding sequence
  source 1..1182: mol_type = other DNA

SEQ ID NO: 161077 - DNA, 18 bp, synthetic construct
  misc_feature 1..18: note = Description of Artificial Sequence: Synthetic coding sequence
  source 1..18: mol_type = other DNA
atggatgaaaatgaatag

SEQ ID NO: 161078 - DNA, 1182 bp, synthetic construct; identical to SEQ ID NO: 161074
  misc_feature 1..1182: note = Description of Artificial Sequence: Synthetic coding sequence
  source 1..1182: mol_type = other DNA

SEQ ID NO: 161079 - DNA, 1401 bp, synthetic construct
  misc_feature 1..1401: note = Description of Artificial Sequence: Synthetic coding sequence
  source 1..1401: mol_type = other DNA
atggcccggcggcgggagctgaagcgctgcctgcagctgctggccagcagcgctgagcccgcccggcgggcccgggtgaggaagaaccccagcgcctgccggggccggcccagccgctatgctgctgccctgtgtgccggcaccctgtggccagaggccgctgagctgcggcggcgggccctgcctgccacccccagcgccagcagcagccccaaggacatggatgaaaatgaaagcaaccagagcctgatgaccagcagccagtaccccaaggaggccgtgaggaagaggcagaacagcgccaggaacagcggggccagtgacagcagccgcttcagcaggaagagcttcaagctggactaccgcctggaggaggatgtgaccaagagcaagaagggcaaggatggccgctttgtgaacccctggcccacctggaagaaccccagcatccccaacgtgctgcgctggctgatcatggagaaggaccacagctctgtgcccagcagcaaggaggagctggacaaggagctgcctgtgctgaagccctacttcatcaccaaccctgaggaggccggcgtgcgggaggccggcctgcgggtgacctggctgggccacgccaccgtgatggtggagatggatgagctgatcttcctgacagaccccatcttcagcagccgggccagccccagccagtacatgggccccaagcgcttcagaagaagcccctgcaccatcagcgagctgccccccattgatgctgtgctgatcagccacaaccactatgaccacctggactacaacagcgtcatcgccctgaatgaaagatttggaaatgagctgcgctggtttgtgcccctgggcctgctggactggatgcagaagtgtggctgtgaaaatgtgattgagctggactggtgggaggagaactgtgtgcccggccatgacaaggtgacctttgtgttcacccccagccagcactggtgcaagaggaccctgatggatgacaacaaggtgctgtggggctcctggagcgtgctgggcccctggaaccgcttcttctttgctggggacaccggctactgcccagcctttgaggagatcggcaagagatttggcccctttgacctggccgccatccccatcggggcctatgagccccgctggttcatgaagtaccagcacgtggaccctgaggaggccgtgcgcatccacacagatgtgcagaccaagaagtccatggccatccactggggcacctttgccctggccaatgagcactacctggagccccctgtgaagctgaatgaggccctggagagatatggcctgaatgctgaggacttctttgtgctgaagcatggagagagccgctacctgaacaatgatgatgagaacttctag

SEQ ID NO: 161080 - DNA, 1182 bp, synthetic construct; identical to SEQ ID NO: 161074
  misc_feature 1..1182: note = Description of Artificial Sequence: Synthetic coding sequence
  source 1..1182: mol_type = other DNA

SEQ ID NO: 161081 - DNA, 2199 bp, synthetic construct
  misc_feature 1..2199: note = Description of Artificial Sequence: Synthetic coding sequence
  source 1..2199: mol_type = other DNA
atggagcggcaggtgctgctgtctgagcctgaggaggccgccgccctgtaccggggcctgagccggcagcctgccctgtctgctgcctgcctgggccctgaggtgaccacccagtatggaggccagtacagaacagtgcacacagagtggacccagagggacctggagaggatggagaacatccgcttctgccggcagtacctggtgttccatgatggagacagcgtggtgtttgctggccctgctggcaacagcgtggagaccagaggagagctgctgagccgggagagccccagcggcaccatgaaggctgtgctgaggaaggccggcggcaccggccctggagaggagaagcagttcctggaggtgtgggagaagaacaggaagctgaagagcttcaacctgagcgccctggagaagcacggccctgtgtatgaagatgactgcttcggctgcctgtcctggagccacagcgagacccacctgctgtatgtggccgagaagaagaggcccaaggccgagagcttcttccagaccaaggccctggatgtgtctgccagtgatgatgaaattgcccggctgaagaagccagaccaggccatcaagggggaccagtttgtgttctatgaggactggggcgagaacatggtgtccaagagcatccctgtgctgtgtgtgctggatgtggagagcggcaacatctctgtgctggagggcgtgcctgaaaatgtgtccccaggccaggccttctgggcccctggagatgctggggtggtgtttgtgggctggtggcatgagcccttccggctgggcatccgcttctgcaccaacagaagaagtgccctgtactacgtggacctgattggaggaaaatgtgagctgctgagtgatgacagcctggccgtgagcagcccccggctgagcccagaccagtgccgcatcgtgtacctgcagtaccccagcctcatcccccaccaccagtgcagccagctgtgcctgtatgactggtacaccaaggtgacctctgtggtggtggatgtggtgccccggcagctgggggagaacttcagcggcatctactgcagcctgctgcccctgggctgctggagcgctgacagccagagggtggtgtttgacagcgcccagaggagccggcaggacctgtttgctgtggacacccaggtgggcaccgtgaccagcctgacagctgggggcagcggcggctcctggaagctgctgaccatcgaccaggacctgatggtggcccagttcagcacccccagcctgccccccaccctgaaggtgggcttcctgcccagcgctgggaaggagcagagcgtgctgtgggtgtccctggaggaggccgagcccatcccagacatccactggggcatccgggtgctgcagcccccacctgagcaggagaatgtgcagtatgccggcctggactttgaggccatcctgctgcagcccggcagccccccagacaagacccaggtgcccatggtggtgatgcctcatggaggcccccacagcagctttgtgacagcctggatgctgtttcctgccatgctgtgcaagatgggctttgctgtgctgctggtgaactaccggggcagcactggatttggccaggacagcatcctgagcctgcctggaaatgtgggccaccaggatgtgaaggatgtgcagtttgctgtggagcaggtgctgcaggaggagcactttgatgccagccacgtggccctgatgggcggcagccacggcggcttcatcagctgccacctgattggccagtacccagagacctaccgggcctgtgtggccaggaaccctgtgatcaacatcgcctccatgctgggcagcacagacatcccagactggtgtgtggtggaggccggcttccccttcagcagtgactgcctgcctgacctgtctgtgtgggccgagatgctggacaagagccccatccgctacatcccccaggtgaagacccccctgctgctgatgctgggccaggaggaccggcgggtgcccttcaagcagggcatggagtactaccgggccctgaagaccagaaatgtgcctgtgcggctgctgctgtaccccaagagcacccacgccctgtctgaggtggaggtggagagtgacagcttcatgaatgctgtgctgtggctgcggacccacctgggcagctag

SEQ ID NO: 161082 - DNA, 1833 bp, synthetic construct
  misc_feature 1..1833: note = Description of Artificial Sequence: Synthetic coding sequence
  source 1..1833: mol_type = other DNA
gtgctgaaccggctgcagagcaaatatggcagcctgtaccgccgggacaacgtcatcctgagcggcacccacacccacagcggccctgctggctacttccagtacacagtgtttgtgattgccagcgagggcttcagcaaccagaccttccagcacatggtgacaggcatcctgaagagcattgatattgcccacaccaacatgaagccaggcaagatcttcatcaacaagggaaatgtggatggagtgcagatcaacagaagcccctacagctacctgcagaacccccagagcgagcgggcccgctacagcagcaacacagacaaggagatgattgtgctgaagatggtggacctgaatggagatgacctgggcctcatctcctggtttgccatccaccctgtgtccatgaacaacagcaaccacctggtgaacagcgacaacgtgggctacgccagctacctgctggagcaggagaagaacaagggctacctgcccggccagggcccctttgtggccgccttcagcagcagcaacctgggagatgtgagccccaacatcctgggcccccgctgcatcaacacaggagagagctgtgacaatgccaacagcacctgccccatcggcggccccagcatgtgcatcgccaagggccctggccaggacatgtttgacagcacccagatcatcggccgggccatgtaccagagggccaaggagctgtatgccagcgccagccaggaggtgacaggccccctggccagcgcccaccagtgggtggacatgacagatgtgacagtgtggctgaacagcacccacgccagcaagacctgcaagccagccctgggctacagctttgctgctggcaccattgatggagtgggcggcctgaacttcacccagggcaagacagaaggagaccccttctgggacaccatccgggaccagatcctgggcaagcccagcgaggagatcaaggagtgccacaagcccaagcccatcctgctgcacactggagagctgagcaagccccacccctggcacccagacatcgtggatgtgcagatcatcaccctgggcagcctggccatcacagccatccctggagagttcaccaccatgtctggaagaaggctgcgggaggccgtgcaggccgagtttgccagccacggcatgcagaacatgacagtggtgatcagcggcctgtgcaatgtgtacacccactacatcaccacctatgaggagtaccaggcccagagatatgaagctgccagcaccatctacggcccccacaccctgagcgcctacatccagctgttcaggaacctggccaaggccatcgccacagacacagtggccaacctgagccggggccctgagccccccttcttcaagcagctgattgtgcccctcatccccagcatcgtggaccgggcccccaagggccgcacctttggagatgtgctgcagcctgccaagccagagtacagagtgggggaggtggccgaggtgatctttgtgggcgccaaccccaagaacagcgtgcagaaccagaaccaccagaccttcctgactgtggagaagtatgaggccaccagcacctcctggcagatcgtgtgcaatgatgcctcctgggagacccgcttctactggcacaagggcctgctgggcctgagcaatgccaccgtggagtggcacatcccagacacagcccagcccggcatctaccgcatccgctacttcggccacaacaggaagcaggacatcctgaagccagctgtgatcctgagctttgagggcaccagccctgcctttgaggtggtgaccatctag

SEQ ID NO: 161083 - DNA, 1869 bp, synthetic construct
  misc_feature 1..1869: note = Description of Artificial Sequence: Synthetic coding sequence
  source 1..1869: mol_type = other DNA
atggattctgagaagagcagcgagtggaggagtgatgtgctgaaccggctgcagagcaaatatggcagcctgtaccgccgggacaacgtcatcctgagcggcacccacacccacagcggccctgctggctacttccagtacacagtgtttgtgattgccagcgagggcttcagcaaccagaccttccagcacatggtgacaggcatcctgaagagcattgatattgcccacaccaacatgaagccaggcaagatcttcatcaacaagggaaatgtggatggagtgcagatcaacagaagcccctacagctacctgcagaacccccagagcgagcgggcccgctacagcagcaacacagacaaggagatgattgtgctgaagatggtggacctgaatggagatgacctgggcctcatctcctggtttgccatccaccctgtgtccatgaacaacagcaaccacctggtgaacagcgacaacgtgggctacgccagctacctgctggagcaggagaagaacaagggctacctgcccggccagggcccctttgtggccgccttcagcagcagcaacctgggagatgtgagccccaacatcctgggcccccgctgcatcaacacaggagagagctgtgacaatgccaacagcacctgccccatcggcggccccagcatgtgcatcgccaagggccctggccaggacatgtttgacagcacccagatcatcggccgggccatgtaccagagggccaaggagctgtatgccagcgccagccaggaggtgacaggccccctggccagcgcccaccagtgggtggacatgacagatgtgacagtgtggctgaacagcacccacgccagcaagacctgcaagccagccctgggctacagctttgctgctggcaccattgatggagtgggcggcctgaacttcacccagggcaagacagaaggagaccccttctgggacaccatccgggaccagatcctgggcaagcccagcgaggagatcaaggagtgccacaagcccaagcccatcctgctgcacactggagagctgagcaagccccacccctggcacccagacatcgtggatgtgcagatcatcaccctgggcagcctggccatcacagccatccctggagagttcaccaccatgtctggaagaaggctgcgggaggccgtgcaggccgagtttgccagccacggcatgcagaacatgacagtggtgatcagcggcctgtgcaatgtgtacacccactacatcaccacctatgaggagtaccaggcccagagatatgaagctgccagcaccatctacggcccccacaccctgagcgcctacatccagctgttcaggaacctggccaaggccatcgccacagacacagtggccaacctgagccggggccctgagccccccttcttcaagcagctgattgtgcccctcatccccagcatcgtggaccgggcccccaagggccgcacctttggagatgtgctgcagcctgccaagccagagtacagagtgggggaggtggccgaggtgatctttgtgggcgccaaccccaagaacagcgtgcagaaccagaaccaccagaccttcctgactgtggagaagtatgaggccaccagcacctcctggcagatcgtgtgcaatgatgcctcctgggagacccgcttctactggcacaagggcctgctgggcctgagcaatgccaccgtggagtggcacatcccagacacagcccagcccggcatctaccgcatccgctacttcggccacaacaggaagcaggacatcctgaagccagctgtgatcctgagctttgagggcaccagccctgcctttgaggtggtgaccatctag

SEQ ID NO: 161084 - DNA, 1341 bp, synthetic construct
  misc_feature 1..1341: note = Description of Artificial Sequence: Synthetic coding sequence
  source 1..1341: mol_type = other DNA
atggagatggagcaggagaagatgaccatgaacaaggagctgagcccagatgctgctgcctactgctgcagcgcctgccacggagatgagacctggagctacaaccaccccatccggggccgggccaagagccgcagcctgagcgccagccctgccctgggcagcaccaaggagttccggaggaccaggagcctgcacggcccctgccctgtgaccaccttcggccccaaggcctgtgtgctgcagaacccccagaccatcatgcacatccaggaccctgccagccagaggctgacctggaacaagagccccaagtctgtgctggtgatcaagaagatgagagatgccagcctgctgcagcccttcaaggagctgtgcacccacctgatggaggagaacatgattgtgtatgtggagaagaaggtgctggaggaccctgccatcgccagtgatgagagctttggagctgtgaagaagaagttctgcaccttccgggaggactatgatgacatcagcaaccagattgacttcatcatctgcctgggcggagatggcaccctgctgtatgccagcagcctcttccagggctctgtgccccctgtgatggccttccacctgggcagcctgggcttcctgacccccttctcctttgagaacttccagagccaggtgacccaggtgattgagggcaatgctgctgtggtgctgcggagccggctgaaggtgcgggtggtgaaggagctgcggggcaagaagacagctgtgcacaacggcctgggagaaaatggcagccaggccgccggcctggacatggatgtgggcaagcaggccatgcagtaccaggtgctgaatgaggtggtgattgaccggggccccagcagctacctgagcaatgtggatgtgtacctggatggccacctgatcaccaccgtgcagggagatggagtgattgtgtccacccccaccggcagcacagcctatgctgctgctgctggggcctccatgatccaccccaacgtgcctgccatcatgatcacccccatctgcccccacagcctgtccttccggcccatcgtggtgcctgctggggtggagctgaagatcatgctgagccctgaggccaggaacacagcctgggtgtcctttgatggcaggaagaggcaggagatccgccacggggacagcatcagcatcaccaccagctgctaccccctgcccagcatctgtgtgcgggaccctgtgtctgactggtttgagagcctggcccagtgcctgcactggaatgtgaggaagaagcaggcccactttgaggaggaggaggaggaggaggaggagggctag

SEQ ID NO: 161085 - DNA, 1341 bp, synthetic construct; identical to SEQ ID NO: 161084
  misc_feature 1..1341: note = Description of Artificial Sequence: Synthetic coding sequence
  source 1..1341: mol_type = other DNA

SEQ ID NO: 161086 - DNA, 1245 bp, synthetic construct
  misc_feature 1..1245: note = Description of Artificial Sequence: Synthetic coding sequence
  source 1..1245: mol_type = other DNA
atgggccggccccgggtgcggcaggcctggccaggctgctgcggccacacaggccgcctgcctgctggccggggctacctggccagccacatgtgtgaccctgctggagctgagctgattggagatggcatgtctgaccccaccccacccagcaatgcctgcaccggccacatccaggaccctgccagccagaggctgacctggaacaagagccccaagtctgtgctggtgatcaagaagatgagagatgccagcctgctgcagcccttcaaggagctgtgcacccacctgatggaggagaacatgattgtgtatgtggagaagaaggtgctggaggaccctgccatcgccagtgatgagagctttggagctgtgaagaagaagttctgcaccttccgggaggactatgatgacatcagcaaccagattgacttcatcatctgcctgggcggagatggcaccctgctgtatgccagcagcctcttccagggctctgtgccccctgtgatggccttccacctgggcagcctgggcttcctgacccccttctcctttgagaacttccagagccaggtgacccaggtgattgagggcaatgctgctgtggtgctgcggagccggctgaaggtgcgggtggtgaaggagctgcggggcaagaagacagctgtgcacaacggcctgggagaaaatggcagccaggccgccggcctggacatggatgtgggcaagcaggccatgcagtaccaggtgctgaatgaggtggtgattgaccggggccccagcagctacctgagcaatgtggatgtgtacctggatggccacctgatcaccaccgtgcagggagatggagtgattgtgtccacccccaccggcagcacagcctatgctgctgctgctggggcctccatgatccaccccaacgtgcctgccatcatgatcacccccatctgcccccacagcctgtccttccggcccatcgtggtgcctgctggggtggagctgaagatcatgctgagccctgaggccaggaacacagcctgggtgtcctttgatggcaggaagaggcaggagatccgccacggggacagcatcagcatcaccaccagctgctaccccctgcccagcatctgtgtgcgggaccctgtgtctgactggtttgagagcctggcccagtgcctgcactggaatgtgaggaagaagcaggcccactttgaggaggaggaggaggaggaggaggagggctag

SEQ ID NO: 161087 - DNA, 1776 bp, synthetic construct
  misc_feature 1..1776: note = Description of Artificial Sequence: Synthetic coding sequence
  source 1..1776: mol_type = other DNA
atggagatggagcaggagaagatgaccatgaacaaggagctgagcccagatgctgctgcctactgctgcagcgcctgccacggagatgagacctggagctacaaccaccccatccggggccgggccaagagccgcagcctgagcgccagccctgccctgggcagcaccaaggagttccggaggaccaggagcctgcacggcccctgccctgtgaccaccttcggccccaaggcctgtgtgctgcagaacccccagaccatcatcgccacccccctgagcctggccagccagctgctgcccagccctgctgtgagccacagcggccagggcggcgtgacaggccaggtgcacgtgctgccccagcccagcgaccagggcgtgctgagcggccccagggctgcccggggccagacagccccccaggaggaggccgtgacccaggaggaggtggaggccctggtgtgtggccacacccagcgctgggtgcccggccctgtgtatgatgctgctgctgggggcagcggctgggcccagctgagcctgcgggccggcatgggcgtgggccaggccaccggccacatccaggaccctgccagccagaggctgacctggaacaagagccccaagtctgtgctggtgatcaagaagatgagagatgccagcctgctgcagcccttcaaggagctgtgcacccacctgatggaggcccggggagctgggggcaagggggcctggggcgcccacggcgtgggcggggccagcatccacatcacagccccccgggtgggcagcgctgggggcatgagccggctggccctgtgcttccaggagaacatgattgtgtatgtggagaagaaggtgctggaggaccctgccatcgccagtgatgagagctttggagctgtgaagaagaagttctgcaccttcagagaagattatgatgacatcagcaaccagattgacttcatcatctgcctgggcggagatggcaccctgctgtatgccagcagcctcttccagggctctgtgccccctgtgatggccttccacctgggcagcctgggcttcctgacccccttctcctttgagaacttccagagccaggtgacccaggtgattgagggcaatgctgctgtggtgctgcggagccggctgaaggtgcgggtggtgaaggagctgcggggcaagaagacagctgtgcacaacggcctgggggagaatggcagccaggccgccggcctggacatggatgtgggcaagcaggccatgcagtaccaggtgctgaatgaggtggtgattgaccggggccccagcagctacctgagcaatgtggatgtgtacctggatggccacctgatcaccaccgtgcagggagatggagtcatcgtgtccacccccaccggcagcacagcctatgctgctgctgctggggcctccatgatccaccccaacgtgcctgccatcatgatcacccccatctgcccccacagcctgtccttccggcccatcgtggtgcctgctggggtggagctgaagatcatgctgagccctgaggccaggaacacagcctgggtgtcctttgatggcaggaagaggcaggagatcagacatggagacagcatcagcatcaccaccagctgctaccccctgcccagcatctgtgtgcgggaccctgtgtctgactggtttgagagcctggcccagtgcctgcactggaatgtgaggaagaagcaggcccactttgaggaggaggaggaggaggaggaggagggctag

SEQ ID NO: 161088 - DNA, 1776 bp, synthetic construct; identical to SEQ ID NO: 161087
  misc_feature 1..1776: note = Description of Artificial Sequence: Synthetic coding sequence
  source 1..1776: mol_type = other DNA

SEQ ID NO: 161089 - DNA, 621 bp, synthetic construct
  misc_feature 1..621: note = Description of Artificial Sequence: Synthetic coding sequence
  source 1..621: mol_type = other DNA
atgggccggccccgggtgcggcaggcctggccaggctgctgcggccacacaggccgcctgcctgctggccggggctacctggccagccacatgtgtgaccctgctggagctgagctgattggagatggcatgtctgaccccaccccacccagcaatgcctgcaccggccacatccaggaccctgccagccagaggctgacctggaacaagagccccaagtctgtgctggtgatcaagaagatgagagatgccagcctgctgcagcccttcaaggagctgtgcacccacctgatggaggagaacatgattgtgtatgtggagaagaaggtgctggaggaccctgccatcgccagtgatgagagctttggagctgtgaagaagaagttctgcaccttccgggaggactatgatgacatcagcaaccagattgacttcatcatctgcctgggcggagatggcaccctgctgtatgccagcagcctcttccagggctctgtgccccctgtgatggccttccacctgggcagcctgggcttcctgacccccttctcctttgagaacttccagagccaggtgacccaggtgattgagggcaatgctgctgtggtgctgcggagctag

SEQ ID NO: 161090 - DNA, 2121 bp, synthetic construct
  misc_feature 1..2121: note = Description of Artificial Sequence: Synthetic coding sequence
  source 1..2121: mol_type = other DNA
atgggcaggaaggtgacagtggccacctgtgccctgaaccagtgggccctggactttgagggcaacctgcagaggatcctgaagagcattgagatcgccaagaacagaggagcccgctaccgcctgggccctgagctggagatctgtggctacggctgctgggaccactactatgaaagtgacaccctgctgcacagcttccaggtgctggccgccctggtggagagccctgtgacccaggacatcatctgtgatgtgggcatgcctgtgatgcacagaaatgtgcgctacaactgcagggtcatcttcctgaacaggaagatcctgctgatccggcccaagatggccctggccaatgaaggcaactaccgggagctgcgctggttcaccccctggagccgcagccgccacacagaggagtacttcctgcccaggatgatccaggacctgaccaagcaggagaccgtgccctttggagatgctgtgctggtgacctgggacacctgcatcggcagcgagatctgtgaggagctgtggaccccccacagcccccacatcgacatgggcctggatggagtggagatcatcaccaatgccagcggcagccaccaggtgctgaggaaggccaacaccagggtggacctggtgaccatggtgaccagcaagaatggaggcatctacctgctggccaaccagaagggctgtgatggagaccggctgtactatgatggctgtgccatgattgccatgaatggatctgtgtttgcccagggcagccagttcagcctggatgatgtggaggtgctgacagccaccctggacctggaggatgtgcgcagctacagagctgagatcagcagcaggaacctggccgccagccgggccagcccctacccccgggtgaaggtggactttgccctgagctgccacgaggacctgctggcccccatcagcgagcccatcgagtggaagtaccacagccctgaggaggagatcagcctgggccctgcctgctggctgtgggacttcctgcggcgcagccagcaggccggcttcctgctgcccctgtctggaggagtggacagcgctgccacagcctgcctgatctacagcatgtgctgccaggtgtgtgaggccgtgcgctctggaaatgaggaggtgctggctgatgtgaggaccatcgtgaaccagatctcctacaccccccaggacccccgggacctgtgtggccgcatcctgaccacctgctacatggccagcaagaacagcagccaggagacctgcacccgggcccgggagctggcccagcagatcggcagccaccacatcagcctgaacattgatcctgctgtgaaggctgtgatgggcatcttcagcctggtgacaggcaagagccccctgtttgctgcccatggaggcagcagccgggagaacctggccctgcagaatgtgcaggcccgcatccgcatggtgctggcctacctgtttgcccagctgagcctgtggagcagaggagtgcatggaggcctgctggtgctgggcagcgccaacgtggatgagagcctgctgggctacctgaccaagtatgactgcagcagcgctgacatcaaccccatcggcggcatcagcaagacagacctgcgggcctttgtgcagttctgcatccagcgcttccagctgcctgccctgcagagcatcctgctggccccagccacagctgagctggagcccctggctgatggccaggtgtcccagacagatgaggaggacatgggcatgacctacgccgagctgtctgtgtatggcaagctgaggaaggtggccaagatgggcccctacagcatgttctgcaagctgctgggcatgtggaggcacatctgcaccccccggcaggtggccgacaaggtgaagcgcttcttcagcaagtacagcatgaacagacacaagatgaccaccctgaccccagcctaccacgccgagaactacagccctgaggacaacagatttgacctgcggcccttcctgtacaacacctcctggccctggcagttccgctgcatcgagaaccaggtgctgcagctggagagagctgagccccagagcctggatggagtggactag

SEQ ID NO: 161091 - DNA, 1341 bp, synthetic construct
  misc_feature 1..1341: note = Description of Artificial Sequence: Synthetic coding sequence
  source 1..1341: mol_type = other DNA
atgggcatcagcggccaggaggtgctgacagccaccctggacctggaggatgtgcgcagctacagagctgagatcagcagcaggaacctggccgccagccgggccagcccctacccccgggtgaaggtggactttgccctgagctgccacgaggacctgctggcccccatcagcgagcccatcgagtggaagtaccacagccctgaggaggagatcagcctgggccctgcctgctggctgtgggacttcctgcggcgcagccagcaggccggcttcctgctgcccctgtctggaggagtggacagcgctgccacagcctgcctgatctacagcatgtgctgccaggtgtgtgaggccgtgcgctctggaaatgaggaggtgctggctgatgtgaggaccatcgtgaaccagatctcctacaccccccaggacccccgggacctgtgtggccgcatcctgaccacctgctacatggccagcaagaacagcagccaggagacctgcacccgggcccgggagctggcccagcagatcggcagccaccacatcagcctgaacattgatcctgctgtgaaggctgtgatgggcatcttcagcctggtgacaggcaagagccccctgtttgctgcccatggaggcagcagccgggagaacctggccctgcagaatgtgcaggcccgcatccgcatggtgctggcctacctgtttgcccagctgagcctgtggagcagaggagtgcatggaggcctgctggtgctgggcagcgccaacgtggatgagagcctgctgggctacctgaccaagtatgactgcagcagcgctgacatcaaccccatcggcggcatcagcaagacagacctgcgggcctttgtgcagttctgcatccagcgcttccagctgcctgccctgcagagcatcctgctggccccagccacagctgagctggagcccctggctgatggccaggtgtcccagacagatgaggaggacatgggcatgacctacgccgagctgtctgtgtatggcaagctgaggaaggtggccaagatgggcccctacagcatgttctgcaagctgctgggcatgtggaggcacatctgcaccccccggcaggtggccgacaaggtgaagcgcttcttcagcaagtacagcatgaacagacacaagatgaccaccctgaccccagcctaccacgccgagaactacagccctgaggacaacagatttgacctgcggcccttcctgtacaacacctcctggccctggcagttccgctgcatcgagaaccaggtgctgcagctggagagagctgagccccagagcctggatggagtggactag

SEQ ID NO: 161092 - DNA, 1122 bp, synthetic construct
  misc_feature 1..1122: note = Description of Artificial Sequence: Synthetic coding sequence
  source 1..1122: mol_type = other DNA
atggagcctgctgtgtctgagcccatgagggaccaggtggcccggacccacctgacagaggacacccccaaggtgaatgctgacatcgagaaggtgaaccagaaccaggccaagcgctgcaccgtgattggaggcagcggcttcctgggccagcacatggtggagcagctgctggcccggggctatgctgtgaatgtgtttgacatccagcagggctttgacaacccccaggtgcgcttcttcctgggggacctgtgcagccggcaggacctgtacccagccctgaagggcgtgaacacagtgttccactgtgccagccccccacccagcagcaacaacaaggagctgttctacagagtgaactacatcggcaccaagaatgtgattgagacctgcaaggaggccggcgtgcagaagctgatcctgaccagcagcgccagcgtcatctttgagggcgtggacatcaagaatggaacagaggacctgccctatgccatgaagcccatcgactactacacagagaccaagatcctgcaggagagagctgtgctgggcgccaatgaccctgagaagaacttcctgaccacagccatccggccccacggcatcttcggcccccgggacccccagctggtgcccatcctgattgaggccgccagaaatggcaagatgaagtttgtgattggaaatggcaagaacctggtggacttcacctttgtggagaatgtggtgcacggccacatcctggccgctgagcagctgagccgggacagcaccctgggcggcaaggccttccacatcaccaatgatgagcccatccccttctggaccttcctgagccgcatcctgaccggcctgaactatgaggcccccaagtaccacatcccctactgggtggcctactacctggccctgctgctgagcctgctggtgatggtgatcagccctgtgatccagctgcagcccaccttcacccccatgagggtggccctggccggcaccttccactactacagctgtgagcgggccaagaaggccatgggctaccagcccctggtgaccatggatgatgccatggagaggacagtgcagagcttccgccacctgcggcgggtgaagtag

SEQ ID NO: 161093 - DNA, 765 bp, synthetic construct
  misc_feature 1..765: note = Description of Artificial Sequence: Synthetic coding sequence
  source 1..765: mol_type = other DNA
atggagcctgctgtgtctgagcccatgagggaccaggtggcccggacccacctgacagaggacacccccaaggtgaatgctgacatcgagaaggtgaaccagaaccaggccaagcgctgcaccgtgattggaggcagcggcttcctgggccagcacatggtggagcagctgctggcccggggctatgctgtgaatgtgtttgacatccagcagggctttgacaacccccaggtgcgcttcttcctgggggacctgtgcagccggcaggacctgtacccagccctgaagggcgtgaacacagtgttccactgtgccagccccccacccagcagcaacaacaaggagctgttctacagagtgaactacatcggcaccaagaatgtgattgagacctgcaaggaggccggcgtgcagaagctgatcctgaccagcagcgccagcgtcatctttgagggcgtggacatcaagaatggaacagaggacctgccctatgccatgaagcccatcgactactacacagagaccaagatcctgcaggagagagctgtgctgggcgccaatgaccctgagaagaacttcctgaccacagccatccggccccacggcatcttcggcccccgggacccccagctggtgcccatcctgattgaggccgccagaaatggcaagatgaagtttgtgattggaaatggcaagaacctggtggacttcacctttgtggagaatgtggtgcacggccacatcctggccgctgagcagctgtag

SEQ ID NO: 161094 - DNA, 1122 bp, synthetic construct; identical to SEQ ID NO: 161092
  misc_feature 1..1122: note = Description of Artificial Sequence: Synthetic coding sequence
  source 1..1122: mol_type = other DNA

SEQ ID NO: 161095 - DNA, 825 bp, synthetic construct
  misc_feature 1..825: note = Description of Artificial Sequence: Synthetic coding sequence
  source 1..825: mol_type = other DNA
atggtgggccggcgggccctgattgtgctggcccacagcgagaggaccagcttcaactatgccatgaaggaggccgctgctgctgccctgaagaagaagggctgggaggtggtggagagtgacctgtatgccatgaacttcaaccccatcatcagcaggaaggacatcaccgggaagctgaaggaccctgccaacttccagtacccagctgagagcgtgctggcctacaaggagggccacctgagcccagacatcgtggccgagcagaagaagctggaggccgctgacctggtgatcttccagttccccctgcagtggtttggagtgcctgccatcctgaagggctggtttgagagggtcttcatcggggagtttgcctacacctacgccgccatgtatgacaagggccccttccgcagcaagaaggctgtgctgagcatcaccactggaggcagcggctccatgtacagcctgcagggcatccacggggacatgaatgtcatcctgtggcccatccagagcggcatcctgcacttctgtggcttccaggtgctggagccccagctgacctacagcatcggccacaccccagcagatgcccgcatccagatcctggagggctggaagaagaggctggagaacatctgggatgagacccccctgtactttgcccccagcagcctgtttgacctgaacttccaggccggcttcctgatgaagaaggaggtgcaggatgaggagaagaacaagaagtttggcctgtctgtgggccaccacctgggcaagagcatccccacagacaaccagatcaaggccaggaagtag

SEQ ID NO: 161096 - DNA, 711 bp, synthetic construct
  misc_feature 1..711: note = Description of Artificial Sequence: Synthetic coding sequence
  source 1..711: mol_type = other DNA
atggtgggccggcgggccctgattgtgctggcccacagcgagaggaccagcttcaactatgccatgaaggaggccgctgctgctgccctgaagaagaagggctgggaggtggtggagagtgacctgtatgccatgaacttcaaccccatcatcagcaggaaggacatcaccgggaagctgaaggaccctgccaacttccagtacccagctgagagcgtgctggcctacaaggagggccacctgagcccagacatcgtggccgagcagaagaagctggaggccgctgacctggtgatcttccagagcaagaaggctgtgctgagcatcaccactggaggcagcggctccatgtacagcctgcagggcatccacggggacatgaatgtcatcctgtggcccatccagagcggcatcctgcacttctgtggcttccaggtgctggagccccagctgacctacagcatcggccacaccccagcagatgcccgcatccagatcctggagggctggaagaagaggctggagaacatctgggatgagacccccctgtactttgcccccagcagcctgtttgacctgaacttccaggccggcttcctgatgaagaaggaggtgcaggatgaggagaagaacaagaagtttggcctgtctgtgggccaccacctgggcaagagcatccccacagacaaccagatcaaggccaggaagtag

SEQ ID NO: 161097 - DNA, 723 bp, synthetic construct
  misc_feature 1..723: note = Description of Artificial Sequence: Synthetic coding sequence
  source 1..723: mol_type = other DNA
atggtgggccggcgggccctgattgtgctggcccacagcgagaggaccagcttcaactatgccatgaaggaggccgctgctgctgccctgaagaagaagggctgggaggtggtggagagtgacctgtatgccatgaacttcaaccccatcatcagcaggaaggacatcaccgggaagctgaaggaccctgccaacttccagtacccagctgagagcgtgctggcctacaaggagggccacctgagcccagacatcgtggccgagcagaagaagctggaggccgctgacctggtgatcttccagttccccctgcagtggtttggagtgcctgccatcctgaagggctggtttgagagggtcttcatcggggagtttgcctacacctacgccgccatgtatgacaagggccccttccgcagcggcatcctgcacttctgtggcttccaggtgctggagccccagctgacctacagcatcggccacaccccagcagatgcccgcatccagatcctggagggctggaagaagaggctggagaacatctgggatgagacccccctgtactttgcccccagcagcctgtttgacctgaacttccaggccggcttcctgatgaagaaggaggtgcaggatgaggagaagaacaagaagtttggcctgtctgtgggccaccacctgggcaagagcatccccacagacaaccagatcaaggccaggaagtag

SEQ ID NO: 161098 - DNA, 609 bp, synthetic construct
  misc_feature 1..609: note = Description of Artificial Sequence: Synthetic coding sequence
  source 1..609: mol_type = other DNA
atggtgggccggcgggccctgattgtgctggcccacagcgagaggaccagcttcaactatgccatgaaggaggccgctgctgctgccctgaagaagaagggctgggaggtggtggagagtgacctgtatgccatgaacttcaaccccatcatcagcaggaaggacatcaccgggaagctgaaggaccctgccaacttccagtacccagctgagagcgtgctggcctacaaggagggccacctgagcccagacatcgtggccgagcagaagaagctggaggccgctgacctggtgatcttccagagcggcatcctgcacttctgtggcttccaggtgctggagccccagctgacctacagcatcggccacaccccagcagatgcccgcatccagatcctggagggctggaagaagaggctggagaacatctgggatgagacccccctgtactttgcccccagcagcctgtttgacctgaacttccaggccggcttcctgatgaagaaggaggtgcaggatgaggagaagaacaagaagtttggcctgtctgtgggccaccacctgggcaagagcatccccacagacaaccagatcaaggccaggaagtag

SEQ ID NO: 161099 - DNA, 696 bp, synthetic construct
  misc_feature 1..696: note = Description of Artificial Sequence: Synthetic coding sequence
  source 1..696: mol_type = other DNA
atggccggcaagaaggtgctgattgtgtatgcccaccaggagcccaagagcttcaacggcagcctgaagaatgtggccgtggatgagctgagccggcagggctgcaccgtgacagtgtctgacctgtatgccatgaacctggagccccgggccacagacaaggacatcaccggcaccctgagcaaccctgaggtgttcaactacggcgtggagacccatgaggcctacaagcagaggagcctggccagtgacatcacagatgagcagaagaaggtgcgggaggccgacctggtgatcttccagttccccctgtactggttctctgtgcctgccatcctgaagggctggatggacagagtgctgtgccagggctttgcctttgacatccctggcttctatgattctggcctgctgcagggcaagctggccctgctgtctgtgaccactggaggaacagctgagatgtacaccaagacaggagtgaatggagacagccgctacttcctgtggcccctgcagcacggcaccctgcacttctgtggcttcaaggtgctggccccccagatcagctttgcccctgagatcgccagcgaggaggagaggaagggcatggtggccgcctggagccagaggctgcagaccatctggaaggaggagcccatcccctgcacagcccactggcacttcggccagtag

SEQ ID NO: 161100 - DNA, 696 bp, synthetic construct; identical to SEQ ID NO: 161099
  misc_feature 1..696: note = Description of Artificial Sequence: Synthetic coding sequence
  source 1..696: mol_type = other DNA

SEQ ID NO: 161101 - DNA, 582 bp, synthetic construct
  misc_feature 1..582: note = Description of Artificial Sequence: Synthetic coding sequence
  source 1..582: mol_type = other DNA
atggccggcaagaaggtgctgattgtgtatgcccaccaggagcccaagagcttcaacggcagcctgaagaatgtggccgtggatgagctgagccggcagggctgcaccgtgacagtgtctgacctgtatgccatgaacctggagccccgggccacagacaaggacatcaccggcaccctgagcaaccctgaggtgttcaactacggcgtggagacccatgaggcctacaagcagaggagcctggccagtgacatcacagatgagcagaagaaggtgcgggaggccgacctggtgatcttccagggcaagctggccctgctgtctgtgaccactggaggaacagctgagatgtacaccaagacaggagtgaatggagacagccgctacttcctgtggcccctgcagcacggcaccctgcacttctgtggcttcaaggtgctggccccccagatcagctttgcccctgagatcgccagcgaggaggagaggaagggcatggtggccgcctggagccagaggctgcagaccatctggaaggaggagcccatcccctgcacagcccactggcacttcggccagtag

SEQ ID NO: 161102 - DNA, 582 bp, synthetic construct; identical to SEQ ID NO: 161101
  misc_feature 1..582: note = Description of Artificial Sequence: Synthetic coding sequence
  source 1..582: mol_type = other DNA

SEQ ID NO: 161103 - DNA, 696 bp, synthetic construct; identical to SEQ ID NO: 161099
  misc_feature 1..696: note = Description of Artificial Sequence: Synthetic coding sequence
  source 1..696: mol_type = other DNA

SEQ ID NO: 161104 - DNA, 420 bp, synthetic construct
  misc_feature 1..420: note = Description of Artificial Sequence: Synthetic coding sequence
  source 1..420: mol_type = other DNA
atggccggcaagaaggtgctgattgtgtatgcccaccaggagcccaagagcttcaacggcagcctgaagaatgtggccgtggatgagctgagccggcagggctgcaccgtgacagtgtctgacctgtatgccatgaacctggagccccgggccacagacaaggacatcaccggcaccctgagcaaccctgaggtgttcaactacggcgtggagacccatgaggcctacaagcagaggagcctggccagtgacatcacagatgagcagaagaaggtgcgggaggccgacctggtgatcttccagttccccctgtactggttctctgtgcctgccatcctgaagggctggatggacagagtgctgtgccagggctttgcctttgacatccctggcttctatgattctggcctgctgcagtag

SEQ ID NO: 161105 - DNA, 420 bp, synthetic construct; identical to SEQ ID NO: 161104
  misc_feature 1..420: note = Description of Artificial Sequence: Synthetic coding sequence
  source 1..420: mol_type = other DNA

SEQ ID NO: 161106 - DNA, 192 bp, synthetic construct
  misc_feature 1..192: note = Description of Artificial Sequence: Synthetic coding sequence
  source 1..192: mol_type = other DNA
atggccggcaagaaggtgctgattgtgtatgcccaccaggagcccaagagcttcaacggcagcctgaagaatgtggccgtggatgagctgagccggcagggctgcaccgtgacagtgtctgacctgtatgccatgaacctggagccccgggccacagacaaggacatcaccggcaccctgagcaacccctag

SEQ ID NO: 161107 - DNA, 483 bp, synthetic construct
  misc_feature 1..483: note = Description of Artificial Sequence: Synthetic coding sequence
  source 1..483: mol_type = other DNA
accccaggcctgaagcagagcagccacctgagcctgtggagctcctgggactaccgcctgctggacagcctgaagagggactatgccggcaagccccagccccccatcaagtctgagaggagaaatcctccttcctatgccatggccggcaagaaggtgctgattgtgtatgcccaccaggagcccaagagcttcaacggcagcctgaagaatgtggccgtggatgagctgagccggcagggctgcaccgtgacagtgtctgacctgtatgccatgaacctggagccccgggccacagacaaggacatcaccggcaccctgagcaaccctgaggtgttcaactatggagtggagacccatgaggcctacaagcagaggagcctggccagtgacatcacagatgagcagaagaaggtgcgggaggccgacctggtgatcttccagatgctgagcacagagctgagcctgaccagccgctgctag

SEQ ID NO: 161108 - DNA, 231 bp, synthetic construct
  misc_feature 1..231: note = Description of Artificial Sequence: Synthetic coding sequence
  source 1..231: mol_type = other DNA
atggctgctgctgctgccagcagaggagtgggcgccaagctgggcctgcgggagatccgcatccacctgtgccagaggagccctggcagccagggcgtgcgggacttcatcgagaagagatatgtggagctgaagaaggccaacccagacctgcccatcctgatcagagaatgttctgatgtgcagcccaagctgtgggcccgctatgccagccgggtgcagaacagctag

SEQ ID NO: 161109 - DNA, 213 bp, synthetic construct
  misc_feature 1..213: note = Description of Artificial Sequence: Synthetic coding sequence
  source 1..213: mol_type = other DNA
atgtggtttgagatcctgcccggcctgtctgtgatgggcgtgtgcctgctgatccctggcctggccacagcctacatccaccgcttcaccaatggaggcaaggagaagagggtggcccacttcggctaccactggagcctgatggagcgggaccggcgcatctctggagtggaccgctactacgtgtccaagggcctggagaacattgattag

SEQ ID NO: 161110 - DNA, 1068 bp, synthetic construct
  misc_feature 1..1068: note = Description of Artificial Sequence: Synthetic coding sequence
  source 1..1068: mol_type = other DNA
atggccctgcggctgctgaagctggccgccaccagcgccagcgcccgggtggtggccgccggggcccagagggtgcggggcatccacagctctgtgcagtgcaagctgcgctatggcatgtggcacttcctgctgggggacaaggccagcaagaggctgacagagaggagcagggtcatcaccgtggatggcaacatctgcaccgggaagggcaagctggccaaggagattgctgagaagctgggcttcaagcacttccctgaggccggcatccactacccagacagcaccactggagatggcaagcccctggccacagactacaatggaaactgcagcctggagaagttctatgatgaccccaggagcaatgatggcaacagctaccgcctgcagagctggctgtacagcagccggctgctgcagtacagtgatgccctggagcacctgctgaccaccggccagggcgtggtgctggagaggagcatcttcagtgactttgtgttcctggaggccatgtacaaccagggcttcatcaggaagcagtgtgtggaccactacaatgaggtgaagtctgtgaccatctgtgactacctgcccccccacctggtgatctacattgatgtgcctgtgcctgaggtgcagaggcgcatccagaagaagggggacccccatgagatgaagatcaccagcgcctacctgcaggacattgaaaatgcctacaagaagaccttcctgcctgagatgtctgagaagtgtgaggtgctgcagtacagcgcccgggaggcccaggacagcaagaaggtggtggaggacatcgagtacctgaagtttgacaagggcccctggctgaagcaggacaacagaaccctgtaccacctgcggctgctggtgcaggacaagtttgaggtgctgaactacaccagcatccccatcttcctgcctgaggtgaccatcggggcccaccagacagacagagtgctgcaccagttccgggagctgcccggcaggaagtacagccctggctacaacacagaggtgggggacaagtggatctggctgaagtag

SEQ ID NO: 161111 - DNA, 1068 bp, synthetic construct
  misc_feature 1..1068: note = Description of Artificial Sequence: Synthetic coding sequence
  source 1..1068: mol_type = other DNA
atggccctgcggctgctgaagctggccgccaccagcgccagcgcccgggtggtggcccgggcccccagcgcctggaggggcatccacagctctgtgcagtgcaagctgcgctatggcatgtggcacttcctgctgggggacaaggccagcaagaggctgacagagaggagcagggtcatcaccgtggatggcaacatctgcaccgggaagggcaagctggccaaggagattgctgagaagctgggcttcaagcacttccctgaggccggcatccactacccagacagcaccactggagatggcaagcccctggccacagactacaatggaaactgcagcctggagaagttctatgatgaccccaggagcaatgatggcaacagctaccgcctgcagagctggctgtacagcagccggctgctgcagtacagtgatgccctggagcacctgctgaccaccggccagggcgtggtgctggagaggagcatcttcagtgactttgtgttcctggaggccatgtacaaccagggcttcatcaggaagcagtgtgtggaccactacaatgaggtgaagtctgtgaccatctgtgactacctgcccccccacctggtgatctacattgatgtgcctgtgcctgaggtgcagaggcgcatccagaagaagggggacccccatgagatgaagatcaccagcgcctacctgcaggacattgaaaatgcctacaagaagaccttcctgcctgagatgtctgagaagtgtgaggtgctgcagtacagcgcccgggaggcccaggacagcaagaaggtggtggaggacatcgagtacctgaagtttgacaagggcccctggctgaagcaggacaacagaaccctgtaccacctgcggctgctggtgcaggacaagtttgaggtgctgaactacaccagcatccccatcttcctgcctgaggtgaccatcggggcccaccagacagacagagtgctgcaccagttccgggagctgcccggcaggaagtacagccctggctacaacacagaggtgggggacaagtggatctggctgaagtag

SEQ ID NO: 161112 - DNA, 426 bp, synthetic construct
  misc_feature 1..426: note = Description of Artificial Sequence: Synthetic coding sequence
  source 1..426: mol_type = other DNA
atggcccccaaggtgttccggcagtactgggacatcccagatggaacagactgccacaggaaggcctacagcaccaccagcatcgcctctgtggccggcctgacagctgctgcctacagagtgaccctgaaccccccaggcaccttcctggagggcgtggccaaggtgggccagtacaccttcaccgctgctgctgtgggcgctgtgtttggcctgaccacctgcatcagcgcccacgtgcgggagaagccagatgaccccctgaactacttcctgggcggctgtgccggcggcctgaccctgggcgcccggacccacaactacggcatcggggctgctgcctgtgtgtacttcggcattgctgccagcctggtgaagatgggccgcctggagggctgggaggtgtttgccaagcccaaggtgtag

SEQ ID NO: 161113 - DNA, 687 bp, synthetic construct
  misc_feature 1..687: note = Description of Artificial Sequence: Synthetic coding sequence
  source 1..687: mol_type = other DNA
atggcccccaaggtgttccggcagtactgggacatcccagatggaacagactgccacaggaaggcctacagcaccaccagcatcgcctctgtggccggcctgacagctgctgcctacagagtgaccctgaaccccccaggcaccttcctggagggcgtggccaaggtgggccagtacaccttcaccgctgctgctgtgggcgctgtgtttggcctgaccacctgcatcagcgcccacgtgcgggagaagccagatgaccccctgaactacttcctgggcggctgtgccggcggcctgaccctgggcgccaggaagacaggcagccactgtgtggtgcaggccggcctgaagctgctggccagcagcagcccccacaccagcgccagccagagcgctggcatcatcggcatgagccactgtgtgcagcgcttctgggtgcccagcagcagcgcctgcctggaggtgctgtctggagagagcacagatgtgcacgcctgcagcagcaccaggggggcctgcaacagcagcggcagccggcccctgcctgagctgggcgcccgggccagcggcagcctgaggaagggcggccacacccacccagcccccagaggagctggggccctgacccctgtgcaggccctgattgagagcctgctgaacaccctgggcagcaaccccaggacatag

SEQ ID NO: 161114 - DNA, 684 bp, synthetic construct
  misc_feature 1..684: note = Description of Artificial Sequence: Synthetic coding sequence
  source 1..684: mol_type = other DNA
atgcaggagcccaggagagtgaccccctgcctgggcaagaggggcgtgaagaccccccagctgcagcccggcagcgccttcctgccccgggtgcggcggcagagcttccctgcccggagtgacagctacaccaccgtgcgggacttcctggccgtgcccaggaccatcagcagcgccagcgccaccctcatcatggctgtggccgtgagccacttccggcccggccctgaggtgtgggacacagcctccatggccgccagcaaggtgaagcaggacatgcctcctcctgggggctacggccccatcgactacaagaggaacctgccccggcggggcctgagcggctacagcatgctggccatcggcatcggcaccctcatctacggccactggagcatcatgaagtggaaccgggagcggcggcggctgcagatcgaggactttgaggcccgcatcgccctgctgcccctgctgcaggccgagacagacaggaggaccctgcagatgctgcgggagaacctggaggaggaggccatcatcatgaaggatgtgcctgactggaaggtgggggagagcgtcttccacaccacccgctgggtgcccccactcatcggggagctgtatggcctgcggaccacagaggaggccctgcacgccagccacggcttcatgtggtacacctag

SEQ ID NO: 161115 - DNA, 435 bp, synthetic construct
  misc_feature 1..435: note = Description of Artificial Sequence: Synthetic coding sequence
  source 1..435: mol_type = other DNA
atggccgccagcaaggtgaagcaggacatgcctcctcctgggggctacggccccatcgactacaagaggaacctgccccggcggggcctgagcggctacagcatgctggccatcggcatcggcaccctcatctacggccactggagcatcatgaagtggaaccgggagcggcggcggctgcagattgaagattttgaggccagaattgccctgctgcccctgctgcaggccgagacagacaggaggaccctgcagatgctgcgggagaacctggaggaggaggccatcatcatgaaggatgtgcctgactggaaggtgggggagagcgtcttccacaccacccgctgggtgccccccctgattggagagctgtatggcctgcggaccacagaggaggccctgcacgccagccacggcttcatgtggtacacctag

SEQ ID NO: 161116 - DNA, 300 bp, synthetic construct
  misc_feature 1..300: note = Description of Artificial Sequence: Synthetic coding sequence
  source 1..300: mol_type = other DNA
atggctgctgctgctgccagcagaggagtgggcgccaagctgggcctgcgggagatccgcatccacctgtgccagaggagccctggcagccagggcgtgcgggacttcatcgagaagagatatgtggagctgaagaaggccaacccagacctgcccatcctgatcagagaatgttctgatgtgcagcccaagctgtgggcccgctatgccttcggccaggagaccaacgtgcccctgaacaacttctctgctgaccaggtgacccgggccctggagaatgtgctgagcggcaaggcctag

SEQ ID NO: 161117 - DNA, 720 bp, synthetic construct
  misc_feature 1..720: note = Description of Artificial Sequence: Synthetic coding sequence
  source 1..720: mol_type = other DNA
atggccggcgtgctgaagaagaccaccggcctggtgggcctggccgtgtgcaacacccctcatgaggtgtgcacctttgtgctgagcagcttcctgaacagccagggccgcctgaacagctgccactttgcctactgccgggtgaatggcatccagatgttccaggccctgaactacaagccccgggagctgctgcggcacggccgctgcccccccaccagcctcatccgctgccacatcttcatctacttctgccacgacctcttcatcaagcctgtgttcctgctgaccttcagcctgaccttctcctggctgcacctgtgcctgctgctgagcgcccccagccagatctacatcagcgtcttccacctgttcagcctgccctaccgcttctgcctgggcgccctggactacatctacctgggcctgctgaaggtgctgccccccttccccagcgtgcgctccttccccagcgtcttcaccaacgtgttcatcaagaagacccacaagttcttcatcctgctggtgcccagcatcatcacccccttcctgtgcttcaccctgcagatcacccagaagagctacctgtacttcctgcagttcctgagctacagccccctgaatgccctgagccacccctggaggttcagcagcagccccatcatctccatgctgcccaaccccatggtgagcagctacttcagccccagcctgacctag

SEQ ID NO: 161118 - DNA, 351 bp, synthetic construct
  misc_feature 1..351: note = Description of Artificial Sequence: Synthetic coding sequence
  source 1..351: mol_type = other DNA
atggccggcgtgctgaagaagaccaccggcctggtgggcctggccgtgtgcaacacccctcatgagcggctgcgcatcctgtacaccaagatcctggatgtgctggaggagatccccaagaatgctgcctacaggaagtacacagagcagatcaccaatgagaagctggccatggtgaaggccgagccagatgtgaagaagctggaggaccagctgcagggcggccagctggaggaggtgatcctgcaggccgagcacgagctgaacctggccaggaagatgagggagtggaagctgtgggagcccctggtggaggagcccccagctgaccagtggaagtggcccatctag

SEQ ID NO: 161119 - DNA, 351 bp, synthetic construct
  misc_feature 1..351: note = Description of Artificial Sequence: Synthetic coding sequence
  source 1..351: mol_type = other DNA
atgccctacagagtgggccagaccaccggcctggtgggcctggccgtgtgcaacacccctcatgagcggctgcgcatcctgtacaccaagatcctggatgtgctggaggagatccccaagaatgctgcctacaggaagtacacagagcagatcaccaatgagaagctggccatggtgaaggccgagccagatgtgaagaagctggaggaccagctgcagggcggccagctggaggaggtgatcctgcaggccgagcacgagctgaacctggccaggaagatgagggagtggaagctgtgggagcccctggtggaggagcccccagctgaccagtggaagtggcccatctag

SEQ ID NO: 161120 - DNA, 465 bp, synthetic construct
  misc_feature 1..465: note = Description of Artificial Sequence: Synthetic coding sequence
  source 1..465: mol_type = other DNA
atgggcaaggacatccggcccaggtctgcccgggccgcctgcaagggcgtgggcctgtggagcggctgcttcggcaagatggccggcagcggcgtgcggcaggccaccagcacagccagcacctttgtgaagcccatcttcagccgggacatgaatgaggccaagagaagagtgcgggagctgtaccgggcctggtaccgggaggtgcccaacacagtgcaccagttccagctggacatcaccgtgaagatgggccgggacaaggtgcgggagatgttcatgaagaatgcccacgtgacagacccccgggtggtggacctgctggtgatcaagggcaagattgagctggaggagaccatcaaggtgtggaagcagaggacccacgtgatgaggttcttccacgagacagaggccccccggcccaaggacttcctgagcaagttctacgtgggccatgacccctag

SEQ ID NO: 161121 - DNA, 342 bp, synthetic construct
  misc_feature 1..342: note = Description of Artificial Sequence: Synthetic coding sequence
  source 1..342: mol_type = other DNA
atggccagcgccaccaggctcatccagaggctgaggaactgggccagcggccatgacctgcagggcaagctgcagctgcgctaccaggagatcagcaagaggacccagcccccacccaagctgcctgtgggccccagccacaagctgagcaacaactactactgcaccagagatggccggcgggagagcgtgcccccatccatcatcatgagcagccagaaggccctggtgtctgggaagccagctgagagcagcgctgtggccgccacagagaagaaggctgtgaccccagccccacccatcaagcgctgggagctgagcagtgaccagccctacctgtag

SEQ ID NO: 161122 - DNA, 519 bp, synthetic construct
  misc_feature 1..519: note = Description of Artificial Sequence: Synthetic coding sequence
  source 1..519: mol_type = other DNA
atgcctggcatcgtggagctgcccaccctggaggagctgaaggtggatgaggtgaagatcagcagcgctgtgctgaaggccgccgcccaccactacggggcccagtgtgacaagcccaacaaggagttcatgctgtgccgctgggaggagaaggacccccggcgctgcctggaggagggcaagctggtgaacaagtgtgccctggacttcttccggcagatcaagaggcactgtgccgagcccttcacagagtactggacctgcatcgactacacaggccagcagctgttccgccactgcaggaagcagcaggccaagtttgatgaatgtgtgctggacaagctgggctgggtgcggccagacctgggggagctgagcaaggtgaccaaggtgaagacagaccggcccctgcctgagaacccctaccacagccggcccaggccagaccccagccctgagattgaaggagacctgcagcctgccacccacggcagccgcttctacttctggaccaagtag

SEQ ID NO: 161123 - DNA, 387 bp, synthetic construct
  misc_feature 1..387: note = Description of Artificial Sequence: Synthetic coding sequence
  source 1..387: mol_type = other DNA
atgcctggcatcgtggagctgcccaccctggaggagctgaaggtggatgaggtgaagatcagcagcgctgtgctgaaggccgccgcccaccactacggggcccagtgtgacaagcccaacaaggagttcatgctgtgccgctgggaggagaaggacccccggcgctgcctggaggagggcaagctggtgaacaagtgtgccctggacttcttccggcagatcaagaggcactgtgccgagcccttcacagagtactggacctgcatcgactacacaggccagcagctgttccgccactgcaggaagcagcaggccaagtttgatgaatgtgtgctggacaagctgggctgggtgcggccagacctgggggagctgagcaaaggatag

SEQ ID NO: 161124 - DNA, 1134 bp, synthetic construct
  misc_feature 1..1134: note = Description of Artificial Sequence: Synthetic coding sequence
  source 1..1134: mol_type = other DNA
atggctgctgctgcccagagccgggtggtgcgggtgctgtccatgagccgcagcgccatcacagccatcgccacctctgtgtgccacggccccccctgccggcagctgcaccacgccctgatgcctcatggaaaaggaggccgcagctctgtgtctggcatcgtggccaccgtgtttggagccaccggcttcctgggccgctacgtggtgaaccacctgggccgcatgggcagccaggtgatcatcccctaccgctgtgacaagtatgacatcatgcacctgcggcccatgggagacctgggccagctgctcttcctggagtgggatgcccgggacaaggacagcatcagaagagtggtgcagcacagcaatgtggtgatcaacctgattggccgggactgggagaccaagaactttgattttgaagatgtgtttgtgaagatcccccaggccatcgcccagctgagcaaggaggccggcgtggagaagttcatccacgtgagccacctgaatgccaacatcaagagcagcagccgctacctgaggaacaaggctgtgggggagaaggtggtgagagatgccttccctgaggccatcatcgtgaagcccagcgacatcttcggccgggaggaccgcttcctgaacagctttgcctccatgcacagatttggccccatccccctgggcagcctgggctggaagacagtgaagcagcctgtgtatgtggtggatgtgtccaaaggaattgtgaatgctgtgaaggaccctgatgccaacgggaagagctttgcctttgtgggccccagccgctacctgctcttccacctggtgaagtacatctttgctgtggcccacaggctcttcctgcccttccccctgcccctgtttgcctaccgctgggtggcccgggtgtttgagatcagcccctttgagccctggatcacccgggacaaggtggagaggatgcacatcacagacatgaagctgccccacctgcccggcctggaggacctgggcatccaggccacccccctggagctgaaggccatcgaggtgctgcggcggcacaggacctaccgctggctgtctgctgagattgaagatgtgaagccagccaagacagtgaacatctag

SEQ ID NO: 161125 - DNA, 984 bp, synthetic construct
  misc_feature 1..984: note = Description of Artificial Sequence: Synthetic coding sequence
  source 1..984: mol_type = other DNA
atggccctggtgcacaagctgctgcggggcacctacttcctgaggaagttcagcaagcccaccagcgccctgtaccccttcctgggcatccgctttgctgagtacagcagcagcctgcagaagcctgtggccagccctgggaaggccagcagccagaggaagacagaaggagacctgcagggcgaccaccagaaggaggtggccctggacatcaccagcagcgaggagaagccagatgtgtcctttgacaaggccatcagagatgaggccatctaccacttccggctgctgaaggatgaaattgtggaccactggaggggccctgagggccaccccctgcacgaggtgctgctggagcaggccaaggtggtgtggcagttccggggcaaggaggacctggacaagtggacagtgaccagtgacaagaccatcggcggccgctctgaggtgttcctgaagatgggcaagaacaaccagagcgccctgctgtatggcaccctgagcagcgaggccccccaggatggagagagcaccaggagcggctactgtgccatgatcagccgcatccccaggggggcctttgagaggaagatgtcctatgactggagccagttcaacaccctgtacctgcgggtgagaggagatggccggccctggatggtgaacatcaaggaggacacagacttcttccagaggaccaaccagatgtacagctacttcatgttcacccggggcggcccctactggcaggaggtgaagatccccttcagcaagttcttcttcagcaacagaggccgcatcagagatgtgcagcacgagctgcccctggacaagatcagcagcatcggcttcaccctggccgacaaggtggatggccccttcttcctggagattgacttcatcggggtcttcacagatcctgcccacacagaggagtttgcctatgagaacagccctgagctgaaccccaggctcttcaagtag

SEQ ID NO: 161126 - DNA, 576 bp, synthetic construct
  misc_feature 1..576: note = Description of Artificial Sequence: Synthetic coding sequence
  source 1..576: mol_type = other DNA
atggccctggtgcacaagctgctgcggggcacctacttcctgaggaagttcagcaagcccaccagcgccctgtaccccttcctgggcatccgctttgctgagtacagcagcagcctgcagaagcctgtggccagccctgggaaggccagcagccagaggaagacagaaggagacctgcagggcgaccaccagaaggaggtggccctggacatcaccagcagcgaggagaagccagatgtgtcctttgacaaggccatcagagatgaggccatctaccacttccggctgctgaaggatgaaattgtggaccactggaggggccctgagggccaccccctgcacgaggtgctgctggagcaggccaaggtggtgtggcagttccggggcaaggaggacctggacaagtggacagtgaccagtgacaagaccatcggcggccgctctgaggtgttcctgaagatgggcaagaacaaccagagcgccctgctgtatggcaccctgagcagcgaggccccccaggatggagagagcaccaggagcggctactgtgccatgatcagccgcatccccaggtag

SEQ ID NO: 161127 - DNA, 630 bp, synthetic construct
  misc_feature 1..630: note = Description of Artificial Sequence: Synthetic coding sequence
  source 1..630: mol_type = other DNA
atggccctggtgcacaagctgctgcggggcacctacttcctgaggaagttcagcaagcccaccagcgccctgtaccccttcctgggcatccgctttgctgagtacagcagcagcctgcagaagcctgtggccagccctgggaaggccagcagccagaggaagacagaaggagacctgcagggcgaccaccagaaggaggtggccctggacatcaccagcagcgaggagaagccagatgtgtcctttgacaaggccatcagagatgaggccatctaccacttccggctgctgaaggatgaaattgtggaccactggaggggccctgagggccaccccctgcacgaggtgctgctggagcaggccaaggtggtgtggcagttccggggcaaggaggacctggacaagtggacagtgaccagtgacaagaccatcggcggccgctctgaggtgttcctgaagatgggcaagaacaaccagagcgccctgctgtatggcaccctgagcagcgaggccccccaggatggagagagcaccaggagcggctactgtgccatgatcagccgcatccccaggggggcctttgagaggaagatgtcctatgactggagccagttcaacaccctgtactag

SEQ ID NO: 161128 - DNA, 510 bp, synthetic construct
  misc_feature 1..510: note = Description of Artificial Sequence: Synthetic coding sequence
  source 1..510: mol_type = other DNA
atgggctggagccaggacctcttccgggccctgtggaggagcctgagccgggaggtgaaggagcacgtgggcacagaccagtttggaaacaagtactactacatcccccagtacaagaactggaggggccagaccatccgggagaagagaattgtggaggccgccaacaagaaggaggtggactatgaggccggggacatccccacagagtgggaggcctggatccggaggaccaggaagaccccacccaccatggaggagatcctgaagaatgagaagcaccgggaggagatcaagatcaagagccaggacttctatgagaaggagaagctgctgagcaaggagaccagcgaggagctgctgcccccacctgtgcagacccagatcaagggccacgccagcgccccctactttgggaaggaggagcccagcgtggcccccagcagcacaggcaagaccttccagcccggctcctggatgcccagagatggcaagagccacaaccagtag

SEQ ID NO: 161129 - DNA, 384 bp, synthetic construct
  misc_feature 1..384: note = Description of Artificial Sequence: Synthetic coding sequence
  source 1..384: mol_type = other DNA
atgtacatcgacagctacaacagccggggcttcatgatcaatggaaacagagtgctgggcccctgtgccctgctgccccacagcgtggtgcagtggaatgtgggcagccaccaggacatcacagaggacagcttcagcctcttctggctgctggagcccagaattgaaattgtggtggtgggcaccggggacagaacagagcggctgcagagccaggtgctgcaggccatgaggcagaggggcattgctgtggaggtgcaggacaccccaaatgcctgtgccaccttcaacttcctgtgccacgagggccgggtgactggagctgccctgatccccccacctgggggcaccagcctgaccagcctgggccaggccgcccagtag

SEQ ID NO: 161130 - DNA, 555 bp, synthetic construct
  misc_feature 1..555: note = Description of Artificial Sequence: Synthetic coding sequence
  source 1..555: mol_type = other DNA
atggccacagccctggccctgcggagcctgtaccgggcccggcccagcctgcgctgcccccctgtggagctgccctgggccccccggcggggccaccggctgagccctgcagatgatgagctgtaccagaggacccgcatcagcctgctgcagcgggaggccgcccaggccatgtacatcgacagctacaacagccggggcttcatgatcaatggaaacagagtgctgggcccctgtgccctgctgccccacagcgtggtgcagtggaatgtgggcagccaccaggacatcacagaagattccttcagcctcttctggctgctggagccccgcatcgagatcgtggtggtgggcactggagacagaacagagcggctgcagagccaggtgctgcaggccatgaggcagaggggcattgctgtggaggtgcaggacaccccaaatgcctgtgccaccttcaacttcctgtgccacgagggccgggtgactggagctgccctgatccccccacctgggggcaccagcctgaccagcctgggccaggccgcccagtag

SEQ ID NO: 161131 - DNA, 384 bp, synthetic construct; identical to SEQ ID NO: 161129
  misc_feature 1..384: note = Description of Artificial Sequence: Synthetic coding sequence
  source 1..384: mol_type = other DNA

SEQ ID NO: 161132 - DNA, 384 bp, synthetic construct; identical to SEQ ID NO: 161129
  misc_feature 1..384: note = Description of Artificial Sequence: Synthetic coding sequence
  source 1..384: mol_type = other DNA

SEQ ID NO: 161133 - DNA, 528 bp, synthetic construct
  misc_feature 1..528: note = Description of Artificial Sequence: Synthetic coding sequence
  source 1..528: mol_type = other DNA
atgggcgccctggtgatccggggcatccggaacttcaacctggagaacagagctgagcgggagatcagcaagatgaagcccagcgtggcccccaggcaccccagcaccaacagcctgctgcgggagcagatcagcctgtacccagaggtgaagggggagatcgccaggaaggatgagaagctgctgtccttcctgaaggatgtgtatgtggacagcaaggaccctgtgagcagcctgcaggtgaaggctgctgagacctgccaggagcccaaggagttccggctgcccaaggaccaccactttgacatgatcaacatcaagagcatccccaagggcaagatcagcatcgtggaggccctgaccctgctgaacaaccacaagctgtttcctgagacctggacagctgagaagatcatgcaggagtaccagctggagcagaaggatgtgaacagcctgctgaagtactttgtgacctttgaggtggagatcttccccccagaggacaagaaggccatccgcagcaagtag

SEQ ID NO: 161134 - DNA, 519 bp, synthetic construct
  misc_feature 1..519: note = Description of Artificial Sequence: Synthetic coding sequence
  source 1..519: mol_type = other DNA
atgccagacagctgggacaaggatgtgtacccagagccccccaggaggacccctgtgcagcccaaccccatcgtgtacatgatgaaggcctttgacctgattgtggacaggcctgtgaccctggtgcgggagttcatcgagcggcagcacgccaagaaccgctactactactaccaccggcagtacagaagagtgcctgacatcacagagtgcaaggaggaggacatcatgtgcatgtatgaggccgagatgcagtggaagagggactacaaggtggaccaggagatcatcaacatcatgcaggaccggctgaaggcctgccagcagcgggagggccagaactaccagcagaactgcatcaaggaggtggagcagttcacccaggtggccaaggcctaccaggaccgctaccaggacctgggcgcctacagcagcgccaggaagtgcctggccaagcagaggcagaggatgctgcaggagaggaaggccgccaaggaggccgctgctgccaccagctag

SEQ ID NO: 161135 - DNA, 507 bp, synthetic construct
  misc_feature 1..507: note = Description of Artificial Sequence: Synthetic coding sequence
  source 1..507: mol_type = other DNA
atgccagacagctgggacaaggatgtgtacccagagccccccaggaggacccctgtgcagcccaaccccatcgtgtacatgatgaaggcctttgacctgattgtggacaggcctgtgaccctggtgcgggagttcatcgagcggcagcacgccaagaaccgctactactactaccaccggcagtacagaagagtgcctgacatcacagagtgcaaggaggaggacatcatgtgcatgtatgaggccgagatgcagtggaagagggactacaaggtggaccaggagatcatcaacatcatgcaggaccggctgaaggcctgccagcagcgggagggccagaactaccagcagaactgcatcaaggaggtggagcagttcacccaggtggccaaggcctaccaggacagatgtgcctgccccacccacccccagccccccaccatcctgctgcggcctgggggccagaaccactgcaagagcagcctgcccagcctggtgctgacctag

SEQ ID NO: 161136 - DNA, 492 bp, synthetic construct
  misc_feature 1..492: note = Description of Artificial Sequence: Synthetic coding sequence
  source 1..492: mol_type = other DNA
atggctgctggcctgtttggcctgagcgcccggcggctgctggccgctgctgccacccggggcctgcctgctgcccgggtgcgctgggagagcagcttcagcaggacagtggtggcccccagcgctgtggccggcaagaggcctcctgagcccaccaccccctggcaggaggaccctgagccagaagatgagaacctgtatgagaagaacccagacagccacggctatgacaaggaccctgtgctggatgtgtggaacatgaggctggtgttcttctttggagtgtccatcatcctggtgctgggcagcacctttgtggcctacctgcctgactaccgctgcaccggctgcccccgggcctgggatggcatgaaggagtggagcagaagagaggccgagcggctggtgaagtaccgggaggccaacggcctgcccatcatggagagcaactgctttgaccccagcaagatccagctgcctgaagatgaatag

SEQ ID NO: 161137 - DNA, 462 bp, synthetic construct
  misc_feature 1..462: note = Description of Artificial Sequence: Synthetic coding sequence
  source 1..462: mol_type = other DNA
atggctgctggcctgtttggcctgagcgcccggcggctgctggccgctgctgccacccggggcctgcctgctgcccgggtgcgctgggagagcagcttcagcaggacagtggtggcccccagcgctgtggccggcaagaggcctcctgagcccaccaccccctggcaggaggaccctgagccagaagatgagaacctgtatgagaagaacccagacagccacggctatgacaaggaccctgtgctggatgtgtggaacatgaggctggtgttcttctttggagtgtccatcatcctggtgctgggcagcacctttgtggcctacctgcctgactacaggatgaaggagtggagcagaagagaggccgagcggctggtgaagtaccgggaggccaacggcctgcccatcatggagagcaactgctttgaccccagcaagatccagctgcctgaagatgaatag

SEQ ID NO: 161138 - DNA, 474 bp, synthetic construct
  misc_feature 1..474: note = Description of Artificial Sequence: Synthetic coding sequence
  source 1..474: mol_type = other DNA
gctgcccccagcgtgatggccgccggcctgtttggcctgagcgcccggcggctgctggccgccaggagaagaggcctgcctgctgcccgggtgcgctgggagagcagcttcagcaggacagtggtggcccccagcgctgtggccggcaagaggcctcctgagcccaccaccccctggcaggaggaccctgagccagaagatgagaacctgtatgagaagaacccagacagccacggctatgacaaggaccctgtgctggatgtgtggaacatgaggctggtgttcttctttggagtgtccatcatcctggtgctgggcagcacctttgtggcctacctgcctgactacaggatgaaggagtggagcagaagagaggccgagcggctggtgaagtaccgggaggccaacggcctgcccatcatggagagcaactgctttgaccccagcaagatccagctgcctgaagatgaatag

SEQ ID NO: 161139 - DNA, 297 bp, synthetic construct
  misc_feature 1..297: note = Description of Artificial Sequence: Synthetic coding sequence
  source 1..297: mol_type = other DNA
atggcccatgaacatggccatgaacatggccaccacaagatggagctgcctgactaccggcagtggaagattgagggcacccccctggagaccatccagaagaagctggccgccaagggcctgcgggacccctggggcagaaatgaggcctggagatacatgggcggctttgccaagtctgtgtccttcagtgatgtgttcttcaagggcttcaagtggggctttgctgcctttgtggtggccgtgggcgctgagtactacctggagagcctgaacaaggacaagaagcaccactag

SEQ ID NO: 161140 - DNA, 297 bp, synthetic construct; identical to SEQ ID NO: 161139
  misc_feature 1..297: note = Description of Artificial Sequence: Synthetic coding sequence
  source 1..297: mol_type = other DNA

SEQ ID NO: 161141 - DNA, 198 bp, synthetic construct
  misc_feature 1..198: note = Description of Artificial Sequence: Synthetic coding sequence
  source 1..198: mol_type = other DNA
atggcccatgaacatggccatgaacatggccaccacaagatggagctgcctgactaccggcagtggaagattgagggcacccccctggagaccatccagaagaagctggccgccaagggcctgcgggacccctggggcagaaatgaggcctggagatacatgggcggctttgccaagtctgtgtccttcagtgactag

SEQ ID NO: 161142 - DNA, 297 bp, synthetic construct; identical to SEQ ID NO: 161139
  misc_feature 1..297: note = Description of Artificial Sequence: Synthetic coding sequence
  source 1..297: mol_type = other DNA

SEQ ID NO: 161143 - DNA, 741 bp, synthetic construct; identical to SEQ ID NO: 159392
  misc_feature 1..741: note = Description of Artificial Sequence: Synthetic coding sequence
  source 1..741: mol_type = other DNA

SEQ ID NO: 161144 - DNA, 561 bp, synthetic construct
  misc_feature 1..561: note = Description of Artificial Sequence: Synthetic coding sequence
  source 1..561: mol_type = other DNA
atggctgtggcccgggccggcgtgctgggcgtgcagtggctgcagagggccagcagaaatgtgatgcccctgggcgccaggacagccagccacatgaccaaggacatgtttcctggcccctaccccaggaccccagaggagagagctgctgctgccaagaagtacaacatgagggtggaggactatgagccctacccagatgatggcatgggctacggggactaccccaagctgcctgacaggagccagcacgagcgggacccctggtacagctgggaccagcccggcctgcggctgaactggggcgagcccatgcactggcacctggacatgtacaacagaaacagagtggacaccagccccacccctgtgtcctggcacgtgatgtgcatgcagctgtttggcttcctggccttcatgatcttcatgtgctgggtgggagatgtgtaccctgtgtaccagcctgtgggccccaagcagtacccctacaacaacctgtacctggagcggggcggggaccccagcaaggagcctgagcgggtggtgcactatgagatctag

SEQ ID NO: 161145 - DNA, 519 bp, synthetic construct
  misc_feature 1..519: note = Description of Artificial Sequence: Synthetic coding sequence
  source 1..519: mol_type = other DNA
atggctgtggcccgggccggcgtgctgggcgtgcagtggctgcagagggccagcagaaatgtgatgcccctgggcgccaggacagccagccacatgaccaaggacatgtttcctggcccctaccccaggaccccagaggagagagctgctgctgccaagaagtacaacatgagggtggaggactatgagccctacccagatgatggcatgggctacggggactaccccaagctgcctgacaggagccagcacgagcgggacccctggtacagctgggaccagcccggcctgcggctgaactggggcgagcccatgcactggcacctggacatgtacaacagaaacagagtggacaccagccccacccctgtgtcctggcacgtgatgtgcatgcagctgtttggcttcctggccttcatgatcttcatgtgctgggtgggagatgtgtaccctgtgtaccagcctgtgtgccgccaccacttctcctacaacctgggcttcctgagcgccctgggctag

SEQ ID NO: 161146 - DNA, 468 bp, synthetic construct
  misc_feature 1..468: note = Description of Artificial Sequence: Synthetic coding sequence
  source 1..468: mol_type = other DNA
atgaccaaggacatgtttcctggcccctaccccaggaccccagaggagagagctgctgctgccaagaagtacaacatgagggtggaggactatgagccctacccagatgatggcatgggctatggagactaccccaagctgcctgacaggagccagcacgagcgggacccctggtacagctgggaccagcccggcctgcggctgaactggggcgagcccatgcactggcacctggacatgtacaacagaaacagagtggacaccagccccacccctgtgtcctggcacgtgatgtgcatgcagctgtttggcttcctggccttcatgatcttcatgtgctgggtgggagatgtgtaccctgtgtaccagcctgtgggccccaagcagtacccctacaacaacctgtacctggagcggggcggggaccccagcaaggagcctgagcgggtggtgcactatgagatctag

SEQ ID NO: 161147 - DNA, 519 bp, synthetic construct; identical to SEQ ID NO: 161145
  misc_feature 1..519: note = Description of Artificial Sequence: Synthetic coding sequence
  source 1..519: mol_type = other DNA

SEQ ID NO: 161148 - DNA, 540 bp, synthetic construct
  misc_feature 1..540: note = Description of Artificial Sequence: Synthetic coding sequence
  source 1..540: mol_type = other DNA
atggccttcctggccagcggcccctacctgacccaccagcagaaggtgctgcggctgtacaagagggccctgcggcacctggagagctggtgtgtgcagagggacaagtaccgctactttgcctgcctgatgagggccaggtttgaggagcacaagaatgagaaggacatggccaaggccacccagctgctgaaggaggccgaggaggagttctggtaccggcagcacccccagccctacatcttcccagacagccctgggggcaccagctatgaaagatatgactgctacaaggtgcctgagtggtgcctggatgactggcaccccagcgagaaggccatgtacccagactactttgccaagcgggagcagtggaagaagctgcggcgggagagctgggagcgggaggtgaagcagctgcaggaggagaccccacctgggggccccctgacagaggccctgcccccagccaggaaggagggggacctgccccccctgtggtggtacatcgtgacccggccccgggagcggcccatgtag

SEQ ID NO: 161149 - DNA, 471 bp, synthetic construct
  misc_feature 1..471: note = Description of Artificial Sequence: Synthetic coding sequence
  source 1..471: mol_type = other DNA
atggccagccgggtgctgagcgcctacgtgtcccggctgcctgctgcctttgcccccctgccccgggtgaggatgctggccgtggcccggcccctgagcacagccctgtgcagcgctggcacccagacccggctgggcaccctgcagcctgccctggtgctggcccaggtgcccggccgggtgacccagctgtgccggcagtacagcgacatgccacccctgaccctggagggcatccaggacagagtgctgtatgtgctgaagctgtatgacaagattgatcctgagaagctgtctgtgaacagccacttcatgaaggacctgggcctggacagcctggaccaggtggagatcatcatggccatggaggatgaatttggatttgagatcccagacattgatgctgagaagctgatgtgcccccaggagatcgtggactacatcgctgacaagaaggatgtgtatgaatag

SEQ ID NO: 161150 - DNA, 231 bp, synthetic construct
  misc_feature 1..231: note = Description of Artificial Sequence: Synthetic coding sequence
  source 1..231: mol_type = other DNA
atggcccccagcgccctgctgcggcccctgagccggctgctggccccagcccggctgcccagcggccccagcgtgcgcagcaagttctacgtgcgggagcccccaaatgccaagccagactggctgaaggtgggcttcaccctgggcaccaccgtcttcctgtggatctacctgatcaagcagcacaatgaagacatcctggagtacaagagaagaaatggcctggagtag

SEQ ID NO: 161151 - DNA, 231 bp, synthetic construct; identical to SEQ ID NO: 161150
  misc_feature 1..231: note = Description of Artificial Sequence: Synthetic coding sequence
  source 1..231: mol_type = other DNA

SEQ ID NO: 161152 - DNA, 231 bp, synthetic construct; identical to SEQ ID NO: 161150
  misc_feature 1..231: note = Description of Artificial Sequence: Synthetic coding sequence
  source 1..231: mol_type = other DNA

SEQ ID NO: 161153 - DNA, 231 bp, synthetic construct; identical to SEQ ID NO: 161150
  misc_feature 1..231: note = Description of Artificial Sequence: Synthetic coding sequence
  source 1..231: mol_type = other DNA

SEQ ID NO: 161154 - DNA, 231 bp, synthetic construct; identical to SEQ ID NO: 161150
  misc_feature 1..231: note = Description of Artificial Sequence: Synthetic coding sequence
  source 1..231: mol_type = other DNA

SEQ ID NO: 161155 - DNA, 231 bp, synthetic construct; identical to SEQ ID NO: 161150
  misc_feature 1..231: note = Description of Artificial Sequence: Synthetic coding sequence
  source 1..231: mol_type = other DNA

SEQ ID NO: 161156 - DNA, 231 bp, synthetic construct; identical to SEQ ID NO: 161150
  misc_feature 1..231: note = Description of Artificial Sequence: Synthetic coding sequence
  source 1..231: mol_type = other DNA

SEQ ID NO: 161157 - DNA, 231 bp, synthetic construct; identical to SEQ ID NO: 161150
  misc_feature 1..231: note = Description of Artificial Sequence: Synthetic coding sequence
  source 1..231: mol_type = other DNA

SEQ ID NO: 161158 - DNA, 915 bp, synthetic construct
  misc_feature 1..915: note = Description of Artificial Sequence: Synthetic coding sequence
  source 1..915: mol_type = other DNA
atgatctacaccatgaagaaggtgcacgccctgtgggcctctgtgtgcctgctgctgaacctggccccagcccccctgaatgctgacagcgaggaggatgaggagcacaccatcatcacagacacagagctgccccccctgaagctgatgcacagcttctgtgccttcaaggcagatgatggcccctgcaaggccatcatgaagcgcttcttcttcaacatcttcacccggcagtgtgaggagttcatctacggcggctgtgagggcaaccagaacagatttgagagcctggaggagtgcaagaagatgtgcacccgggacaatgccaaccgcatcatcaagaccaccctgcagcaggagaagccagacttctgcttcctggaggaggaccccggcatctgccggggctacatcacccgctacttctacaacaaccagaccaagcagtgtgagcgcttcaagtatggaggctgcctgggcaacatgaacaactttgagaccctggaggagtgcaagaacatctgtgaagatggccccaacggcttccaggtggacaactacggcacccagctgaatgctgtgaacaacagcctgaccccccagagcaccaaggtgcccagcctgtttgagttccacggccccagctggtgcctgaccccagctgaccggggcctgtgccgggccaatgaaaatcgcttctactacaacagcgtgattggaaaatgtcggcccttcaagtacagcggctgcggcggcaatgaaaacaacttcaccagcaagcaggagtgcctgcgggcctgcaagaagggcttcatccagaggatcagcaaaggaggcctcatcaagaccaagaggaagaggaagaagcagagggtgaagatcgcctatgaggagatctttgtgaagaacatgtag

SEQ ID NO: 161159 - DNA, 2013 bp, synthetic construct
  misc_feature 1..2013: note = Description of Artificial Sequence: Synthetic coding sequence
  source 1..2013: mol_type = other DNA
atgcagatcccccgcttctgctaccacgagcggctgtctgtggccggcaactgcaggatgtgcctggtggagattgagaaggcccccaaggtggtggccgcctgtgccatgcctgtgatgaagggctggaacatcctgaccaacagcgagaagagcaagaaggcccgggagggcgtgatggagttcctgctggccaaccaccccctggactgccccatctgtgaccagggcggagaatgtgacctgcaggaccagagcatgatgtttggaaatgacaggagccgcttcctggagggcaagagagctgtggaggacaagaacatcggccccctggtgaagaccatcatgacccgctgcatccagtgcacccgctgcatccgctttgccagcgagattgctggggtggatgacctgggcaccaccggcagaggaaatgacatgcaggtgggcacctacatcgagaagatgttcatgtctgagctgagcggcaacatcatcgacatctgccctgtgggcgccctgaccagcaagccctatgccttcaccgcccggccctgggagaccaggaagacagagagcattgatgtgatggatgctgtgggcagcaacatcgtggtgtccaccaggactggagaggtgatgaggatcctgcccaggatgcatgaggacatcaatgaggagtggatcagtgacaagaccaggtttgcctatgatggcctgaagaggcagaggctgacagagcccatggtgagaaatgagaagggcctgctgacctacacctcctgggaggatgccctgagccgggtggccggcatgctgcagagcttccagggcaaggatgtggccgccatcgccggcggcctggtggatgctgaggccctggtggccctgaaggacctgctgaacagagtggacagcgacaccctgtgcacagaggaggtgttccccacagctggggccggcacagacctgcggagcaactacctgctgaacaccaccatcgccggcgtggaggaggctgatgtggtgctgctggtgggcaccaaccccaggtttgaggcccccctcttcaatgcccgcatcaggaagtcctggctgcacaatgacctgaaggtggccctgattggcagccctgtggacctgacctacacctatgaccacctgggggacagccccaagatcctgcaggacatcgccagcggcagccaccccttcagccaggtgctgaaggaggccaagaagcccatggtggtgctgggcagcagcgccctgcagagaaatgatggagctgccatcctggccgctgtgagcagcatcgcccagaagatccgcatgaccagcggcgtgactggagactggaaggtgatgaacatcctgcaccgcatcgccagccaggtggccgccctggacctgggctacaagccaggagtggaggccatcaggaagaacccccccaaggtgctcttcctgctgggcgcagatggcggctgcatcacccggcaggacctgcccaaggactgcttcatcatctaccagggccaccacggagatgtgggcgcccccatcgcagatgtgatcctgcccggggccgcctacacagagaagagcgccacctacgtgaacacagagggccgggcccagcagaccaaggtggccgtgaccccacctggcctggcccgggaggactggaagatcatccgggccctgtctgaaattgctggcatgaccctgccctatgacaccctggaccaggtgaggaaccggctggaggaggtgagccccaacctggtgcgctatgatgacatcgagggcgccaactacttccagcaggccaatgagctgagcaagctggtgaaccagcagctgctggccgaccccctggtgcccccccagctgaccatcaaggacttctacatgacagacagcatcagccgggccagccagaccatggccaagtgtgtgaaggctgtgacagagggcgcccaggccgtggaggagcccagcatctgctag

SEQ ID NO: 161160 - DNA, 1851 bp, synthetic construct
  misc_feature 1..1851: note = Description of Artificial Sequence: Synthetic coding sequence
  source 1..1851: mol_type = other DNA
atgtgggagggcgtgatggagttcctgctggccaaccaccccctggactgccccatctgtgaccagggcggagaatgtgacctgcaggaccagagcatgatgtttggaaatgacaggagccgcttcctggagggcaagagagctgtggaggacaagaacatcggccccctggtgaagaccatcatgacccgctgcatccagtgcacccgctgcatccgctttgccagcgagattgctggggtggatgacctgggcaccaccggcagaggaaatgacatgcaggtgggcacctacatcgagaagatgttcatgtctgagctgagcggcaacatcatcgacatctgccctgtgggcgccctgaccagcaagccctatgccttcaccgcccggccctgggagaccaggaagacagagagcattgatgtgatggatgctgtgggcagcaacatcgtggtgtccaccaggactggagaggtgatgaggatcctgcccaggatgcatgaggacatcaatgaggagtggatcagtgacaagaccaggtttgcctatgatggcctgaagaggcagaggctgacagagcccatggtgagaaatgagaagggcctgctgacctacacctcctgggaggatgccctgagccgggtggccggcatgctgcagagcttccagggcaaggatgtggccgccatcgccggcggcctggtggatgctgaggccctggtggccctgaaggacctgctgaacagagtggacagcgacaccctgtgcacagaggaggtgttccccacagctggggccggcacagacctgcggagcaactacctgctgaacaccaccatcgccggcgtggaggaggctgatgtggtgctgctggtgggcaccaaccccaggtttgaggcccccctcttcaatgcccgcatcaggaagtcctggctgcacaatgacctgaaggtggccctgattggcagccctgtggacctgacctacacctatgaccacctgggggacagccccaagatcctgcaggacatcgccagcggcagccaccccttcagccaggtgctgaaggaggccaagaagcccatggtggtgctgggcagcagcgccctgcagagaaatgatggagctgccatcctggccgctgtgagcagcatcgcccagaagatccgcatgaccagcggcgtgactggagactggaaggtgatgaacatcctgcaccgcatcgccagccaggtggccgccctggacctgggctacaagccaggagtggaggccatcaggaagaacccccccaaggtgctcttcctgctgggcgcagatggcggctgcatcacccggcaggacctgcccaaggactgcttcatcatctaccagggccaccacggagatgtgggcgcccccatcgcagatgtgatcctgcccggggccgcctacacagagaagagcgccacctacgtgaacacagagggccgggcccagcagaccaaggtggccgtgaccccacctggcctggcccgggaggactggaagatcatccgggccctgtctgaaattgctggcatgaccctgccctatgacaccctggaccaggtgaggaaccggctggaggaggtgagccccaacctggtgcgctatgatgacatcgagggcgccaactacttccagcaggccaatgagctgagcaagctggtgaaccagcagctgctggccgaccccctggtgcccccccagctgaccatcaaggacttctacatgacagacagcatcagccgggccagccagaccatggccaagtgtgtgaaggctgtgacagagggcgcccaggccgtggaggagcccagcatctgctag

SEQ ID NO: 161161 - DNA, 2076 bp, synthetic construct
  misc_feature 1..2076: note = Description of Artificial Sequence: Synthetic coding sequence
  source 1..2076: mol_type = other DNA
atgctgcgcatccctgtgaggaaggccctggtgggcctgagcaagagccccaagggctgtgtgaggaccacagccacagctgccagcaacctgattgaggtgtttgtggatggccagagcgtgatggtggagcccggcaccaccgtgctgcaggtggtggccgcctgtgccatgcctgtgatgaagggctggaacatcctgaccaacagcgagaagagcaagaaggcccgggagggcgtgatggagttcctgctggccaaccaccccctggactgccccatctgtgaccagggcggggagtgtgacctgcaggaccagagcatgatgtttggaaatgacaggagccgcttcctggagggcaagagagctgtggaggacaagaacatcggccccctggtgaagaccatcatgacccgctgcatccagtgcacccgctgcatccgctttgccagcgagattgctggggtggatgacctgggcaccaccggcagaggaaatgacatgcaggtgggcacctacatcgagaagatgttcatgtctgagctgagcggcaacatcatcgacatctgccctgtgggcgccctgaccagcaagccctatgccttcaccgcccggccctgggagaccaggaagacagagagcattgatgtgatggatgctgtgggcagcaacatcgtggtgtccaccaggactggagaggtgatgaggatcctgcccaggatgcatgaggacatcaatgaggagtggatcagtgacaagaccaggtttgcctatgatggcctgaagaggcagaggctgacagagcccatggtgagaaatgagaagggcctgctgacctacacctcctgggaggatgccctgagccgggtggccggcatgctgcagagcttccagggcaaggatgtggccgccatcgccggcggcctggtggatgctgaggccctggtggccctgaaggacctgctgaacagagtggacagcgacaccctgtgcacagaggaggtgttccccacagctggagctggaacagacctgcggagcaactacctgctgaacaccaccatcgccggcgtggaggaggctgatgtggtgctgctggtgggcaccaaccccaggtttgaggcccccctcttcaatgcccgcatcaggaagtcctggctgcacaatgacctgaaggtggccctgattggcagccctgtggacctgacctacacctatgaccacctgggggacagccccaagatcctgcaggacatcgccagcggcagccaccccttcagccaggtgctgaaggaggccaagaagcccatggtggtgctgggcagcagcgccctgcagagaaatgatggagctgccatcctggccgctgtgagcagcatcgcccagaagatccgcatgaccagcggcgtgactggagactggaaggtgatgaacatcctgcacagaattgccagccaggtggccgccctggacctgggctacaagccaggagtggaggccatcaggaagaacccccccaaggtgctcttcctgctgggcgcagatggcggctgcatcacccggcaggacctgcccaaggactgcttcatcatctaccagggccaccacggagatgtgggcgcccccatcgcagatgtgatcctgcctggagctgcctacacagagaagagcgccacctacgtgaacacagagggccgggcccagcagaccaaggtggccgtgaccccacctggcctggcccgggaggactggaagatcatccgggccctgtctgaaattgctggcatgaccctgccctatgacaccctggaccaggtgaggaaccggctggaggaggtgagccccaacctggtgcgctatgatgacattgaaggagccaactacttccagcaggccaatgagctgagcaagctggtgaaccagcagctgctggccgaccccctggtgcccccccagctgaccatcaaggacttctacatgacagacagcatcagccgggccagccagaccatggccaagtgtgtgaaggctgtgacagaaggagcccaggccgtggaggagcccagcatctgctag

SEQ ID NO: 161162 - DNA, 2184 bp, synthetic construct
  misc_feature 1..2184: note = Description of Artificial Sequence: Synthetic coding sequence
  source 1..2184: mol_type = other DNA
atgctgcgcatccctgtgaggaaggccctggtgggcctgagcaagagccccaagggctgtgtgaggaccacagccacagctgccagcaacctgattgaggtgtttgtggatggccagagcgtgatggtggagcccggcaccaccgtgctgcaggcctgtgagaaggtgggcatgcagatcccccgcttctgctaccacgagcggctgtctgtggccggcaactgcaggatgtgcctggtggagattgagaaggcccccaaggtggtggccgcctgtgccatgcctgtgatgaagggctggaacatcctgaccaacagcgagaagagcaagaaggcccgggagggcgtgatggagttcctgctggccaaccaccccctggactgccccatctgtgaccagggcggggagtgtgacctgcaggaccagagcatgatgtttggaaatgacaggagccgcttcctggagggcaagagagctgtggaggacaagaacatcggccccctggtgaagaccatcatgacccgctgcatccagtgcacccgctgcatccgctttgccagcgagattgctggggtggatgacctgggcaccaccggcagaggaaatgacatgcaggtgggcacctacatcgagaagatgttcatgtctgagctgagcggcaacatcatcgacatctgccctgtgggcgccctgaccagcaagccctatgccttcaccgcccggccctgggagaccaggaagacagagagcattgatgtgatggatgctgtgggcagcaacatcgtggtgtccaccaggactggagaggtgatgaggatcctgcccaggatgcatgaggacatcaatgaggagtggatcagtgacaagaccaggtttgcctatgatggcctgaagaggcagaggctgacagagcccatggtgagaaatgagaagggcctgctgacctacacctcctgggaggatgccctgagccgggtggccggcatgctgcagagcttccagggcaaggatgtggccgccatcgccggcggcctggtggatgctgaggccctggtggccctgaaggacctgctgaacagagtggacagcgacaccctgtgcacagaggaggtgttccccacagctggagctggaacagacctgcggagcaactacctgctgaacaccaccatcgccggcgtggaggaggctgatgtggtgctgctggtgggcaccaaccccaggtttgaggcccccctcttcaatgcccgcatcaggaagtcctggctgcacaatgacctgaaggtggccctgattggcagccctgtggacctgacctacacctatgaccacctgggggacagccccaagatcctgcaggacatcgccagcggcagccaccccttcagccaggtgctgaaggaggccaagaagcccatggtggtgctgggcagcagcgccctgcagagaaatgatggagctgccatcctggccgctgtgagcagcatcgcccagaagatccgcatgaccagcggcgtgactggagactggaaggtgatgaacatcctgcacagaattgccagccaggtggccgccctggacctgggctacaagccaggagtggaggccatcaggaagaacccccccaaggtgctcttcctgctgggcgcagatggcggctgcatcacccggcaggacctgcccaaggactgcttcatcatctaccagggccaccacggagatgtgggcgcccccatcgcagatgtgatcctgcctggagctgcctacacagagaagagcgccacctacgtgaacacagagggccgggcccagcagaccaaggtggccgtgaccccacctggcctggcccgggaggactggaagatcatccgggccctgtctgaaattgctggcatgaccctgccctatgacaccctggaccaggtgaggaaccggctggaggaggtgagccccaacctggtgcgctatgatgacattgaaggagccaactacttccagcaggccaatgagctgagcaagctggtgaaccagcagctgctggccgaccccctggtgcccccccagctgaccatcaaggacttctacatgacagacagcatcagccgggccagccagaccatggccaagtgtgtgaaggctgtgacagaaggagcccaggccgtggaggagcccagcatctgctag

SEQ ID NO: 161163 - DNA, 393 bp, synthetic construct
  misc_feature 1..393: note = Description of Artificial Sequence: Synthetic coding sequence
  source 1..393: mol_type = other DNA
atgctgcgcatccctgtgaggaaggccctggtgggcctgagcaagagccccaagggctgtgtgaggaccacagccacagctgccagcaacctgattgaggtgtttgtggatggccagagcgtgatggtggagcccggcaccaccgtgctgcaggcctgtgagaaggtgggcatgcagatcccccgcttctgctaccacgagcggctgtctgtggccggcaactgcaggatgtgcctggtggagattgagaaggcccccaaggtggtggccgcctgtgccatgcctgtgatgaagggctggaacatcctgaccaacagcgagaagagcaagaaggcccgggagggcgtgatggagttcctgctggccaaccaccccctggactgccccatctag

SEQ ID NO: 161164 - DNA, 2226 bp, synthetic construct
  misc_feature 1..2226: note = Description of Artificial Sequence: Synthetic coding sequence
  source 1..2226: mol_type = other DNA
atgaggatccggggcagcagcggcaccctgagccgcatcaacatgctgcgcatccctgtgaggaaggccctggtgggcctgagcaagagccccaagggctgtgtgaggaccacagccacagctgccagcaacctgattgaggtgtttgtggatggccagagcgtgatggtggagcccggcaccaccgtgctgcaggcctgtgagaaggtgggcatgcagatcccccgcttctgctaccacgagcggctgtctgtggccggcaactgcaggatgtgcctggtggagattgagaaggcccccaaggtggtggccgcctgtgccatgcctgtgatgaagggctggaacatcctgaccaacagcgagaagagcaagaaggcccgggagggcgtgatggagttcctgctggccaaccaccccctggactgccccatctgtgaccagggcggggagtgtgacctgcaggaccagagcatgatgtttggaaatgacaggagccgcttcctggagggcaagagagctgtggaggacaagaacatcggccccctggtgaagaccatcatgacccgctgcatccagtgcacccgctgcatccgctttgccagcgagattgctggggtggatgacctgggcaccaccggcagaggaaatgacatgcaggtgggcacctacatcgagaagatgttcatgtctgagctgagcggcaacatcatcgacatctgccctgtgggcgccctgaccagcaagccctatgccttcaccgcccggccctgggagaccaggaagacagagagcattgatgtgatggatgctgtgggcagcaacatcgtggtgtccaccaggactggagaggtgatgaggatcctgcccaggatgcatgaggacatcaatgaggagtggatcagtgacaagaccaggtttgcctatgatggcctgaagaggcagaggctgacagagcccatggtgagaaatgagaagggcctgctgacctacacctcctgggaggatgccctgagccgggtggccggcatgctgcagagcttccagggcaaggatgtggccgccatcgccggcggcctggtggatgctgaggccctggtggccctgaaggacctgctgaacagagtggacagcgacaccctgtgcacagaggaggtgttccccacagctggagctggaacagacctgcggagcaactacctgctgaacaccaccatcgccggcgtggaggaggctgatgtggtgctgctggtgggcaccaaccccaggtttgaggcccccctcttcaatgcccgcatcaggaagtcctggctgcacaatgacctgaaggtggccctgattggcagccctgtggacctgacctacacctatgaccacctgggggacagccccaagatcctgcaggacatcgccagcggcagccaccccttcagccaggtgctgaaggaggccaagaagcccatggtggtgctgggcagcagcgccctgcagagaaatgatggagctgccatcctggccgctgtgagcagcatcgcccagaagatccgcatgaccagcggcgtgactggagactggaaggtgatgaacatcctgcacagaattgccagccaggtggccgccctggacctgggctacaagccaggagtggaggccatcaggaagaacccccccaaggtgctcttcctgctgggcgcagatggcggctgcatcacccggcaggacctgcccaaggactgcttcatcatctaccagggccaccacggagatgtgggcgcccccatcgcagatgtgatcctgcctggagctgcctacacagagaagagcgccacctacgtgaacacagagggccgggcccagcagaccaaggtggccgtgaccccacctggcctggcccgggaggactggaagatcatccgggccctgtctgaaattgctggcatgaccctgccctatgacaccctggaccaggtgaggaaccggctggaggaggtgagccccaacctggtgcgctatgatgacattgaaggagccaactacttccagcaggccaatgagctgagcaagctggtgaaccagcagctgctggccgaccccctggtgcccccccagctgaccatcaaggacttctacatgacagacagcatcagccgggccagccagaccatggccaagtgtgtgaaggctgtgacagaaggagcccaggccgtggaggagcccagcatctgctag

SEQ ID NO: 161165 - DNA, 1836 bp, synthetic construct
  misc_feature 1..1836: note = Description of Artificial Sequence: Synthetic coding sequence
  source 1..1836: mol_type = other DNA
atggagttcctgctggccaaccaccccctggactgccccatctgtgaccagggcggggagtgtgacctgcaggaccagagcatgatgtttggaaatgacaggagccgcttcctggagggcaagagagctgtggaggacaagaacatcggccccctggtgaagaccatcatgacccgctgcatccagtgcacccgctgcatccgctttgccagcgagattgctggggtggatgacctgggcaccaccggcagaggaaatgacatgcaggtgggcacctacatcgagaagatgttcatgtctgagctgagcggcaacatcatcgacatctgccctgtgggcgccctgaccagcaagccctatgccttcaccgcccggccctgggagaccaggaagacagagagcattgatgtgatggatgctgtgggcagcaacatcgtggtgtccaccaggactggagaggtgatgaggatcctgcccaggatgcatgaggacatcaatgaggagtggatcagtgacaagaccaggtttgcctatgatggcctgaagaggcagaggctgacagagcccatggtgagaaatgagaagggcctgctgacctacacctcctgggaggatgccctgagccgggtggccggcatgctgcagagcttccagggcaaggatgtggccgccatcgccggcggcctggtggatgctgaggccctggtggccctgaaggacctgctgaacagagtggacagcgacaccctgtgcacagaggaggtgttccccacagctggagctggaacagacctgcggagcaactacctgctgaacaccaccatcgccggcgtggaggaggctgatgtggtgctgctggtgggcaccaaccccaggtttgaggcccccctcttcaatgcccgcatcaggaagtcctggctgcacaatgacctgaaggtggccctgattggcagccctgtggacctgacctacacctatgaccacctgggggacagccccaagatcctgcaggacatcgccagcggcagccaccccttcagccaggtgctgaaggaggccaagaagcccatggtggtgctgggcagcagcgccctgcagagaaatgatggagctgccatcctggccgctgtgagcagcatcgcccagaagatccgcatgaccagcggcgtgactggagactggaaggtgatgaacatcctgcacagaattgccagccaggtggccgccctggacctgggctacaagccaggagtggaggccatcaggaagaacccccccaaggtgctcttcctgctgggcgcagatggcggctgcatcacccggcaggacctgcccaaggactgcttcatcatctaccagggccaccacggagatgtgggcgcccccatcgcagatgtgatcctgcctggagctgcctacacagagaagagcgccacctacgtgaacacagagggccgggcccagcagaccaaggtggccgtgaccccacctggcctggcccgggaggactggaagatcatccgggccctgtctgaaattgctggcatgaccctgccctatgacaccctggaccaggtgaggaaccggctggaggaggtgagccccaacctggtgcgctatgatgacattgaaggagccaactacttccagcaggccaatgagctgagcaagctggtgaaccagcagctgctggccgaccccctggtgcccccccagctgaccatcaaggacttctacatgacagacagcatcagccgggccagccagaccatggccaagtgtgtgaaggctgtgacagaaggagcccaggccgtggaggagcccagcatctgctag

SEQ ID NO: 161166 - DNA, 1392 bp, synthetic construct
  misc_feature 1..1392: note = Description of Artificial Sequence: Synthetic coding sequence
  source 1..1392: mol_type = other DNA
atggccgccctgcgggccctgtgtggcttccggggcgtggccgcccaggtgctgcggcctggggccggcgtgcggctgcccatccagcccagcagaggagtgcggcagtggcagccagatgtggagtgggcccagcagtttggaggagctgtgatgtaccccagcaaggagacagcccactggaagcccccaccctggaatgatgtggacccccccaaggacaccatcgtgaagaacatcaccctgaactttggcccccagcaccctgctgcccacggcgtgctgcggctggtgatggagctgagcggggagatggtgaggaaatgtgacccccacatcggcctgctgcaccggggcacagagaagctgattgagtacaagacctacctgcaggccctgccctactttgaccggctggactatgtgtccatgatgtgcaatgagcaggcctacagcctggccgtggagaagctgctgaacatccggcccccaccccgggcccagtggatccgggtgctgtttggagagatcacccggctgctgaaccacatcatggctgtgaccacccacgccctggacctgggcgccatgacccccttcttctggctgtttgaggagcgggagaagatgtttgagttctatgaaagagtgtctggggccaggatgcacgccgcctacatccggcctggaggagtgcaccaggacctgcccctgggcctgatggatgacatctaccagttcagcaagaacttcagcctgcggctggatgagctggaggagctgctgaccaacaaccgcatctggaggaacagaaccattgatattggagtggtgacagctgaggaggccctgaactacggcttctctggagtgatgctgcggggcagcggcatccagtgggacctgaggaagacccagccctatgatgtgtatgaccaggtggagtttgatgtgcctgtgggcagcagaggagactgctatgaccgctacctgtgccgggtggaggagatgaggcagagcctgcgcatcatcgcccagtgcctgaacaagatgcctcctggagagatcaaggtggatgatgccaaggtgtccccacccaagagagctgagatgaagacctccatggagagcctcatccaccacttcaagctgtacacagagggctaccaggtgcccccaggggccacctacacagccatcgaggcccccaagggggagtttggagtgtacctggtgtctgatggcagcagccggccctaccgctgcaagatcaaggcccctggctttgcccacctggccggcctggacaagatgagcaagggccacatgctggctgatgtggtggccatcatcggcacccaggacatcgtgtttggagaggtggacagatag

SEQ ID NO: 161167 - DNA, 1374 bp, synthetic construct
  misc_feature 1..1374: note = Description of Artificial Sequence: Synthetic coding sequence
  source 1..1374: mol_type = other DNA
atggccgccctgcgggccctgtgtggcttccggggcgtggccgcccaggtgctgcggcctggggccggcgtgcggctgcccatccagcccagcagaggagtgcggcagtggcagccagatgtggagtgggcccagcagtttggaggagctgtgatgtaccccagcaaggagacagcccactggaagcccccaccctggaatgatgtggacccccccaaggacaccatcgtgaagaacatcaccctgaactttggcccccagcaccctgctgcccacggcgtgctgcggctggtgatggagctgagcggggagatggtgaggaaatgtgacccccacatcggcctgctgcaccggggcacagagaagctgattgagtacaagacctacctgcaggccctgccctactttgaccggctggactatgtgtccatgatgtgcaatgagcaggcctacagcctggccgtggagaagctgctgaacatccggcccccaccccgggcccagtggatccgggtgctgtttggagagatcacccggctgctgaaccacatcatggctgtgaccacccacgccctggacctgggcgccatgacccccttcttctggctgtttgaggagcgggagaagatgtttgagttctatgaaagagtgtctggggccaggatgcacgccgcctacatccggcctggaggagtgcaccaggacctgcccctgggcctgatggatgacatctaccagttcagcaagaacttcagcctgcggctggatgagctggaggagctgctgaccaacaaccgcatctggaggaacagaaccattgatattggagtggtgacagctgaggaggccctgaactacggcttctctggagtgatgctgcggggcagcggcatccagtgggacctgaggaagacccagccctatgatgtgtatgaccaggtggagtttgatgtgcctgtgggcagcagaggagactgctatgaccgctacctgtgccgggtggaggagatgaggcagagcctgcgcatcatcgcccagtgcctgaacaagatgcctcctggagagatcaaggtggatgatgccaaggtgtccccacccaagagagctgagatgaagacctccatggagagcctcatccaccacttcaagctgtacacagagggctaccaggtgcccccaggggccacctacacagccatcgaggcccccaagggggagtttggagtgtacctggtgtctgatggcagcagccggccctaccgctgcaagatcaaggcccctggctttgcccacctggccggcctggacaagatgagcaagggccacatgctggctgatgtggtggccatcatcggcacccggcccatcgtgtag

SEQ ID NO: 161168 - DNA, 696 bp, synthetic construct
  misc_feature 1..696: note = Description of Artificial Sequence: Synthetic coding sequence
  source 1..696: mol_type = other DNA
atggagctgagcggggagatggtgaggaaatgtgacccccacatcggcctgctgcaccggggcacagagaagctgattgagtacaagacctacctgcaggccctgccctactttgaccggctggactatgtgtccatgatgtgcaatgagcaggcctacagcctggccgtggagaagctgctgaacatccggcccccaccccgggcccagtggatccgggtgctgtttggagagatcacccggctgctgaaccacatcatggctgtgaccacccacgccctggacctgggcgccatgacccccttcttctggctgtttgaggagcgggagaagatgtttgagttctatgaaagagtgtctggggccaggatgcacgccgcctacatccggcctggaggagtgcaccaggacctgcccctgggcctgatggatgacatctaccagttcagcaagaacttcagcctgcggctggatgagctggaggagctgctgaccaacaaccgcatctggaggaacagaaccattgatattggagtggtgacagctgaggaggccctgaactacggcttctctggagtgatgctgcggggcagcggcatccagtgggacctgaggaagacccagccctatgatgtgtatgaccaggtggagtttgatgtgcctgtgggcagcagaggagactgctatgacagatag

SEQ ID NO: 161169 - DNA, 162 bp, synthetic construct
  misc_feature 1..162: note = Description of Artificial Sequence: Synthetic coding sequence
  source 1..162: mol_type = other DNA
atgtttgagttctatgagcgggtgtctggggccaggatgcatgctgcctacatccggcctgggggcgtgcaccaggacctgcccctgggcctgatggatgacatctaccagttcagcaagaacttcagcctgcggctggatgagctggaggaggtgtcctag

SEQ ID NO: 161170 - DNA, 795 bp, synthetic construct
  misc_feature 1..795: note = Description of Artificial Sequence: Synthetic coding sequence
  source 1..795: mol_type = other DNA
atggctgctgctgctgtggcccggctgtggtggaggggcatcctgggcgccagcgccctgacccggggcaccggccggcccagcgtgctgctgctgcctgtgagaagagagagcgctggagctgacacccggcccaccgtgcggcccagaaatgatgtggcccacaagcagctgagcgcctttggagaatatgtggccgagatcctgcccaagtatgtgcagcaggtgcaggtgtcctgcttcaatgagctggaggtgtgcatccacccagatggagtcatccctgtgctgaccttcctgcgggaccacaccaatgcccagttcaagagcctggtggacctgacagctgtggatgtgcccacccggcagaacagatttgagatcgtgtacaacctgctgagcctgcgcttcaacagccgcatccgggtgaagacctacacagatgagctgacccccattgaatctgctgtgtctgtgttcaaggccgccaactggtatgaaagagagatctgggacatgtttggagtcttctttgccaaccacccagacctgcggcgcatcctgacagattatggctttgagggccaccccttcaggaaggacttccccctgagcggctacgtggagctgcgctatgatgatgaggtgaagagggtggtggccgagcctgtggagctggcccaggagttcaggaagtttgacctgaacagcccctgggaggccttccctgtgtaccggcagcccccagagagcctgaagctggaggccggggacaagaagccagatgccaagtag

SEQ ID NO: 161171 - DNA, 528 bp, synthetic construct
  misc_feature 1..528: note = Description of Artificial Sequence: Synthetic coding sequence
  source 1..528: mol_type = other DNA
atggctgctgtgtccatgtctgtggtgctgcggcagaccctgtggaggagaagagctgtggccgtggccgccctgtctgtgtcccgggtgcccaccaggagcctgcggaccagcacctggaggctggcccaggaccagacccaggacacccagctgatcaccgtggatgagaagctggacatcaccaccctgactggagtgcctgaggagcacatcaagaccaggaaggtgcgcatctttgtgcctgccaggaacaacatgcagagcggcgtgaacaacaccaagaagtggaagatggagtttgacacccgggagcgctgggagaaccccctgatgggctgggccagcacagctgaccccctgagcaacatggtgctgaccttcagcaccaaggaggatgctgtgtcctttgctgagaagaatggctggagctatgacatcgaggagaggaaggtgcccaagcccaagagcaagagctatggagccaacttctcctggaacaagaggaccagggtgtccaccaagtag

SEQ ID NO: 161172 - DNA, 321 bp, synthetic construct
  misc_feature 1..321: note = Description of Artificial Sequence: Synthetic coding sequence
  source 1..321: mol_type = other DNA
atgcccttcctggacatccagaagcgcttcggcctgaacatcgaccgctggctgaccatccagagcggggagcagccctacaagatggccggccgctgccacgcctttgagaaggagtggattgaatgtgcccatggaattggctacaccagggctgagaaggagtgcaagattgaatatgatgactttgtggagtgcctgctgcggcagaagaccatgaggcgggccggcaccatcaggaagcagagggacaagctgatcaaggagggcaagtacaccccaccaccccaccacatcggcaaaggagagccccggccctag

SEQ ID NO: 161173 - DNA, 321 bp, synthetic construct; identical to SEQ ID NO: 161172
  misc_feature 1..321: note = Description of Artificial Sequence: Synthetic coding sequence
  source 1..321: mol_type = other DNA

SEQ ID NO: 161174 - DNA, 375 bp, synthetic construct
  misc_feature 1..375: note = Description of Artificial Sequence: Synthetic coding sequence
  source 1..375: mol_type = other DNA
atggctgctgccatgaccttctgccgcctgctgaacagatgtggggaggccgcccggagcctgcccctgggcgcccgctgcttcggcgtgcgggtgagccccactggagagaaggtgacccacacaggccaggtgtatgatgacaaggactaccgccgcatccgctttgtgggccggcagaaggaggtgaatgaaaattttgccatcgacctgattgctgagcagcctgtgtctgaggtggagaccagggtgattgcctgtgatggcggcggcggggccctgggccaccccaaggtgtacatcaacctggacaaggagaccaagacaggcacctgtggctactgcggcctgcagttccggcagcaccaccactag

SEQ ID NO: 161175 - DNA, 1560 bp, synthetic construct
  misc_feature 1..1560: note = Description of Artificial Sequence: Synthetic coding sequence
  source 1..1560: mol_type = other DNA
atggcccccatccccaagacagtgggccgcatcaagctggactgcagcctgcggcccagctgccccctggaggtggccgccgcccccaagctgtgcaaggagtttggacctgaggactatggagaagaagatattgtggacttcctgcggcggctggtggagagtgacccccagggcctgcaccgcatccacgtggatggcagcagcggccgcctgcagctgtggcaccacgactacctgctgggccacctggatgatgagggcaagagcacaggccagagcgaccggggcaaaggagctgagggcctgggcacctactgcggcctgaggaagagcttcctgtacccaccccaggagagcgagccctgcccccagagccccagcgccagcgccaccttccccagcgtgtctgacagcctgctgcaggtggccatgccccagaagctgctggtgacagaggaggaggccaaccggctggccgaggagctggtggccgaggaggagaggatgaagcagaaggccgagaagaagaggctgaagaagaagaggcagaaggagaggaagaggcaggagcggctggagcagtactgtggggagcccaaggccagcaccaccagtgatggagatgagagcccccccagcagccctggcaaccctgtgcagggccagtgtggggaggaggaggacagcctggacctgagcagcacctttgtgtccctggccctgaggaaggtgggggactggcccctgagcgcccggcgggagaagggcctgaaccaggagccccagggccggggcctggccctgcagaagatgggccaggaggaggagagccccccccgggaggagcggccccagcagagccccaaggtgcaggccagccctggcctgctggccgccgccctgcagcagagccaggagctggccaagctgggcaccagctttgcccagaatggcttctaccacgaggccgtggtgctcttcacccaggccctgaagctgaacccccaggaccaccggctgtttggaaacagaagcttctgccacgagcggctgggccagcctgcctgggccctggctgatgcccaggtggccctgaccctgcggcccggctggccccggggcctcttccggctgggcaaggccctgatgggcctgcagcgcttccgggaggccgctgctgtgttccaggagaccctgcggggcggcagccagccagatgctgcccgggagctgcggagctgcctgctgcacctgaccctgcagggccagaggggcggcatctgtgccccacccctgagccctggggccctgcagcccctgccccacgccgagctggcccccagcggcctgcccagcctgcgctgccccaggagcacagccctgcggagccctggcctgagccccctgctgcactaccccagctgccacaggagccaccccaaccagcccctgagccagacccagagcagaagaccccaccccctgaagccccaggaccccagcaagggctgggacatcctgggcctgggcctgcagcacctgagccaggccaggtag

SEQ ID NO: 161176 - DNA, 621 bp, synthetic construct
  misc_feature 1..621: note = Description of Artificial Sequence: Synthetic coding sequence
  source 1..621: mol_type = other DNA
atggctgtgctgagcgcccctggcctgcggggcttccgcatcctgggcctgcggagctctgtgggccctgctgtgcaggcccggggcgtgcaccagagcgtggccacagatggccccagcagcacccagcctgccctgcccaaggcccgggctgtggcccccaagcccagcagcagaggagaatatgtggtggccaagctggatgacctggtgaactgggcccggcgcagcagcctgtggcccatgaccttcggcctggcctgctgtgctgtggagatgatgcacatggccgcccccaggtatgacatggaccgcttcggcgtggtgttccgggccagcccccggcagagtgatgtgatgattgtggccggcaccctgaccaacaagatggccccagccctgaggaaggtgtatgaccagatgcctgagccccgctacgtggtgtccatgggcagctgtgccaatggaggcggctactaccactacagctacagcgtggtgcggggctgtgacagaattgtgcctgtggacatctacatccctggccgggccggcacagccccacccacccgggagctggagactggacctgccccccacggggcccggcggcccctgtag

SEQ ID NO: 161177 - DNA, 885 bp, synthetic construct
  misc_feature 1..885: note = Description of Artificial Sequence: Synthetic coding sequence
  source 1..885: mol_type = other DNA
atggctgtgctgagcgcccctggcctgcggggcttccgcatcctgggcctgcggagctctgtgggccctgctgtgcaggcccggggcgtgcaccagagcgtggccacagatggccccagcagcacccagcctgccctgcccaaggcccgggctgtggcccccaagcccagcagcagaggagaatatgtggtggccaagctggatgacctggtgaactgggccaggagagtgtccaccatgagctgccggcccagcagcagcgcccgggccagcctgcacacccaccgccacacccacacccacaccaacgtgcagaccaggacccacaccacccacgcctgcaccctgacctgtgcccacgtgcacgccagcagccacgtgtggacagatgtgtacacagaccacacccacacccacgcccacaatgcccacatgcacaccaggacccacgcccacctgcacacccacgcccacaccagcacctgtgcccacaccctggcccacatccacacctgcaccctggccctgatgcacacccacgcccacatctacacctgcaccaggaccctggcccacacctgcacctacatgcacagccacgcccacacctgcaccctgacccacatgcacacccggccctgtgtggacacctgcatgtgtgcctgctggcacgcctgcacccaggcccacagcctgatgcacacccacccctgtggccgcggggccggccgcaccctgcctgaggcccctgtgctggcctggtggcctgtggtgcccagtgaagattctgaccctgctggagatgaccccagcgtgtctgtcatcctcttcctggcctctgtgtgcagcagctgcttctccttcaaggtgaaggctgtgttctag

SEQ ID NO: 161178 - DNA, 645 bp, synthetic construct
  misc_feature 1..645: note = Description of Artificial Sequence: Synthetic coding sequence
  source 1..645: mol_type = other DNA
atggctgtgctgagcgcccctggcctgcggggcttccgcatcctgggcctgcggagctctgtgggccctgctgtgcaggcccggggcgtgcaccagagcgtggccacagatggccccagcagcacccagcctgccctgcccaaggcccgggctgtggcccccaagcccagcagcagaggagaatatgtggtggccaagctggatgacctggtgaactgggcccggcgcagcagcctgtggcccatgaccttcggcctggcctgctgtgctgtggagatgatgcacatggccgcccccaggtatgacatggaccgcttcggcgtggtgttccgggccagcccccggcagagtgatgtgatgattgtggccggcaccctgaccaacaagatggccccagccctgaggaagagcagcctgcggccagatgctggagctgccctgcggggcctgcatggagagctgcggcagaggcggcggctgctgcccctcttcctgctgggcggggagggcctgcggccccaccgggcccggggccacctgcacccccggctgcccaccacagctgaggccctgctgtatggcatcctgcagctgcagaggaagatcaagcgggagcggcggctgcagatctggtacagaagatag

SEQ ID NO: 161179 - DNA, 621 bp, synthetic construct; identical to SEQ ID NO: 161176
  misc_feature 1..621: note = Description of Artificial Sequence: Synthetic coding sequence
  source 1..621: mol_type = other DNA

SEQ ID NO: 161180 - DNA, 633 bp, synthetic construct
  misc_feature 1..633: note = Description of Artificial Sequence: Synthetic coding sequence
  source 1..633: mol_type = other DNA
atgcgctgcctgaccacccccatgctgctgcgggccctggcccaggccgcccgggccggccccccaggcggccgcagcctgcacagcagcgctgtggccgccacctacaagtatgtgaacatgcaggaccctgagatggacatgaagtctgtgacagacagagctgcccggaccctgctgtggacagagctgttccggggcctgggcatgaccctgagctacctgttccgggagcccgccaccatcaactacccctttgagaagggccccctgagcccccgcttccggggggagcacgccctgcggcgctaccccagcggggaggagcgctgcatcgcctgcaagctgtgtgaggccatctgcccagcccaggccatcaccatcgaggccgagcccagggcagatggcagcaggaggaccaccaggtatgacatcgacatgaccaagtgcatctactgcggcttctgccaggaggcctgccctgtggatgccatcgtggagggccccaactttgagttcagcacagagacccatgaggagctgctgtacaacaaggagaagctgctgaacaatggagacaagtgggaggccgagattgctgccaacatccaggccgactacctgtacagatag

SEQ ID NO: 161181 - DNA, 375 bp, synthetic construct
  misc_feature 1..375: note = Description of Artificial Sequence: Synthetic coding sequence
  source 1..375: mol_type = other DNA
atgcgctgcctgaccacccccatgctgctgcgggccctggcccaggccgcccgggccggccccccaggcggccgcagcctgcacagcagcgctgtggccgccacctacaagtatgtgaacatgcaggaccctgagatggacatgaagtctgtgacagacagagctgcccggaccctgctgtggacagagctgttccggggcctgggcatgaccctgagctacctgttccgggagcccgccaccatcaactacccctttgagaagggccccctgagcccccgcttccggggggagcacgccctgcggcgctaccccagcggggaggagcgctgcatcgcctgcaagctgtgtgaggccatctgcccagcccagtag

SEQ ID NO: 161182 - DNA, 333 bp, synthetic construct
  misc_feature 1..333: note = Description of Artificial Sequence: Synthetic coding sequence
  source 1..333: mol_type = other DNA
atgcgctgcctgaccacccccatgctgctgcgggccctggcccaggccgcccgggccggccccccaggcggccgcagcctgcacagcagcgctgtggccgccacctacaagtatgtgaacatgcaggaccctgagatggacatgaagtctgtgacagacagagctgcccggaccctgctgtggacagagctgttccggggcctgggcatgaccctgagctacctgttccgggagcccgccaccatcaactacccctttgagaagggccccctgagcccccgcttccggggggagcacgccctgcggcgctaccccagcggggaggagaggtag

SEQ ID NO: 161183 - DNA, 555 bp, synthetic construct
  misc_feature 1..555: note = Description of Artificial Sequence: Synthetic coding sequence
  source 1..555: mol_type = other DNA
atgcgctgcctgaccacccccatgctgctgcgggccctggcccaggccgcccgggccggccccccaggcggccgcagcctgcacagcagcgctgtggccgccacctacaagtatgtgaacatgcaggaccctgagatggacatgaagtctgtgacagacagagctgcccggaccctgctgtggacagagctgttccggggcctgggcatgaccctgagctacctgttccgggagcccgccaccatcaactacccctttgagaagggccccctgagcccccgcttccggggggagcacgccctgcggcgctaccccagcggggaggagcgctgcatcgcctgcaagctgtgtgaggccatctgcccagcccaggccatcaccatcgaggccgagcccagggcagatggcagcaggaggaccaccaggtatgacatcgacatgaccaagtgcatctactgcggcttctgccaggaggcctgccctgtggatgccatcgtggagggccccaactttgagttcagcacagagacccatgaggagctgctgtacaactag

SEQ ID NO: 161184 - DNA, 195 bp, synthetic construct
  misc_feature 1..195: note = Description of Artificial Sequence: Synthetic coding sequence
  source 1..195: mol_type = other DNA
atgaccaagtgcatctactgcggcttctgccaggaggcctgccctgtggatgccatcgtggagggccccaactttgagttcagcacagagacccatgaggagctgctgtacaacaaggagaagctgctgaacaatggagacaagtgggaggccgagattgctgccaacatccaggccgactacctgtacagatag

SEQ ID NO: 161185 - DNA, 1395 bp, synthetic construct
  misc_feature 1..1395: note = Description of Artificial Sequence: Synthetic coding sequence
  source 1..1395: mol_type = other DNA
atgctggccacccggcggctgctgggctggagcctgcctgcccgggtgtctgtgcgcttcagcggggacaccacagcccccaagaagaccagctttggcagcctgaaggatgaggaccgcatcttcaccaacctgtatggaagacatgactggaggctgaagggcagcctgagcagaggagactggtacaagaccaaggagatcctgctgaagggccctgactggatcctgggggagatcaagaccagcggcctgcggggccggggcggggccggcttccccaccggcctgaagtggagcttcatgaacaagcccagtgatggccggcccaagtacctggtggtgaatgctgatgaaggagagcccggcacctgcaaggaccgggagatcctgcggcatgacccccacaagctgctggagggctgcctggtgggcggccgggccatgggcgcccgggccgcctacatctacatccggggggagttctacaatgaggccagcaacctgcaggtggccatccgggaggcctatgaagctggcctcatcggcaagaatgcctgtggcagcggctatgactttgatgtgtttgtggtgagaggagctggggcctacatctgtggggaggagacagccctgattgagagcattgagggcaagcagggcaagccccggctgaagccacccttcccagcagatgtgggcgtgtttggctgccccaccaccgtggccaacgtggagaccgtggccgtgagccccaccatctgccggcggggcggcacctggtttgctggcttcggccgggagagaaattctggcaccaagctgttcaacatcagcggccacgtgaaccacccctgcaccgtggaggaggagatgtctgtgcccctgaaggagctgattgagaagcacgccggcggcgtgactggaggctgggacaacctgctggccgtcatccctgggggcagcagcacccccctcatccccaagtctgtgtgtgagaccgtgctgatggactttgatgccctggtgcaggcccagacaggcctgggcacagctgctgtgattgtgatggacaggagcacagacatcgtgaaggccatcgcccggctgattgagttctacaagcatgagagctgtggccagtgcaccccctgccgggagggcgtggactggatgaacaaggtgatggccaggtttgtgagaggagatgcccggcctgctgagattgacagcctgtgggagatcagcaagcagatcgagggccacaccatctgtgccctgggagatggagctgcctggcctgtgcagggcctcatccgccacttccggcctgagctggaggagaggatgcagagatttgcccagcagcaccaggcccggcaggccgccagctag

SEQ ID NO: 161186 - DNA, 1374 bp, synthetic construct
  misc_feature 1..1374: note = Description of Artificial Sequence: Synthetic coding sequence
  source 1..1374: mol_type = other DNA
atgctggccacccggcggctgctgggctggagcctgcctgcccgggtgtccacagcccccaagaagaccagctttggcagcctgaaggatgaagatcgcatcttcaccaacctgtatggaagacatgactggaggctgaagggcagcctgagcagaggagactggtacaagaccaaggagatcctgctgaagggccctgactggatcctgggggagatcaagaccagcggcctgcggggccggggcggggccggcttccccaccggcctgaagtggagcttcatgaacaagcccagtgatggccggcccaagtacctggtggtgaatgctgatgaaggagagcccggcacctgcaaggaccgggagatcctgcggcatgacccccacaagctgctggagggctgcctggtgggcggccgggccatgggcgcccgggccgcctacatctacatccggggggagttctacaatgaggccagcaacctgcaggtggccatccgggaggcctatgaggccggcctgattggcaagaatgcctgtggcagcggctatgactttgatgtgtttgtggtgcggggggccggggcctacatctgtggggaggagacagccctgattgagagcattgagggcaagcagggcaagccccggctgaagccacccttcccagcagatgtgggcgtgtttggctgccccaccaccgtggccaacgtggagaccgtggccgtgagccccaccatctgcagaagaggaggcacctggtttgctggcttcggccgggagaggaacagcggcaccaagctgttcaacatcagcggccacgtgaaccacccctgcaccgtggaggaggagatgtctgtgcccctgaaggagctgattgagaagcatgctggaggagtgactggaggctgggacaacctgctggccgtcatccctgggggcagcagcacccccctcatccccaagtctgtgtgtgaaacagtgctgatggactttgatgccctggtgcaggcccagacaggcctgggcacagctgctgtgattgtgatggacaggagcacagacatcgtgaaggccatcgcccggctcatcgagttctacaagcatgagagctgtggccagtgcaccccctgccgggagggcgtggactggatgaacaaggtgatggccaggtttgtgagaggagatgcccggcctgctgagattgacagcctgtgggagatcagcaagcagatcgagggccacaccatctgtgccctgggagatggagctgcctggcctgtgcagggcctcatccgccacttccggcctgagctggaggagaggatgcagagatttgcccagcagcaccaggcccggcaggccgccagctag

SEQ ID NO: 161187 - DNA, 1008 bp, synthetic construct
  misc_feature 1..1008: note = Description of Artificial Sequence: Synthetic coding sequence
  source 1..1008: mol_type = other DNA
atgctggccacccggcggctgctgggctggagcctgcctgcccgggtgtctgtgcgcttcagcggggacaccacagcccccaagaagaccagctttggcagcctgaaggatgaggaccgcatcttcaccaacctgtatggaagacatgactggaggctgaagggcagcctgagcagaggagactggtacaagaccaaggagatcctgctgaagggccctgactggatcctgggggagatcaagaccagcggcctgcggggccggggcggggccggcttccccaccggcctgaagtggagcttcatgaacaagcccagtgatggcagccccaccaccgtggccaacgtggagaccgtggccgtgagccccaccatctgcagaagaggaggcacctggtttgctggcttcggccgggagaggaacagcggcaccaagctgttcaacatcagcggccacgtgaaccacccctgcaccgtggaggaggagatgtctgtgcccctgaaggagctgattgagaagcatgctggaggagtgactggaggctgggacaacctgctggccgtcatccctgggggcagcagcacccccctcatccccaagtctgtgtgtgaaacagtgctgatggactttgatgccctggtgcaggcccagacaggcctgggcacagctgctgtgattgtgatggacaggagcacagacatcgtgaaggccatcgcccggctcatcgagttctacaagcatgagagctgtggccagtgcaccccctgccgggagggcgtggactggatgaacaaggtgatggccaggtttgtgagaggagatgcccggcctgctgagattgacagcctgtgggagatcagcaagcagatcgagggccacaccatctgtgccctgggagatggagctgcctggcctgtgcagggcctcatccgccacttccggcctgagctggaggagaggatgcagagatttgcccagcagcaccaggcccggcaggccgccagctag

SEQ ID NO: 161188 - DNA, 1368 bp, synthetic construct
  misc_feature 1..1368: note = Description of Artificial Sequence: Synthetic coding sequence
  source 1..1368: mol_type = other DNA
atgctggccacccggcggctgctgggctggagcctgcctgccaggacagcccccaagaagaccagctttggcagcctgaaggatgaagatcgcatcttcaccaacctgtatggaagacatgactggaggctgaagggcagcctgagcagaggagactggtacaagaccaaggagatcctgctgaagggccctgactggatcctgggggagatcaagaccagcggcctgcggggccggggcggggccggcttccccaccggcctgaagtggagcttcatgaacaagcccagtgatggccggcccaagtacctggtggtgaatgctgatgaaggagagcccggcacctgcaaggaccgggagatcctgcggcatgacccccacaagctgctggagggctgcctggtgggcggccgggccatgggcgcccgggccgcctacatctacatccggggggagttctacaatgaggccagcaacctgcaggtggccatccgggaggcctatgaggccggcctgattggcaagaatgcctgtggcagcggctatgactttgatgtgtttgtggtgcggggggccggggcctacatctgtggggaggagacagccctgattgagagcattgagggcaagcagggcaagccccggctgaagccacccttcccagcagatgtgggcgtgtttggctgccccaccaccgtggccaacgtggagaccgtggccgtgagccccaccatctgcagaagaggaggcacctggtttgctggcttcggccgggagaggaacagcggcaccaagctgttcaacatcagcggccacgtgaaccacccctgcaccgtggaggaggagatgtctgtgcccctgaaggagctgattgagaagcatgctggaggagtgactggaggctgggacaacctgctggccgtcatccctgggggcagcagcacccccctcatccccaagtctgtgtgtgaaacagtgctgatggactttgatgccctggtgcaggcccagacaggcctgggcacagctgctgtgattgtgatggacaggagcacagacatcgtgaaggccatcgcccggctcatcgagttctacaagcatgagagctgtggccagtgcaccccctgccgggagggcgtggactggatgaacaaggtgatggccaggtttgtgagaggagatgcccggcctgctgagattgacagcctgtgggagatcagcaagcagatcgagggccacaccatctgtgccctgggagatggagctgcctggcctgtgcagggcctcatccgccacttccggcctgagctggaggagaggatgcagagatttgcccagcagcaccaggcccggcaggccgccagctag

SEQ ID NO: 161189 - DNA, 1092 bp, synthetic construct
  misc_feature 1..1092: note = Description of Artificial Sequence: Synthetic coding sequence
  source 1..1092: mol_type = other DNA
atgaacaagcccagtgatggccggcccaagtacctggtggtgaatgctgatgaaggagagcccggcacctgcaaggaccgggagatcctgcggcatgacccccacaagctgctggagggctgcctggtgggcggccgggccatgggcgcccgggccgcctacatctacatccggggggagttctacaatgaggccagcaacctgcaggtggccatccgggaggcctatgaggccggcctgattggcaagaatgcctgtggcagcggctatgactttgatgtgtttgtggtgcggggggccggggcctacatctgtggggaggagacagccctgattgagagcattgagggcaagcagggcaagccccggctgaagccacccttcccagcagatgtgggcgtgtttggctgccccaccaccgtggccaacgtggagaccgtggccgtgagccccaccatctgcagaagaggaggcacctggtttgctggcttcggccgggagaggaacagcggcaccaagctgttcaacatcagcggccacgtgaaccacccctgcaccgtggaggaggagatgtctgtgcccctgaaggagctgattgagaagcatgctggaggagtgactggaggctgggacaacctgctggccgtcatccctgggggcagcagcacccccctcatccccaagtctgtgtgtgaaacagtgctgatggactttgatgccctggtgcaggcccagacaggcctgggcacagctgctgtgattgtgatggacaggagcacagacatcgtgaaggccatcgcccggctcatcgagttctacaagcatgagagctgtggccagtgcaccccctgccgggagggcgtggactggatgaacaaggtgatggccaggtttgtgagaggagatgcccggcctgctgagattgacagcctgtgggagatcagcaagcagatcgagggccacaccatctgtgccctgggagatggagctgcctggcctgtgcagggcctcatccgccacttccggcctgagctggaggagaggatgcagagatttgcccagcagcaccaggcccggcaggccgccagctag

SEQ ID NO: 161190 - DNA, 750 bp, synthetic construct
  misc_feature 1..750: note = Description of Artificial Sequence: Synthetic coding sequence
  source 1..750: mol_type = other DNA
atgttcttctctgctgccctgcgggcccgggccgccggcctgacagcccactggggcagacatgtgaggaacctgcacaagacagtgatgcagaatggagctgggggcgccctgtttgtgcaccgggacaccccagagaacaacccagacaccccatttgacttcaccccagagaactacaagagaattgaggccatcgtgaagaactacccagagggccacaaggctgctgctgtgctgcctgtgctggacctggcccagaggcagaatggctggctgcccatcagcgccatgaacaaggtggccgaggtgctgcaggtgccccccatgagggtgtatgaggtggccaccttctacaccatgtacaacaggaagcctgtgggcaagtaccacatccaggtgtgcaccaccaccccctgcatgctgaggaacagcgacagcatcctggaggccatccagaagaagctgggcatcaaggtgggggagaccaccccagacaagctgttcaccctcatcgaggtggagtgcctgggcgcctgtgtgaatgcccccatggtgcagatcaatgacaactactatgaggacctgacagccaaggacatcgaggagatcattgatgagctgaaggccggcaagatccccaagccaggccccaggagcggccgcttcagctgtgagcctgctgggggcctgaccagcctgacagagccccccaagggccctggctttggagtgcaggccggcctgtag

SEQ ID NO: 161191 - DNA, 327 bp, synthetic construct
  misc_feature 1..327: note = Description of Artificial Sequence: Synthetic coding sequence
  source 1..327: mol_type = other DNA
atggccgccccctgcctgctgcggcagggccgggccggggccctgaagaccatgctgcaggaggcccaggtgttccggggcctggccagcacagtgtccctgtctgctgagagcggcaagtctgagaagggccagccccagaacagcaagaagcagagcccccccaagaagccagcccctgtgcctgctgagccctttgacaacaccacctacaagaacctgcagcaccacgactacagcacctacaccttcctggacctgaacctggagctgagcaagttcaggatgccccagcccagcagcggccgggagagccccaggcactag

SEQ ID NO: 161192 - DNA, 1422 bp, synthetic construct
  misc_feature 1..1422: note = Description of Artificial Sequence: Synthetic coding sequence
  source 1..1422: mol_type = other DNA
atggccgccccctgcctgctgcggcagggccgggccggggccctgaagaccatgctgcaggaggcccaggtgttccggggcctggccagcacagtgtccctgtctgctgagagcggcaagtctgagaagggccagccccagaacagcaagaagcagagcccccccaagaatgtggtggagcccaaggagcggggcaagctgctggccacccagacagctgctgagctgagcaagaacctgagcagccccagcagctacccacctgctgtgaacaagggcaggaaggtggccagccccagccccagcggctctgtgctcttcacagatgaaggagtgcccaagttcctgagcaggaagaccctggtggagttcccccagaaggtgctgagccccttcaggaagcagggcagtgacagcgaggcccggcaggtgggcaggaaggtgaccagccccagcagcagcagcagcagcagcagcagtgacagcgagagtgatgatgaagcagatgtgtctgaggtgaccccccgggtggtgtccaagggccggggcggcctgaggaagccagaggccagccacagctttgaaaatagagccccccgggtgacagtgtctgccaaggagaagaccctgctgcagaagccccacgtggacatcacagatcctgagaagccccaccagcccaagaagaagggcagccctgccaagcccagcgagggcagagaaaatgcccggcccaagaccaccatgcccaggagccaggtggatgaggagttcctgaagcagagcctgaaggagaagcagctgcagaagaccttccggctgaatgaaattgacaaggagagccagaagccctttgaggtgaagggccccctgcctgtgcacaccaagagcggcctgagcgccccacccaagggcagccctgccccagctgtgctggccgaggaggcccgggcagagggccagctgcaggccagccccccaggagctgctgagggccacctggagaagcctgtgcctgagccccagaggaaggccgccccacccctgcccaggaaggagaccagcggcacccagggcatcgagggccacctgaagggcggccaggccatcgtggaggaccagatcccccccagcaacctggagaccgtgcctgtggagaacaaccacggcttccacgagaagacagctgccctgaagctggaggccgagggggaggccatggaggatgctgctgcccctggagatgaccggggcggcacccaggagcccgcccctgtgcctgctgagccctttgacaacaccacctacaagaacctgcagcaccacgactacagcacctacaccttcctggacctgaacctggagctgagcaagttcaggatgccccagcccagcagcggccgggagagccccaggcactag

SEQ ID NO: 161193 - DNA, 339 bp, synthetic construct
  misc_feature 1..339: note = Description of Artificial Sequence: Synthetic coding sequence
  source 1..339: mol_type = other DNA
atgctgcaggaggcccaggtgttccggggcctggccagcacagtgtccctgtctgctgagagcggcaagtctgagaagggccagccccagaacagcaagaagcagagcccccccaagtctgtgcccaccccccaccggcgctacagcccctgtggggactggaaggatgccagcagcctgaagccagcccctgtgcctgctgagccctttgacaacaccacctacaagaacctgcagcaccacgactacagcacctacaccttcctggacctgaacctggagctgagcaagttcaggatgccccagcccagcagcggccgggagagccccaggcactag

SEQ ID NO: 161194 - DNA, 2223 bp, synthetic construct
  misc_feature 1..2223: note = Description of Artificial Sequence: Synthetic coding sequence
  source 1..2223: mol_type = other DNA
atggagaagctgggcgtggagcctgaggaggagggcggcggagatgatgatgaagaagatgctgaggcctgggccatggagctggctgatgtgggcgccgccgccagcagccagggcgtgcatgaccaggtgctgcccaccccaaatgccagcagccgggtgattgtgcacgtggacctggactgcttctacgcccaggtggagatgatcagcaaccctgagctgaaggacaagcccctgggcgtgcagcagaagtacctggtggtgacctgcaactatgaggccaggaagctgggcgtgaagaagctgatgaatgtgagagatgccaaggagaagtgcccccagctggtgctggtgaatggagaggacctgacccgctaccgggagatgagctacaaggtgacagagctgctggaggagttcagccctgtggtggagcggctgggctttgatgagaactttgtggacctgacagagatggtggagaagaggctgcagcagctgcagagtgatgagctgtctgctgtgacagtgtctggccacgtgtacaacaaccagagcatcaacctgctggatgtgctgcacatccggctgctggtgggcagccagattgctgctgagatgagggaggccatgtacaaccagctgggcctgaccggctgtgccggcgtggccagcaacaagctgctggccaagctggtgtctggagtcttcaagcccaaccagcagacagtgctgctgcctgagagctgccagcacctgatccacagcctgaaccacatcaaggagatccctggcatcggctacaagacagccaagtgcctggaggccctgggcatcaacagcgtgcgggacctgcagaccttcagccccaagatcctggagaaggagctgggcatctctgtggcccagaggatccagaagctgagctttggagaggacaacagccctgtgatcctgagcggccccccccagagcttcagcgaggaggacagcttcaagaagtgcagcagcgaggtggaggccaagaacaagattgaggagctgctggccagcctgctgaacagagtgtgccaggacggcaggaagccccacacagtgcggctcatcatccgccgctacagcagcgagaagcactacggccgggagagccggcagtgccccatccccagccacgtgatccagaagctgggcactggaaattatgatgtgatgacccccatggtggacatcctgatgaagctgttcaggaacatggtgaatgtgaagatgcccttccacctgaccctgctgtctgtgtgcttctgcaacctgaaggccctgaacacagccaagaagggcctgattgactactacctgatgcccagcctgagcaccaccagccgcagcggcaagcacagcttcaagatgaaggacacccacatggaggacttccccaaggacaaggagaccaacagagacttcctgcccagcggccgcatcgagagcaccaggacccgggagagccccctggacaccaccaacttcagcaaggagaaggacatcaatgagttccccctgtgcagcctgcctgagggcgtggaccaggaggtgttcaagcagctgcctgtggacatccaggaggagatcctgagcggcaagagccgggagaagttccagggcaaaggatctgtgtcctgccccctgcacgccagcagaggagtgctgtccttcttcagcaagaagcagatgcaggacatccccatcaacccccgggaccacctgagcagcagcaagcaggtgtcctctgtgagcccctgtgagcccggcaccagcggcttcaacagcagcagcagcagctacatgagcagccagaaggactacagctactacctggacaaccggctgaaggatgagcgcatcagccagggccccaaggagccccagggcttccacttcaccaacagcaacccagctgtgtctgccttccacagcttccccaacctgcagagcgagcagctgttcagcaggaaccacaccacagacagccacaagcagacagtggccacagacagccatgagggcctgacagaaaatcgggagccagattctgtggatgagaagatcaccttccccagcgacatcgacccccaggtgttctatgagctgcctgaggccgtgcagaaggagctgctggccgagtggaagagagctggcagtgacttccacatcggccacaagtag

SEQ ID NO: 161195 - DNA, 540 bp, synthetic construct
  misc_feature 1..540: note = Description of Artificial Sequence: Synthetic coding sequence
  source 1..540: mol_type = other DNA
atgaacaagaggggcttctccatggaggtgggccagtacatctttgtgaactgccccagcatcagcctgctggagtggcaccccttcaccctgaccagcgcccctgaggaggacttcttcagcatccacatccgggctgctggggactggacagagaacctgatccgggcctttgagcagcagtacagccccatcccccgcatcgaggtggatggccccttcggcacagcctctgaagatgtgttccagtatgaggtggccgtgctggtgggcgccggcatcggcgtgaccccatttgccagcatcctgaagagcatctggtacaagttccagtgtgccgaccacaacctgaagaccaagaagatctacttctactggatctgccgggagactggagccttctcctggttcaacaacctgctgaccagcctggagcaggagatggaggagctgggcaagagcctgaggaagtgctgccaccgctacagcagcctggaccccaggaaggtgcagttctacttcaacaaggagaacttctag

SEQ ID NO: 161196 - DNA, 1584 bp, synthetic construct
  misc_feature 1..1584: note = Description of Artificial Sequence: Synthetic coding sequence
  source 1..1584: mol_type = other DNA
atgggcaactgggtggtgaaccactggttctctgtgctcttcctggtggtgtggctgggcctgaatgtgttcctgtttgtggatgccttcctgaagtatgagaaggctgacaagtactactacaccaggaagatcctgggcttctgcagcaggaccctgaggaagcagctggaccacaacctgaccttccacaagctggtggcctacatgatctgcctgcacacagccatccacatcatcgcccacctgttcaactttgactgctacagccgcagccggcaggccacagatggcagcctggccagcatcctgagcagcctgagccatgatgagaagaagggcggctcctggctgaaccccatccagagcaggaacaccaccgtggagtatgtgaccttcaccagcattgctggcctgactggagtcatcatgaccatcgccctgatcctgatggtgaccagcgccacagagttcatccgccgcagctactttgaggtgttctggtacacccaccacctgttcatcttctacatcctgggcctgggcatccacggcatcggcggcatcgtgcggggccagacagaggagagcatgaatgaaagccaccccaggaaatgtgccgagagctttgagatgtgggatgaccgggacagccactgcagaagacccaagtttgagggccaccccccagagagctggaagtggatcctggcccctgtgatcctgtacatctgtgagcgcatcctgcgcttctaccgcagccagcagaaggtggtgatcaccaaggtggtgatgcaccccagcaaggtgctggagctgcagatgaacaagaggggcttctccatggaggtgggccagtacatctttgtgaactgccccagcatcagcctgctggagtggcaccccttcaccctgaccagcgcccctgaggaggacttcttcagcatccacatccgggctgctggggactggacagagaacctgatccgggcctttgagcagcagtacagccccatcccccgcatcgaggtggatggccccttcggcacagcctctgaagatgtgttccagtatgaggtggccgtgctggtgggcgccggcatcggcgtgaccccatttgccagcatcctgaagagcatctggtacaagttccagtgtgccgaccacaacctgaagaccaagaagatctacttctactggatctgccgggagactggagccttctcctggttcaacaacctgctgaccagcctggagcaggagatggaggagctgggcaaggtgggcttcctgaactaccgcctcttcctgaccggctgggacagcaacatcgtgggccacgccgccctgaactttgacaaggccacagacatcgtgacaggcctgaagcagaagaccagctttggccggcccatgtgggacaatgagttcagcaccatcgccaccagccaccccaagtctgtggtgggcgtcttcctgtgtggccccaggaccctggccaagagcctgaggaagtgctgccaccgctacagcagcctggaccccaggaaggtgcagttctacttcaacaaggagaacttctag

SEQ ID NO: 161197 - DNA, 579 bp, synthetic construct
  misc_feature 1..579: note = Description of Artificial Sequence: Synthetic coding sequence
  source 1..579: mol_type = other DNA
atgggcaactgggtggtgaaccactggttctctgtgctcttcctggtggtgtggctgggcctgaatgtgttcctgtttgtggatgccttcctgaagtatgagaaggctgacaagtactactacaccaggaagatcctgggcagcaccctggcctgtgcccgggccagcgccctgtgcctgaacttcaacagcaccctcatcctgctgcctgtgtgcaggaacctgctgtccttcctgcggggcacctgcagcttctgcagcaggaccctgaggaagcagctggaccacaacctgaccttccacaagctggtggcctacatgatctgcctgcacacagccatccacatcatcgcccacctgttcaactttgactgctacagccgcagccggcaggccacagatggcagcctggccagcatcctgagcagcctgagccatgatgagaagaagggcggctcctggctgaaccccatccacccccacatcacccccaccgtgtacatgttcaccgtgacctttgacatggtgctgagctctgtgaacagcaacctcttcctgttcctgctgatcaagaagtag

SEQ ID NO: 161198 - DNA, 579 bp, synthetic construct; identical to SEQ ID NO: 161197
  misc_feature 1..579: note = Description of Artificial Sequence: Synthetic coding sequence
  source 1..579: mol_type = other DNA

SEQ ID NO: 161199 - DNA, 1695 bp, synthetic construct
  misc_feature 1..1695: note = Description of Artificial Sequence: Synthetic coding sequence
  source 1..1695: mol_type = other DNA
atgggcaactgggtggtgaaccactggttctctgtgctcttcctggtggtgtggctgggcctgaatgtgttcctgtttgtggatgccttcctgaagtatgagaaggctgacaagtactactacaccaggaagatcctgggcagcaccctggcctgtgcccgggccagcgccctgtgcctgaacttcaacagcaccctcatcctgctgcctgtgtgcaggaacctgctgtccttcctgcggggcacctgcagcttctgcagcaggaccctgaggaagcagctggaccacaacctgaccttccacaagctggtggcctacatgatctgcctgcacacagccatccacatcatcgcccacctgttcaactttgactgctacagccgcagccggcaggccacagatggcagcctggccagcatcctgagcagcctgagccatgatgagaagaagggcggctcctggctgaaccccatccagagcaggaacaccaccgtggagtatgtgaccttcaccagcattgctggcctgactggagtcatcatgaccatcgccctgatcctgatggtgaccagcgccacagagttcatcagaagaagctactttgaggtgttctggtacacccaccacctgttcatcttctacatcctgggcctgggcatccatggaattggaggcatcgtgcggggccagacagaggagagcatgaatgaaagccaccccaggaaatgtgccgagagctttgagatgtgggatgaccgggacagccactgccggcggcccaagtttgagggccaccccccagagagctggaagtggatcctggcccctgtgatcctgtacatctgtgagcgcatcctgcgcttctaccgcagccagcagaaggtggtgatcaccaaggtggtgatgcaccccagcaaggtgctggagctgcagatgaacaagaggggcttctccatggaggtgggccagtacatctttgtgaactgccccagcatcagcctgctggagtggcaccccttcaccctgaccagcgcccctgaggaggacttcttcagcatccacatccgggccgccggggactggacagaaaatctcatccgggcctttgagcagcagtacagccccatccccagaattgaggtggatggcccctttggaacagcctctgaagatgtgttccagtatgaggtggccgtgctggtgggcgccggcattggagtgaccccatttgccagcatcctgaagagcatctggtacaagttccagtgtgccgaccacaacctgaagaccaagaagatctacttctactggatctgccgggagaccggggccttctcctggttcaacaacctgctgaccagcctggagcaggagatggaggagctgggcaaggtgggcttcctgaactaccgcctcttcctgaccggctgggacagcaacatcgtgggccatgctgccctgaactttgacaaggccacagacatcgtgacaggcctgaagcagaagaccagctttggccggcccatgtgggacaatgagttcagcaccatcgccaccagccaccccaagtctgtggtgggcgtcttcctgtgtggccccaggaccctggccaagagcctgaggaagtgctgccaccgctacagcagcctggaccccaggaaggtgcagttctacttcaacaaggagaacttctag

SEQ ID NO: 161200 - DNA, 528 bp, synthetic construct
  misc_feature 1..528: note = Description of Artificial Sequence: Synthetic coding sequence
  source 1..528: mol_type = other DNA
tgattctccatggaggtgggccagtacatctttgtgaactgccccagcatcagcctgctggagtggcaccccttcaccctgaccagcgcccctgaggaggacttcttcagcatccacatccgggctgctggggactggacagagaacctgatccgggcctttgagcagcagtacagccccatcccccgcatcgaggtggatggccccttcggcacagcctctgaagatgtgttccagtatgaggtggccgtgctggtgggcgccggcatcggcgtgaccccatttgccagcatcctgaagagcatctggtacaagttccagtgtgccgaccacaacctgaagaccaagaagatctacttctactggatctgccgggagactggagccttctcctggttcaacaacctgctgaccagcctggagcaggagatggaggagctgggcaagagcctgaggaagtgctgccaccgctacagcagcctggaccccaggaaggtgcagttctacttcaacaaggagaacttctag

SEQ ID NO: 161201 - DNA, 1707 bp, synthetic construct
  misc_feature 1..1707: note = Description of Artificial Sequence: Synthetic coding sequence
  source 1..1707: mol_type = other DNA
atgatgggctgctggatcctgaatgaaggcctgagcaccatcctggtgctgtcctggctgggcatcaacttctacctgttcatcgacaccttctactggtatgaggaggaggagagcttccactacaccagggtcatcctgggcagcaccctggcctgggcccgggccagcgccctgtgcctgaacttcaactgcatgctgatcctgatccctgtgtccaggaacctgatctccttcatccggggcaccagcatctgctgccggggcccctggaggcggcagctggacaagaacctgcgcttccacaagctggtggcctatggaattgctgtgaatgccaccatccacatcgtggcccacttcttcaacctggagcgctaccactggagccagagcgaggaggcccagggcctgctggccgccctgagcaagctgggcaacaccccaaatgaaagctacctgaaccctgtgaggaccttccccaccaacaccaccacagagctgctgcggaccatcgccggcgtgacaggcctggtgatcagcctggccctggtgctgatcatgaccagcagcacagagttcatccggcaggccagctatgagctgttctggtacacccaccacgtgttcatcgtgttcttcctgagcctggccatccacggcaccggcagaattgtgcggggccagacccaggacagcctgagcctgcacaacatcaccttctgccgggacagatatgcagagtggcagacagtggcccagtgccctgtgccccagttcagcggcaaggagcccagcgcctggaagtggatcctgggccctgtggtgctgtatgcctgtgagcgcatcatccgcttctggaggttccagcaggaggtggtgatcaccaaggtggtgagccaccccagcggcgtgctggagctgcacatgaagaagaggggcttcaagatggcccctggccagtacatcctggtgcagtgcccagccatcagcagcctggagtggcaccccttcaccctgaccagcgccccccaggaggacttcttctctgtgcacatccgggccgccggggactggacagctgccctgctggaggcctttggagctgagggccaggccctgcaggagccctggagcctgccccggctggccgtggatggcccctttggaacagccctgacagatgtgttccactaccctgtgtgtgtgtgtgtggccgccggcattggagtgaccccatttgctgccctgctgaagagcatctggtacaagtgcagcgaggcccagacccccctgaagctgagcaaggtgtacttctactggatctgcagagatgcccgggcctttgagtggtttgctgacctgctgctgagcctggagaccaggatgtctgagcagggcaagacccacttcctgagctaccacatcttcctgaccggctgggatgagaaccaggccctgcacatcgccctgcactgggatgaaaatacagatgtgatcaccggcctgaagcagaagaccttctacggccggcccaactggaacaatgagttcaagcagatcgcctacaaccaccccagcagcagcattggagtcttcttctgtggccccaaggccctgagcaggaccctgcagaagatgtgccacctgtacagcagcgctgacccccggggcgtgcacttctactacaacaaggagagcttctag

SEQ ID NO: 161202 - DNA, 1737 bp, synthetic construct
  misc_feature 1..1737: note = Description of Artificial Sequence: Synthetic coding sequence
  source 1..1737: mol_type = other DNA
atggctgtgtcctggaggtcctggctggccaatgaaggagtgaagcacctgtgcctcttcatctggctgtccatgaatgtgctgctcttctggaagaccttcctgctgtacaaccagggccctgagtaccactacctgcaccagatgctgggcctgggcctgtgcctgagccgggccagcgcctctgtgctgaacctgaactgcagcctcatcctgctgcccatgtgcaggaccctgctggcctacctgcggggcagccagaaggtgcccagcaggaggacccggcggctgctggacaagagcaggaccttccacatcacctgtggggtgaccatctgcatcttcagcggcgtgcacgtggccgcccacctggtgaatgccctgaacttctctgtgaactacagcgaggactttgtggagctgaatgctgcccgctacagagatgaggaccccaggaagctgctcttcaccaccgtgcccggcctgactggagtgtgcatggtggtggtgctcttcctgatgatcacagccagcacctacgccatccgggtgagcaactatgacatcttctggtacacccacaacctcttctttgtgttctacatgctgctgaccctgcacgtgtctgggggcctgctgaagtaccagaccaacctggacacccaccccccaggctgcatcagcctgaacagaaccagcagccagaacatcagcctgcctgagtacttcagcgagcacttccacgagcccttccctgagggcttcagcaagccagctgagttcacccagcacaagtttgtgaagatctgcatggaggagccccgcttccaggccaacttcccccagacctggctgtggatcagcggccccctgtgcctgtactgtgccgagcggctgtaccgctacatccgcagcaacaagcctgtgaccatcatctctgtgatgagccaccccagtgatgtgatggagatccgcatggtgaaggagaacttcaaggcccggcccggccagtacatcaccctgcactgccccagcgtgtctgccctggagaaccaccccttcaccctgaccatgtgccccacagagaccaaggccacctttggagtgcacctgaagatcgtgggggactggacagagcgcttccgggacctgctgctgccccccagcagccaggacagcgagatcctgcccttcatccagagcaggaactaccccaagctgtacattgatggccccttcggcagcccctttgaggagagcctgaactatgaggtgtccctgtgtgtggccggcggcattggagtgaccccatttgccagcatcctgaacaccctgctggatgactggaagccctacaagctgcggcggctgtacttcatctgggtgtgccgggacatccagagcttccgctggtttgctgacctgctgtgcatgctgcacaacaagttctggcaggagaacagaccagactatgtgaacatccagctgtacctgagccagacagatggcatccagaagatcatcggggagaagtaccacgccctgaacagccgcctcttcatcggccggccccgctggaagctgctgtttgatgaaattgccaagtacaacagaggcaagacagtgggcgtcttctgctgcggccccaacagcctgagcaagaccctgcacaagctgagcaaccagaacaacagctatggcaccaggtttgagtacaacaaggagagcttctcctag

SEQ ID NO: 161203 - DNA, 1665 bp, synthetic construct
  misc_feature 1..1665: note = Description of Artificial Sequence: Synthetic coding sequence
  source 1..1665: mol_type = other DNA
atgaatgtgctgctcttctggaagaccttcctgctgtacaaccagggccctgagtaccactacctgcaccagatgctgggcctgggcctgtgcctgagccgggccagcgcctctgtgctgaacctgaactgcagcctcatcctgctgcccatgtgcaggaccctgctggcctacctgcggggcagccagaaggtgcccagcaggaggacccggcggctgctggacaagagcaggaccttccacatcacctgtggggtgaccatctgcatcttcagcggcgtgcacgtggccgcccacctggtgaatgccctgaacttctctgtgaactacagcgaggactttgtggagctgaatgctgcccgctacagagatgaggaccccaggaagctgctcttcaccaccgtgcccggcctgactggagtgtgcatggtggtggtgctcttcctgatgatcacagccagcacctacgccatccgggtgagcaactatgacatcttctggtacacccacaacctcttctttgtgttctacatgctgctgaccctgcacgtgtctgggggcctgctgaagtaccagaccaacctggacacccaccccccaggctgcatcagcctgaacagaaccagcagccagaacatcagcctgcctgagtacttcagcgagcacttccacgagcccttccctgagggcttcagcaagccagctgagttcacccagcacaagtttgtgaagatctgcatggaggagccccgcttccaggccaacttcccccagacctggctgtggatcagcggccccctgtgcctgtactgtgccgagcggctgtaccgctacatccgcagcaacaagcctgtgaccatcatctctgtgatgagccaccccagtgatgtgatggagatccgcatggtgaaggagaacttcaaggcccggcccggccagtacatcaccctgcactgccccagcgtgtctgccctggagaaccaccccttcaccctgaccatgtgccccacagagaccaaggccacctttggagtgcacctgaagatcgtgggggactggacagagcgcttccgggacctgctgctgccccccagcagccaggacagcgagatcctgcccttcatccagagcaggaactaccccaagctgtacattgatggccccttcggcagcccctttgaggagagcctgaactatgaggtgtccctgtgtgtggccggcggcattggagtgaccccatttgccagcatcctgaacaccctgctggatgactggaagccctacaagctgcggcggctgtacttcatctgggtgtgccgggacatccagagcttccgctggtttgctgacctgctgtgcatgctgcacaacaagttctggcaggagaacagaccagactatgtgaacatccagctgtacctgagccagacagatggcatccagaagatcatcggggagaagtaccacgccctgaacagccgcctcttcatcggccggccccgctggaagctgctgtttgatgaaattgccaagtacaacagaggcaagacagtgggcgtcttctgctgcggccccaacagcctgagcaagaccctgcacaagctgagcaaccagaacaacagctatggcaccaggtttgagtacaacaaggagagcttctcctag

SEQ ID NO: 161204 - DNA, 816 bp, synthetic construct
  misc_feature 1..816: note = Description of Artificial Sequence: Synthetic coding sequence
  source 1..816: mol_type = other DNA
atggctgtgtcctggaggtcctggctggccaatgaaggagtgaagcacctgtgcctcttcatctggctgtccatgaatgtgctgctcttctggaagaccttcctgctgtacaaccagggccctgagtaccactacctgcaccagatgctgggctgccccacagagaccaaggccaccttcggcgtgcacctgaagatcgtgggggactggacagagcgcttccgggacctgctgctgccccccagcagccaggacagcgagatcctgcccttcatccagagcaggaactaccccaagctgtacattgatggccccttcggcagcccctttgaggagagcctgaactatgaggtgtccctgtgtgtggccggcggcatcggcgtgaccccatttgccagcatcctgaacaccctgctggatgactggaagccctacaagctgcggcggctgtacttcatctgggtgtgccgggacatccagagcttccgctggtttgctgacctgctgtgcatgctgcacaacaagttctggcaggagaacagaccagactatgtgaacatccagctgtacctgagccagacagatggcatccagaagatcattggagagaagtaccacgccctgaacagccgcctcttcatcggccggccccgctggaagctgctgtttgatgagatcgccaagtacaacagaggcaagacagtgggcgtcttctgctgcggccccaacagcctgagcaagaccctgcacaagctgagcaaccagaacaacagctatggcaccaggtttgagtacaacaaggagagcttctcctag

SEQ ID NO: 161205 - DNA, 165 bp, synthetic construct
  misc_feature 1..165: note = Description of Artificial Sequence: Synthetic coding sequence
  source 1..165: mol_type = other DNA
atggctgtgtcctggaggtcctggctggccaatgaaggagtgaagcacctgtgcctcttcatctggctgtccatgaatgtgctgctcttctggaagaccttcctgctgtacaaccagggccctgagtaccactacctgcaccagatgctgggggagctgtcctag

SEQ ID NO: 161206 - DNA, 1800 bp, synthetic construct
  misc_feature 1..1800: note = Description of Artificial Sequence: Synthetic coding sequence
  source 1..1800: mol_type = other DNA
atgggagagatgtggaggaagcgggaggaggtgatcttccgggagtacagcttctccttctaccccctgaacatctttgccccctttgtgctcttcccagactacttctgcctgctgggcttcatctggctgtccatgaatgtgctgctcttctggaagaccttcctgctgtacaaccagggccctgagtaccactacctgcaccagatgctgggcctgggcctgtgcctgagccgggccagcgcctctgtgctgaacctgaactgcagcctcatcctgctgcccatgtgcaggaccctgctggcctacctgcggggcagccagaaggtgcccagcaggaggacccggcggctgctggacaagagcaggaccttccacatcacctgtggggtgaccatctgcatcttctctggagtgcacgtggccgcccacctggtgaatgccctgaacttctctgtgaactacagtgaagattttgtggagctgaatgctgcccgctacagagatgaggaccccaggaagctgctcttcaccaccgtgcccggcctgactggagtgtgcatggtggtggtgctcttcctgatgatcacagccagcacctacgccatccgggtgagcaactatgacatcttctggtacacccacaacctcttctttgtgttctacatgctgctgaccctgcacgtgtctgggggcctgctgaagtaccagaccaacctggacacccaccccccaggctgcatcagcctgaacagaaccagcagccagaacatcagcctgcctgagtacttcagcgagcacttccacgagcccttccctgagggcttcagcaagccagctgagttcacccagcacaagtttgtgaagatctgcatggaggagccccgcttccaggccaacttcccccagacctggctgtggatcagcggccccctgtgcctgtactgtgccgagcggctgtaccgctacatccgcagcaacaagcctgtgaccatcatctctgtgatgagccaccccagtgatgtgatggagatccgcatggtgaaggagaacttcaaggcccggcccggccagtacatcaccctgcactgccccagcgtgtctgccctggagaaccaccccttcaccctgaccatgtgccccacagagaccaaggccaccttcggcgtgcacctgaagatcgtgggggactggacagagcgcttccgggacctgctgctgccccccagcagccaggacagcgagatcctgcccttcatccagagcaggaactaccccaagctgtacattgatggccccttcggcagcccctttgaggagagcctgaactatgaggtgtccctgtgtgtggccggcggcatcggcgtgaccccatttgccagcatcctgaacaccctgctggatgactggaagccctacaagctgcggcggctgtacttcatctgggtgtgccgggacatccagagcttccgctggtttgctgacctgctgtgcatgctgcacaacaagttctggcaggagaacagaccagactatgtgaacatccagctgtacctgagccagacagatggcatccagaagatcattggagagaagtaccacgccctgaacagccgcctcttcatcggccggccccgctggaagctgctgtttgatgagatcgccaagtacaacagaggcaagacagtgggcgtcttctgctgcggccccaacagcctgagcaagaccctgcacaagctgagcaaccagaacaacagctatggcaccaggtttgagtacaacaaggagagcttctcctag

SEQ ID NO: 161207 - DNA, 1665 bp, synthetic construct; identical to SEQ ID NO: 161203
  misc_feature 1..1665: note = Description of Artificial Sequence: Synthetic coding sequence
  source 1..1665: mol_type = other DNA

SEQ ID NO: 161208 - DNA, 1665 bp, synthetic construct; identical to SEQ ID NO: 161203
  misc_feature 1..1665: note = Description of Artificial Sequence: Synthetic coding sequence
  source 1..1665: mol_type = other DNA

SEQ ID NO: 161209 - DNA, 696 bp, synthetic construct
  misc_feature 1..696: note = Description of Artificial Sequence: Synthetic coding sequence
  source 1..696: mol_type = other DNA
atggctgtgtcctggaggtcctggctggccaatgaaggagtgaagcacctgtgcctcttcatctggctgtccatgaatgtgctgctcttctggaagaccttcctgctgtacaaccagggccctgagtaccactacctgcaccagatgctgggctgccccacagagaccaaggccaccttcggcgtgcacctgaagatcgtgggggactggacagagcgcttccgggacctgctgctgccccccagcagccaggacagcgagatcctgcccttcatccagagcaggaactaccccaaggatgactggaagccctacaagctgcggcggctgtacttcatctgggtgtgccgggacatccagagcttccgctggtttgctgacctgctgtgcatgctgcacaacaagttctggcaggagaacagaccagactatgtgaacatccagctgtacctgagccagacagatggcatccagaagatcattggagagaagtaccacgccctgaacagccgcctcttcatcggccggccccgctggaagctgctgtttgatgagatcgccaagtacaacagaggcaagacagtgggcgtcttctgctgcggccccaacagcctgagcaagaccctgcacaagctgagcaaccagaacaacagctatggcaccaggtttgagtacaacaaggagagcttctcctag

SEQ ID NO: 161210 - DNA, 1617 bp, synthetic construct
  misc_feature 1..1617: note = Description of Artificial Sequence: Synthetic coding sequence
  source 1..1617: mol_type = other DNA
atggctgtgtcctggaggtcctggctggccaatgaaggagtgaagcacctgtgcctcttcatctggctgtccatgaatgtgctgctcttctggaagaccttcctgctgtacaaccagggccctgagtaccactacctgcaccagatgctgggcctgggcctgtgcctgagccgggccagcgcctctgtgctgaacctgaactgcagcctcatcctgctgcccatgtgcaggaccctgctggcctacctgcggggcagccagaaggtgcccagcaggaggacccggcggctgctggacaagagcaggaccttccacatcacctgtggggtgaccatctgcatcttcagcggcgtgcacgtggccgcccacctggtgaatgccctgaacttctctgtgaactacagcgaggactttgtggagctgaatgctgcccgctacagagatgaggaccccaggaagctgctcttcaccaccgtgcccggcctgactggagtgtgcatggtggtggtgctcttcctgatgatcacagccagcacctacgccatccgggtgagcaactatgacatcttctggtacacccacaacctcttctttgtgttctacatgctgctgaccctgcacgtgtctgggggcctgctgaagtaccagaccaacctggacacccaccccccaggctgcatcagcctgaacagaaccagcagccagaacatcagcctgcctgagtacttcagcgagcacttccacgagcccttccctgagggcttcagcaagccagctgagttcacccagcacaagtttgtgaagatctgcatggaggagccccgcttccaggccaacttcccccagacctggctgtggatcagcggccccctgtgcctgtactgtgccgagcggctgtaccgctacatccgcagcaacaagcctgtgaccatcatctctgtgatgagccaccccagtgatgtgatggagatccgcatggtgaaggagaacttcaaggcccggcccggccagtacatcaccctgcactgccccagcgtgtctgccctggagaaccaccccttcaccctgaccatgtgccccacagagaccaaggccacctttggagtgcacctgaagatcgtgggggactggacagagcgcttccgggacctgctgctgccccccagcagccaggacagcgagatcctgcccttcatccagagcaggaactaccccaaggatgactggaagccctacaagctgcggcggctgtacttcatctgggtgtgccgggacatccagagcttccgctggtttgctgacctgctgtgcatgctgcacaacaagttctggcaggagaacagaccagactatgtgaacatccagctgtacctgagccagacagatggcatccagaagatcatcggggagaagtaccacgccctgaacagccgcctcttcatcggccggccccgctggaagctgctgtttgatgaaattgccaagtacaacagaggcaagacagtgggcgtcttctgctgcggccccaacagcctgagcaagaccctgcacaagctgagcaaccagaacaacagctatggcaccaggtttgagtacaacaaggagagcttctcctag

SEQ ID NO: 161211 - DNA, 1665 bp, synthetic construct; identical to SEQ ID NO: 161203
  misc_feature 1..1665: note = Description of Artificial Sequence: Synthetic coding sequence
  source 1..1665: mol_type = other DNA

SEQ ID NO: 161212 - DNA, 1665 bp, synthetic construct; identical to SEQ ID NO: 161203
  misc_feature 1..1665: note = Description of Artificial Sequence: Synthetic coding sequence
  source 1..1665: mol_type = other DNA

SEQ ID NO: 161213 - DNA, 2193 bp, synthetic construct
  misc_feature 1..2193: note = Description of Artificial Sequence: Synthetic coding sequence
  source 1..2193: mol_type = other DNA
atggcctttgtgtgtgccggcctgagtgacaccatgtctgctgaggaggatgcccgctggctgcgctgggtgacccagcagttcaagaccatcgccggggaggatggagagatcagcctgcaggagttcaaggccgccctgcacgtgaaggagagcttctttgctgagcgcttctttgccctgtttgacagcgacagaagtggcaccatcaccctgcaggagctgcaggaggccctgaccctgctgatccacggcagccccatggacaagctgaagttcctgttccaggtgtatgacattgatggcagcggcagcattgatcctgatgagctgaggacagtgctgcagagctgcctgcgggagagcgccatcagcctgcctgatgagaagctggaccagctgaccctggccctgtttgaatctgcagatgctgatggaaatggagccatcacctttgaggagctgagagatgagctgcagcgcttccctggggtgatggagaacctgaccatctctgctgcccactggctgacagccccagccccccggccccggccccggcggccccggcagctgacccgggcctactggcacaaccacaggagccagctgttctgcctggccacctacgccggcctgcacgtgctgctgtttggcctggccgccagcgcccaccgggacctgggcgcctctgtgatggtggccaagggctgcggccagtgcctgaactttgactgcagcttcatcgctgtgctgatgctgcggcgctgcctgacctggctgcgggccacctggctggcccaggtgctgcccctggaccagaacatccagttccaccagctgatgggctacgtggtggtgggcctgagcctggtgcacacagtggcccacacagtgaactttgtgctgcaggcccaggccgaggccagccccttccagttctgggagctgctgctgaccaccaggcctggcatcggctgggtgcacggcagcgccagccccactggagtggccctgctgctgctgctgctgctgatgttcatctgcagcagcagctgcatcagaagaagtggccactttgaggtgttctactggacccacctgagctacctgctggtgtggctgctgctgatcttccacggccccaacttctggaagtggctgctggtgcccggcatcctcttcttcctggagaaggccatcggcctggccgtgtccaggatggctgctgtgtgcatcatggaggtgaacctgctgcccagcaaggtgacccacctgctgatcaagaggcctcccttcttccactacagacctggggactacctgtacctgaacatccccaccatcgcccgctatgagtggcaccccttcaccatcagcagcgcccctgagcagaaggacaccatctggctgcacatccgcagccagggccagtggaccaaccggctgtatgagagcttcaaggccagtgaccccctgggccggggcagcaagaggctgagccgctctgtgaccatgaggaagagccagaggagcagcaagggcagcgagatcctgctggagaagcacaagttctgcaacatcaagtgctacattgatggcccctacggcacccccacccggcgcatctttgccagcgagcacgctgtgctgattggagctggcatcggcatcaccccatttgccagcatcctgcagagcatcatgtaccgccaccagaagaggaagcacacctgccccagctgccagcacagctggattgaaggagtgcaggacaacatgaagctgcacaaggtggacttcatctggatcaacagagaccagaggagctttgagtggtttgtgtccctgctgaccaagctggagatggaccaggccgaggaggcccagtatggccgcttcctggagctgcacatgtacatgaccagcgccctgggcaagaatgacatgaaggccatcggcctgcagatggccctggacctgctggccaacaaggagaagaaggacagcatcaccggcctgcagaccaggacccagcccggccgcccagactggagcaaggtgttccagaaggtggccgctgagaagaagggcaaggtgcaggtgttcttctgtggcagccctgccctggccaaggtgctgaagggccactgtgagaagtttggcttccgcttcttccaggagaacttctag

SEQ ID NO: 161214 - DNA, 2298 bp, synthetic construct
  misc_feature 1..2298: note = Description of Artificial Sequence: Synthetic coding sequence
  source 1..2298: mol_type = other DNA
atgaacaccagcggggaccctgcccagacaggccctgagggctgccggggcaccatgtctgcagaagaagatgcccgctggctgcgctgggtgacccagcagttcaagaccatcgctggagaagatggagagatcagcctgcaggagttcaaggccgccctgcacgtgaaggagagcttctttgctgagcgcttctttgccctgtttgacagcgacaggagcggcaccatcaccctgcaggagctgcaggaggccctgaccctgctgattcatggcagccccatggacaagctgaagttcctgttccaggtgtatgacattgatgtgtgtgcccggcagggcgccagcgctggaacagagtggggcgctggggccggcccccactgggccagcagccccctgggcaccggcagcggcagcattgatcctgatgagctgaggacagtgctgcagagctgcctgcgggagagcgccatcagcctgcctgatgagaagctggaccagctgaccctggccctgtttgagagcgcagatgctgatggaaatggagccatcacctttgaggagctgagagatgagctgcagcgcttccctggggtgatggagaacctgaccatctctgctgcccactggctgacagccccagccccccggccccggccccggcggccccggcagctgacccgggcctactggcacaaccacaggagccagctgttctgcctggccacctacgccggcctgcacgtgctgctgtttggcctggccgccagcgcccaccgggacctgggcgcctctgtgatggtggccaagggctgcggccagtgcctgaactttgactgcagcttcatcgctgtgctgatgctgcggcgctgcctgacctggctgcgggccacctggctggcccaggtgctgcccctggaccagaacatccagttccaccagctgatgggctacgtggtggtgggcctgagcctggtgcacacagtggcccacacagtgaactttgtgctgcaggcccaggccgaggccagccccttccagttctgggagctgctgctgaccacccggcccggcatcggctgggtgcacggcagcgccagccccaccggggtggccctgctgctgctgctgctgctgatgttcatctgcagcagcagctgcatccgccgcagcggccactttgaggtgttctactggacccacctgagctacctgctggtgtggctgctgctgatcttccacggccccaacttctggaagtggctgctggtgcccggcatcctcttcttcctggagaaggccatcggcctggccgtgtccaggatggctgctgtgtgcatcatggaggtgaacctgctgcccagcaaggtgacccacctgctgatcaagaggcctcccttcttccactacagacctggggactacctgtacctgaacatccccaccatcgcccgctatgagtggcaccccttcaccatcagcagcgcccctgagcagaaggacaccatctggctgcacatccgcagccagggccagtggaccaaccggctgtatgagagcttcaaggccagtgaccccctgggccggggcagcaagaggctgagccgctctgtgaccatgaggaagagccagaggagcagcaaaggaagtgagatcctgctggagaagcacaagttctgcaacatcaagtgctacattgatggcccctacggcacccccacccggcgcatctttgccagcgagcacgctgtgctgattggagctggcatcggcatcaccccatttgccagcatcctgcagagcatcatgtaccgccaccagaagaggaagcacacctgccccagctgccagcacagctggattgagggcgtgcaggacaacatgaagctgcacaaggtggacttcatctggatcaacagagaccagaggagctttgagtggtttgtgtccctgctgaccaagctggagatggaccaggccgaggaggcccagtatggccgcttcctggagctgcacatgtacatgaccagcgccctgggcaagaatgacatgaaggccatcggcctgcagatggccctggacctgctggccaacaaggagaagaaggacagcatcaccggcctgcagaccaggacccagcccggccgcccagactggagcaaggtgttccagaaggtggccgctgagaagaagggcaaggtgcaggtgttcttctgtggcagccctgccctggccaaggtgctgaagggccactgtgagaagtttggcttccgcttcttccaggagaacttctag

SEQ ID NO: 161215 - DNA, 2214 bp, synthetic construct
  misc_feature 1..2214: note = Description of Artificial Sequence: Synthetic coding sequence
  source 1..2214: mol_type = other DNA
atgaacaccagcggggaccctgcccagacaggccctgagggctgccggggcaccatgtctgcagaagaagatgcccgctggctgcgctgggtgacccagcagttcaagaccatcgctggagaagatggagagatcagcctgcaggagttcaaggccgccctgcacgtgaaggagagcttctttgctgagcgcttctttgccctgtttgacagcgacaggagcggcaccatcaccctgcaggagctgcaggaggccctgaccctgctgattcatggcagccccatggacaagctgaagttcctgttccaggtgtatgacattgatggcagcggcagcattgatcctgatgagctgaggacagtgctgcagagctgcctgcgggagagcgccatcagcctgcctgatgagaagctggaccagctgaccctggccctgtttgagagcgcagatgctgatggaaatggagccatcacctttgaggagctgagagatgagctgcagcgcttccctggggtgatggagaacctgaccatctctgctgcccactggctgacagccccagccccccggccccggccccggcggccccggcagctgacccgggcctactggcacaaccacaggagccagctgttctgcctggccacctacgccggcctgcacgtgctgctgtttggcctggccgccagcgcccaccgggacctgggcgcctctgtgatggtggccaagggctgcggccagtgcctgaactttgactgcagcttcatcgctgtgctgatgctgcggcgctgcctgacctggctgcgggccacctggctggcccaggtgctgcccctggaccagaacatccagttccaccagctgatgggctacgtggtggtgggcctgagcctggtgcacacagtggcccacacagtgaactttgtgctgcaggcccaggccgaggccagccccttccagttctgggagctgctgctgaccacccggcccggcatcggctgggtgcacggcagcgccagccccaccggggtggccctgctgctgctgctgctgctgatgttcatctgcagcagcagctgcatccgccgcagcggccactttgaggtgttctactggacccacctgagctacctgctggtgtggctgctgctgatcttccacggccccaacttctggaagtggctgctggtgcccggcatcctcttcttcctggagaaggccatcggcctggccgtgtccaggatggctgctgtgtgcatcatggaggtgaacctgctgcccagcaaggtgacccacctgctgatcaagaggcctcccttcttccactacagacctggggactacctgtacctgaacatccccaccatcgcccgctatgagtggcaccccttcaccatcagcagcgcccctgagcagaaggacaccatctggctgcacatccgcagccagggccagtggaccaaccggctgtatgagagcttcaaggccagtgaccccctgggccggggcagcaagaggctgagccgctctgtgaccatgaggaagagccagaggagcagcaaaggaagtgagatcctgctggagaagcacaagttctgcaacatcaagtgctacattgatggcccctacggcacccccacccggcgcatctttgccagcgagcacgctgtgctgattggagctggcatcggcatcaccccatttgccagcatcctgcagagcatcatgtaccgccaccagaagaggaagcacacctgccccagctgccagcacagctggattgagggcgtgcaggacaacatgaagctgcacaaggtggacttcatctggatcaacagagaccagaggagctttgagtggtttgtgtccctgctgaccaagctggagatggaccaggccgaggaggcccagtatggccgcttcctggagctgcacatgtacatgaccagcgccctgggcaagaatgacatgaaggccatcggcctgcagatggccctggacctgctggccaacaaggagaagaaggacagcatcaccggcctgcagaccaggacccagcccggccgcccagactggagcaaggtgttccagaaggtggccgctgagaagaagggcaaggtgcaggtgttcttctgtggcagccctgccctggccaaggtgctgaagggccactgtgagaagtttggcttccgcttcttccaggagaacttctag

SEQ ID NO: 161216 - DNA, 4419 bp, synthetic construct
  misc_feature 1..4419: note = Description of Artificial Sequence: Synthetic coding sequence
  source 1..4419: mol_type = other DNA
atggacaatgccctcttctgcctggccgctgtgagcaacctggacatcgagagcaagctgtctgtgtactaccgggccccctggcaccagcagaggaacatcttcctgcctgccaccaggcctccctgtgtggaggagctgcacagacatgcccggcagagcctgcaggccctgcggcgggagcacaggagcagaagtgaccggcgggagcagagagctgctgcccccctgagcattgctgccccacccctgcctgcctaccccccagcccacagccagaggagaagagagttcaaggacagacacttcctgaccttcaacagcaccaggagccccagccccacagagtgctgccacatgaccccctggagcaggaagagccaccccccagaagatgaggacacagatgtgatgctgggccagaggcccaagaaccccatccacaacatccccagcaccctggacaagcagaccaactggagcaaggccctgcccctgcccaccccagaggagaagatgaagcaggatgcccaggtgatcagcagctgcatcatccccatcaacgtgactggagtgggctttgaccgggaggccagcatccgctgcagcctggtgcacagccagagcgtgctgcagaggaggaggaagctgcggcggaggaagaccatcagcggcatcccccggcgggtgcagcaggagattgacagtgatgagagccctgtggcccgggagagaaatgtcatcgtgcacaccaacccagaccccagcaacacagtgaaccgcatcagcggcacccgggacagcgagtgccagacagaggacatcctgattgctgcccccagcagaagacgcatccgggcccagaggggccagagcattgctgccagcctgagccacagcgctggcaacatcagcgccctggccgacaagggggacaccatgttcaccccagctgtgagcagcaggaccaggagccgcagcctgccccgggagggcaacagaggaggagatgctgagcccaaggtgggcgccaagcccagcgcctatgaggagggggagagctttgtgggggaccacgagaggaccccaaatgacttcagcgaggcccccagcagccccagcgcccaggaccaccagcccaccctgggcctggcctgcagccagcacctgcacagcccccagcacaagctgtctgagcggggccgcagccggctgagcaggatggctgctgacagcggcagctgtgacatcagcagcaacagcgacaccttcggcagccccatccactgcatcagcacagctggggtgctgctgagcagccacatggaccagaaggatgaccaccagagcagcagcggcaactggagcggcagcagcagcacctgccccagccagaccagcgagaccatccccccagctgccagcccccccctgaccggcagcagccactgtgacagcgagctgagcctgaacacagcccctcatgccaatgaagatgcctctgtgtttgtgacagagcagtacaatgaccacctggacaaggtgcggggccaccgggccaacagcttcaccagcacagtggccgacctgctggatgaccccaacaacagcaacaccagtgacagcgagtggaactacctgcaccaccaccatgatgccagctgccggcaggacttcagccctgagcggcccaaggctgacagcctgggctgccccagcttcacctccatggccacctatgacagcttcctggagaagagccccagcgacaaggctgacaccagcagccacttctctgtggacacagagggctactacacctccatgcactttgactgtggcctgaagggcaacaagagctatgtgtgccactacgccgccctgggcccagaaaatggccagggcgtgggcgccagccctggcctgcctgactgtgcctggcaggactacctggaccacaagaggcagggccggcccagcatctccttcaggaagcccaaggccaagcccaccccacccaagaggagcagcagcctgaggaagagtgatggaaatgctgacatcagcgagaagaaggagcccaagatcagcagcggccagcacctgccccacagcagccgggagatgaagctgcccctggactttgccaacacccccagcaggatggagaatgccaacctgcccaccaagcaggagcccagctggatcaaccagagcgagcagggcatcaaggagccccagctggatgccagtgacatcccccccttcaaggatgaggtggccgagagcacccactatgctgacctgtggctgctgaatgacctgaagaccaatgacccctaccgcagcctgagcaacagcagcacagccaccggcaccaccgtgattgagtgcatcaagagccctgagagcagcgagagccagaccagccagagcgagagccgggccaccacccccagcctgcccagcgtggacaatgagttcaagctggccagccctgagaagctggccggcctggccagccccagcagcggctacagcagccagagcgagacccccaccagcagcttccccacagccttcttcagcggccccctgagccctgggggcagcaagaggaagcccaaggtgcctgagaggaagagcagcctgcagcagcccagcctgaaggatggcaccatcagcctgagcaaggacctggagctgcccatcatcccccccacccacctggacctgagcgccctgcacaacgtgctgaacaagcccttccaccaccgccaccccctgcacgtgttcacccacaacaagcagaacacagtgggggagaccctgcggagcaaccccccacccagcctggccatcacccccaccatcctgaagtctgtgaacctgcggagcatcaacaagtctgaggaggtgaagcagaaggaggagaacaacacagacctgccctacctggaggagagcaccctgaccacagctgccctgagccccagcaagatccggccccacacagccaacaagtctgtgtcccggcagtacagcacagaggacaccatcctgtccttcctggacagcagcgctgtggagatgggccctgacaagctgcacctggagaagaacagcacctttgatgtgaagaacagatgtgaccctgagaccatcaccagcgctggcagcagcctgctggacagcaatgtgaccaaggaccaggtgaggacagaaacagagcccatccctgagaacacccccaccaagaactgtgccttccccacagagggcttccagagggtgtctgctgcccggcccaatgacctggatggcaagatcatccagtatggccctggcccagatgagaccctggagcaggtgcagaaggcccccagcgctggcctggaggaggtggcccagcctgagagcgtggatgtgatcaccagccagagcgacagccccacccgggccacagatgtgagcaaccagttcaagcaccagtttgtgatgagccgccaccacgacaaggtgcccggcaccatctcctatgagagcgagatcacctctgtgaacagcttccctgagaagtgcagcaagcaggagaacatcgccagcggcatcagcgccaagagcgccagtgacaacagcaaggccgaggagacccagggcaatgtggatgaggccagcctgaaggagagcagccccagtgatgacagcatcatcagccccctgtctgaggacagccaggccgaggccgagggcgtgtttgtgagccccaacaagcccaggaccacagaggacctgtttgctgtgatccacaggagcaagaggaaggtgctgggcaggaaggacagcggggacatgtctgtgcgcagcaagagccgggcccccctgagcagcagcagcagcagcgccagcagcatcaccagccccagcagcaatgtgaccacccccaacagccagaggagccctggcctcatctacagaaatgccaagaagagcaacaccagcaatgaggagttcaagctgctgctgctgaagaagggcagcagaagtgacagcagctacaggatgtctgccacagagatcctgaagagccccatcctgcccaagcccccaggagagctgacagctgagagcccccagagcacagatgatgcccaccagggcagccagggcgctgaggccctgagccccctgagcccctgcagcccccgggtgaatgctgagggcttcagcagcaagagctttgccaccagcgccagcgcccgggtgggccgcagccgggcccccccagctgccagcagcagccgctacagcgtgcgctgccgcctgtacaacacccccatgcaggccatcagcgagggggagacagagaacagtgatggcagcccccatgatgacaggagcagccagagcagcacctag

SEQ ID NO: 161217 - DNA, 4893 bp, synthetic construct
  misc_feature 1..4893: note = Description of Artificial Sequence: Synthetic coding sequence
  source 1..4893: mol_type = other DNA
atgccctttgccaagagaattgtggagccccagtggctgtgccggcagaggaggcctgcccctggccctgctgtggatgccagcggcggcagcgctgagcccccaccacccctgcagcccccaggaagaagagacctggatgaggtggaggcccctggccctgaggagcccgcccgggctgtgcctgcccccagcggcctgcccccacctcctccacccctgcctgccccagctgaccagacccagccccctcatggagaggcctctgtggccggggaggagagcacagctggcatccctgaggccgccccagctgctggggaggccagcagcgctgctgctgctgctgctgtgctgctgatgctggacctgtgtgctgtgtccaatgctgccctggcccgggtgctgcggcagctgagtgatgtggcccggcatgcctgcagcctcttccaggagctggagagtgacatccagctgacccaccggcgggtgtgggccctgcagggcaagctgggcggcgtgcagagggtgctgagcaccctggaccccaagcaggaggccgtgcctgtgagcaacctggacatcgagagcaagctgtctgtgtactaccgggccccctggcaccagcagaggaacatcttcctgcctgccacccggcccccctgtgtggaggagctgcacagacatgcccggcagagcctgcaggccctgcggcgggagcacaggagcagaagtgacagaagagagcagagagctgctgcccccctgagcattgctgccccacccctgcctgcctaccccccagcccacagccagaggcggcgggagttcaaggacagacacttcctgaccagccaccccccagaagatgaggacacagatgtgatgctgggccagaggcccaagaaccccatccacaacatccccagcaccctggacaagcagaccaactggagcaaggccctgcccctgcccaccccagaggagaagatgaagcaggatgcccaggtgatcagcagctgcatcatccccatcaacgtgactggagtgggctttgaccgggaggccagcatccgctgcagcctggtgcacagccagagcgtgctgcagaggaggaggaagctgcggcggaggaagaccatcagcggcatcccccggcgggtgcagcaggagattgacagtgatgagagccctgtggcccgggagagaaatgtcatcgtgcacaccaacccagaccccagcaacacagtgaaccgcatcagcggcacccgggacagcgagtgccagacagaggacatcctgattgctgcccccagcagaagacgcatccgggcccagaggggccagagcattgctgccagcctgagccacagcgctggcaacatcagcgccctggccgacaagggggacaccatgttcaccccagctgtgagcagcaggaccaggagccgcagcctgccccgggagggcaacagaggaggagatgctgagcccaaggtgggcgccaagcccagcgcctatgaggagggggagagctttgtgggggaccacgagaggaccccaaatgacttcagcgaggcccccagcagccccagcgcccaggaccaccagcccaccctgggcctggcctgcagccagcacctgcacagcccccagcacaagctgtctgagcggggccgcagccggctgagcaggatggctgctgacagcggcagctgtgacatcagcagcaacagcgacaccttcggcagccccatccactgcatcagcacagctggggtgctgctgagcagccacatggaccagaaggatgaccaccagagcagcagcggcaactggagcggcagcagcagcacctgccccagccagaccagcgagaccatccccccagctgccagcccccccctgaccggcagcagccactgtgacagcgagctgagcctgaacacagcccctcatgccaatgaagatgcctctgtgtttgtgacagagcagtacaatgaccacctggacaaggtgcggggccaccgggccaacagcttcaccagcacagtggccgacctgctggatgaccccaacaacagcaacaccagtgacagcgagtggaactacctgcaccaccaccatgatgccagctgccggcaggacttcagccctgagcggcccaaggctgacagcctgggctgccccagcttcacctccatggccacctatgacagcttcctggagaagagccccagcgacaaggctgacaccagcagccacttctctgtggacacagagggctactacacctccatgcactttgactgtggcctgaagggcaacaagagctatgtgtgccactacgccgccctgggcccagaaaatggccagggcgtgggcgccagccctggcctgcctgactgtgcctggcaggactacctggaccacaagaggcagggccggcccagcatctccttcaggaagcccaaggccaagcccaccccacccaagaggagcagcagcctgaggaagagtgatggaaatgctgacatcagcgagaagaaggagcccaagatcagcagcggccagcacctgccccacagcagccgggagatgaagctgcccctggactttgccaacacccccagcaggatggagaatgccaacctgcccaccaagcaggagcccagctggatcaaccagagcgagcagggcatcaaggagccccagctggatgccagtgacatcccccccttcaaggatgaggtggccgagagcacccactatgctgacctgtggctgctgaatgacctgaagaccaatgacccctaccgcagcctgagcaacagcagcacagccaccggcaccaccgtgattgagtgcatcaagagccctgagagcagcgagagccagaccagccagagcgagagccgggccaccacccccagcctgcccagcgtggacaatgagttcaagctggccagccctgagaagctggccggcctggccagccccagcagcggctacagcagccagagcgagacccccaccagcagcttccccacagccttcttcagcggccccctgagccctgggggcagcaagaggaagcccaaggtgcctgagaggaagagcagcctgcagcagcccagcctgaaggatggcaccatcagcctgagcaaggacctggagctgcccatcatcccccccacccacctggacctgagcgccctgcacaacgtgctgaacaagcccttccaccaccgccaccccctgcacgtgttcacccacaacaagcagaacacagtgggggagaccctgcggagcaaccccccacccagcctggccatcacccccaccatcctgaagtctgtgaacctgcggagcatcaacaagtctgaggaggtgaagcagaaggaggagaacaacacagacctgccctacctggaggagagcaccctgaccacagctgccctgagccccagcaagatccggccccacacagccaacaagtctgtgtcccggcagtacagcacagaggacaccatcctgtccttcctggacagcagcgctgtggagatgggccctgacaagctgcacctggagaagaacagcacctttgatgtgaagaacagatgtgaccctgagaccatcaccagcgctggcagcagcctgctggacagcaatgtgaccaaggaccaggtgaggacagaaacagagcccatccctgagaacacccccaccaagaactgtgccttccccacagagggcttccagagggtgtctgctgcccggcccaatgacctggatggcaagatcatccagtatggccctggcccagatgagaccctggagcaggtgcagaaggcccccagcgctggcctggaggaggtggcccagcctgagagcgtggatgtgatcaccagccagagcgacagccccacccgggccacagatgtgagcaaccagttcaagcaccagtttgtgatgagccgccaccacgacaaggtgcccggcaccatctcctatgagagcgagatcacctctgtgaacagcttccctgagaagtgcagcaagcaggagaacatcgccagcggcatcagcgccaagagcgccagtgacaacagcaaggccgaggagacccagggcaatgtggatgaggccagcctgaaggagagcagccccagtgatgacagcatcatcagccccctgtctgaggacagccaggccgaggccgagggcgtgtttgtgagccccaacaagcccaggaccacagaggacctgtttgctgtgatccacaggagcaagaggaaggtgctgggcaggaaggacagcggggacatgtctgtgcgcagcaagagccgggcccccctgagcagcagcagcagcagcgccagcagcatcaccagccccagcagcaatgtgaccacccccaacagccagaggagccctggcctcatctacagaaatgccaagaagagcaacaccagcaatgaggagttcaagctgctgctgctgaagaagggcagcagaagtgacagcagctacaggatgtctgccacagagatcctgaagagccccatcctgcccaagcccccaggagagctgacagctgagagcccccagagcacagatgatgcccaccagggcagccagggcgctgaggccctgagccccctgagcccctgcagcccccgggtgaatgctgagggcttcagcagcaagagctttgccaccagcgccagcgcccgggtgggccgcagccgggcccccccagctgccagcagcagccgctacagcgtgcgctgccgcctgtacaacacccccatgcaggccatcagcgagggggagacagagaacagtgatggcagcccccatgatgacaggagcagccagagcagcacctag

SEQ ID NO: 161218 - DNA, 4425 bp, synthetic construct
  misc_feature 1..4425: note = Description of Artificial Sequence: Synthetic coding sequence
  source 1..4425: mol_type = other DNA
atggccctggcctgctgcatgcccaagaatgctgctgtgagcaacctggacatcgagagcaagctgtctgtgtactaccgggccccctggcaccagcagaggaacatcttcctgcctgccaccaggcctccctgtgtggaggagctgcacagacatgcccggcagagcctgcaggccctgcggcgggagcacaggagcagaagtgaccggcgggagcagagagctgctgcccccctgagcattgctgccccacccctgcctgcctaccccccagcccacagccagaggagaagagagttcaaggacagacacttcctgaccttcaacagcaccaggagccccagccccacagagtgctgccacatgaccccctggagcaggaagagccaccccccagaagatgaggacacagatgtgatgctgggccagaggcccaagaaccccatccacaacatccccagcaccctggacaagcagaccaactggagcaaggccctgcccctgcccaccccagaggagaagatgaagcaggatgcccaggtgatcagcagctgcatcatccccatcaacgtgactggagtgggctttgaccgggaggccagcatccgctgcagcctggtgcacagccagagcgtgctgcagaggaggaggaagctgcggcggaggaagaccatcagcggcatcccccggcgggtgcagcaggagattgacagtgatgagagccctgtggcccgggagagaaatgtcatcgtgcacaccaacccagaccccagcaacacagtgaaccgcatcagcggcacccgggacagcgagtgccagacagaggacatcctgattgctgcccccagcagaagacgcatccgggcccagaggggccagagcattgctgccagcctgagccacagcgctggcaacatcagcgccctggccgacaagggggacaccatgttcaccccagctgtgagcagcaggaccaggagccgcagcctgccccgggagggcaacagaggaggagatgctgagcccaaggtgggcgccaagcccagcgcctatgaggagggggagagctttgtgggggaccacgagaggaccccaaatgacttcagcgaggcccccagcagccccagcgcccaggaccaccagcccaccctgggcctggcctgcagccagcacctgcacagcccccagcacaagctgtctgagcggggccgcagccggctgagcaggatggctgctgacagcggcagctgtgacatcagcagcaacagcgacaccttcggcagccccatccactgcatcagcacagctggggtgctgctgagcagccacatggaccagaaggatgaccaccagagcagcagcggcaactggagcggcagcagcagcacctgccccagccagaccagcgagaccatccccccagctgccagcccccccctgaccggcagcagccactgtgacagcgagctgagcctgaacacagcccctcatgccaatgaagatgcctctgtgtttgtgacagagcagtacaatgaccacctggacaaggtgcggggccaccgggccaacagcttcaccagcacagtggccgacctgctggatgaccccaacaacagcaacaccagtgacagcgagtggaactacctgcaccaccaccatgatgccagctgccggcaggacttcagccctgagcggcccaaggctgacagcctgggctgccccagcttcacctccatggccacctatgacagcttcctggagaagagccccagcgacaaggctgacaccagcagccacttctctgtggacacagagggctactacacctccatgcactttgactgtggcctgaagggcaacaagagctatgtgtgccactacgccgccctgggcccagaaaatggccagggcgtgggcgccagccctggcctgcctgactgtgcctggcaggactacctggaccacaagaggcagggccggcccagcatctccttcaggaagcccaaggccaagcccaccccacccaagaggagcagcagcctgaggaagagtgatggaaatgctgacatcagcgagaagaaggagcccaagatcagcagcggccagcacctgccccacagcagccgggagatgaagctgcccctggactttgccaacacccccagcaggatggagaatgccaacctgcccaccaagcaggagcccagctggatcaaccagagcgagcagggcatcaaggagccccagctggatgccagtgacatcccccccttcaaggatgaggtggccgagagcacccactatgctgacctgtggctgctgaatgacctgaagaccaatgacccctaccgcagcctgagcaacagcagcacagccaccggcaccaccgtgattgagtgcatcaagagccctgagagcagcgagagccagaccagccagagcgagagccgggccaccacccccagcctgcccagcgtggacaatgagttcaagctggccagccctgagaagctggccggcctggccagccccagcagcggctacagcagccagagcgagacccccaccagcagcttccccacagccttcttcagcggccccctgagccctgggggcagcaagaggaagcccaaggtgcctgagaggaagagcagcctgcagcagcccagcctgaaggatggcaccatcagcctgagcaaggacctggagctgcccatcatcccccccacccacctggacctgagcgccctgcacaacgtgctgaacaagcccttccaccaccgccaccccctgcacgtgttcacccacaacaagcagaacacagtgggggagaccctgcggagcaaccccccacccagcctggccatcacccccaccatcctgaagtctgtgaacctgcggagcatcaacaagtctgaggaggtgaagcagaaggaggagaacaacacagacctgccctacctggaggagagcaccctgaccacagctgccctgagccccagcaagatccggccccacacagccaacaagtctgtgtcccggcagtacagcacagaggacaccatcctgtccttcctggacagcagcgctgtggagatgggccctgacaagctgcacctggagaagaacagcacctttgatgtgaagaacagatgtgaccctgagaccatcaccagcgctggcagcagcctgctggacagcaatgtgaccaaggaccaggtgaggacagaaacagagcccatccctgagaacacccccaccaagaactgtgccttccccacagagggcttccagagggtgtctgctgcccggcccaatgacctggatggcaagatcatccagtatggccctggcccagatgagaccctggagcaggtgcagaaggcccccagcgctggcctggaggaggtggcccagcctgagagcgtggatgtgatcaccagccagagcgacagccccacccgggccacagatgtgagcaaccagttcaagcaccagtttgtgatgagccgccaccacgacaaggtgcccggcaccatctcctatgagagcgagatcacctctgtgaacagcttccctgagaagtgcagcaagcaggagaacatcgccagcggcatcagcgccaagagcgccagtgacaacagcaaggccgaggagacccagggcaatgtggatgaggccagcctgaaggagagcagccccagtgatgacagcatcatcagccccctgtctgaggacagccaggccgaggccgagggcgtgtttgtgagccccaacaagcccaggaccacagaggacctgtttgctgtgatccacaggagcaagaggaaggtgctgggcaggaaggacagcggggacatgtctgtgcgcagcaagagccgggcccccctgagcagcagcagcagcagcgccagcagcatcaccagccccagcagcaatgtgaccacccccaacagccagaggagccctggcctcatctacagaaatgccaagaagagcaacaccagcaatgaggagttcaagctgctgctgctgaagaagggcagcagaagtgacagcagctacaggatgtctgccacagagatcctgaagagccccatcctgcccaagcccccaggagagctgacagctgagagcccccagagcacagatgatgcccaccagggcagccagggcgctgaggccctgagccccctgagcccctgcagcccccgggtgaatgctgagggcttcagcagcaagagctttgccaccagcgccagcgcccgggtgggccgcagccgggcccccccagctgccagcagcagccgctacagcgtgcgctgccgcctgtacaacacccccatgcaggccatcagcgagggggagacagagaacagtgatggcagcccccatgatgacaggagcagccagagcagcacctag

SEQ ID NO: 161219 - DNA, 255 bp, synthetic construct
  misc_feature 1..255: note = Description of Artificial Sequence: Synthetic coding sequence
  source 1..255: mol_type = other DNA
cctgagctgcaggtgtgtgtgttctgcaggaacaacaaggaggccatggccctgtacaccacccacatcctgaagggcccagatggccgggtgctgtgccctgtgctgcggcgctacacctgccccctgtgtggggccagcggggacaatgcccacaccatcaagtactgccccctgagcaaggtgcccccacctccagcccggcccccacccaggtctgccagagatggccccccaggcaagaagctgaggtag

SEQ ID NO: 161220 - DNA, 879 bp, synthetic construct
  misc_feature 1..879: note = Description of Artificial Sequence: Synthetic coding sequence
  source 1..879: mol_type = other DNA
atggaggccttcccctgggcccccaggagcccccggcggggccgggcccccccacccatggccctggtgcccagcgcccgctacgtgtctgcccctggccctgcccacccccagcccttcagctcctggaatgactacctgggcctggccaccctcatcaccaaggctgtggatggagagcccaggtttggctgtgcccggggcggcaatggaggcggcggcagcccccccagcagcagcagcagcagctgctgcagcccccacactggagctggccctggggccctgggccctgccctgggccccccagactatgatgaagatgatgatgatgacagtgatgagcccggcagccggggccgctacctgggcagcgccctggagctgcgggccctggagctgtgtgccggccctgctgaggccggcctgctggaggagagatttgctgagctgagcccctttgctggccgggctgctgctgtgctgctgggctgtgccccagctgctgctgctgctgccaccaccaccagcgaggccaccccccgggaggagcgggccccagcctgggccgctgagccccggctgcatgctgccagcggggctgctgctgcccggctgctgaagccagagctgcaggtgtgtgtgttctgcaggaacaacaaggaggccatggccctgtacaccacccacatcctgaagggcccagatggccgggtgctgtgccctgtgctgcggcgctacacctgccccctgtgtggggccagcggggacaatgcccacaccatcaagtactgccccctgagcaaggtgcccccacctccagcccggcccccacccaggtctgccagagatggccccccaggcaagaagctgaggtag

SEQ ID NO: 161221 - DNA, 3456 bp, synthetic construct
  misc_feature 1..3456: note = Description of Artificial Sequence: Synthetic coding sequence
  source 1..3456: mol_type = other DNA
atgctgcggcgggtgacagtggccgctgtgtgtgccaccaggaggaagctgtgtgaggccggccgggagctggccgccctgtggggcatcgagacccggggccgctgtgaagattctgctgctgcccggcccttccccatcctggccatgcctggaagaaacaaggccaagagcacctgcagctgcccagacctgcagcccaacggccaggacctgggggagaacagccgggtggcccggctgggcgcagatgagagcgaggaggagggcagaagaggcagcctgagcaatgctggggaccctgagatcgtgaagagccccagcgaccccaagcagtaccgctacatcaagctgcagaatggcctgcaggccctgctgatcagtgacctgagcaacatggagggcaagacaggcaacaccacagatgatgaggaggaggaggaggtggaggaggaggaggaggatgatgatgaggacagcggggctgagattgaagatgatgatgaggagggctttgatgatgaagatgaatttgatgatgaacatgatgatgacctggacacagaagataatgagctggaggagctggaggagcgggcagaggccaggaagaagaccacagagaagcagagcgctgctgccctgtgtgtgggcgtgggcagctttgctgaccctgatgacctgcccggcctggcccacttcctggagcacatggtgttcatgggcagcctgaagtacccagatgaaaatggatttgatgccttcctgaagaagcatggaggcagtgacaatgccagcacagactgtgagaggacagtgttccagtttgatgtgcagaggaagtacttcaaggaggccctggaccgctgggcccagttcttcatccaccccctgatgatcagagatgccatcgaccgggaggtggaggccgtggacagcgagtaccagctggcccggcccagtgatgccaacaggaaggagatgctgtttggcagcctggcccggcccggccaccccatgggcaagttcttctggggcaatgctgagaccctgaagcatgagcccaggaagaacaacatcgacacccacgcccggctgcgggagttctggatgagatactacagcagccactacatgaccctggtggtgcagagcaaggagaccctggacaccctggagaagtgggtgacagagatcttcagccagatccccaacaacggcctgccccggcccaactttggccacctgacagacccctttgacaccccagccttcaacaagctgtacagagtggtgcccatcaggaagatccacgccctgaccatcacctgggccctgcccccccagcagcagcactacagagtgaagcccctgcactacatctcctggctggtgggccacgagggcaagggcagcatcctgtccttcctgaggaagaagtgctgggccctggccctgtttggaggaaatggagaaacaggctttgagcagaacagcacctacagcgtcttcagcatcagcatcaccctgacagatgagggctatgagcacttctatgaggtggcctacaccgtcttccagtacctgaagatgctgcagaagctgggccctgagaagaggatctttgaggagatcaggaagattgaagataatgagttccactaccaggagcagacagatcctgtggagtatgtggagaacatgtgtgagaacatgcagctgtaccccctgcaggacatcctgaccggggaccagctgctgtttgagtacaagccagaggtgattggagaggccctgaaccagctggtgccccagaaggccaacctggtgctgctgagcggggccaatgaaggaaaatgtgacctgaaggagaagtggtttggcacccagtacagcattgaggacattgaaaattcctgggccgagctgtggaacagcaactttgagctgaacccagacctgcacctgcctgctgagaacaagtacatcgccacagacttcaccctgaaggcctttgactgcccagagacagagtaccctgtgaagatcgtgaacaccccccagggctgcctgtggtacaagaaggacaacaagttcaagatccccaaggcctacatccgcttccacctgatcagccccctcatccagaagtctgctgccaacgtggtgctgtttgacatctttgtgaacatcctgacccacaacctggccgagcccgcctatgaagcagatgtggcccagctggagtacaagctggtggccggggagcacggcctcatcatccgggtgaagggcttcaaccacaagctgcccctgctcttccagctgatcatcgactacctggccgagttcaacagcaccccagctgtgttcaccatgatcacagagcagctgaagaagacctacttcaacatcctgatcaagccagagaccctggccaaggatgtgcggctgctgatcctggagtatgcccgctggagcatgattgacaagtaccaggccctgatggatggcctgagcctggagagcctgctgagctttgtgaaggagttcaagagccagctgtttgtggagggcctggtgcagggcaatgtgaccagcacagagagcatggacttcctgaagtatgtggtggacaagctgaacttcaagcccctggagcaggagatgcctgtgcagttccaggtggtggagctgcccagcggccaccacctgtgcaaggtgaaggccctgaacaagggagatgccaacagcgaggtgacagtgtactaccagagcggcaccaggagcctgcgggagtacaccctgatggagctgctggtgatgcacatggaggagccctgctttgacttcctgcggaccaagcagaccctgggctaccacgtgtaccccacctgcaggaacaccagcggcatcctgggcttctctgtgacagtgggcacccaggccaccaagtacaacagcgaggtggtggacaagaagattgaggagttcctgagcagctttgaggagaagattgagaacctgacagaggaggccttcaacacccaggtgacagccctgatcaagctgaaggaatgtgaggacacccacctgggggaggaggtggacaggaactggaatgaggtggtgacccagcagtacctgtttgaccggctggcccatgaaattgaggccctgaagagcttcagcaagagtgacctggtgaactggttcaaggcccaccggggccctggcagcaagatgctgtctgtgcacgtggtgggctacggcaagtatgagctggaggaggatggcacccccagcagcgaggacagcaacagcagctgtgaggtgatgcagctgacctacctgcccaccagccccctgctggccgactgcatcatccccatcacagacatccgggccttcaccaccaccctgaacctgctgccctaccacaagatcgtgaagtag

SEQ ID NO: 161222 - DNA, 3660 bp, synthetic construct
  misc_feature 1..3660: note = Description of Artificial Sequence: Synthetic coding sequence
  source 1..3660: mol_type = other DNA
atgctgcggcgggtgacagtggccgctgtgtgtgccaccaggaggaagctgtgtgaggccggccgggagctggccgccctgtggggcatcgagacccggggccgctgtgaagattctgctgctgcccggcccttccccatcctggccatgcctggaagaaacaaggccaagagcacctgcagctgcccagacctgcagcccaacggccaggacctgggggagaacagccgggtggcccggctgggcgcagatgagagcgaggaggagggcagaagaggcagcctgagcaatgctggggaccctgagatcgtgaagagccccagcgaccccaagcagtaccgctacatcaagctgcagaatggcctgcaggccctgctgatcagtgacctgagcaacatggagggcaagacaggcaacaccacagatgatgaggaggaggaggaggtggaggaggaggaggaggatgatgatgaggacagcggggctgagattgaagatgatgatgaggagggctttgatgatgaagatgaatttgatgatgaacatgatgatgacctggacacagaagataatgagctggaggagctggaggagcgggcagaggccaggaagaagaccacagagaagcagcagctgcagagcctcttcctgctgtggagcaagctgacagaccggctgtggttcaagagcacctacagcaagatgagcagcaccctgctggtggagaccaggaacctgtatggagtggtgggcgctgagagccgcagcgcccctgtgcagcacctggccggctggcaggccgaggagcagcagggcgagacagacacagtgctgtctgctgctgccctgtgtgtgggcgtgggcagctttgctgaccctgatgacctgcccggcctggcccacttcctggagcacatggtgttcatgggcagcctgaagtacccagatgaaaatggatttgatgccttcctgaagaagcatggaggcagtgacaatgccagcacagactgtgagaggacagtgttccagtttgatgtgcagaggaagtacttcaaggaggccctggaccgctgggcccagttcttcatccaccccctgatgatcagagatgccatcgaccgggaggtggaggccgtggacagcgagtaccagctggcccggcccagtgatgccaacaggaaggagatgctgtttggcagcctggcccggcccggccaccccatgggcaagttcttctggggcaatgctgagaccctgaagcatgagcccaggaagaacaacatcgacacccacgcccggctgcgggagttctggatgagatactacagcagccactacatgaccctggtggtgcagagcaaggagaccctggacaccctggagaagtgggtgacagagatcttcagccagatccccaacaacggcctgccccggcccaactttggccacctgacagacccctttgacaccccagccttcaacaagctgtacagagtggtgcccatcaggaagatccacgccctgaccatcacctgggccctgcccccccagcagcagcactacagagtgaagcccctgcactacatctcctggctggtgggccacgagggcaagggcagcatcctgtccttcctgaggaagaagtgctgggccctggccctgtttggaggaaatggagaaacaggctttgagcagaacagcacctacagcgtcttcagcatcagcatcaccctgacagatgagggctatgagcacttctatgaggtggcctacaccgtcttccagtacctgaagatgctgcagaagctgggccctgagaagaggatctttgaggagatcaggaagattgaagataatgagttccactaccaggagcagacagatcctgtggagtatgtggagaacatgtgtgagaacatgcagctgtaccccctgcaggacatcctgaccggggaccagctgctgtttgagtacaagccagaggtgattggagaggccctgaaccagctggtgccccagaaggccaacctggtgctgctgagcggggccaatgaaggaaaatgtgacctgaaggagaagtggtttggcacccagtacagcattgaggacattgaaaattcctgggccgagctgtggaacagcaactttgagctgaacccagacctgcacctgcctgctgagaacaagtacatcgccacagacttcaccctgaaggcctttgactgcccagagacagagtaccctgtgaagatcgtgaacaccccccagggctgcctgtggtacaagaaggacaacaagttcaagatccccaaggcctacatccgcttccacctgatcagccccctcatccagaagtctgctgccaacgtggtgctgtttgacatctttgtgaacatcctgacccacaacctggccgagcccgcctatgaagcagatgtggcccagctggagtacaagctggtggccggggagcacggcctcatcatccgggtgaagggcttcaaccacaagctgcccctgctcttccagctgatcatcgactacctggccgagttcaacagcaccccagctgtgttcaccatgatcacagagcagctgaagaagacctacttcaacatcctgatcaagccagagaccctggccaaggatgtgcggctgctgatcctggagtatgcccgctggagcatgattgacaagtaccaggccctgatggatggcctgagcctggagagcctgctgagctttgtgaaggagttcaagagccagctgtttgtggagggcctggtgcagggcaatgtgaccagcacagagagcatggacttcctgaagtatgtggtggacaagctgaacttcaagcccctggagcaggagatgcctgtgcagttccaggtggtggagctgcccagcggccaccacctgtgcaaggtgaaggccctgaacaagggagatgccaacagcgaggtgacagtgtactaccagagcggcaccaggagcctgcgggagtacaccctgatggagctgctggtgatgcacatggaggagccctgctttgacttcctgcggaccaagcagaccctgggctaccacgtgtaccccacctgcaggaacaccagcggcatcctgggcttctctgtgacagtgggcacccaggccaccaagtacaacagcgaggtggtggacaagaagattgaggagttcctgagcagctttgaggagaagattgagaacctgacagaggaggccttcaacacccaggtgacagccctgatcaagctgaaggaatgtgaggacacccacctgggggaggaggtggacaggaactggaatgaggtggtgacccagcagtacctgtttgaccggctggcccatgaaattgaggccctgaagagcttcagcaagagtgacctggtgaactggttcaaggcccaccggggccctggcagcaagatgctgtctgtgcacgtggtgggctacggcaagtatgagctggaggaggatggcacccccagcagcgaggacagcaacagcagctgtgaggtgatgcagctgacctacctgcccaccagccccctgctggccgactgcatcatccccatcacagacatccgggccttcaccaccaccctgaacctgctgccctaccacaagatcgtgaagtag

SEQ ID NO: 161223 - DNA, 1662 bp, synthetic construct
  misc_feature 1..1662: note = Description of Artificial Sequence: Synthetic coding sequence
  source 1..1662: mol_type = other DNA
atgctgcagaagctgggccctgagaagaggatctttgaggagatcaggaagattgaagataatgagttccactaccaggagcagacagatcctgtggagtatgtggagaacatgtgtgagaacatgcagctgtaccccctgcaggacatcctgaccggggaccagctgctgtttgagtacaagccagaggtgattggagaggccctgaaccagctggtgccccagaaggccaacctggtgctgctgagcggggccaatgaaggaaaatgtgacctgaaggagaagtggtttggcacccagtacagcattgaggacattgaaaattcctgggccgagctgtggaacagcaactttgagctgaacccagacctgcacctgcctgctgagaacaagtacatcgcctacatccgcttccacctgatcagccccctcatccagaagtctgctgccaacgtggtgctgtttgacatctttgtgaacatcctgacccacaacctggccgagcccgcctatgaagcagatgtggcccagctggagtacaagctggtggccggggagcacggcctcatcatccgggtgaagggcttcaaccacaagctgcccctgctcttccagctgatcatcgactacctggccgagttcaacagcaccccagctgtgttcaccatgatcacagagcagctgaagaagacctacttcaacatcctgatcaagccagagaccctggccaaggatgtgcggctgctgatcctggagtatgcccgctggagcatgattgacaagtaccaggccctgatggatggcctgagcctggagagcctgctgagctttgtgaaggagttcaagagccagctgtttgtggagggcctggtgcagggcaatgtgaccagcacagagagcatggacttcctgaagtatgtggtggacaagctgaacttcaagcccctggagcaggagatgcctgtgcagttccaggtggtggagctgcccagcggccaccacctgtgcaaggtgaaggccctgaacaagggagatgccaacagcgaggtgacagtgtactaccagagcggcaccaggagcctgcgggagtacaccctgatggagctgctggtgatgcacatggaggagccctgctttgacttcctgcggaccaagcagaccctgggcagcgaggtggtggacaagaagattgaggagttcctgagcagctttgaggagaagattgagaacctgacagaggaggccttcaacacccaggtgacagccctgatcaagctgaaggaatgtgaggacacccacctgggggaggaggtggacaggaactggaatgaggtggtgacccagcagtacctgtttgaccggctggcccatgaaattgaggccctgaagagcttcagcaagagtgacctggtgaactggttcaaggcccaccggggccctggcagcaagatgctgtctgtgcacgtggtgggctacggcaagtatgagctggaggaggatggcacccccagcagcgaggacagcaacagcagctgtgaggtgatgcagctgacctacctgcccaccagccccctgctggccgactgcatcatccccatcacagacatccgggccttcaccaccaccctgaacctgctgccctaccacaagatcgtgaagtag

SEQ ID NO: 161224 - DNA, 1617 bp, synthetic construct
  misc_feature 1..1617: note = Description of Artificial Sequence: Synthetic coding sequence
  source 1..1617: mol_type = other DNA
tgaaaaattgaggacaatgagttccactaccaggagcagacagatcctgtggagtatgtggagaacatgtgtgagaacatgcagctgtaccccctgcaggacatcctgactggagaccagctgctgtttgagtacaagccagaggtgattggagaggccctgaaccagctggtgccccagaaggccaacctggtgctgctgagcggggccaatgaaggaaaatgtgacctgaaggagaagtggtttggcacccagtacagcattgaagatattgagaacagctgggccgagctgtggaacagcaactttgagctgaacccagacctgcacctgcctgctgagaacaagtacatcgcctacatccgcttccacctgatcagccccctcatccagaagtctgctgccaacgtggtgctgtttgacatctttgtgaacatcctgacccacaacctggccgagcccgcctatgaagcagatgtggcccagctggagtacaagctggtggccggggagcacggcctcatcatccgggtgaagggcttcaaccacaagctgcccctgctcttccagctgatcatcgactacctggccgagttcaacagcaccccagctgtgttcaccatgatcacagagcagctgaagaagacctacttcaacatcctgatcaagccagagaccctggccaaggatgtgcggctgctgatcctggagtatgcccgctggagcatgattgacaagtaccaggccctgatggatggcctgagcctggagagcctgctgagctttgtgaaggagttcaagagccagctgtttgtggagggcctggtgcagggcaatgtgaccagcacagagagcatggacttcctgaagtatgtggtggacaagctgaacttcaagcccctggagcaggagatgcctgtgcagttccaggtggtggagctgcccagcggccaccacctgtgcaaggtgaaggccctgaacaagggagatgccaacagcgaggtgacagtgtactaccagagcggcaccaggagcctgcgggagtacaccctgatggagctgctggtgatgcacatggaggagccctgctttgacttcctgcggaccaagcagaccctgggcagcgaggtggtggacaagaagattgaggagttcctgagcagctttgaggagaagattgagaacctgacagaggaggccttcaacacccaggtgacagccctgatcaagctgaaggaatgtgaggacacccacctgggggaggaggtggacaggaactggaatgaggtggtgacccagcagtacctgtttgaccggctggcccacgagattgaggccctgaagagcttcagcaagagtgacctggtgaactggttcaaggcccaccggggccctggcagcaagatgctgtctgtgcacgtggtgggctacggcaagtatgagctggaggaggatggcacccccagcagcgaggacagcaacagcagctgtgaggtgatgcagctgacctacctgcccaccagccccctgctggccgactgcatcatccccatcacagacatccgggccttcaccaccaccctgaacctgctgccctaccacaagatcgtgaagtag

SEQ ID NO: 161225 - DNA, 3264 bp, synthetic construct
  misc_feature 1..3264: note = Description of Artificial Sequence: Synthetic coding sequence
  source 1..3264: mol_type = other DNA
atggagggcaagacaggcaacaccacagatgatgaggaggaggaggaggtggaggaggaggaggaggatgatgatgaggacagcggggctgagattgaagatgatgatgaggagggctttgatgatgaagatgaatttgatgatgaacatgatgatgacctggacacagaagataatgagctggaggagctggaggagcgggcagaggccaggaagaagaccacagagaagcagcagctgcagagcctcttcctgctgtggagcaagctgacagaccggctgtggttcaagagcacctacagcaagatgagcagcaccctgctggtggagaccaggaacctgtatggagtggtgggcgctgagagccgcagcgcccctgtgcagcacctggccggctggcaggccgaggagcagcagggcgagacagacacagtgctgtctgctgctgccctgtgtgtgggcgtgggcagctttgctgaccctgatgacctgcccggcctggcccacttcctggagcacatggtgttcatgggcagcctgaagtacccagatgaaaatggatttgatgccttcctgaagaagcatggaggcagtgacaatgccagcacagactgtgagaggacagtgttccagtttgatgtgcagaggaagtacttcaaggaggccctggaccgctgggcccagttcttcatccaccccctgatgatcagagatgccatcgaccgggaggtggaggccgtggacagcgagtaccagctggcccggcccagtgatgccaacaggaaggagatgctgtttggcagcctggcccggcccggccaccccatgggcaagttcttctggggcaatgctgagaccctgaagcatgagcccaggaagaacaacatcgacacccacgcccggctgcgggagttctggatgagatactacagcagccactacatgaccctggtggtgcagagcaaggagaccctggacaccctggagaagtgggtgacagagatcttcagccagatccccaacaacggcctgccccggcccaactttggccacctgacagacccctttgacaccccagccttcaacaagctgtacagagtggtgcccatcaggaagatccacgccctgaccatcacctgggccctgcccccccagcagcagcactacagagtgaagcccctgcactacatctcctggctggtgggccacgagggcaagggcagcatcctgtccttcctgaggaagaagtgctgggccctggccctgtttggaggaaatggagaaacaggctttgagcagaacagcacctacagcgtcttcagcatcagcatcaccctgacagatgagggctatgagcacttctatgaggtggcctacaccgtcttccagtacctgaagatgctgcagaagctgggccctgagaagaggatctttgaggagatcaggaagattgaagataatgagttccactaccaggagcagacagatcctgtggagtatgtggagaacatgtgtgagaacatgcagctgtaccccctgcaggacatcctgaccggggaccagctgctgtttgagtacaagccagaggtgattggagaggccctgaaccagctggtgccccagaaggccaacctggtgctgctgagcggggccaatgaaggaaaatgtgacctgaaggagaagtggtttggcacccagtacagcattgaggacattgaaaattcctgggccgagctgtggaacagcaactttgagctgaacccagacctgcacctgcctgctgagaacaagtacatcgccacagacttcaccctgaaggcctttgactgcccagagacagagtaccctgtgaagatcgtgaacaccccccagggctgcctgtggtacaagaaggacaacaagttcaagatccccaaggcctacatccgcttccacctgatcagccccctcatccagaagtctgctgccaacgtggtgctgtttgacatctttgtgaacatcctgacccacaacctggccgagcccgcctatgaagcagatgtggcccagctggagtacaagctggtggccggggagcacggcctcatcatccgggtgaagggcttcaaccacaagctgcccctgctcttccagctgatcatcgactacctggccgagttcaacagcaccccagctgtgttcaccatgatcacagagcagctgaagaagacctacttcaacatcctgatcaagccagagaccctggccaaggatgtgcggctgctgatcctggagtatgcccgctggagcatgattgacaagtaccaggccctgatggatggcctgagcctggagagcctgctgagctttgtgaaggagttcaagagccagctgtttgtggagggcctggtgcagggcaatgtgaccagcacagagagcatggacttcctgaagtatgtggtggacaagctgaacttcaagcccctggagcaggagatgcctgtgcagttccaggtggtggagctgcccagcggccaccacctgtgcaaggtgaaggccctgaacaagggagatgccaacagcgaggtgacagtgtactaccagagcggcaccaggagcctgcgggagtacaccctgatggagctgctggtgatgcacatggaggagccctgctttgacttcctgcggaccaagcagaccctgggctaccacgtgtaccccacctgcaggaacaccagcggcatcctgggcttctctgtgacagtgggcacccaggccaccaagtacaacagcgaggtggtggacaagaagattgaggagttcctgagcagctttgaggagaagattgagaacctgacagaggaggccttcaacacccaggtgacagccctgatcaagctgaaggaatgtgaggacacccacctgggggaggaggtggacaggaactggaatgaggtggtgacccagcagtacctgtttgaccggctggcccatgaaattgaggccctgaagagcttcagcaagagtgacctggtgaactggttcaaggcccaccggggccctggcagcaagatgctgtctgtgcacgtggtgggctacggcaagtatgagctggaggaggatggcacccccagcagcgaggacagcaacagcagctgtgaggtgatgcagctgacctacctgcccaccagccccctgctggccgactgcatcatccccatcacagacatccgggccttcaccaccaccctgaacctgctgccctaccacaagatcgtgaagtag

SEQ ID NO: 161226 - DNA, 2244 bp, synthetic construct
  misc_feature 1..2244: note = Description of Artificial Sequence: Synthetic coding sequence
  source 1..2244: mol_type = other DNA
atggagggcaagacaggcaacaccacagatgatgaggaggaggaggaggtggaggaggaggaggaggatgatgatgaggacagcggggctgagattgaagatgatgatgaggagggctttgatgatgaagatgaatttgatgatgaacatgatgatgacctggacacagaagataatgagctggaggagctggaggagcgggcagaggccaggaagaagaccacagagaagcagagcgctgctgccctgtgtgtgggcgtgggcagctttgctgaccctgatgacctgcccggcctggcccacttcctggagcacatggtgttcatgggcagcctgaagtacccagatgaaaatggatttgatgccttcctgaagaagcatggaggcagtgacaatgccagcacagactgtgagaggacagtgttccagtttgatgtgcagaggaagtacttcaaggaggccctggaccgctgggcccagttcttcatccaccccctgatgatcagagatgccatcgaccgggaggtggaggccgtggacagcgagtaccagctggcccggcccagtgatgccaacaggaaggagatgctgtttggcagcctggcccggcccggccaccccatgggcaagttcttctggggcaatgctgagaccctgaagcatgagcccaggaagaacaacatcgacacccacgcccggctgcgggagttctggatgagatactacagcagccactacatgaccctggtggtgcagagcaaggagaccctggacaccctggagaagtgggtgacagagatcttcagccagatccccaacaacggcctgccccggcccaactttggccacctgacagacccctttgacaccccagccttcaacaagctgtacagagtggtgcccatcaggaagatccacgccctgaccatcacctgggccctgcccccccagcagcagcactacagagtgaagcccctgcactacatctcctggctggtgggccacgagggcaagggcagcatcctgtccttcctgaggaagaagtgctgggccctggccctgtttggaggaaatggagaaacaggctttgagcagaacagcacctacagcgtcttcagcatcagcatcaccctgacagatgagggctatgagcacttctatgaggtggcctacaccgtcttccagtacctgaagatgctgcagaagctgggccctgagaagaggatctttgaggagatcaggaagattgaagataatgagttccactaccaggagcagacagatcctgtggagtatgtggagaacatgtgtgagaacatgcagctgtaccccctgcaggacatcctgaccggggaccagctgctgtttgagtacaagccagaggtgattggagaggccctgaaccagctggtgccccagaaggccaacctggtgctgctgagcggggccaatgaaggaaaatgtgacctgaaggagaagtggtttggcacccagtacagcattgaggacattgaaaattcctgggccgagctgtggaacagcaactttgagctgaacccagacctgcacctgcctgctgagaacaagtacatcgccacagacttcaccctgaaggcctttgactgcccagagacagagtaccctgtgaagatcgtgaacaccccccagggctgcctgtggtacaagaaggacaacaagttcaagatccccaaggcctacatccgcttccacctgatcagccccctcatccagaagtctgctgccaacgtggtgctgtttgacatctttgtgaacatcctgacccacaacctggccgagcccgcctatgaagcagatgtggcccagctggagtacaagctggtggccggggagcacggcctcatcatccgggtgaagggcttcaaccacaagctgcccctgctcttccagctgatcatcgactacctggccgagttcaacagcaccccagctgtgttcaccatgatcacagagcagctgaagaagacctacttcaacatcctgatcaagccagagaccctggccaaggatgtgcggctgctgatcctggagtatgcccgctggagcatgattgacaagtaccaggccctgatggatggcctgagcctggagagcctgctgagctttgtgaaggagttcaagagccagctgtttgtggagggcctggtgcagggcaatgtgaccagcacagtgctgtgccagtgggcccaggacagcgagacctag

SEQ ID NO: 161227 - DNA, 3447 bp, synthetic construct
  misc_feature 1..3447: note = Description of Artificial Sequence: Synthetic coding sequence
  source 1..3447: mol_type = other DNA
atgctgcggcgggtgacagtggccgctgtgtgtgccaccaggaggaagctgtgtgaggccggccgggagctggccgccctgtggggcatcgagacccggggccgctgtgaagattctgctgctgcccggcccttccccatcctggccatgcctggaagaaacaaggccaagagcacctgcagctgcccagacctgcagcccaacggccaggacctgggggagaacagccgggtggcccggctgggcgcagatgagagcgaggaggagggcagaagaggcagcctgagcaatgctggggaccctgagatcgtgaagagccccagcgaccccaagcagtaccgctacatcaagctgcagaatggcctgcaggccctgctgatcagtgacctgagcaacatggagggcaagacaggcaacaccacagatgatgaggaggaggaggaggtggaggaggaggaggaggatgatgatgaggacagcggggctgagattgaagatgatgatgaggagggctttgatgatgaagatgaatttgatgatgaacatgatgatgacctggacacagaagataatgagctggaggagctggaggagcgggcagaggccaggaagaagaccacagagaagcagagcgctgctgccctgtgtgtgggcgtgggcagctttgctgaccctgatgacctgcccggcctggcccacttcctggagcacatggtgttcatgggcagcctgaagtacccagatgaaaatggatttgatgccttcctgaagaagcatggaggcagtgacaatgccagcacagactgtgagaggacagtgttccagtttgatgtgcagaggaagtacttcaaggaggccctggaccgctgggcccagttcttcatccaccccctgatgatcagagatgccatcgaccgggaggtggaggccgtggacagcgagtaccagctggcccggcccagtgatgccaacaggaaggagatgctgtttggcagcctggcccggcccggccaccccatgggcaagttcttctggggcaatgctgagaccctgaagcatgagcccaggaagaacaacatcgacacccacgcccggctgcgggagttctggatgagatactacagcagccactacatgaccctggtggtgcagagcaaggagaccctggacaccctggagaagtgggtgacagagatcttcagccagatccccaacaacggcctgccccggcccaactttggccacctgacagacccctttgacaccccagccttcaacaagctgtacagagtggtgcccatcaggaagatccacgccctgaccatcacctgggccctgcccccccagcagcagcactacagagtgaagcccctgcactacatctcctggctggtgggccacgagggcaagggcagcatcctgtccttcctgaggaagaagtgctgggccctggccctgtttggaggaaatggagaaacaggctttgagcagaacagcacctacagcgtcttcagcatcagcatcaccctgacagatgagggctatgagcacttctatgaggtggcctacaccgtcttccagtacctgaagatgctgcagaagctgggccctgagaagaggatctttgaggagatcaggaagattgaagataatgagttccactaccaggagcagacagatcctgtggagtatgtggagaacatgtgtgagaacatgcagctgtaccccctgcaggacatcctgaccggggaccagctgctgtttgagtacaagccagaggtgattggagaggccctgaaccagctggtgccccagaaggccaacctggtgctgctgagcggggccaatgaaggaaaatgtgacctgaaggagaagtggtttggcacccagtacagcattgaggacattgaaaattcctgggccgagctgtggaacagcaactttgagctgaacccagacctgcacctgcctgctgagaacaagtacatcgccacagacttcaccctgaaggcctttgactgcccagagacagagtaccctgtgaagatcgtgaacaccccccagggctgcctgtggtacaagaaggacaacaagttcaagatccccaaggcctacatccgcttccacctgatcagccccctcatccagaagtctgctgccaacgtggtgctgtttgacatctttgtgaacatcctgacccacaacctggccgagcccgcctatgaagcagatgtggcccagctggagtacaagctggtggccggggagcacggcctcatcatccgggtgaagggcttcaaccacaagctgcccctgctcttccagctgatcatcgactacctggccgagttcaacagcaccccagctgtgttcaccatgatcacagagcagctgaagaagacctacttcaacatcctgatcaagccagagaccctggccaaggatgtgcggctgctgatcctggagtatgcccgctggagcatgattgacaagtaccaggccctgatggatggcctgagcctggagagcctgctgagctttgtgaaggagttcaagagccagctgtttgtggagggcctggtgcagggcaatgtgaccagcacagagagcatggacttcctgaagtatgtggtggacaagctgaacttcaagcccctggagcaggagatgcctgtgcagttccaggtggtggagctgcccagcggccaccacctgtgcaaggtgaaggccctgaacaagggagatgccaacagcgaggtgacagtgtactaccagagcggcaccaggagcctgcgggagtacaccctgatggagctgctggtgatgcacatggaggagccctgctttgacttcctgcggaccaagcagaccctgggctaccacgtgtaccccacctgcaggaacaccagcggcatcctgggcttctctgtgacagtgggcacccaggccaccaagtacaacagcgaggtggtggacaagaagattgaggagttcctgagcagctttgaggagaagattgagaacctgacagaggaggccttcaacacccaggtgacagccctgatcaagctgaaggaatgtgaggacacccacctgggggaggaggtggacaggaactggaatgaggtggtgacccagcagtacctgtttgaccggctggcccatgaaattgaggccctgaagagcttcagcaagagtgacctggtgaactggttcaaggcccaccggggccctggcagcaagatgctgtctgtgcacgtggtgggctacggcaagtatgagctggaggaggatggcacccccagcagcgaggacagcaacagcagctgtgaggtgatgcagctgacctacctgcccaccagccccctgctggccatcgtgagcagccccctgctgatcagcggcctgagccagcagcacagcaccttcagccccaccatcaagtag

SEQ ID NO: 161228 - DNA, 1587 bp, synthetic construct
  misc_feature 1..1587: note = Description of Artificial Sequence: Synthetic coding sequence
  source 1..1587: mol_type = other DNA
atgggcgccgccgccagcagaagaagagccctgcggtctgaggccatgagctctgtggccgccaaggtgcgggccgcccgggcctttggagagtacctgagccagagccacccagaaaatagaaatggagctgaccacctgctggctgatgcctacagcggccatgatggcagccctgagatgcagcctgccccccagaacaagaggcggctgagcctggtgtccaatggctgctatgagggcagcctgtctgaggagcccagcatcaggaagccagctggggagggcccccagccccgggtgtacaccatctctggagagcccgccctgctgcccagccctgaggccgaggccatcgagctggccgtggtgaagggccggcggcagaggcacccccaccaccacagccagcccctgcgggccagccctgggggcagccgggaggatgtgtcccggccctgccagagctgggccggcagccggcagggcagcaaggagtgccccggctgtgcccagctggcccctggccccaccccccgggccttcggcctggaccagccccccctgcctgagaccagcggccgcaggaagaagctggagaggatgtacagcgtggacagagtgtctgatgacatccccatccgcacctggttccccaaggaaaatctcttctccttccagacagccaccaccaccatgcaggccgtgttccggggctatgcagagaggaagaggaggaagagagaaaatgacagcgccagcgtcatccagaggaacttcaggaagcacctgaggatggtgggcagccggcgggtgaaggcccagacctttgctgagcggcgggagaggagcttcagccgctcctggagcgaccccacccccatgaaggctgacaccagccatgacagccgggacagcagtgacctgcagagcagccactgcaccctggatgaggcctttgaggacctggactgggacacagagaagggcctggaggccgtggcctgtgacacagagggctttgtgccccccaaggtgatgctgatcagcagcaaggtgcccaaggccgagtacatccccaccatcatcagaagagatgaccccagcatcatccccatcctgtatgaccatgaacatgccacctttgaggacatcctggaggagattgaaaggaagctgaatgtgtaccacaagggggccaagatctggaagatgctgatcttctgccagggcggccctggccacctgtacctgctgaagaacaaggtggccacctttgccaaggtggagaaggaggaggacatgatccacttctggaagaggctgagccggctgatgagcaaggtgaaccctgagcccaacgtcatccacatcatgggctgctacatcctgggcaaccccaacggggagaagctgttccagaacctgcggaccctgatgaccccctacagagtgacctttgagagccccctggagctgagcgcccagggcaagcagatgattgagacctactttgacttccggctgtaccgcctgtggaagagccggcagcacagcaagctgctggactttgatgatgtgctgtag

SEQ ID NO: 161229 - DNA, 984 bp, synthetic construct
  misc_feature 1..984: note = Description of Artificial Sequence: Synthetic coding sequence
  source 1..984: mol_type = other DNA
atgtacagcgtggacagagtgtctgatgacatccccatccgcacctggttccccaaggagaacctcttctccttccagacagccaccaccaccatgcaggccgtgttccggggctacgccgagaggaagaggaggaagcgggagaatgattctgccagcgtcatccagaggaacttcaggaagcacctgaggatggtgggcagcagaagagtgaaggcccagacctttgctgagcggcgggagaggagcttcagccgctcctggagcgaccccacccccatgaaggctgacaccagccatgacagccgggacagcagtgacctgcagagcagccactgcaccctggatgaggcctttgaggacctggactgggacacagagaagggcctggaggccgtggcctgtgacacagagggctttgtgccccccaaggtgatgctgatcagcagcaaggtgcccaaggccgagtacatccccaccatcatcagaagagatgaccccagcatcatccccatcctgtatgaccacgagcacgccacctttgaggacatcctggaggagattgaaaggaagctgaatgtgtaccacaagggggccaagatctggaagatgctgatcttctgccagggcggccctggccacctgtacctgctgaagaacaaggtggccacctttgccaaggtggagaaggaggaggacatgatccacttctggaagaggctgagccggctgatgagcaaggtgaaccctgagcccaacgtcatccacatcatgggctgctacatcctgggcaaccccaatggagagaagctgttccagaacctgcggaccctgatgaccccctacagagtgacctttgagagccccctggagctgagcgcccagggcaagcagatgattgagacctactttgacttccggctgtaccgcctgtggaagagccggcagcacagcaagctgctggactttgatgatgtgctgtag

SEQ ID NO: 161230 - DNA, 438 bp, synthetic construct
  misc_feature 1..438: note = Description of Artificial Sequence: Synthetic coding sequence
  source 1..438: mol_type = other DNA
atggtgggcagcagaagagtgaaggcccagacctttgctgagcggcgggagaggagcttcagccgctcctggagcgaccccacccccatgaaggctgacaccagccatgacagccgggacagcagtgacctgcagagcagccactgcaccctggatgaggcctttgaggacctggactgggacacagagaagggcctggaggccgtggcctgtgacacagagggctttgtgccccccaaggtgatgctgatcagcagcaaggtgcccaaggccgagtacatccccaccatcatcagaagagatgaccccagcatcatccccatcctgtatgtgtccccagcccctggcctgcccccaacagatgccctgctgcggccccaccctggccctgccccagccccccaggtgccccgggtgctgtggcgctgctggctgtag

SEQ ID NO: 161231 - DNA, 1587 bp, synthetic construct; identical to SEQ ID NO: 161228
  misc_feature 1..1587: note = Description of Artificial Sequence: Synthetic coding sequence
  source 1..1587: mol_type = other DNA

SEQ ID NO: 161232 - DNA, 1503 bp, synthetic construct
  misc_feature 1..1503: note = Description of Artificial Sequence: Synthetic coding sequence
  source 1..1503: mol_type = other DNA
atgggcgccgccgccagcagaagaagagccctgcggtctgaggccatgagctctgtggccgccaaggtgcgggccgcccgggcctttggagagtacctgagccagagccacccagaaaatagaaatggagctgaccacctgctggctgatgcctacagcggccatgatggcagccctgagatgcagcctgccccccagaacaagaggcggctgagcctggtgtccaatggctgctatgagggcagcctgtctgaggagcccagcatcaggaagccagctggggagggcccccagccccgggtgtacaccatctctggagagcccgccctgctgcccagccctgaggccgaggccatcgagctggccgtggtgaagggccggcggcagaggcacccccaccaccacagccagcccctgcgggccagccctgggggcagccgggaggatgtgtcccggccctgccagagctgggccggcagccggcagggcagcaaggagtgccccggctgtgcccagctggcccctggccccaccccccgggccttcggcctggaccagccccccctgcctgagaccagcggccgcaggaagaagctggagaggatgtacagcgtggacagagtgtctgatgacatccccatccgcacctggttccccaaggaaaatctcttctccttccagacagccaccaccaccatgcaggccatctctgtgttccggggctatgcagagaggaagaggaggaagagagaaaatgacagcgccagcgtcatccagaggaacttcaggaagcacctgaggatggtgggcagccggcgggtgaaggcccagagcagtgacctgcagagcagccactgcaccctggatgaggcctttgaggacctggactgggacacagagaagggcctggaggccgtggcctgtgacacagagggctttgtgccccccaaggtgatgctgatcagcagcaaggtgcccaaggccgagtacatccccaccatcatcagaagagatgaccccagcatcatccccatcctgtatgaccatgaacatgccacctttgaggacatcctggaggagattgaaaggaagctgaatgtgtaccacaagggggccaagatctggaagatgctgatcttctgccagggcggccctggccacctgtacctgctgaagaacaaggtggccacctttgccaaggtggagaaggaggaggacatgatccacttctggaagaggctgagccggctgatgagcaaggtgaaccctgagcccaacgtcatccacatcatgggctgctacatcctgggcaaccccaacggggagaagctgttccagaacctgcggaccctgatgaccccctacagagtgacctttgagagccccctggagctgagcgcccagggcaagcagatgattgagacctactttgacttccggctgtaccgcctgtggaagagccggcagcacagcaagctgctggactttgatgatgtgctgtag

SEQ ID NO: 161233 - DNA, 1518 bp, synthetic construct
  misc_feature 1..1518: note = Description of Artificial Sequence: Synthetic coding sequence
  source 1..1518: mol_type = other DNA
atgggcgccgccgccagcagaagaagagccctgcggtctgaggccatgagctctgtggccgccaaggtgcgggccgcccgggcctttggagagtacctgagccagagccacccagaaaatagaaatggagctgaccacctgctggctgatgcctacagcggccatgatggcagccctgagatgcagcctgccccccagaacaagaggcggctgagcctggtgtccaatggctgctatgagggcagcctgtctgaggagcccagcatcaggaagccagctggggagggcccccagccccgggtgtacaccatctctggagagcccgccctgctgcccagccctgaggccgaggccatcgagctggccgtggtgaagggccggcggcagaggcacccccaccaccacagccagcccctgcgggccagccctgggggcagccgggaggatgtgtcccggccctgccagagctgggccggcagccggcagggcagcaaggagtgccccggctgtgcccagctggcccctggccccaccccccgggccttcggcctggaccagccccccctgcctgagaccagcggccgcaggaagaagctggagaggatgtacagcgtggacagagtgtctgatgacatccccatccgcacctggttccccaaggaaaatctcttctccttccagacagccaccaccaccatgcaggccaacttcaggaagcacctgaggatggtgggcagcagaagagtgaaggcccagacctttgctgagcggcgggagaggagcttcagccgctcctggagcgaccccacccccatgaaggctgacaccagccatgacagccgggacagcagtgacctgcagagcagccactgcaccctggatgaggcctttgaggacctggactgggacacagagaagggcctggaggccgtggcctgtgacacagagggctttgtgccccccaaggtgatgctgatcagcagcaaggtgcccaaggccgagtacatccccaccatcatcagaagagatgaccccagcatcatccccatcctgtatgaccacgagcacgccacctttgaggacatcctggaggagattgaaaggaagctgaatgtgtaccacaagggggccaagatctggaagatgctgatcttctgccagggcggccctggccacctgtacctgctgaagaacaaggtggccacctttgccaaggtggagaaggaggaggacatgatccacttctggaagaggctgagccggctgatgagcaaggtgaaccctgagcccaacgtcatccacatcatgggctgctacatcctgggcaaccccaatggagagaagctgttccagaacctgcggaccctgatgaccccctacagagtgacctttgagagccccctggagctgagcgcccagggcaagcagatgattgagacctactttgacttccggctgtaccgcctgtggaagagccggcagcacagcaagctgctggactttgatgatgtgctgtag

SEQ ID NO: 161234 - DNA, 1593 bp, synthetic construct
  misc_feature 1..1593: note = Description of Artificial Sequence: Synthetic coding sequence
  source 1..1593: mol_type = other DNA
atgggcgccgccgccagcagaagaagagccctgcggtctgaggccatgagctctgtggccgccaaggtgcgggccgcccgggcctttggagagtacctgagccagagccacccagaaaatagaaatggagctgaccacctgctggctgatgcctacagcggccatgatggcagccctgagatgcagcctgccccccagaacaagaggcggctgagcctggtgtccaatggctgctatgagggcagcctgtctgaggagcccagcatcaggaagccagctggggagggcccccagccccgggtgtacaccatctctggagagcccgccctgctgcccagccctgaggccgaggccatcgagctggccgtggtgaagggccggcggcagaggcacccccaccaccacagccagcccctgcgggccagccctgggggcagccgggaggatgtgtcccggccctgccagagctgggccggcagccggcagggcagcaaggagtgccccggctgtgcccagctggcccctggccccaccccccgggccttcggcctggaccagccccccctgcctgagaccagcggccgcaggaagaagctggagaggatgtacagcgtggacagagtgtctgatgacatccccatccgcacctggttccccaaggaaaatctcttctccttccagacagccaccaccaccatgcaggccatctctgtgttccggggctatgcagagaggaagaggaggaagagagaaaatgacagcgccagcgtcatccagaggaacttcaggaagcacctgaggatggtgggcagccggcgggtgaaggcccagacctttgctgagcggcgggagaggagcttcagccgctcctggagcgaccccacccccatgaaggctgacaccagccatgacagccgggacagcagtgacctgcagagcagccactgcaccctggatgaggcctttgaggacctggactgggacacagagaagggcctggaggccgtggcctgtgacacagagggctttgtgccccccaaggtgatgctgatcagcagcaaggtgcccaaggccgagtacatccccaccatcatcagaagagatgaccccagcatcatccccatcctgtatgaccatgaacatgccacctttgaggacatcctggaggagattgaaaggaagctgaatgtgtaccacaagggggccaagatctggaagatgctgatcttctgccagggcggccctggccacctgtacctgctgaagaacaaggtggccacctttgccaaggtggagaaggaggaggacatgatccacttctggaagaggctgagccggctgatgagcaaggtgaaccctgagcccaacgtcatccacatcatgggctgctacatcctgggcaaccccaacggggagaagctgttccagaacctgcggaccctgatgaccccctacagagtgacctttgagagccccctggagctgagcgcccagggcaagcagatgattgagacctactttgacttccggctgtaccgcctgtggaagagccggcagcacagcaagctgctggactttgatgatgtgctgtag

SEQ ID NO: 161235 - DNA, 585 bp, synthetic construct
  misc_feature 1..585: note = Description of Artificial Sequence: Synthetic coding sequence
  source 1..585: mol_type = other DNA
atgggcctgggccccctgagcagcagcctgagcccccagctgatcagcagcaaggtgcccaaggccgagtacatccccaccatcatcagaagagatgaccccagcatcatccccatcctgtatgaccatgaacatgccacctttgaggacatcctggaggagattgaaaggaagctgaatgtgtaccacaagggggccaagatctggaagatgctgatcttctgccagggcggccctggccacctgtacctgctgaagaacaaggtggccacctttgccaaggtggagaaggaggaggacatgatccacttctggaagaggctgagccggctgatgagcaaggtgaaccctgagcccaacgtcatccacatcatgggctgctacatcctgggcaaccccaacggggagaagctgttccagaacctgcggaccctgatgaccccctacagagtgacctttgagagccccctggagctgagcgcccagggcaagcagatgattgagacctactttgacttccggctgtaccgcctgtggaagagccggcagcacagcaagctgctggactttgatgatgtgctgtag

SEQ ID NO: 161236 - DNA, 1524 bp, synthetic construct
  misc_feature 1..1524: note = Description of Artificial Sequence: Synthetic coding sequence
  source 1..1524: mol_type = other DNA
atgggcgccgccgccagcagaagaagagccctgcggtctgaggccatgagctctgtggccgccaaggtgcgggccgcccgggcctttggagagtacctgagccagagccacccagaaaatagaaatggagctgaccacctgctggctgatgcctacagcggccatgatggcagccctgagatgcagcctgccccccagaacaagaggcggctgagcctggtgtccaatggctgctatgagggcagcctgtctgaggagcccagcatcaggaagccagctggggagggcccccagccccgggtgtacaccatctctggagagcccgccctgctgcccagccctgaggccgaggccatcgagctggccgtggtgaagggccggcggcagaggcacccccaccaccacagccagcccctgcgggccagccctgggggcagccgggaggatgtgtcccggccctgccagagctgggccggcagccggcagggcagcaaggagtgccccggctgtgcccagctggcccctggccccaccccccgggccttcggcctggaccagccccccctgcctgagaccagcggccgcaggaagaagctggagaggatgtacagcgtggacagagtgtctgatgacatccccatccgcacctggttccccaaggaaaatctcttctccttccagacagccaccaccaccatgcaggccgtgggcaacttcaggaagcacctgaggatggtgggcagcagaagagtgaaggcccagacctttgctgagcggcgggagaggagcttcagccgctcctggagcgaccccacccccatgaaggctgacaccagccatgacagccgggacagcagtgacctgcagagcagccactgcaccctggatgaggcctttgaggacctggactgggacacagagaagggcctggaggccgtggcctgtgacacagagggctttgtgccccccaaggtgatgctgatcagcagcaaggtgcccaaggccgagtacatccccaccatcatcagaagagatgaccccagcatcatccccatcctgtatgaccacgagcacgccacctttgaggacatcctggaggagattgaaaggaagctgaatgtgtaccacaagggggccaagatctggaagatgctgatcttctgccagggcggccctggccacctgtacctgctgaagaacaaggtggccacctttgccaaggtggagaaggaggaggacatgatccacttctggaagaggctgagccggctgatgagcaaggtgaaccctgagcccaacgtcatccacatcatgggctgctacatcctgggcaaccccaatggagagaagctgttccagaacctgcggaccctgatgaccccctacagagtgacctttgagagccccctggagctgagcgcccagggcaagcagatgattgagacctactttgacttccggctgtaccgcctgtggaagagccggcagcacagcaagctgctggactttgatgatgtgctgtag

SEQ ID NO: 161237 - DNA, 1524 bp, synthetic construct
  misc_feature 1..1524: note = Description of Artificial Sequence: Synthetic coding sequence
  source 1..1524: mol_type = other DNA
atgggcgccgccgccagcagaagaagagccctgcggtctgaggccatgagctctgtggccgccaaggtgcgggccgcccgggcctttggagagtacctgagccagagccacccagaaaatagaaatggagctgaccacctgctggctgatgcctacagcggccatgatggcagccctgagatgcagcctgccccccagaacaagaggcggctgagcctggtgtccaatggctgctatgagggcagcctgtctgaggagcccagcatcaggaagccagctggggagggcccccagccccgggtgtacaccatctctggagagcccgccctgctgcccagccctgaggccgaggccatcgagctggccgtggtgaagggccggcggcagaggcacccccaccaccacagccagcccctgcgggccagccctgggggcagccgggaggatgtgtcccggccctgccagagctgggccggcagccggcagggcagcaaggagtgccccggctgtgcccagctggcccctggccccaccccccgggccttcggcctggaccagccccccctgcctgagaccagcggccgcaggaagaagctggagaggatgtacagcgtggacagagtgtctgatgacatccccatccgcacctggttccccaaggaaaatctcttctccttccagacagccaccaccaccatgcaggccatcagcaacttcaggaagcacctgaggatggtgggcagcagaagagtgaaggcccagacctttgctgagcggcgggagaggagcttcagccgctcctggagcgaccccacccccatgaaggctgacaccagccatgacagccgggacagcagtgacctgcagagcagccactgcaccctggatgaggcctttgaggacctggactgggacacagagaagggcctggaggccgtggcctgtgacacagagggctttgtgccccccaaggtgatgctgatcagcagcaaggtgcccaaggccgagtacatccccaccatcatcagaagagatgaccccagcatcatccccatcctgtatgaccacgagcacgccacctttgaggacatcctggaggagattgaaaggaagctgaatgtgtaccacaagggggccaagatctggaagatgctgatcttctgccagggcggccctggccacctgtacctgctgaagaacaaggtggccacctttgccaaggtggagaaggaggaggacatgatccacttctggaagaggctgagccggctgatgagcaaggtgaaccctgagcccaacgtcatccacatcatgggctgctacatcctgggcaaccccaatggagagaagctgttccagaacctgcggaccctgatgaccccctacagagtgacctttgagagccccctggagctgagcgcccagggcaagcagatgattgagacctactttgacttccggctgtaccgcctgtggaagagccggcagcacagcaagctgctggactttgatgatgtgctgtag

SEQ ID NO: 161238 - DNA, 984 bp, synthetic construct
  misc_feature 1..984: note = Description of Artificial Sequence: Synthetic coding sequence
  source 1..984: mol_type = other DNA
atgcagctgggccgccgcctggaccctgagcggcaggccctgcacctgtgcagcggcgtggagggggagccctggaaggctgtggccggccgggccctgggcggcatctgcctgtgggtgggcggcggggcccggagccagggcgagcactggctgcccacccccaagggcaacttcaggaagcacctgaggatggtgggcagcagaagagtgaaggcccagacctttgctgagcggcgggagaggagcttcagccgctcctggagcgaccccacccccatgaaggctgacaccagccatgacagccgggacagcagtgacctgcagagcagccactgcaccctggatgaggcctttgaggacctggactgggacacagagaagggcctggaggccgtggcctgtgacacagagggctttgtgccccccaaggtgatgctgatcagcagcaaggtgcccaaggccgagtacatccccaccatcatcagaagagatgaccccagcatcatccccatcctgtatgaccacgagcacgccacctttgaggacatcctggaggagattgaaaggaagctgaatgtgtaccacaagggggccaagatctggaagatgctgatcttctgccagggcggccctggccacctgtacctgctgaagaacaaggtggccacctttgccaaggtggagaaggaggaggacatgatccacttctggaagaggctgagccggctgatgagcaaggtgaaccctgagcccaacgtcatccacatcatgggctgctacatcctgggcaaccccaatggagagaagctgttccagaacctgcggaccctgatgaccccctacagagtgacctttgagagccccctggagctgagcgcccagggcaagcagatgattgagacctactttgacttccggctgtaccgcctgtggaagagccggcagcacagcaagctgctggactttgatgatgtgctgtag

SEQ ID NO: 161239 - DNA, 648 bp, synthetic construct
  misc_feature 1..648: note = Description of Artificial Sequence: Synthetic coding sequence
  source 1..648: mol_type = other DNA
atgcctggagaggccacagagaccgtgcctgccacagagcaggagctgccccagccccaggccgagactggaagtggcacagaaagtgacagtgatgagagcgtgcctgagctggaggagcaggacagcacccaggccaccacccagcaggcccagctggccgctgctgctgagattgatgaggagcctgtgtccaaggccaagcagagccgctctgagaagaaggccaggaaggccatgagcaagctgggcctgcggcaggtgactggagtgaccagggtgaccatcaggaagagcaagaacatcctcttcgtcatcaccaagccagatgtgtacaagagccctgccagtgacacctacatcgtgtttggagaggccaagattgaggacctgagccagcaggcccagctggccgctgctgagaagttcaaggtgcagggcgaggccgtgagcaacatccaggagaacacccagacccccaccgtgcaggaggagagcgaggaggaggaggtggatgagaccggggtggaggtgaaggacatcgagctggtgatgagccaggccaacgtgtcccgggccaaggctgtgcgggccctgaagaacaacagcaatgacatcgtgaatgccatcatggagctgaccatgtag

SEQ ID NO: 161240 - DNA, 648 bp, synthetic construct; identical to SEQ ID NO: 161239
  misc_feature 1..648: note = Description of Artificial Sequence: Synthetic coding sequence
  source 1..648: mol_type = other DNA

SEQ ID NO: 161241 - DNA, 6237 bp, synthetic construct
  misc_feature 1..6237: note = Description of Artificial Sequence: Synthetic coding sequence
  source 1..6237: mol_type = other DNA
atgcctggagaggccacagagaccgtgcctgccacagagcaggagctgccccagccccaggccgagacagctgtgctgcccatgagcagcgccctgtctgtgacagctgccctgggccagcccggccccaccctgcccccaccctgcagccctgccccccagcagtgccccctgtctgctgccaaccaggccagccccttccccagccccagcaccatcgccagcacccccctggaggtgcccttcccccagagcagcagcggcacagccctgcccctgggcacagcccctgaggcccccaccttcctgcccaacctgattggcccccccatcagccctgctgccctggccctggccagccccatgattgcccccaccctgaagggcacccccagcagcagcgcccccctggccctggtggccctggccccccacagcgtgcagaagagcagcgccttcccccccaacctgctgaccagccccccatctgtggccgtggccgagagcggcagcgtcatcaccctgagcgcccccatcgcccccagcgagcccaagaccaacctgaacaaggtgcccagcgaggtggtgcccaaccccaagggcacccccagccccccctgcatcgtgtccacagtgccctaccactgtgtgacccccatggccagcatccagagcggcgtggccagcctgccccagaccacccccaccaccaccctggccatcgccagcccccaggtgaaggacaccaccatcagctctgtgctgatcagcccccagaaccctggcagcctgagcctgaagggccctgtgagccccccagctgccctgagcctgagcacccagagcctgcctgtggtgaccagcagccagaagacagctggccccaacaccccaccagacttccccatcagcctgggcagccacctggcccccctgcaccagagcagctttggatctgtgcagctgctgggccagacaggccccagcgccctgagtgaccccaccgtgaagaccatctctgtggaccacagcagcactggagccagctaccccagccagaggagcgtcatcccccccctgcccagcagaaatgaggtggtgcctgccaccgtggccgccttccctgtggtggcccccagcgtggacaagggccccagcaccatcagcagcatcacctgcagccccagcggcagcctgaatgtggccaccagcttcagcctgagccccaccaccagcctcatcctgaagagcagccccaatgccacctaccactaccccctggtggcccagatgcctgtgtcctctgtgggcaccacccccctggtggtgaccaacccctgcaccatcgctgctgcccccaccaccacctttgaggtggccacctgtgtgtccccacccatgagcagcggccccatcagcaacatcgagcccaccagccctgctgccctggtgatggcccctgtggcccccaaggagcccagcacccaggtggccaccaccctgcgcatccctgtgtccccacccctgcctgaccctgaggacctgaagaacctgcccagctctgtgctggtgaagttccccacccagaaggacctgcagacagtgcctgccagcctggagggcgcccccttcagccctgcccaggccggcctgaccaccaagaaggaccccaccgtgctgcccctggtgcaggccgcccccaagaacagccccagcttccagagcaccagcagcagccctgagatccccctgagccctgaggccaccctggccaagaagagcctgggggagcccctgcccatcggcaagccagccagctccatgaccagccccctgggcgtgaacagcagcgccagcgtcatcaagacagacagctatgccggcccagattctgctggccccctgctgaagagcagcctcatcacccccaccgtggccgccttccccctggagagcgctgaccctgctggggtggcccccaccacagccaagggcaccagcacctacaccaccacagccagccccttcctggagggcaccgtgtccctggcccccaagaaccaccctgtgaaggagggcaccctgaccaccctgcccctggtgcccacagccagcgagaactgccctgtggcccccagcccccagaacacctgtgcccccctggccaccctggtgctggcccctgagatccccaagtctgtgcccagccccagcctgcccccagctggcaccccacctggcaccaagaaggtggatggcatcagccacaccagcgccctggcccctgtggccagcagccccaaggaatgtcccacagaagattctggggccagcgccacagccagcagcaagggcaccctgacctacctggccgacagccccagccccctgggcgtgtctgtgagcccccagaccaagaggcctcccaccaagaagggcagcgctggccctgacacccccatcggcaacctgagcagccctgtgtcccctgtggaggccagcttcctgcctgagaacagcctgtccttccagggcagcaaggacagccctgccaccacccacagccccaccccacccagccccaagggggcccccacccccagcgctgtgacccccctgagccccaagggcgtgaccctgccccccaaggagacccccaccccatctgtggtgaacctgcccttccccaaggagggccctgccaccccagcccccaagcaggccccagccctgtccatgaccagcagcagccccaagaaggcccgggccaccccagcccccaagggcatcccagccagccccagccccaagggggcccccaccccacctgctgccaccccacccagccccaagggcggccctgccacccccagccccaagtgggcccccaccccacctgctgccaccccacccagccccaagggcggccctgccacccccagccccaagggggcccccaccccacctgctgccaccccacccagccccaagggcggccctgccacccccagccccaagggggcccccaccccacctgctgtgaccccacccagccccaagggcagccctgctgccacccccttccccaagggggccagcaccccacctgctgccaccccacccagccccaagggcagccctgctgccacccccctgcccaagggggcccccaccaccccagctgccaccctgcccagccccaagggcggccctgccacccccagcctgaagggggcccccaccccacctgctgccaccccacccagccccaagggcggccctgccacccccagccccaagggggcccccatgcctcctgctgccaccccacccagccccaagggcggcctggccaccccaccccacaagggggcccccaccaccccagctgccaccccacccagccccaagggcggcctggccaccccaccacccaagggggcccccaccaccccagctgccaccccacccagccccaagggcggcctggccaccccaccacccaagggggcccccaccaccccagctgccaccccacccagccccaagggcggcctggccacccccagccccaagggggcccccaccaccccagctgccaccccacccagccccaagggcggcctggccacccccagccccaagggggcccccaccaccccagctgccaccccacccagccccaagggcggcctggccacccccagccccaagggggcccccaccaccccagctgccaccccacccagccccaagggcggccctgccaccccaccacccaagggggcccccaccccacctgctgccaccccacccagcctgaagggcggcctggccaccccaccccacaagggggcccccaacccagctgtggtgaccccacccagccccaagggcggccctgccaccagcccccccaagggggcccccaccccacctgctgccaccccacccagccccaagggcagccctggcaccccaccacccaagggggcccccaccccacctgctgtgaccccacccagccccaagggcacccccaccctgcctgccaccacccccagcagcaaaggaggccccaccacccccagcagcaaggagggccccaccccacctgctgccacccccagccacaagggcggccctgccatgaccccacccagccccaagaggggccctgccatccccagccccaagggggaccccaccagccctgctgtgatccccctgagccccaagaaggccccagccacccctgtgacccgggagggcgccgccacccccagcaagggggacctgaccccacctgctgtgacccctgtgtccctgaagaaggccccagccaccagcgcccccaagggcggccctgccacccccagcagcaagggggaccccaccctgcctgctgtgaccccacccagccccaaggagcccccagcccccaagcaggtggccaccagcagcagccccaagaaggccccagccaccccagcccccatgggcgcccccaccctgcctgctgtgatccccagcagccccaaggaggtgcctgccacccccagcagcagaagagaccccatcgcccccacagccaccctgctgagcaagaagaccccagccaccctggcccccaaggaggccctgatccccccagccatgacagtgcccagccccaagaagaccccagccatccccacccccaaggaggccccagccacccccagcagcaaggaggccagcagccccccagctgtgacccccagcacctacaagggggcccccagccccaaggagctgctgatccccccagctgtgaccagccccagccccaaggaggcccccaccccacctgctgtgaccccacccagccctgagaagggccctgccaccccagcccccaagggcacccccaccagcccccctgtgacccccagcagcctgaaggacagccccaccagccctgcctctgtgacctgcaagatgggcgccaccgtgccccaggccagcaagggcctgcctgccaagaagggccccacagccctgaaggaggtgctggtggccccagcccctgagagcacccccatcatcacagcccccaccaggaagggcccccagaccaagaagagcagcgccaccagcccccccatctgcccagaccccagcgccaagaatggcagcaagggccccctgagcacagtggccccagcccccctgctgcctgtgcagaaggacagcagcaagacagccaagggcaaggatgccagccacagccccaagggccccctggcccctcctgagagcaaggccagcacccccctgacagctgctgcctttgagaaggtgctgcccaagccagagagcgcctctgtgtctgctgcccccagcccccctgtgtccctgcccctggcccccagccctgtgcccaccctgccccccaagcagcagttcctgcccagcagccctggcctggtgctggagagccccagcaagcccctggccccagcagatgaagatgagctgctgcccctcatccccccagagcccatcagcggcggcgtgcccttccagagcgtgctggtgaacatgcccacccccaagtctgctggcatccctgtgcccacccccagcgccaagcagcctgtgaccaagaacaacaagggcagcggcacagaaagtgacagtgatgaatctgtgcctgagctggaggagcaggacagcacccaggccaccacccagcaggcccagctggccgctgctgctgagattgatgaggagcctgtgtccaaggccaagcagagccgctctgagaagaaggccaggaaggccatgagcaagctgggcctgcggcaggtgactggagtgaccagggtgaccatcaggaagagcaagaacatcctgtttgtgatcaccaagccagatgtgtacaagagccctgccagtgacacctacatcgtgtttggagaggccaagattgaggacctgagccagcaggcccagctggccgctgctgagaagttcaaggtgcagggcgaggccgtgagcaacatccaggagaacacccagacccccaccgtgcaggaggagagcgaggaggaggaggtggatgaaacaggagtggaggtgaaggacatcgagctggtgatgagccaggccaacgtgtcccgggccaaggctgtgcgggccctgaagaacaacagcaatgacatcgtgaatgccatcatggagctgaccatgtag

SEQ ID NO: 161242 - DNA, 648 bp, synthetic construct; identical to SEQ ID NO: 161239
  misc_feature 1..648: note = Description of Artificial Sequence: Synthetic coding sequence
  source 1..648: mol_type = other DNA

SEQ ID NO: 161243 - DNA, 21 bp, synthetic construct
  misc_feature 1..21: note = Description of Artificial Sequence: Synthetic coding sequence
  source 1..21: mol_type = other DNA
atgcctggagaggccacctag

SEQ ID NO: 161244 - DNA, 597 bp, synthetic construct
  misc_feature 1..597: note = Description of Artificial Sequence: Synthetic coding sequence
  source 1..597: mol_type = other DNA
atgcctggagaggccacagagaccgtgcctgccacagagcaggagctgccccagccccaggccgagactggaagtggcacagaaagtgacagtgatgagagcgtgcctgagctggaggagcaggacagcacccaggccaccacccagcaggcccagctggccgctgctgctgagattgatgaggagcctgtgtccaaggccaagcagagccgctctgagaagaaggccaggaaggccatgagcaagctgggcctgcggcaggtgactggagtgaccagggtgaccatcaggaagagcaagaacatcctcttcgtcatcaccaagccagatgtgtacaagagccctgccagtgacacctacatcgtgtttggagaggccaagattgaggacctgagccagcaggcccagctggccgctgctgagaagttcaaggtgcagggcgaggccgtgagcaacatccaggagaacacccagacccccaccgtgcaggaggagagcgaggaggaggaggtggatgagaccggggtggaggtgaaggacatcgagctggtgatgagccaggccaacgtgtcccgggccaaggctgtgcgggcctag

SEQ ID NO: 161245 - DNA, 381 bp, synthetic construct
  misc_feature 1..381: note = Description of Artificial Sequence: Synthetic coding sequence
  source 1..381: mol_type = other DNA
atgcctggagaggccacagagaccgtgcctgccacagagcaggagctgccccagccccaggccgagactggaagtggcacagaaagtgacagtgatgagagcgtgcctgagctggaggagcaggacagcacccaggccaccacccagcaggcccagctggccgctgctgctgagattgatgaggagcctgtgtccaaggccaagcagagccgctctgagaagaaggccaggaaggccatgagcaagctgggcctgcggcaggtgactggagtgaccagggtgaccatcaggaagagcaagaacatcctcttcgtcatcaccaagccagatgtgtacaagagccctgccagtgacacctacatcgtgtttggagaggcctag

SEQ ID NO: 161246 - DNA, 648 bp, synthetic construct; identical to SEQ ID NO: 161239
  misc_feature 1..648: note = Description of Artificial Sequence: Synthetic coding sequence
  source 1..648: mol_type = other DNA

SEQ ID NO: 161247 - DNA, 2778 bp, synthetic construct
  misc_feature 1..2778: note = Description of Artificial Sequence: Synthetic coding sequence
  source 1..2778: mol_type = other DNA
atgcctggagaggccacagagaccgtgcctgccacagagcaggagctgccccagccccaggccgagacagctgtgctgcccatgagcagcgccctgtctgtgacagctgccctgggccagcccggccccaccctgcccccaccctgcagccctgccccccagcagtgccccctgtctgctgccaaccaggccagccccttccccagccccagcaccatcgccagcacccccctggaggtgcccttcccccagagcagcagcggcacagccctgcccctgggcacagcccctgaggcccccaccttcctgcccaacctgattggcccccccatcagccctgctgccctggccctggccagccccatgattgcccccaccctgaagggcacccccagcagcagcgcccccctggccctggtggccctggccccccacagcgtgcagaagagcagcgccttcccccccaacctgctgaccagccccccatctgtggccgtggccgagagcggcagcgtcatcaccctgagcgcccccatcgcccccagcgagcccaagaccaacctgaacaaggtgcccagcgaggtggtgcccaaccccaagggcacccccagccccccctgcatcgtgtccacagtgccctaccactgtgtgacccccatggccagcatccagagcggcgtggccagcctgccccagaccacccccaccaccaccctggccatcgccagcccccaggtgaaggacaccaccatcagctctgtgctgatcagcccccagaaccctggcagcctgagcctgaagggccctgtgagccccccagctgccctgagcctgagcacccagagcctgcctgtggtgaccagcagccagaagacagctggccccaacaccccaccagacttccccatcagcctgggcagccacctggcccccctgcaccagagcagctttggatctgtgcagctgctgggccagacaggccccagcgccctgagtgaccccaccgtgaagaccatctctgtggaccacagcagcactggagccagctaccccagccagaggagcgtcatcccccccctgcccagcagaaatgaggtggtgcctgccaccgtggccgccttccctgtggtggcccccagcgtggacaagggccccagcaccatcagcagcatcacctgcagccccagcggcagcctgaatgtggccaccagcttcagcctgagccccaccaccagcctcatcctgaagagcagccccaatgccacctaccactaccccctggtggcccagatgcctgtgtcctctgtgggcaccacccccctggtggtgaccaacccctgcaccatcgctgctgcccccaccaccacctttgaggtggccacctgtgtgtccccacccatgagcagcggccccatcagcaacatcgagcccaccagccctgctgccctggtgatggcccctgtggcccccaaggagcccagcacccaggtggccaccaccctgcgcatccctgtgtccccacccctgcctgaccctgaggacctgaagaacctgcccagctctgtgctggtgaagttccccacccagaaggacctgcagacagtgcctgccagcctggagggcgcccccttcagccctgcccaggccggcctgaccaccaagaaggaccccaccgtgctgcccctggtgcaggccgcccccaagaacagccccagcttccagagcaccagcagcagccctgagatccccctgagccctgaggccaccctggccaagaagagcctgggggagcccctgcccatcgtggccgccttccccctggagagcgctgaccctgctggggtggcccccaccacagccaaggctgctgcctttgagaaggtgctgcccaagccagagagcgcctctgtgtctgctgcccccagcccccctgtgtccctgcccctggcccccagccctgtgcccaccctgccccccaagcagcagttcctgcccagcagccctggcctggtgctggagagccccagcaagcccctggccccagcagatgaagatgagctgctgcccctcatccccccagagcccatctctggaggagtgcccttccagagcgtgctggtgaacatgcccacccccaagtctgctggcatccctgtgcccaccccatctgccaagcagcctgtgaccaagaacaacaagggcagcggcacagaaagtgacagtgatgagagcgtgcctgagctggaggagcaggacagcacccaggccaccacccagcaggcccagctggccgctgctgctgagattgatgaggagcctgtgtccaaggccaagcagagccgctctgagaagaaggccaggaaggccatgagcaagctgggcctgcggcaggtgactggagtgaccagggtgaccatcaggaagagcaagaacatcctcttcgtcatcaccaagccagatgtgtacaagagccctgccagtgacacctacatcgtgtttggagaggccaagattgaggacctgagccagcaggcccagctggccgctgctgagaagttcaaggtgcagggcgaggccgtgagcaacatccaggagaacacccagacccccaccgtgcaggaggagagcgaggaggaggaggtggatgagaccggggtggaggtgaaggacatcgagctggtgatgagccaggccaacgtgtcccgggccaaggctgtgcgggccctgaagaacaacagcaatgacatcgtgaatgccatcatggagctgaccatgtag

SEQ ID NO: 161248 - DNA, 306 bp, synthetic construct
  misc_feature 1..306: note = Description of Artificial Sequence: Synthetic coding sequence
  source 1..306: mol_type = other DNA
atgcccctggaggatgaggtggtgcccccccaggtgctgtctgagcccaatgaggaggccggggccgccctgagccccctgcctgaggtgcccccctggacaggagaggtgtccccagcccagagagatggaggagccctgggccggggcccctgggacagcagtgacagaagtgccctgctgaagagcaagctgcgggccctgctgacagcccccaggagcctgcggcgcagcagctgctttggaggccgcatggaccgcatcggggcccagagcggcctgggctgcaacagcttccgctactag

SEQ ID NO: 161249 - DNA, 456 bp, synthetic construct
  misc_feature 1..456: note = Description of Artificial Sequence: Synthetic coding sequence
  source 1..456: mol_type = other DNA
atgagcagcttcagcaccaccaccgtgtccttcctgctgctgctggccttccagctgctgggccagacccgggccaaccccatgtacaatgctgtgtccaatgctgacctgatggacttcaagaacctgctggaccacctggaggagaagatgcccctggaggatgaggtggtgcccccccaggtgctgtctgagcccaatgaggaggccggggccgccctgagccccctgcctgaggtgcccccctggacaggagaggtgtccccagcccagagagatggaggagccctgggccggggcccctgggacagcagtgacagaagtgccctgctgaagagcaagctgcgggccctgctgacagcccccaggagcctgcggcgcagcagctgctttggaggccgcatggaccgcatcggggcccagagcggcctgggctgcaacagcttccgctactag

SEQ ID NO: 161250 - DNA, 768 bp, synthetic construct
  misc_feature 1..768: note = Description of Artificial Sequence: Synthetic coding sequence
  source 1..768: mol_type = other DNA
atggagcagtatgccaacaacctggaggagctggtggaggagaggacccaggcctacctggaggagaagaggaaggccgaggccctgctgtaccagatcctgccccacagcgtggccgagcagctgaagagaggagaaacagtgcaggccgaggcctttgattctgtgaccatctacttcagtgacatcgtgggcttcaccgccctgtctgctgagagcacccccatgcaggtggtgaccctgctgaatgacctgtacacctgctttgatgctgtgattgacaactttgatgtgtacaaggtggagaccatcggagatgcctacatggtggtgtctggcctgcctgtgagaaatggccgcctgcacgcctgtgaggtggccaggatggccctggccctgctggatgctgtgcgctccttccgcatccgccaccggccccaggagcagctgcggctgcgcatcggcatccacacaggccctgtgtgtgccggcgtggtgggcctgaagatgccccgctactgcctgtttggagacacagtgaacacagccagcaggatggagagcaatggagaggccctgaagatccacctgagcagcgagaccaaggctgtgctggaggagtttggaggctttgagctggagctgcggggagatgtggagatgaaggtggagggggaggccagcgccctgcccaccttctggggcccccggggcagctaccccagccaggccgccaatgccacccccatccccaaggccctgatctag

SEQ ID NO: 161251 - DNA, 3186 bp, synthetic construct
  misc_feature 1..3186: note = Description of Artificial Sequence: Synthetic coding sequence
  source 1..3186: mol_type = other DNA
atgcctggccccaggaggcctgctggcagccggctgcggctgctgctgctgctgctgctgccccccctgctgctgctgctgcggggcagccacgccggcaacctgactgtggccgtggtgctgcccctggccaacaccagctacccctggagctgggcccgggtgggccctgctgtggagctggccctggcccaggtgaaggcccggccagacctgctgcccggctggacagtgaggacagtgctgggcagcagtgaaaatgccctgggcgtgtgcagcgacacagctgcccccctggccgctgtggacctgaagtgggagcacaacccagctgtgttcctgggccctggctgtgtgtatgctgctgcccctgtgggccgcttcaccgcccactggagggtgcccctgctgacagctggggccccagccctgggcttcggcgtgaaggatgaatatgccctgaccacccgggccggccccagctatgccaagctgggggactttgtggccgccctgcaccggcggctgggctgggagcggcaggccctgatgctgtatgcctacagacctggagatgaggagcactgcttcttcctggtggagggcctcttcatgagggtgcgggaccggctgaacatcaccgtggaccacctggagtttgctgaagatgacctgagccactacacccggctgctgcggaccatgcccaggaagggccgggtcatctacatctgcagcagcccagatgccttccgcaccctgatgctgctggccctggaggccggcctgtgtggggaggactatgtgttcttccacctggacatcttcggccagagcctgcagggcggccagggccctgccccccggcggccctgggagagaggagatggccaggatgtgtctgcccggcaggccttccaggccgccaagatcatcacctacaaggaccctgacaaccctgagtacctggagttcctgaagcagctgaagcacctggcctatgagcagttcaacttcaccatggaggatggcctggtgaacaccatcccagccagcttccatgatggcctgctgctgtacatccaggccgtgacagagaccctggcccacggcggcaccgtgacagatggagagaacatcacccagaggatgtggaacagaagcttccagggcgtgacaggctacctgaagattgacagcagcggggaccgggagacagacttcagcctgtgggacatggaccctgaaaatggagccttccgggtggtgctgaactacaacggcaccagccaggagctggtggccgtgtctggcaggaagctgaactggcccctgggctacccacctccagacatccccaagtgtggctttgacaatgaagatcctgcctgcaaccaggaccacctgagcaccctggaggtgctggccctggtgggcagcctgagcctgctgggcatcctgattgtgtccttcttcatctacaggaagatgcagctggagaaggagctggccagcgagctgtggagggtgcgctgggaggatgtggagcccagcagcctggagcggcacctgcggtctgctggcagccggctgaccctgagcggccggggcagcaactacggcagcctgctgaccacagagggccagttccaggtgtttgccaagacagcctactacaagggcaacctggtggccgtgaagagggtgaacaggaagagaattgagctgaccaggaaggtgctgtttgagctgaagcacatgagagatgtgcagaatgagcacctgaccaggtttgtgggcgcctgcacagatcctcccaacatctgcatcctgacagagtactgcccccggggcagcctgcaggacatcctggagaatgaaagcatcaccctggactggatgttccgctacagcctgaccaatgacatcgtgaagggcatgctgttcctgcacaacggggccatctgcagccacggcaacctgaagagcagcaactgtgtggtggatggccgctttgtgctgaagatcacagattatggcctggagagcttccgggacctggaccctgagcagggccacacagtgtatgccaagaagctgtggacagcccctgagctgctgaggatggccagcccccctgtgcggggcagccaggccggagatgtgtacagctttggcatcatcctgcaggagatcgccctgcggtctggagtcttccacgtggagggcctggacctgagccccaaggagatcatcgagcgggtgaccagaggagagcagccccccttccggcccagcctggccctgcagagccacctggaggagctgggcctgctgatgcagcgctgctgggccgaggacccccaggagcggccccccttccagcagatccggctgaccctgaggaagttcaaccgggagaacagcagcaacatcctggacaacctgctgagcaggatggagcagtatgccaacaacctggaggagctggtggaggagaggacccaggcctacctggaggagaagaggaaggccgaggccctgctgtaccagatcctgccccacagcgtggccgagcagctgaagagaggagagaccgtgcaggccgaggcctttgacagcgtgaccatctacttcagtgacatcgtgggcttcaccgccctgtctgctgagagcacccccatgcaggtggtgaccctgctgaatgacctgtacacctgctttgatgctgtgattgacaactttgatgtgtacaaggtggagaccatcggagatgcctacatggtggtgtctggcctgcctgtgagaaatggccgcctgcacgcctgtgaggtggccaggatggccctggccctgctggatgctgtgcgctccttccgcatccgccaccggccccaggagcagctgcggctgagaattggcatccacactggacctgtgtgtgccggcgtggtgggcctgaagatgccccgctactgcctgtttggagacacagtgaacacagccagcaggatggagagcaatggagaggccctgaagatccacctgagcagcgagaccaaggctgtgctggaggagtttggaggctttgagctggagctgcggggagatgtggagatgaagggcaagggcaaggtgaggacctactggctgctgggggagcggggcagcagcacccggggctag

SEQ ID NO: 161252 - DNA, 1623 bp, synthetic construct
  misc_feature 1..1623: note = Description of Artificial Sequence: Synthetic coding sequence
  source 1..1623: mol_type = other DNA
aagatgcagctggagaaggagctggccagcgagctgtggagggtgcgctgggaggatgtggagcccagcagcctggagcggcacctgcggtctgctggcagccggctgaccctgagcggccggggcagcaactacggcagcctgctgaccacagagggccagttccaggtgtttgccaagacagcctactacaagatgagagatgtgcagaatgagcacctgaccaggtttgtgggcgcctgcacagacccccccaacatctgcatcctgacagagtactgcccccggggcagcctgcaggacatcctggagaatgaaagcatcaccctggactggatgttccgctacagcctgaccaatgacatcgtgaagggcatgctgttcctgcacaatggagccatctgcagccacggcaacctgaagagcagcaactgtgtggtggatggccgctttgtgctgaagatcacagattatggcctggagagcttccgggacctggaccctgagcagggccacacagtgtatgccaagaagctgtggacagcccctgagctgctgaggatggccagcccccctgtgcggggcagccaggccggagatgtgtacagctttggcatcatcctgcaggagatcgccctgcggtctggagtcttccacgtggagggcctggacctgagccccaaggagatcatcgagcgggtgaccagaggagagcagccccccttccggcccagcctggccctgcagagccacctggaggagctgggcctgctgatgcagcgctgctgggccgaggacccccaggagaggcctcccttccagcagatccggctgaccctgaggaagttcaaccgggagaacagcagcaacatcctggacaacctgctgagcaggatggagcagtatgccaacaacctggaggagctggtggaggagaggacccaggcctacctggaggagaagaggaaggccgaggccctgctgtaccagatcctgccccacagcgtggccgagcagctgaagagaggagaaacagtgcaggccgaggcctttgattctgtgaccatctacttcagtgacatcgtgggcttcaccgccctgtctgctgagagcacccccatgcaggtggtgaccctgctgaatgacctgtacacctgctttgatgctgtgattgacaactttgatgtgtacaaggtggagaccatcggagatgcctacatggtggtgtctggcctgcctgtgagaaatggccgcctgcacgcctgtgaggtggccaggatggccctggccctgctggatgctgtgcgctccttccgcatccgccaccggccccaggagcagctgcggctgcgcatcggcatccacacaggccctgtgtgtgccggcgtggtgggcctgaagatgccccgctactgcctgtttggagacacagtgaacacagccagcaggatggagagcaatggagaggccctgaagatccacctgagcagcgagaccaaggctgtgctggaggagtttggaggctttgagctggagctgcggggagatgtggagatgaagggcaagggcaaggtgaggacctactggctgctgggggagcggggcagcagcacccggggctag

SEQ ID NO: 161253 - DNA, 3144 bp, synthetic construct
  misc_feature 1..3144: note = Description of Artificial Sequence: Synthetic coding sequence
  source 1..3144: mol_type = other DNA
atggccctgcccagcctgctgctgctggtggccgccctggccggcggcgtgcggcccccaggggccaggaacctgaccctggccgtggtgctgcctgagcacaacctgtcctatgcctgggcctggccccgggtgggccctgctgtggccctggccgtggaggccctgggccgggccctgcctgtggacctgcgctttgtgtcctctgagctggagggcgcctgcagcgagtacctggcccccctgtctgctgtggacctgaagctgtaccatgaccctgacctgctgctgggccctggctgtgtgtacccagctgcctctgtggccaggtttgccagccactggaggctgcccctgctgacagctggagctgtggccagcggcttcagcgccaagaatgaccactaccgcaccctggtgaggacaggccccagcgcccccaagctgggggagtttgtggtgaccctgcacggccacttcaactggacagcccgggccgccctgctgtacctggatgccaggacagatgaccggccccactacttcaccatcgagggcgtgtttgaggccctgcagggcagcaacctgtctgtgcagcaccaggtgtatgcccgggagcccggcggccctgagcaggccacccacttcatccgggccaacggcagaattgtgtacatctgtggccccctggagatgctgcacgagatcctgctgcaggcccagcgggagaacctgaccaatggagactatgtgttcttctacctggatgtgtttggagagagcctgcgggccggccccacccgggccaccggccggccctggcaggacaacagaacccgggagcaggcccaggccctgcgggaggccttccagacagtgctggtgatcacctaccgggagccccccaaccctgagtaccaggagttccagaaccggctgctgatccgggccagagaagattttggagtggagctgggccccagcctgatgaacctgattgctggctgcttctatgatggcatcctgctgtatgcagaggtgctgaatgagaccatccaggagggcggcaccagagaagatggcctgcgcatcgtggagaagatgcagggccgccgctaccacggcgtgacaggcctggtggtgatggacaagaacaatgaccgggagacagactttgtgctgtgggccatgggagacctggacagcggggacttccagcctgctgcccactacagcggggctgagaagcagatctggtggacaggccggcccatcccctgggtgaagggggccccacccagcgacaaccccccctgtgcctttgacctggatgaccccagctgtgacaagacccccctgagcaccctggccatcgtggccctgggcaccggcatcaccttcatcatgtttggagtgagcagcttcctgatcttcaggaagctgatgctggagaaggagctggcctccatgctgtggaggatccgctgggaggagctgcagtttggaaacagcgagcgctaccacaagggagctggcagccggctgaccctgagcctgcggggcagcagctatggcagcctgatgacagcccacggcaagtaccagatctttgccaacacaggccacttcaagggaaatgtggtggccatcaagcacgtgaacaagaagagaattgagctgacccggcaggtgctgtttgagctgaagcacatgagagatgtgcagttcaaccacctgacccgcttcatcggggcctgcattgatcctcccaacatctgcatcgtgacagagtactgcccccggggcagcctgcaggacatcctggagaatgacagcatcaacctggactggatgttccgctacagcctcatcaatgacctggtgaagggcatggccttcctgcacaacagcatcatcagcagccacggcagcctgaagagcagcaactgtgtggtggacagcagatttgtgctgaagatcacagattatggcctggccagcttccgcagcacagctgagccagatgacagccacgccctgtatgccaagaagctgtggacagcccctgagctgctgagcggcaaccccctgcccaccaccggcatgcagaaggcagatgtgtacagctttggcatcatcctgcaggagatcgccctgcggagcggccccttctacctggagggcctggacctgagccccaaggagatcgtgcagaaggtgagaaatggccagaggccctacttccggcccagcattgacaggacccagctgaatgaggagctggtgctgctgatggagcgctgctgggcccaggaccctgctgagaggccagactttggccagatcaagggcttcatccgccgcttcaacaaggagggcggcaccagcatcctggacaacctgctgctgaggatggagcagtatgccaacaacctggagaagctggtggaggagaggacccaggcctacctggaggagaagaggaaggccgaggccctgctgtaccagatcctgccccacagcgtggccgagcagctgaagagaggagaaacagtgcaggccgaggcctttgattctgtgaccatctacttcagtgacatcgtgggcttcaccgccctgtctgctgagagcacccccatgcaggtggtgaccctgctgaatgacctgtacacctgctttgatgccatcatcgacaactttgatgtgtacaaggtggagaccatcggagatgcctacatggtggtgtctggcctgcctggaagaaatggccagagacatgcccctgagatcgccaggatggccctggccctgctggatgctgtgtcctccttccgcatccgccaccggccccatgaccagctgcggctgcgcatcggcgtgcacacaggccctgtgtgtgccggcgtggtgggcctgaagatgccccgctactgcctgtttggagacacagtgaacacagccagcaggatggagagcaatggccaggccctgaagatccacgtgagcagcaccaccaaggatgccctggatgagctgggctgcttccagctggagctgcggggagatgtggagatgaagggcaagggcaagatgaggacctactggctgctgggggagaggaaaggacctcctggcctgctgtag

SEQ ID NO: 161254 - DNA, 1626 bp, synthetic construct
  misc_feature 1..1626: note = Description of Artificial Sequence: Synthetic coding sequence
  source 1..1626: mol_type = other DNA
atgcccagcctgctggtgctgaccttcagcccctgtgtgctgctgggctgggccctgctggccggcggcaccggcggcggcggcgtgggcggcggcggcggcggggccggcatcggcggcggccggcaggagcgggaggccctgcccccccagaagattgaggtgctggtgctgctgccccaggatgacagctacctgttcagcctgaccagggtgcggcctgccatcgagtatgccctgcggtctgtggagggcaatggcaccggccggcggctgctgcccccaggcacccgcttccaggtggcctatgaggacagcgactgtggcaacagagccctcttcagcctggtggacagagtggccgccgcccggggggccaagccagacctgatcctgggccctgtgtgtgaatatgctgctgcccctgtggcccggctggccagccactgggacctgcccatgctgtctgctggggccctggccgccggcttccagcacaaggacagcgagtacagccacctgaccagggtggccccagcctatgccaagatgggagagatgatgctggccctcttccgccaccaccactggagccgggccgccctggtgtacagtgatgacaagctggagaggaactgctacttcaccctggagggcgtgcatgaggtgttccaggaggagggcctgcacaccagcatctacagctttgatgagaccaaggacctggacctggaggacatcgtgaggaacatccaggccagcgagcgggtggtgatcatgtgtgccagcagtgacaccatccgcagcatcatgctggtggcccacagacatggcatgaccagcggggactatgccttcttcaacatcgagctgttcaacagcagcagctatggagatggctcctggaagagaggagacaagcatgactttgaggccaagcaggcctacagcagcctgcagacagtgaccctgctgaggacagtgaagccagagtttgagaagttctccatggaggtgaagagctctgtggagaagcagggcctgaacatggaggactatgtgaacatgtttgtggagggcttccatgatgccatcctgctgtatgtgctggccctgcacgaggtgctgcgggccggctacagcaagaaggatggcggcaagatcatccagcagacctggaacagaacatttgagggcattgctggccaggtgtccattgatgccaatggagacagatatggagacttctctgtgattgccatgacagatgtggaggccggcacccaggaggtgattggagactactttgggaaggagggccgctttgagatgaggcccaacgtgaagtacccctggggccccctgaagctgagaattgatgaaaatcgcatcgtggagcacaccaacagcagcccctgcaagagcagcggcggcctggaggagagcgctgtgactggaattgtggtgggcgccctgctgggcgccggcctgctgatggccttctacttcttcaggaagaagtaccgcatcaccatcgagaggaggacccagcaggaggagagcaacctgggcaagcaccgggagctgagagaagattccatccgcagccacttctctgtggcctag

SEQ ID NO: 161255 - DNA, 1623 bp, synthetic construct
  misc_feature 1..1623: note = Description of Artificial Sequence: Synthetic coding sequence
  source 1..1623: mol_type = other DNA
atgcccagcctgctggtgctgaccttcagcccctgtgtgctgctgggctgggccctgctggccggcggcaccggcggcggcggcgtgggcggcggcggcggcggggccggcatcggcggcggccggcaggagcgggaggccctgcccccccagaagattgaggtgctggtgctgctgccccaggatgacagctacctgttcagcctgaccagggtgcggcctgccatcgagtatgccctgcggtctgtggagggcaatggcaccggccggcggctgctgcccccaggcacccgcttccaggtggcctatgaggacagcgactgtggcaacagagccctcttcagcctggtggacagagtggccgccgcccggggggccaagccagacctgatcctgggccctgtgtgtgaatatgctgctgcccctgtggcccggctggccagccactgggacctgcccatgctgtctgctggggccctggccgccggcttccagcacaaggacagcgagtacagccacctgaccagggtggccccagcctatgccaagatgggagagatgatgctggccctcttccgccaccaccactggagccgggccgccctggtgtacagtgatgacaagctggagaggaactgctacttcaccctggagggcgtgcatgaggtgttccaggaggagggcctgcacaccagcatctacagctttgatgagaccaaggacctggacctggaggacatcgtgaggaacatccaggccagcgagcgggtggtgatcatgtgtgccagcagtgacaccatccgcagcatcatgctggtggcccacagacatggcatgaccagcggggactatgccttcttcaacatcgagctgttcaacagcagcagctatggagatggctcctggaagagaggagacaagcatgactttgaggccaagcaggcctacagcagcctgcagacagtgaccctgctgaggacagtgaagccagagtttgagaagttctccatggaggtgaagagctctgtggagaagcagggcctgaacatggaggactatgtgaacatgtttgtggagggcttccatgatgccatcctgctgtatgtgctggccctgcacgaggtgctgcgggccggctacagcaagaaggatggcggcaagatcatccagcagacctggaacagaacatttgagggcattgctggccaggtgtccattgatgccaatggagacagatatggagacttctctgtgattgccatgacagatgtggaggccggcacccaggaggtgattggagactactttgggaaggagggccgctttgagatgaggcccaacgtgaagtacccctggggccccctgaagctgagaattgatgaaaatcgcatcgtggagcacaccaacagcagcccctgcaagagctgtggcctggaggagagcgctgtgacaggcatcgtggtgggcgccctgctgggcgccggcctgctgatggccttctacttcttcaggaagaagtaccgcatcaccattgaaagaaggacccagcaggaggagagcaacctgggcaagcaccgggagctgcgggaggacagcatccgcagccacttctctgtggcctag

SEQ ID NO: 161256 - DNA, 975 bp, synthetic construct
  misc_feature 1..975: note = Description of Artificial Sequence: Synthetic coding sequence
  source 1..975: mol_type = other DNA
atggagcccagcgccctgggcccctggagcctcttcccagacctggccccccgggaccaggagggccaggtgctggccccccggcgctgcttccggcgggagtgtggccagaatgagaaggtggtgatcatgtgtgccagcagtgacaccatccgcagcatcatgctggtggcccacagacatggcatgaccagcggggactatgccttcttcaacatcgagctgttcaacagcagcagctatggagatggctcctggaagagaggagacaagcatgactttgaggccaagcaggcctacagcagcctgcagacagtgaccctgctgaggacagtgaagccagagtttgagaagttctccatggaggtgaagagctctgtggagaagcagggcctgaacatggaggactatgtgaacatgtttgtggagggcttccatgatgccatcctgctgtatgtgctggccctgcacgaggtgctgcgggccggctacagcaagaaggatggcggcaagatcatccagcagacctggaacagaacatttgagggcattgctggccaggtgtccattgatgccaatggagacagatatggagacttctctgtgattgccatgacagatgtggaggccggcacccaggaggtgattggagactactttgggaaggagggccgctttgagatgaggcccaacgtgaagtacccctggggccccctgaagctgagaattgatgaaaatcgcatcgtggagcacaccaacagcagcccctgcaagagctgtggcctggaggagagcgctgtgacaggcatcgtggtgggcgccctgctgggcgccggcctgctgatggccttctacttcttcaggaagaagtaccgcatcaccattgaaagaaggacccagcaggaggagagcaacctgggcaagcaccgggagctgcgggaggacagcatccgcagccacttctctgtggcctag

SEQ ID NO: 161257 - DNA, 915 bp, synthetic construct
  misc_feature 1..915: note = Description of Artificial Sequence: Synthetic coding sequence
  source 1..915: mol_type = other DNA
atgagcagcaccctgcctgccctgctgtgtgtgggcctgtgcctgagccagaggatcagcgcccagcagcagaccctgcccaagcccttcatctgggccgagccccacttcatggtgcccaaggagaagcaggtgaccatctgctgccagggcaactatggagctgtggagtaccagctgcactttgagggcagcctgtttgctgtggaccggcccaagcccccagagcgcatcaacaaggtgaagttctacatcccagacatgaacagcaggatggccggccagtacagctgcatctacagagtgggggagctgtggagcgagcccagcaacctgctggacctggtggtgacagagatgtatgacacccccaccctgtctgtgcaccctggccctgaggtgatcagcggggagaaggtgaccttctactgccgcctggacacagccacctccatgttcctgctgctgaaggagggccgcagcagccacgtgcagaggggctacggcaaggtgcaggccgagttccccctgggccctgtgaccacagcccaccggggcacctaccgctgcttcggcagctacaacaaccacgcctggagcttccccagcgagcctgtgaagctgctggtgactggagacatcgagaacaccagcctggcccctgaggaccccaccttccctgctgacacctggggcacctacctgctgaccacagagaccggcctgcagaaggaccacgccctgtgggaccacacagcccagaacctgctgaggatgggcctggccttcctggtgctggtggccctggtgtggttcctggtggaggactggctgagcaggaagaggacccgggagcgggccagccgggccagcacctgggagggcagaagaaggctgaacacccagaccctgtag

SEQ ID NO: 161258 - DNA, 864 bp, synthetic construct
  misc_feature 1..864: note = Description of Artificial Sequence: Synthetic coding sequence
  source 1..864: mol_type = other DNA
atgagcagcaccctgcctgccctgctgtgtgtgggcctgtgcctgagccagaggatcagcgcccagcagcagaccctgcccaagcccttcatctgggccgagccccacttcatggtgcccaaggagaagcaggtgaccatctgctgccagggcaactatggagctgtggagtaccagctgcactttgagggcagcctgtttgctgtggaccggcccaagcccccagagcgcatcaacaaggtgaagttctacatcccagacatgaacagcaggatggccggccagtacagctgcatctacagagtgggggagctgtggagcgagcccagcaacctgctggacctggtggtgacagagatgtatgacacccccaccctgtctgtgcaccctggccctgaggtgatcagcggggagaaggtgaccttctactgccgcctggacacagccacctccatgttcctgctgctgaaggagggccgcagcagccacgtgcagaggggctacggcaaggtgcaggccgagttccccctgggccctgtgaccacagcccaccggggcacctaccgctgcttcggcagctacaacaaccacgcctggagcttccccagcgagcctgtgaagctgctggtgactggagacatcgagaacaccagcctggcccctgaggaccccaccttcccagaccacgccctgtgggaccacacagcccagaacctgctgaggatgggcctggccttcctggtgctggtggccctggtgtggttcctggtggaggactggctgagcaggaagaggacccgggagcgggccagccgggccagcacctgggagggcagaagaaggctgaacacccagaccctgtag

SEQ ID NO: 161259 - DNA, 630 bp, synthetic construct
  misc_feature 1..630: note = Description of Artificial Sequence: Synthetic coding sequence
  source 1..630: mol_type = other DNA
atgagcagcaccctgcctgccctgctgtgtgtgggcctgtgcctgagccagaggatcagcgcccagcagcagatgtatgacacccccaccctgtctgtgcaccctggccctgaggtgatctctggagagaaggtgaccttctactgccgcctggacacagccacctccatgttcctgctgctgaaggagggccgcagcagccacgtgcagaggggctacggcaaggtgcaggccgagttccccctgggccctgtgaccacagcccaccggggcacctaccgctgcttcggcagctacaacaaccacgcctggagcttccccagcgagcctgtgaagctgctggtgactggagacatcgagaacaccagcctggcccctgaggaccccaccttccctgctgacacctggggcacctacctgctgaccacagaaacaggcctgcagaaggaccacgccctgtgggaccacacagcccagaacctgctgaggatgggcctggccttcctggtgctggtggccctggtgtggttcctggtggaggactggctgagcaggaagaggacccgggagcgggccagccgggccagcacctgggagggcagaagaaggctgaacacccagaccctgtag

SEQ ID NO: 161260 - DNA, 594 bp, synthetic construct
  misc_feature 1..594: note = Description of Artificial Sequence: Synthetic coding sequence
  source 1..594: mol_type = other DNA
atgagcagcaccctgcctgccctgctgtgtgtggagatgtatgacacccccaccctgtctgtgcaccctggccctgaggtgatctctggagagaaggtgaccttctactgccgcctggacacagccacctccatgttcctgctgctgaaggagggccgcagcagccacgtgcagaggggctacggcaaggtgcaggccgagttccccctgggccctgtgaccacagcccaccggggcacctaccgctgcttcggcagctacaacaaccacgcctggagcttccccagcgagcctgtgaagctgctggtgactggagacatcgagaacaccagcctggcccctgaggaccccaccttccctgctgacacctggggcacctacctgctgaccacagaaacaggcctgcagaaggaccacgccctgtgggaccacacagcccagaacctgctgaggatgggcctggccttcctggtgctggtggccctggtgtggttcctggtggaggactggctgagcaggaagaggacccgggagcgggccagccgggccagcacctgggagggcagaagaaggctgaacacccagaccctgtag

SEQ ID NO: 161261 - DNA, 912 bp, synthetic construct
  misc_feature 1..912: note = Description of Artificial Sequence: Synthetic coding sequence
  source 1..912: mol_type = other DNA
atgagcagcaccctgcctgccctgctgtgtgtgggcctgtgcctgagccagaggatcagcgcccagcagcagaccctgcccaagcccttcatctgggccgagccccacttcatggtgcccaaggagaagcaggtgaccatctgctgccagggcaactatggagctgtggagtaccagctgcactttgagggcagcctgtttgctgtggaccggcccaagcccccagagcgcatcaacaaggtgaagttctacatcccagacatgaacagcaggatggccggccagtacagctgcatctacagagtgggggagctgtggagcgagcccagcaacctgctggacctggtggtgacagagatgtatgacacccccaccctgtctgtgcaccctggccctgaggtgatcagcggggagaaggtgaccttctactgccgcctggacacagccacctccatgttcctgctgctgaaggagggccgcagcagccacgtgcagaggggctacggcaaggtgcaggccgagttccccctgggccctgtgaccacagcccaccggggcacctaccgctgcttcggcagctacaacaaccacgcctggagcttccccagcgagcctgtgaagctgctggtgactggagacatcgagaacaccagcctggcccctgaggaccccaccttcccagacacctggggcacctacctgctgaccacagaaacaggcctgcagaaggaccacgccctgtgggaccacacagcccagaacctgctgaggatgggcctggccttcctggtgctggtggccctggtgtggttcctggtggaggactggctgagcaggaagaggacccgggagcgggccagccgggccagcacctgggagggcagaagaaggctgaacacccagaccctgtag

SEQ ID NO: 161262 - DNA, 777 bp, synthetic construct
  misc_feature 1..777: note = Description of Artificial Sequence: Synthetic coding sequence
  source 1..777: mol_type = other DNA
atggcctggagggccctgcaccccctgctgctgctgctgctgctcttccctggcagccaggcccagagcaaggcccaggtgctgcagagcgtggccggccagaccctgactgtgcgctgccagtacccacccaccggcagcctgtatgagaagaagggctggtgcaaggaggccagcgccctggtgtgcatccggctggtgaccagcagcaagcccaggaccatggcctggaccagccgcttcaccatctgggatgatcctgatgctggcttcttcaccgtgaccatgacagacctgcgggaggaggacagcggccactactggtgccgcatctaccggcccagcgacaacagcgtgtccaagtctgtgcgcttctacctggtggtgtccccagccagcgccagcacccagacctcctggaccccccgggacctggtgagcagccagacccagacccagagctgtgtgcccccaacagctggggcccggcaggcccctgagagccccagcaccatccctgtgcccagccagccccagaacagcaccctgcggcccggccctgctgcccccatcgccctggtgcctgtgttctgtggcctgctggtggccaagagcctggtgctgagcgccctgctggtgtggtgggtgctgaggaacagacacatgcagcaccagggccgcagcctgctgcacccagcccagccccggccccaggcccaccgccacttccccctgagccaccgggcccctgggggcacctacggcggcaagccctag

SEQ ID NO: 161263 - DNA, 813 bp, synthetic construct
  misc_feature 1..813: note = Description of Artificial Sequence: Synthetic coding sequence
  source 1..813: mol_type = other DNA
atggcctggagggccctgcaccccctgctgctgctgctgctgctcttccctggcagccaggcccagagcaaggcccaggtgctgcagagcgtggccggccagaccctgactgtgcgctgccagtacccacccaccggcagcctgtatgagaagaagggctggtgcaaggaggccagcgccctggtgtgcatccggctggtgaccagcagcaagcccaggaccatggcctggaccagccgcttcaccatctgggatgatcctgatgctggcttcttcaccgtgaccatgacagacctgcgggaggaggacagcggccactactggtgccgcatctaccggcccagcgacaacagcgtgtccaagtctgtgcgcttctacctggtggtgtccccagccagcgccagcacccagacctcctggaccccccgggacctggtgagcagccagacccagacccagagctgtgtgcccccaacagctggggcccggcaggcccctgagagccccagcaccatccctgtgcccagccaccccagcagccccctgcctgtgcccctgcccagccggccccagaacagcaccctgcggcccggccctgctgcccccatcgccctggtgcctgtgttctgtggcctgctggtggccaagagcctggtgctgagcgccctgctggtgtggtgggtgctgaggaacagacacatgcagcaccagggccgcagcctgctgcacccagcccagccccggccccaggcccaccgccacttccccctgagccaccgggcccctgggggcacctacggcggcaagccctag

SEQ ID NO: 161264 - DNA, 831 bp, synthetic construct
  misc_feature 1..831: note = Description of Artificial Sequence: Synthetic coding sequence
  source 1..831: mol_type = other DNA
atggcctggagggccctgcaccccctgctgctgctgctgctgctcttccctggcagccaggcccagagcaaggcccaggtgctgcagagcgtggccggccagaccctgactgtgcgctgccagtacccacccaccggcagcctgtatgagaagaagggctggtgcaaggaggccagcgccctggtgtgcatccggctggtgaccagcagcaagcccaggaccatggcctggaccagccgcttcaccatctgggatgatcctgatgctggcttcttcaccgtgaccatgacagacctgcgggaggaggacagcggccactactggtgccgcatctaccggcccagcgacaacagcgtgtccaagtctgtgcgcttctacctggtggtgtccccagccagcgccagcacccagacctcctggaccccccgggacctggtgagcagccagacccagacccagagctgtgtgcccccaacagctggggcccggcaggcccctgagagccccagcaccatccctgtgcccagccagccccagaacagcaccctgcggcccggccctgctgcccccatcgccctggtgcctgtgttctgtggcctgctggtggccaagagcctggtgctgagcgccctgctggtgtggtggggagacatctggtggaagaccatgatggagctgcggagcctggacacccagaaggccacctgccacctgcagcaggtgacagacctgccctggacctctgtgagcagccctgtggagcgggagatcctgtaccacacagtggcccggaccaagatcagtgatgatgatgatgagcacaccctgtag

SEQ ID NO: 161265 - DNA, 606 bp, synthetic construct
  misc_feature 1..606: note = Description of Artificial Sequence: Synthetic coding sequence
  source 1..606: mol_type = other DNA
atggcctggatgctgctgctgatcctgatcatggtgcaccctggcagctgtgccctgtgggtgtcccagcccccagagatccgcaccctggagggcagcagcgccttcctgccctgcagcttcaatgccagccagggccgcctggccatcggctctgtgacctggttcagagatgaggtggtgcctgggaaggaggtgagaaatggcaccccagagttccggggccgcctggcccccctggccagcagccgcttcctgcatgaccaccaggccgagctgcacatcagagatgtgcggggccatgatgccagcatctacgtgtgccgggtggaggtgctgggcctgggcgtgggcactggaaatggcacccggctggtggtggagaaggagcacccccagctgggcgccggcaccgtgctgctgctgcgggccggcttctatgctgtgtccttcctgtctgtggccgtgggcagcacagtgtactaccagggcaagtgcctgacctggaagggcccccggcggcagctgcctgctgtggtgcctgcccccctgcccccaccctgtggcagcagcgcccacctgctgccccctgtgcctgggggctag

SEQ ID NO: 161266 - DNA, 498 bp, synthetic construct
  misc_feature 1..498: note = Description of Artificial Sequence: Synthetic coding sequence
  source 1..498: mol_type = other DNA
atggcctggatgctgctgctgatcctgatcatggtgcaccctggcagctgtgccctgtgggtgtcccagcccccagagatccgcaccctggagggcagcagcgccttcctgccctgcagcttcaatgccagccagggccgcctggccatcggctctgtgacctggttcagagatgaggtggtgcctgggaaggaggccgagctgcacatcagagatgtgcggggccatgatgccagcatctacgtgtgccgggtggaggtgctgggcctgggcgtgggcactggaaatggcacccggctggtggtggagaaggagcacccccagctgggcgccggcaccgtgctgctgctgcgggccggcttctatgctgtgtccttcctgtctgtggccgtgggcagcacagtgtactaccagggcaagtgccactgccacatgggcacccactgccacagcagtgatggcccccggggcgtcatccctgagccccgctgcccctag

SEQ ID NO: 161267 - DNA, 573 bp, synthetic construct
  misc_feature 1..573: note = Description of Artificial Sequence: Synthetic coding sequence
  source 1..573: mol_type = other DNA
atggcctggatgctgctgctgatcctgatcatggtgcaccctggcagctgtgccctgtgggtgtcccagcccccagagatccgcaccctggagggcagcagcgccttcctgccctgcagcttcaatgccagccagggccgcctggccatcggctctgtgacctggttcagagatgaggtggtgcctgggaaggaggtgagaaatggcaccccagagttccggggccgcctggcccccctggccagcagccgcttcctgcatgaccaccaggccgagctgcacatcagagatgtgcggggccatgatgccagcatctacgtgtgccgggtggaggtgctgggcctgggcgtgggcactggaaatggcacccggctggtggtggagaaggagcacccccagctgggcgccggcaccgtgctgctgctgcgggccggcttctatgctgtgtccttcctgtctgtggccgtgggcagcacagtgtactaccagggcaagtgccactgccacatgggcacccactgccacagcagtgatggcccccggggcgtcatccctgagccccgctgcccctag

SEQ ID NO: 161268 - DNA, 534 bp, synthetic construct
  misc_feature 1..534: note = Description of Artificial Sequence: Synthetic coding sequence
  source 1..534: mol_type = other DNA
atggcctggatgctgctgctgatcctgatcatggtgcaccctggcagctgtgccctgtgggtgtcccagcccccagagatccgcaccctggagggcagcagcgccttcctgccctgcagcttcaatgccagccagggccgcctggccatcggctctgtgacctggttcagagatgaggtggtgcctgggaaggaggtgagaaatggcaccccagagttccggggccgcctggcccccctggccagcagccgcttcctgcatgaccaccaggccgagctgcacatcagagatgtgcggggccatgatgccagcatctacgtgtgccgggtggaggtgctgggcctgggcgtgggcactggaaatggcacccggctggtggtggagaaggagcacccccagctgggcgccggcaccgtgctgctgctgcgggccggcttctatgctgtgtccttcctgtctgtggccgtgggcagcacagtgtactaccagggcaagtatgccaagagcaccctgagcggcttcccccagctgtag

SEQ ID NO: 161269 - DNA, 573 bp, synthetic construct; identical to SEQ ID NO: 161267
  misc_feature 1..573: note = Description of Artificial Sequence: Synthetic coding sequence
  source 1..573: mol_type = other DNA

SEQ ID NO: 161270 - DNA, 606 bp, synthetic construct; identical to SEQ ID NO: 161265
  misc_feature 1..606: note = Description of Artificial Sequence: Synthetic coding sequence
  source 1..606: mol_type = other DNA

SEQ ID NO: 161271 - DNA, 534 bp, synthetic construct; identical to SEQ ID NO: 161268
  misc_feature 1..534: note = Description of Artificial Sequence: Synthetic coding sequence
  source 1..534: mol_type = other DNA

SEQ ID NO: 161272 - DNA, 498 bp, synthetic construct; identical to SEQ ID NO: 161266
  misc_feature 1..498: note = Description of Artificial Sequence: Synthetic coding sequence
  source 1..498: mol_type = other DNA

SEQ ID NO: 161273 - DNA, 573 bp, synthetic construct; identical to SEQ ID NO: 161267
  misc_feature 1..573: note = Description of Artificial Sequence: Synthetic coding sequence
  source 1..573: mol_type = other DNA

SEQ ID NO: 161274 - DNA, 606 bp, synthetic construct; identical to SEQ ID NO: 161265
  misc_feature 1..606: note = Description of Artificial Sequence: Synthetic coding sequence
  source 1..606: mol_type = other DNA

SEQ ID NO: 161275 - DNA, 573 bp, synthetic construct; identical to SEQ ID NO: 161267
  misc_feature 1..573: note = Description of Artificial Sequence: Synthetic coding sequence
  source 1..573: mol_type = other DNA

SEQ ID NO: 161276 - DNA, 498 bp, synthetic construct; identical to SEQ ID NO: 161266
  misc_feature 1..498: note = Description of Artificial Sequence: Synthetic coding sequence
  source 1..498: mol_type = other DNA

SEQ ID NO: 161277 - DNA, 498 bp, synthetic construct; identical to SEQ ID NO: 161266
  misc_feature 1..498: note = Description of Artificial Sequence: Synthetic coding sequence
  source 1..498: mol_type = other DNA

SEQ ID NO: 161278 - DNA, 498 bp, synthetic construct; identical to SEQ ID NO: 161266
  misc_feature 1..498: note = Description of Artificial Sequence: Synthetic coding sequence
  source 1..498: mol_type = other DNA

SEQ ID NO: 161279 - DNA, 606 bp, synthetic construct; identical to SEQ ID NO: 161265
  misc_feature 1..606: note = Description of Artificial Sequence: Synthetic coding sequence
  source 1..606: mol_type = other DNA

SEQ ID NO: 161280 - DNA, 606 bp, synthetic construct; identical to SEQ ID NO: 161265
  misc_feature 1..606: note = Description of Artificial Sequence: Synthetic coding sequence
  source 1..606: mol_type = other DNA

SEQ ID NO: 161281 - DNA, 534 bp, synthetic construct; identical to SEQ ID NO: 161268
  misc_feature 1..534: note = Description of Artificial Sequence: Synthetic coding sequence
  source 1..534: mol_type = other DNA

SEQ ID NO: 161282 - DNA, 534 bp, synthetic construct; identical to SEQ ID NO: 161268
  misc_feature 1..534: note = Description of Artificial Sequence: Synthetic coding sequence
  source 1..534: mol_type = other DNA

SEQ ID NO: 161283 - DNA, 606 bp, synthetic construct; identical to SEQ ID NO: 161265
  misc_feature 1..606: note = Description of Artificial Sequence: Synthetic coding sequence
  source 1..606: mol_type = other DNA

SEQ ID NO: 161284 - DNA, 534 bp, synthetic construct; identical to SEQ ID NO: 161268
  misc_feature 1..534: note = Description of Artificial Sequence: Synthetic coding sequence
  source 1..534: mol_type = other DNA

SEQ ID NO: 161285 - DNA, 573 bp, synthetic construct; identical to SEQ ID NO: 161267
  misc_feature 1..573: note = Description of Artificial Sequence: Synthetic coding sequence
  source 1..573: mol_type = other DNA

SEQ ID NO: 161286 - DNA, 606 bp, synthetic construct; identical to SEQ ID NO: 161265
  misc_feature 1..606: note = Description of Artificial Sequence: Synthetic coding sequence
  source 1..606: mol_type = other DNA

SEQ ID NO: 161287 - DNA, 498 bp, synthetic construct; identical to SEQ ID NO: 161266
  misc_feature 1..498: note = Description of Artificial Sequence: Synthetic coding sequence
  source 1..498: mol_type = other DNA

SEQ ID NO: 161288 - DNA, 534 bp, synthetic construct; identical to SEQ ID NO: 161268
  misc_feature 1..534: note = Description of Artificial Sequence: Synthetic coding sequence
  source 1..534: mol_type = other DNA

SEQ ID NO: 161289 - DNA, 573 bp, synthetic construct; identical to SEQ ID NO: 161267
  misc_feature 1..573: note = Description of Artificial Sequence: Synthetic coding sequence
  source 1..573: mol_type = other DNA

SEQ ID NO: 161290 - DNA, 534 bp, synthetic construct; identical to SEQ ID NO: 161268
  misc_feature 1..534: note = Description of Artificial Sequence: Synthetic coding sequence
  source 1..534: mol_type = other DNA

SEQ ID NO: 161291 - DNA, 606 bp, synthetic construct; identical to SEQ ID NO: 161265
  misc_feature 1..606: note = Description of Artificial Sequence: Synthetic coding sequence
  source 1..606: mol_type = other DNA

SEQ ID NO: 161292 - DNA, 573 bp, synthetic construct; identical to SEQ ID NO: 161267
  misc_feature 1..573: note = Description of Artificial Sequence: Synthetic coding sequence
  source 1..573: mol_type = other DNA

SEQ ID NO: 161293 - DNA, 498 bp, synthetic construct; identical to SEQ ID NO: 161266
  misc_feature 1..498: note = Description of Artificial Sequence: Synthetic coding sequence
  source 1..498: mol_type = other DNA

SEQ ID NO: 161294 - DNA, 498 bp, synthetic construct; identical to SEQ ID NO: 161266
  misc_feature 1..498: note = Description of Artificial Sequence: Synthetic coding sequence
  source 1..498: mol_type = other DNA

SEQ ID NO: 161295 - DNA, 534 bp, synthetic construct; identical to SEQ ID NO: 161268
  misc_feature 1..534: note = Description of Artificial Sequence: Synthetic coding sequence
  source 1..534: mol_type = other DNA

SEQ ID NO: 161296 - DNA, 573 bp, synthetic construct; identical to SEQ ID NO: 161267
  misc_feature 1..573: note = Description of Artificial Sequence: Synthetic coding sequence
  source 1..573: mol_type = other DNA

SEQ ID NO: 161297 - DNA, 486 bp, synthetic construct
  misc_feature 1..486: note = Description of Artificial Sequence: Synthetic coding sequence
  source 1..486: mol_type = other DNA
atggatgacatctacaaggctgctgtggagcagctgacagaggagcagaagaatgagttcaaggccgcctttgacatctttgtgctgggcgcagaagatggctgcatcagcaccaaggagctgggcaaggtgatgaggatgctgggccagaaccccaccccagaggagctgcaggagatgattgatgaggtggatgaagatggcagcggcaccgtggactttgatgagttcctggtgatgatggtgcgctgcatgaaggatgacagcaagggcaagtctgaggaggagctgagtgacctcttcaggatgtttgacaagaatgctgatggctacatcgacctggatgagctgaagatcatgctgcaggccaccggggagaccatcacagaagatgacatcgaggagctgatgaaggatggagacaagaacaatgatggaagaattgattatgatgagttcctggagttcatgaagggcgtggagtag

SEQ ID NO: 161298 - DNA, 315 bp, synthetic construct
  misc_feature 1..315: note = Description of Artificial Sequence: Synthetic coding sequence
  source 1..315: mol_type = other DNA
atgggcgcccaggaccggccccagtgccactttgatattgagatcaaccgggagcctgtgggccgcatcatgttccagctgttcagtgacatctgccccaagacctgcaagaacttcctgtgcctgtgcagcggggagaagggcctgggcaagaccaccgggaagaagctgtgctacaagggcagcaccttccaccgggtggtgaagaacttcatgatccagggcggggacttcagcgagggcaatggcaagggcggggagagcatctacggcggctacttcaaggaaaatgtggtgttctgcaagatgaagtag

SEQ ID NO: 161299 - DNA, 2805 bp, synthetic construct
  misc_feature 1..2805: note = Description of Artificial Sequence: Synthetic coding sequence
  source 1..2805: mol_type = other DNA
atggctgtgcagcccaaggagaccctgcagctggagagcgctgctgaggtgggctttgtgcgcttcttccagggcatgcctgagaagcccaccaccaccgtgcggctgtttgacagaggagacttctacacagcccacggggaggatgccctgctggccgcccgggaggtgttcaagacccagggcgtcatcaagtacatgggccctgctggggccaagaacctgcagagcgtggtgctgagcaagatgaactttgagagctttgtgaaggacctgctgctggtgcggcagtacagagtggaggtgtacaagaacagagctggcaacaaggccagcaaagaaaatgactggtacctggcctacaaggccagccctggcaacctgagccagtttgaggacatcctgtttggaaataatgacatgtctgccagcattggagtggtgggcgtgaagatgtctgctgtggatggccagaggcaggtgggcgtgggctacgtggacagcatccagaggaagctgggcctgtgtgagttcccagacaatgaccagttcagcaacctggaggccctgctgatccagatcggccccaaggaatgtgtgctgcccggcggggagacagctggggacatgggcaagctgcggcagatcatccagaggggcggcatcctgatcacagagaggaagaaggctgacttcagcaccaaggacatctaccaggacctgaaccggctgctgaagggcaagaagggggagcagatgaacagcgctgtgctgcctgagatggagaaccaggtggccgtgagcagcctgtctgctgtgatcaagttcctggagctgctgagtgatgacagcaactttggccagtttgagctgaccacctttgacttcagccagtacatgaagctggacattgctgctgtgcgggccctgaacctcttccagggctctgtggaggacaccaccggcagccagagcctggccgccctgctgaacaagtgcaagaccccccagggccagaggctggtgaaccagtggatcaagcagcccctgatggacaagaaccgcatcgaggagcggctgaacctggtggaggcctttgtggaggatgctgagctgcggcagaccctgcaggaggacctgctgcggcgcttcccagacctgaaccggctggccaagaagttccagaggcaggccgccaacctgcaggactgctaccgcctgtaccagggcatcaaccagctgcccaacgtcatccaggccctggagaagcatgagggcaagcaccagaagctgctgctggccgtgtttgtgacccccctgacagacctgcggagtgacttcagcaagttccaggagatgattgagaccaccctggacatggaccaggtggagaaccacgagttcctggtgaagcccagctttgaccccaacctgtctgagctgcgggagatcatgaatgacctggagaagaagatgcagagcaccctcatctctgctgcccgggacctgggcctggaccccgggaagcagatcaagctggacagcagcgcccagtttggctactacttccgggtgacctgcaaggaggagaaggtgctgaggaacaacaagaacttcagcacagtggacatccagaagaatggagtgaagttcaccaacagcaagctgaccagcctgaatgaggagtacaccaagaacaagacagaatatgaggaggcccaggatgccatcgtgaaggagatcgtgaacatcagcagcggctacgtggagcccatgcagaccctgaatgatgtgctggcccagctggatgctgtggtgtcctttgcccacgtgtccaatggagcccctgtgccctacgtgcggcctgccatcctggagaagggccagggccgcatcatcctgaaggccagcagacatgcctgtgtggaggtgcaggatgagatcgccttcatccccaatgatgtgtactttgagaaggacaagcagatgttccacatcatcaccggccccaacatgggcggcaagagcacctacatccggcagacaggagtgattgtgctgatggcccagatcggctgctttgtgccctgtgagagcgctgaggtgtccatcgtggactgcatcctggcccgggtgggcgctggggacagccagctgaagggcgtgtccaccttcatggccgagatgctggagacagccagcatcctgcggagcgccaccaaggacagcctcatcatcattgatgagctgggccggggcaccagcacctatgatggcttcggcctggcctgggccatcagcgagtacatcgccaccaagatcggggccttctgcatgtttgccacccacttccacgagctgacagccctggccaaccagatccccaccgtgaacaacctgcacgtgacagccctgaccacagaggagaccctgaccatgctgtaccaggtgaagaagggcgtgtgtgaccagagctttggcatccacgtggccgagctggccaacttccccaagcacgtgattgaatgtgccaagcagaaggccctggagctggaggagttccagtacatcggggagagccagggctatgacatcatggagcctgctgccaagaagtgctacctggagcgggagcagggcgagaagatcatccaggagttcctgagcaaggtgaagcagatgcccttcacagagatgtctgaggagaacatcaccatcaagctgaagcagctgaaggccgaggtgattgccaagaacaacagctttgtgaatgagatcatcagccgcatcaaggtgaccacctag

SEQ ID NO: 161300 - DNA, 435 bp, synthetic construct
  misc_feature 1..435: note = Description of Artificial Sequence: Synthetic coding sequence
  source 1..435: mol_type = other DNA
atgacagaggaggtgattgtcatcgccaagtgggactacacagcccagcaggaccaggagctggacatcaagaagaatgaaaggctgtggctgctggatgacagcaagacctggtggagggtgagaaatgctgccaacagaacaggctacgtgcccagcaactacgtggagaggaagaacagcctgaagaagggcagcctggtgaagaacctgaaggacaccctgggcctgggcaagaccaggaggaagaccagcgccagagatgccagccccacccccagcacagatgctgagtacccagccaacggcagcggggctgaccgcatctatgacctgaacatcccagcctttgtgaagtttgcctacgtggccgagagagaagatgagctgagcctggtgaagggcagccgggtgacagtgatggagaagtgctag

SEQ ID NO: 161301 - DNA, 1143 bp, synthetic construct
  misc_feature 1..1143: note = Description of Artificial Sequence: Synthetic coding sequence
  source 1..1143: mol_type = other DNA
atgacagaggaggtgattgtcatcgccaagtgggactacacagcccagcaggaccaggagctggacatcaagaagaatgaaaggctgtggctgctggatgacagcaagacctggtggagggtgagaaatgctgccaacagaacaggctacgtgcccagcaactacgtggagaggaagaacagcctgaagaagggcagcctggtgaagaacctgaaggacaccctgggcctgggcaagaccaggaggaagaccagcgccagagatgccagccccacccccagcacagatgctgagtacccagccaacggcagcggggctgaccgcatctatgacctgaacatcccagcctttgtgaagtttgcctacgtggccgagagagaagatgagctgagcctggtgaagggcagccgggtgacagtgatggagaagtgcagtgatggctggtggaggggcagctacaacggccagatcggctggttccccagcaactacgtgctggaggaggtggatgaggccgctgctgagagccccagcttcctgagcctgaggaagggggccagcctgagcaatggccagggcagccgggtgctgcacgtggtgcagaccctgtaccccttcagctctgtgacagaggaggagctgaactttgagaagggggagaccatggaggtgattgagaagccagaaaatgaccctgagtggtggaagtgcaagaatgcccggggccaggtgggcctggtgcccaagaactacgtggtggtgctgagtgatggccctgccctgcacccagcccacgccccccagatctcctacacaggccccagcagcagcggccgctttgctggccgggagtggtactatggaaatgtgaccaggcaccaggccgagtgtgccctgaatgaaagaggagtggagggggacttcctgatccgggacagcgagagcagccccagcgacttctctgtgtccctgaaggccagcggcaagaacaagcacttcaaggtgcagctggtggacaacgtgtactgcatcggccagaggcgcttccacaccatggatgagctggtggagcactacaagaaggcccccatcttcaccagcgagcacggggagaagctgtacctggtgcgggccctgcagtag

SEQ ID NO: 161302 - DNA, 333 bp, synthetic construct
  misc_feature 1..333: note = Description of Artificial Sequence: Synthetic coding sequence
  source 1..333: mol_type = other DNA
atgacagaggaggtgattgtcatcgccaagtgggactacacagcccagcaggaccaggagctggacatcaagaagaatgaaaggctgtggctgctggatgacagcaagacctggtggagggtgagaaatgctgccaacagaacaggctacgtgcccagcaactacgtggagaggaagaacagcctgaagaagggcagcctggtgaagaacctgaaggacaccctgggcctgggcaagaccaggaggaagaccagcgccagagatgccagccccacccccagcacagatgctgagtacccagccaacggcagcggggctgaccgcatctactag

SEQ ID NO: 161303 - DNA, 252 bp, synthetic construct
  misc_feature 1..252: note = Description of Artificial Sequence: Synthetic coding sequence
  source 1..252: mol_type = other DNA
atgacagaggaggtgattgtcatcgccaagtgggactacacagcccagcaggaccaggagctggacatcaagaagaatgaaaggctgtggctgctggatgacagcaagacctggtggagggtgagaaatgctgccaacagaacaggctacgtgcccagcaactacgtggagaggaagaacagcctgaagaagggcagcctggtgaagaacctgaaggacaccctggcccagaggctgctgcgggtgccctag

SEQ ID NO: 161304 - DNA, 252 bp, synthetic construct; identical to SEQ ID NO: 161303
  misc_feature 1..252: note = Description of Artificial Sequence: Synthetic coding sequence
  source 1..252: mol_type = other DNA

SEQ ID NO: 161305 - DNA, 2169 bp, synthetic construct
  misc_feature 1..2169: note = Description of Artificial Sequence: Synthetic coding sequence
  source 1..2169: mol_type = other DNA
atgtaccgggccctgtatgccttccgctctgctgagcccaatgccctggcctttgctgctggggagaccttcctggtgctggagaggagcagcgcccactggtggctggccgcccgggcccggagcggggagaccggctacgtgcccccagcctacctgcggcggctgcagggcctggagcaggatgtgctgcaggccatcgaccgggccattgaagctgtgcacaacacagccatgagagatggcggcaagtacagcctggagcagaggggcgtgctgcagaagctgatccaccacaggaaggagaccctgagccggcggggccccagcgccagctctgtggccgtgatgaccagcagcaccagtgaccaccacctggatgctgctgctgcccggcagcccaatggagtgtgccgggccggctttgagcggcagcacagcctgcccagcagcgagcacctgggcgcagatggcggcctgtaccagatccccctgcccagcagccagatccccccccagcccaggagagctgcccccaccaccccacctcctcctgtgaagaggcgggaccgggaggccctgatggccagcggcagcggcggccacaacaccatgcccagcggcggcaacagcgtgagcagcggcagctctgtgagcagcaccagcctggacaccctgtacaccagcagcagccccagcgagcccggcagcagctgcagccccaccccacctcctgtgccccggcggggcacccacaccaccgtgtcccaggtgcagcccccacccagcaaggccagcgcccctgagcccccagctgaggaggaggtggccaccggcaccaccagcgccagtgatgacctggaggccctgggcaccctgagcctgggcaccacagaggagaaggctgctgctgaggccgctgtgcccaggaccatcggggctgagctgatggagctggtgagaagaaacacaggcctgagccatgagctgtgccgggtggccatcggcatcatcgtgggccacatccaggcctctgtgcctgccagcagccctgtgatggagcaggtgctgctgagcctggtggagggcaaggacctgtccatggccctgcccagcggccaggtgtgccacgaccagcagaggctggaggtgatctttgctgacctggcccggaggaaggatgatgcccagcagaggtcctgggccctgtatgaagatgagggcgtcatccgctgctacctggaggagctgctgcacatcctgacagatgctgaccctgaggtgtgcaagaagatgtgcaagagaaatgaatttgagagcgtgctggccctggtggcctactaccagatggagcaccgggccagcctgcggctgctgctgctgaagtgcttcggggccatgtgcagcctggatgctgccatcatcagcaccctggtgtcctctgtgctgcctgtggagctggcccgggacatgcagacagacacccaggaccaccagaagctgtgctacagcgccctgatcctggccatggtgttctccatgggagaggccgtgccctatgcccactatgagcacctgggcaccccatttgcccagttcctgctgaacatcgtggaggatggcctgcccctggacaccacagagcagctgcctgacctgtgtgtgaacctgctgctggccctgaacctgcacctgcctgctgctgaccagaatgtcatcatggccgccctgagcaagcacgccaacgtgaagatcttcagcgagaagctgctgctgctgctgaacagaggagatgatcctgtgcgcatcttcaagcatgagccccagcccccccacagcgtgctgaagttcctgcaggatgtgtttggcagccctgccacagctgccatcttctaccacacagacatgatggccctgattgacatcaccgtgcgccacatcgctgacctgagccctggggacaagctgaggatggagtacctgagcctgatgcacgccatcgtgaggaccaccccctacctgcagcaccgccaccggctgcctgacctgcaggccatcctgcggcgcatcctgaatgaggaggagaccagcccccagtgccagatggacaggatgattgtgcgggagatgtgcaaggagttcctggtgctgggggaggcccccagctag

SEQ ID NO: 161306 - DNA, 2169 bp, synthetic construct
  misc_feature 1..2169: note = Description of Artificial Sequence: Synthetic coding sequence
  source 1..2169: mol_type = other DNA
atgtaccgggccctgtatgccttccgctctgctgagcccaatgccctggcctttgctgctggggagaccttcctggtgctggagaggagcagcgcccactggtggctggccgcccgggcccggagcggggagaccggctacgtgcccccagcctacctgcggcggctgcagggcctggagcaggatgtgctgcaggccatcgaccgggccattgaagctgtgcacaacacagccatgagagatggcggcaagtacagcctggagcagaggggcgtgctgcagaagctgatccaccacaggaaggagaccctgagccggcggggccccagcgccagctctgtggccgtgatgaccagcagcaccagtgaccaccacctggatgctgctgctgcccggcagcccaatggagtgtgccgggccggctttgagcggcagcacagcctgcccagcagcgagcacctgggcgcagatggcggcctgtaccagatccccctgcccagcagccagatccccccccagcccaggagagctgcccccaccaccccacctcctcctgtgaagaggcgggaccgggaggccctgatggccagcggcagcggcggccacaacaccatgcccagcggcggcaacagcgtgagcagcggcagctctgtgagcagcaccagcctggacaccctgtacaccagcagcagccccagcgagcccggcagcagctgcagccccaccccacctcctgtgccccggcggggcacccacaccaccgtgtcccaggtgcagcccccacccagcaaggccagcgcccctgagcccccagctgaggaggaggtggccaccggcaccaccagcgccagtgatgacctggaggccctgggcaccctgagcctgggcaccacagaggagaaggctgctgctgaggccgctgtgcccaggaccatcggggctgagctgatggagctggtgagaagaaacacaggcctgagccatgagctgtgccgggtggccatcggcatcatcgtgggccacatccaggcctctgtgcctgccagcagccctgtgatggagcaggtgctgctgagcctggtggagggcaaggacctgtccatggccctgcccagcggccaggtgtgccacgaccagcagaggctggaggtgatctttgctgacctggcccggaggaaggatgatgcccagcagaggtcctgggccctgtatgaagatgagggcgtcatccgctgctacctggaggagctgctgcacatcctgacagatgctgaccctgaggtgtgcaagaagatgtgcaagagaaatgaatttgagagcgtgctggccctggtggcctactaccagatggagcaccgggccagcctgcggctgctgctgctgaagtgcttcggggccatgtgcagcctggatgctgccatcatcagcaccctggtgtcctctgtgctgcctgtggagctggcccgggacatgcagacagacacccaggaccaccagaagctgtgctacagcgccctgatcctggccatggtgttctccatgggagaggccgtgccctatgcccactatgagcacctgggcaccccatttgcccagttcctgctgaacatcgtggaggatggcctgcccctggacaccacagagcagctgcctgacctgtgtgtgaacctgctgctggccctgaacctgcacctgcctgctgctgaccagaatgtcatcatggccgccctgagcaagcacgccaacgtgaagatcttcagcgagaagctgctgctgctgctgaacagaggagatgatcctgtgcgcatcttcaagcatgagccccagcccccccacagcgtgctgaagttcctgcaggatgtgtttggcagccctgccacagctgccatcttctaccacacagacatgatggccctgattgacatcaccgtgcgccacatcgctgacctgagccctggggacaagggcccctttggagctggccagaggccctggccaggagtgccccggctgctggagcccggcagcacccccagccgggagccccaccctgtggagaggtctggagtgcctgccctgaccagctcctgggccagcggctgcccccggcccctgcacccagccctgcagctggtgattgattctgcctttggaggccgctctgtgtag

SEQ ID NO: 161307 - DNA, 2148 bp, synthetic construct
  misc_feature 1..2148: note = Description of Artificial Sequence: Synthetic coding sequence
  source 1..2148: mol_type = other DNA
atgtaccgggccctgtatgccttccgctctgctgagcccaatgccctggcctttgctgctggggagaccttcctggtgctggagaggagcagcgcccactggtggctggccgcccgggcccggagcggggagaccggctacgtgcccccagcctacctgcggcggctgcagggcctggagcaggatgtgctgcaggccatcgaccgggccattgaagctgtgcacaacacagccatgagagatggcggcaagtacagcctggagcagaggggcgtgctgcagaagctgatccaccacaggaaggagaccctgagccggcggggccccagcgccagctctgtggccgtgatgaccagcagcaccagtgaccaccacctggatgctgctgctgcccggcagcccaatggagtgtgccgggccggctttgagcggcagcacagcctgcccagcagcgagcacctgggcgcagatggcggcctgtaccagatccccccccagccccggcgggccgcccccaccaccccacctcctcctgtgaagagaagagaccgggaggccctgatggccagcggcagcggcggccacaacaccatgcccagcggcggcaacagcgtgagcagcggcagctctgtgagcagcaccagcctggacaccctgtacaccagcagcagccccagcgagcccggcagcagctgcagccccaccccacctcctgtgccccggcggggcacccacaccaccgtgtcccaggtgcagcccccacccagcaaggccagcgcccctgagcccccagctgaggaggaggtggccaccggcaccaccagcgccagtgatgacctggaggccctgggcaccctgagcctgggcaccacagaggagaaggctgctgctgaggccgctgtgcccaggaccatcggggctgagctgatggagctggtgagaagaaacacaggcctgagccatgagctgtgccgggtggccatcggcatcatcgtgggccacatccaggcctctgtgcctgccagcagccctgtgatggagcaggtgctgctgagcctggtggagggcaaggacctgtccatggccctgcccagcggccaggtgtgccacgaccagcagaggctggaggtgatctttgctgacctggcccggaggaaggatgatgcccagcagaggtcctgggccctgtatgaagatgaaggagtcatccgctgctacctggaggagctgctgcacatcctgacagatgctgaccctgaggtgtgcaagaagatgtgcaagagaaatgaatttgaatctgtgctggccctggtggcctactaccagatggagcaccgggccagcctgcggctgctgctgctgaagtgctttggagccatgtgcagcctggatgctgccatcatcagcaccctggtgtcctctgtgctgcctgtggagctggcccgggacatgcagacagacacccaggaccaccagaagctgtgctacagcgccctgatcctggccatggtgttctccatgggagaggccgtgccctatgcccactatgagcacctgggcaccccatttgcccagttcctgctgaacatcgtggaggatggcctgcccctggacaccacagagcagctgcctgacctgtgtgtgaacctgctgctggccctgaacctgcacctgcctgctgctgaccagaatgtcatcatggccgccctgagcaagcacgccaacgtgaagatcttcagcgagaagctgctgctgctgctgaacagaggagatgatcctgtgcgcatcttcaagcatgagccccagcccccccacagcgtgctgaagttcctgcaggatgtgtttggcagccctgccacagctgccatcttctaccacacagacatgatggccctgattgacatcaccgtgcgccacatcgctgacctgagccctggggacaagctgaggatggagtacctgagcctgatgcacgccatcgtgaggaccaccccctacctgcagcaccgccaccggctgcctgacctgcaggccatcctgcggcgcatcctgaatgaggaggagaccagcccccagtgccagatggacaggatgattgtgcgggagatgtgcaaggagttcctggtgctgggggaggcccccagctag

SEQ ID NO: 161308 - DNA, 3405 bp, synthetic construct
  misc_feature 1..3405: note = Description of Artificial Sequence: Synthetic coding sequence
  source 1..3405: mol_type = other DNA
atgagccgctctgtgctgcagcccagccagcagaagctggccgagaagctgaccatcctgaatgaccggggcgtgggcatgctgacccggctgtacaacatcaagaagcagggccaggtgtggaaggcctgtggggaccccaaggccaagcccagctacctgattgacaagaacctggagagcgctgtgaagttcatcgtgaggaagtttcctgctgtggagaccaggaacaacaaccagcagctggcccagctgcagaaggagaagtctgagatcctgaagaacctggccctgtactacttcacctttgtggatgtgatggagttcaaggaccacgtgtgtgagctgctgaacaccattgatgtgtgccaggtgttctttgacatcaccgtgaactttgacctgaccaagaactacctggacctgatcatcacctacaccaccctgatgatcctgctgagccgcatcgaggagaggaaggccatcatcggcctgtacaactatgcccacgagatgacccacggggccagtgaccgggagtacccccggctgggccagatgattgtggactatgagaaccccctgaagaagatgatggaggagtttgtgccccacagcaagagcctgagtgatgccctgatcagcctgcagatggtgtaccccaggaggaacctgtctgctgaccagtggagaaatgcccagctgctgagcctcatcagcgcccccagcaccatgctgaacccagcccagagcgacaccatgccctgtgagtacctgagcctggatgccatggagaagtggatcatcttcggcttcatcctgtgccacggcatcctgaacacagatgccacagccctgaacctgtggaagctggccctgcagagcagcagctgcctgagcctcttcagagatgaggtgttccacatccacaaggctgctgaggacctgtttgtgaacatccggggctacaacaagaggatcaatgacatccgggagtgcaaggaggccgctgtgtcccatgctggctccatgcaccgggagaggaggaagttcctgcggagcgccctgaaggagctggccaccgtgctgagtgaccagcccggcctgctgggccccaaggccctgtttgtgttcatggccctgagctttgccagagatgagatcatctggctgctgcggcatgctgacaacatgcccaagaagtctgcagatgacttcatcgacaagcacatcgccgagctgatcttctacatggaggagctgcgggcccacgtgaggaaatatggccctgtgatgcagcgctactacgtgcagtacctgagcggctttgatgctgtggtgctgaatgagctggtgcagaacctgtctgtgtgcccagaagatgagagcatcatcatgagcagctttgtgaacaccatgaccagcctgtctgtgaagcaggtggaggatggagaggtgtttgacttccggggcatgaggctggactggttccggctgcaggcctacacctctgtgtccaaggccagcctgggcctggccgaccaccgggagctgggcaagatgatgaacaccatcatcttccacaccaagatggtggacagcctggtggagatgctggtggagaccagtgacctgagcatcttctgcttctacagccgggcctttgagaagatgttccagcagtgcctggagctgcccagccagagccgctacagcatcgccttccccctgctgtgcacccacttcatgagctgcacccatgagctgtgcccagaggagcggcaccacatcggggacaggagcctgagcctgtgcaacatgttcctggatgagatggccaagcaggccaggaacctgatcacagacatctgcacagagcagtgcaccctgagtgaccagctgctgcccaagcactgtgccaagaccatcagccaggccgtgaacaagaagagcaagaagcagacaggcaagaagggggagcctgagcgggagaagccaggagtggagagcatgaggaagaaccggctggtggtgaccaacctggacaagctgcacacagccctgtctgagctgtgcttcagcatcaactacgtgcccaacatggtggtgtgggagcacaccttcaccccccgggagtacctgaccagccacctggagatccgcttcaccaagagcatcgtgggcatgaccatgtacaaccaggccacccaggagatcgccaagcccagcgagctgctgacctctgtgcgggcctacatgacagtgctgcagagcattgagaactacgtgcagattgacatcaccagggtcttcaacaacgtgctgctgcagcagacccagcacctggacagccatggagagcccaccatcaccagcctgtacaccaactggtacctggagaccctgctgcggcaggtgtccaatggccacatcgcctacttccctgccatgaaggcctttgtgaacctgcccacagaaaatgagctgaccttcaatgctgaggagtacagcgacatcagcgagatgaggagcctgtctgagctgctgggcccctacggcatgaagttcctgtctgagagcctgatgtggcacatcagcagccaggtggccgagctgaagaagctggtggtggagaatgtggatgtgctgacccagatgaggaccagctttgacaagccagaccagatggccgccctcttcaagaggctgagctctgtggacagcgtgctgaagaggatgaccatcatcggggtcatcctgtccttccgcagcctggcccaggaggccctgagagatgtgctgagctaccacatccccttcctggtgagcagcattgaggacttcaaggaccacatcccccgggagacagacatgaaggtggccatgaatgtgtatgagctgagcagcgctgctggcctgccctgtgaaattgatcctgccctggtggtggccctgagcagccagaagtctgagaacatcagccctgaggaggagtacaagatcgcctgcctgctgatggtgtttgtggccgtgtccctgcccaccctggccagcaatgtgatgagccagtacagccctgccatcgagggccactgcaacaacatccactgcctggccaaggccatcaaccagattgctgctgccctcttcaccatccacaagggcagcattgaggaccggctgaaggagttcctggccctggccagcagcagcctgctgaagattggccaggagacagacaagaccaccaccaggaaccgggagagcgtgtacctgctgctggacatgattgtgcaggagagccccttcctgaccatggacctgctggagagctgcttcccctacgtgctgctgagaaatgcctaccacgctgtgtacaagcagagcgtgaccagcagcgcctag

SEQ ID NO: 161309 - DNA, 3387 bp, synthetic construct
  misc_feature 1..3387: note = Description of Artificial Sequence: Synthetic coding sequence
  source 1..3387: mol_type = other DNA
atgagccgctctgtgctgcagcccagccagcagaagctggccgagaagctgaccatcctgaatgaccggggcgtgggcatgctgacccggctgtacaacatcaagaaggcctgtggggaccccaaggccaagcccagctacctgattgacaagaacctggagagcgctgtgaagttcatcgtgaggaagtttcctgctgtggagaccaggaacaacaaccagcagctggcccagctgcagaaggagaagtctgagatcctgaagaacctggccctgtactacttcacctttgtggatgtgatggagttcaaggaccacgtgtgtgagctgctgaacaccattgatgtgtgccaggtgttctttgacatcaccgtgaactttgacctgaccaagaactacctggacctgatcatcacctacaccaccctgatgatcctgctgagccgcatcgaggagaggaaggccatcatcggcctgtacaactatgcccacgagatgacccacggggccagtgaccgggagtacccccggctgggccagatgattgtggactatgagaaccccctgaagaagatgatggaggagtttgtgccccacagcaagagcctgagtgatgccctgatcagcctgcagatggtgtaccccaggaggaacctgtctgctgaccagtggagaaatgcccagctgctgagcctcatcagcgcccccagcaccatgctgaacccagcccagagcgacaccatgccctgtgagtacctgagcctggatgccatggagaagtggatcatcttcggcttcatcctgtgccacggcatcctgaacacagatgccacagccctgaacctgtggaagctggccctgcagagcagcagctgcctgagcctcttcagagatgaggtgttccacatccacaaggctgctgaggacctgtttgtgaacatccggggctacaacaagaggatcaatgacatccgggagtgcaaggaggccgctgtgtcccatgctggctccatgcaccgggagaggaggaagttcctgcggagcgccctgaaggagctggccaccgtgctgagtgaccagcccggcctgctgggccccaaggccctgtttgtgttcatggccctgagctttgccagagatgagatcatctggctgctgcggcatgctgacaacatgcccaagaagtctgcagatgacttcatcgacaagcacatcgccgagctgatcttctacatggaggagctgcgggcccacgtgaggaaatatggccctgtgatgcagcgctactacgtgcagtacctgagcggctttgatgctgtggtgctgaatgagctggtgcagaacctgtctgtgtgcccagaagatgagagcatcatcatgagcagctttgtgaacaccatgaccagcctgtctgtgaagcaggtggaggatggagaggtgtttgacttccggggcatgaggctggactggttccggctgcaggcctacacctctgtgtccaaggccagcctgggcctggccgaccaccgggagctgggcaagatgatgaacaccatcatcttccacaccaagatggtggacagcctggtggagatgctggtggagaccagtgacctgagcatcttctgcttctacagccgggcctttgagaagatgttccagcagtgcctggagctgcccagccagagccgctacagcatcgccttccccctgctgtgcacccacttcatgagctgcacccatgagctgtgcccagaggagcggcaccacatcggggacaggagcctgagcctgtgcaacatgttcctggatgagatggccaagcaggccaggaacctgatcacagacatctgcacagagcagtgcaccctgagtgaccagctgctgcccaagcactgtgccaagaccatcagccaggccgtgaacaagaagagcaagaagcagacaggcaagaagggggagcctgagcgggagaagccaggagtggagagcatgaggaagaaccggctggtggtgaccaacctggacaagctgcacacagccctgtctgagctgtgcttcagcatcaactacgtgcccaacatggtggtgtgggagcacaccttcaccccccgggagtacctgaccagccacctggagatccgcttcaccaagagcatcgtgggcatgaccatgtacaaccaggccacccaggagatcgccaagcccagcgagctgctgacctctgtgcgggcctacatgacagtgctgcagagcattgagaactacgtgcagattgacatcaccagggtcttcaacaacgtgctgctgcagcagacccagcacctggacagccatggagagcccaccatcaccagcctgtacaccaactggtacctggagaccctgctgcggcaggtgtccaatggccacatcgcctacttccctgccatgaaggcctttgtgaacctgcccacagaaaatgagctgaccttcaatgctgaggagtacagcgacatcagcgagatgaggagcctgtctgagctgctgggcccctacggcatgaagttcctgtctgagagcctgatgtggcacatcagcagccaggtggccgagctgaagaagctggtggtggagaatgtggatgtgctgacccagatgaggaccagctttgacaagccagaccagatggccgccctcttcaagaggctgagctctgtggacagcgtgctgaagaggatgaccatcatcggggtcatcctgtccttccgcagcctggcccaggaggccctgagagatgtgctgagctaccacatccccttcctggtgagcagcattgaggacttcaaggaccacatcccccgggagacagacatgaaggtggccatgaatgtgtatgagctgagcagcgctgctggcctgccctgtgaaattgatcctgccctggtggtggccctgagcagccagaagtctgagaacatcagccctgaggaggagtacaagatcgcctgcctgctgatggtgtttgtggccgtgtccctgcccaccctggccagcaatgtgatgagccagtacagccctgccatcgagggccactgcaacaacatccactgcctggccaaggccatcaaccagattgctgctgccctcttcaccatccacaagggcagcattgaggaccggctgaaggagttcctggccctggccagcagcagcctgctgaagattggccaggagacagacaagaccaccaccaggaaccgggagagcgtgtacctgctgctggacatgattgtgcaggagagccccttcctgaccatggacctgctggagagctgcttcccctacgtgctgctgagaaatgcctaccacgctgtgtacaagcagagcgtgaccagcagcgcctag

SEQ ID NO: 161310 - DNA, 2649 bp, synthetic construct
  misc_feature 1..2649: note = Description of Artificial Sequence: Synthetic coding sequence
  source 1..2649: mol_type = other DNA
atgcctgccctggcctgcctgcggcggctgtgcagacatgtgagcccccaggccgtgctcttcctgctcttcatcttctgcctcttcagcgtcttcatcagcgcctactacctgtatggctggaagaggggcctggagcccagcgcagatgcccctgagccagactgtggggaccccccacctgtggcccccagccggctgctgcccctgaagcctgtgcaggccgccacccccagcaggacagaccccctggtgctggtgtttgtggagagcctgtacagccagctgggccaggaggtggtggccatcctggagagcagccgcttcaagtacagaacagaaattgcccctggaaaaggagacatgcccaccctgacagacaagggccggggccgctttgccctgatcatctatgagaacatcctgaagtatgtgaacctggatgcctggaaccgggagctgctggacaagtactgtgtggcctacggcgtgggcatcatcggcttcttcaaggccaatgaaaacagcctgctgagcgcccagctgaagggcttccccctcttcctgcacagcaacctgggcctgaaggactgcagcatcaaccccaagagccccctgctgtatgtgacccggcccagcgaggtggagaagggcgtgctgcctggagaggactggacagtgttccagagcaaccacagcacctatgagcctgtgctgctggccaagaccaggagcagcgagagcatcccccacctgggcgcagatgctggcctgcacgccgccctgcacgccaccgtggtgcaggacctgggcctgcatgatggcatccagagggtgctgtttggaaacaacctgaacttctggctgcacaagctggtgtttgtggatgctgtggccttcctgaccgggaagaggctgagcctgcccctggaccgctacatcctggtggacattgatgacatctttgtgggcaaggagggcaccaggatgaaggtggaggatgtgaaggccctgtttgacacccagaatgagctgcgggcccacatccccaacttcaccttcaacctgggctacagcggcaagttcttccacacaggcaccaatgcagaagatgctggagatgacctgctgctgtcctatgtgaaggagttctggtggttcccccacatgtggagccacatgcagccccacctgttccacaaccagagcgtgctggccgagcagatggccctgaacaagaagtttgctgtggagcacggcatccccacagacatgggctatgctgtggccccccaccacagcggcgtgtaccctgtgcacgtgcagctgtatgaggcctggaagcaggtgtggagcatccgggtgaccagcacagaggagtacccccacctgaagccagcccgctaccgccggggcttcatccacaacggcatcatggtgctgccccggcagacctgtggcctcttcacccacaccatcttctacaatgagtacccaggcggcagcagcgagctggacaagatcatcaatggaggagagctgttcctgactgtgctgctgaaccccatcagcatcttcatgacccacctgagcaactatggaaatgaccggctgggcctgtacaccttcaagcacctggtgcgcttcctgcacagctggaccaacctgcggctgcagaccctgccccctgtgcagctggcccagaagtacttccagatcttcagcgaggagaaggaccccctgtggcaggacccctgtgaggacaagaggcacaaggacatctggagcaaggagaagacctgtgaccgcttccccaagctgctgatcatcggcccccagaagacaggcaccacagccctgtacctgttcctgggcatgcacccagacctgagcagcaactaccccagcagcgagacctttgaggagatccagttcttcaacggccacaactaccacaagggcatcgactggtacatggagttcttccccatccccagcaacaccaccagtgacttctactttgagaagagcgccaactactttgattctgaggtggccccccggcgggctgctgccctgctgcccaaggccaaggtgctgaccatcctgatcaacccagctgaccgggcctacagctggtaccagcaccagagggcccatgatgatcctgtggccctgaagtacaccttccatgaagtcatcacagctggcagtgatgccagcagcaagctgcgggccctgcagaaccgctgcctggtgcccggctggtacgccacccacatcgagcgctggctgagcgcctaccacgccaaccagatcctggtgctggatggcaagctgctgaggacagagcccgccaaggtgatggacatggtgcagaagttcctgggcgtgaccaacaccatcgactaccacaagaccctggcctttgaccccaagaagggcttctggtgccagctgctggagggcggcaagaccaagtgcctgggcaagagcaaaggaaggaagtacccagagatggacctggacagccgggccttcctgaaggactactacagagaccacaacatcgagctgagcaagctgctgtacaagatgggccagaccctgcccacctggctgcgggaggacctgcagaacaccaggtag

SEQ ID NO: 161311 - DNA, 72 bp, synthetic construct
  misc_feature 1..72: note = Description of Artificial Sequence: Synthetic coding sequence
  source 1..72: mol_type = other DNA
atgcctgccctggcctgcctgcggcggctgtgcagacatgtgagcccccaggccgtgctcttcctgctgtag

SEQ ID NO: 161312 - DNA, 480 bp, synthetic construct
  misc_feature 1..480: note = Description of Artificial Sequence: Synthetic coding sequence
  source 1..480: mol_type = other DNA
atgcctgccctggcctgcctgcggcggctgtgcagacatgtgagcccccaggccgtgctcttcctgctcttcatcttctgcctcttcagcgtcttcatcagcgcctactacctgtatggctggaagaggggcctggagcccagcgcagatgcccctgagccagactgtggggaccccccacctgtggcccccagccggctgctgcccctgaagcctgtgcaggccgccacccccagcaggacagaccccctggtgctggtgtttgtggagagcctgtacagccagctgggccaggaggtggtggccatcctggagagcagccgcttcaagtacagaacagaaattgcccctggaaaaggagacatgcccaccctgacagacaagggccggggccgctttgccctgatcatctatgagaacatcctgaagtatgtgaacctggatgcctggaaccgggagctgctggacaagtactgctag

SEQ ID NO: 161313 - DNA, 207 bp, synthetic construct
  misc_feature 1..207: note = Description of Artificial Sequence: Synthetic coding sequence
  source 1..207: mol_type = other DNA
atgcctgccctggcctgcctgcggcggctgtgcagacatgtgagcccccaggccgtgctcttcctgctcttcatcttctgcctcttcagcgtcttcatcagcgcctactacctgtatggctggaagaggggcctggagcccagcgcagatgcccctgagccagactgtggggaccccccacctgtggcccccagccggctgctgtag

SEQ ID NO: 161314 - DNA, 2283 bp, synthetic construct
  misc_feature 1..2283: note = Description of Artificial Sequence: Synthetic coding sequence
  source 1..2283: mol_type = other DNA
atgcccaccctgacagacaacacccacggccgctacgtgctggtgatctatgagaacctgctgaagtatgtgaacctggatgcctggagccgggagctgctggaccgctactgtgtggagtatggagtgggcatcatcggcttcttccgggcccacgagcacagcctgctgagcgcccagctgaagggcttccccctcttcctgcacagcaacctgggcctgcgggactaccaggtgaaccccagcgcccccctgctgcacctgacccggcccagccggctggagcccggccccctgcctggagatgactggaccatcttccagagcaaccacagcacctatgagcctgtgctgctggccagcctgcggcctgctgagcctgctgtgcccggccctgtgctgcggcgggcccggctgcccaccgtggtgcaggacctgggcctgcatgatggcatccagagggtgctgtttggacatggcctgtccttctggctgcacaagctgatctttgtggatgctgtggcctacctgaccgggaagaggctgtgcctggacctggaccgctacatcctggtggacattgatgacatctttgtgggcaaggagggcaccaggatgaaggtggctgatgtggaggccctgctgaccacccagaacaagctgcggaccctggtgcccaacttcaccttcaacctgggcttcagcggcaagttctaccacactggaacagaggaggaggatgctggagatgacatgctgctgaagcacaggaaggagttctggtggttcccccacatgtggagccacatgcagccccacctgttccacaacagatctgtgctggccgaccagatgaggctgaacaagcagtttgccctggagcacggcatccccacagacctgggctatgctgtggccccccaccacagcggcgtgtaccccatccacacccagctgtatgaggcctggaagtctgtgtggggcatccaggtgaccagcacagaggagtacccccacctgcggcctgcccgctaccgccggggcttcatccacaacggcatcatggtgctgccccggcagacctgtggcctcttcacccacaccatcttctacaatgagtacccaggcggcagccgggagctggacaggagcatccggggcggggagctgttcctgactgtgctgctgaaccccatcagcatcttcatgacccacctgagcaactatggaaatgaccggctgggcctgtacacctttgagagcctggtgcgcttcctgcagtgctggacccggctgcggctgcagaccctgccccctgtgcccctggcccagaagtactttgagctgttcccccaggagaggagccccctgtggcagaacccctgtgatgacaagaggcacaaggacatctggagcaaggagaagacctgtgaccggctgcccaagttcctgattgtgggcccccagaagacaggcaccacagccatccacttcttcctgagcctgcaccctgctgtgaccagcagcttccccagccccagcacctttgaggagatccagttcttcaacagccccaactaccacaagggcatcgactggtacatggacttcttccctgtgcccagcaatgccagcacagacttcctgtttgagaagagcgccacctactttgattctgaggtggtgcccaggagaggagctgccctgctgccccgggccaagatcatcaccgtgctgaccaacccagctgaccgggcctacagctggtaccagcaccagagggcccacggggaccctgtggccctgaactacaccttctaccaggtgatcagcgccagcagccagacccccctggccctgcggagcctgcagaaccgctgcctggtgcccggctactacagcacccacctgcagcgctggctgacctactaccccagcggccagctgctgattgtggatggccaggagctgcggaccaacccagctgcctccatggagagcatccagaagttcctgggcatcacccccttcctgaactacaccaggaccctgcgctttgatgatgacaagggcttctggtgccagggcctggagggcggcaagacccgctgcctgggccgcagcaaaggaagacgctacccagacatggacacagagagccgcctcttcctgacagacttcttcaggaaccacaacctggagctgagcaagctgctgagccggctgggccagcctgtgcccagctggctgcgggaggagctgcagcacagcagcctgggctag

SEQ ID NO: 161315 - DNA, 2652 bp, synthetic construct
  misc_feature 1..2652: note = Description of Artificial Sequence: Synthetic coding sequence
  source 1..2652: mol_type = other DNA
atgctgcagctgtggaaggtggtgcggcctgcccggcagctggagctgcacaggctcatcctgctgctgattgccttcagcctgggctccatgggcttcctggcctactacgtgtccaccagccccaaggccaaggagcccctgcccctgcccctgggggactgcagcagtggaggagctgctggccctggccctgcccggccccctgtgcccccccggccccccaggcctcctgagacagccaggacagagcctgtggtgctggtgtttgtggagagcgcctacagccagctgggccaggagatcgtggccatcctggagagcagccgcttccgctacagcacagagctggcccctggccgcggggacatgcccaccctgacagacaacacccacggccgctacgtgctggtgatctatgagaacctgctgaagtatgtgaacctggatgcctggagccgggagctgctggaccgctactgtgtggagtatggagtgggcatcatcggcttcttccgggcccacgagcacagcctgctgagcgcccagctgaagggcttccccctcttcctgcacagcaacctgggcctgcgggactaccaggtgaaccccagcgcccccctgctgcacctgacccggcccagccggctggagcccggccccctgcctggagatgactggaccatcttccagagcaaccacagcacctatgagcctgtgctgctggccagcctgcggcctgctgagcctgctgtgcccggccctgtgctgcggcgggcccggctgcccaccgtggtgcaggacctgggcctgcatgatggcatccagagggtgctgtttggccacggcctgtccttctggctgcacaagctgatctttgtggatgctgtggcctacctgaccgggaagaggctgtgcctggacctggaccgctacatcctggtggacattgatgacatctttgtgggcaaggagggcaccaggatgaaggtggctgatgtggaggccctgctgaccacccagaacaagctgcggaccctggtgcccaacttcaccttcaacctgggcttcagcggcaagttctaccacactggaacagaggaggaggatgctggagatgacatgctgctgaagcacaggaaggagttctggtggttcccccacatgtggagccacatgcagccccacctgttccacaacagatctgtgctggccgaccagatgaggctgaacaagcagtttgccctggagcacggcatccccacagacctgggctatgctgtggccccccaccacagcggcgtgtaccccatccacacccagctgtatgaggcctggaagtctgtgtggggcatccaggtgaccagcacagaggagtacccccacctgcggcctgcccgctacagaagaggcttcatccacaacggcatcatggtgctgccccggcagacctgtggcctcttcacccacaccatcttctacaatgagtacccaggcggcagccgggagctggacaggagcatccggggcggggagctgttcctgactgtgctgctgaaccccatcagcatcttcatgacccacctgagcaactatggaaatgaccggctgggcctgtacacctttgagagcctggtgcgcttcctgcagtgctggacccggctgcggctgcagaccctgccccctgtgcccctggcccagaagtactttgagctgttcccccaggagaggagccccctgtggcagaacccctgtgatgacaagaggcacaaggacatctggagcaaggagaagacctgtgaccggctgcccaagttcctgattgtgggcccccagaagacaggcaccacagccatccacttcttcctgagcctgcaccctgctgtgaccagcagcttccccagccccagcacctttgaggagatccagttcttcaacagccccaactaccacaagggcatcgactggtacatggacttcttccctgtgcccagcaatgccagcacagacttcctgtttgagaagagcgccacctactttgacagcgaggtggtgcccaggagaggagctgccctgctgccccgggccaagatcatcaccgtgctgaccaacccagctgaccgggcctacagctggtaccagcaccagagggcccatggagaccctgtggccctgaactacaccttctaccaggtgatcagcgccagcagccagacccccctggccctgcggagcctgcagaaccgctgcctggtgcccggctactacagcacccacctgcagcgctggctgacctactaccccagcggccagctgctgattgtggatggccaggagctgcggaccaacccagctgcctccatggagagcatccagaagttcctgggcatcacccccttcctgaactacaccaggaccctgcgctttgatgatgacaagggcttctggtgccagggcctggagggcggcaagacccgctgcctgggccgcagcaagggccgccgctacccagacatggacacagagagccgcctcttcctgacagacttcttcaggaaccacaacctggagctgagcaagctgctgagccggctgggccagcctgtgcccagctggctgcgggaggagctgcagcacagcagcctgggctag

SEQ ID NO: 161316 - DNA, 450 bp, synthetic construct
  misc_feature 1..450: note = Description of Artificial Sequence: Synthetic coding sequence
  source 1..450: mol_type = other DNA
ggggaccctgtggccctgaactacaccttctaccaggtgatcagcgccagcagccagacccccctggccctgcggagcctgcagaaccgctgcctggtgcccggctactacagcacccacctgcagcgctggctgacctactaccccagcggccagctgctgattgtggatggccaggagctgcggaccaacccagctgcctccatggagagcatccagaagttcctgggcatcacccccttcctgaactacaccaggaccctgcgctttgatgatgacaagggcttctggtgccagggcctggagggcggcaagacccgctgcctgggccgcagcaaaggaagacgctacccagacatggacacagaggtgtccaaggcccggggccggggcatccccctgcacttccaggacctgatcctgtgccccaccagctaccacttctgctag

SEQ ID NO: 161317 - DNA, 696 bp, synthetic construct
  misc_feature 1..696: note = Description of Artificial Sequence: Synthetic coding sequence
  source 1..696: mol_type = other DNA
atgagggtgcctgtgtttgaggacatcaaggatgaaacagaggaggagaagatcggggaggaggagaatgaggaggaccaggtgttctacaagcctgtgattgaggacctgtccatggagctggccaggaagtgcacagagctgatcagtgacatccgctacaaggaggagttcaagaagagcaaggacaagtgcacctttgtgacagacagccccatgctgaaccacgtgaagaacatcggggccttcatcagcgaggccaagtacaagggcaccatcaaggctgacctgagcaacagcctgtacaagaggatgcctgccaccattgattctgtgtttgctggggaggtgacccagctgcagagcgaggtggcctacaagcagaagcatgatgctgccaagggcttcagtgactatgcccacatgaaggagcccccagaggtgaagcacgccatggaggtgaacaagcaccagagcaacatctcctacaggaaggatgtgcaggacacccacacctacagcgctgagctggacagaccagacatcaagatggccacccagatcagcaagatcatcagcaatgctgagtacaagaagggccagggcatcatgaacaaggagcctgctgtgattggccgcccagactttgagcacgctgtggaggccagcaagctgagcagccaggtgcggctgtag

SEQ ID NO: 161318 - DNA, 3045 bp, synthetic construct
  misc_feature 1..3045: note = Description of Artificial Sequence: Synthetic coding sequence
  source 1..3045: mol_type = other DNA
atgagggtgcctgtgtttgaggacatcaaggatgaaacagaggaggagaagatcggggaggaggagaatgaggaggaccaggtgttctacaagcctgtgattgaggacctgtccatggagctggccaggaagtgcacagagctgatcagtgacatccgctacaaggaggagttcaagaagagcaaggacaagtgcacctttgtgacagacagccccatgctgaaccacgtgaagaacatcggggccttcatcagcgaggccaagtacaagggcaccatcaaggctgacctgagcaacagcctgtacaagaggatgcctgccaccattgattctgtgtttgctggggaggtgacccagctgcagagcgaggtggcctacaagcagaagcatgatgctgccaagggcttcagtgactatgcccacatgaaggagcccccagaggtgaagcacgccatggaggtgaacaagcaccagagcaacatctcctacaggaaggatgtgcaggacacccacacctacagcgctgagctggacagaccagacatcaagatggccacccagatcagcaagatcatcagcaatgctgagtacaagaagggccagggcatcatgaacaaggagcctgctgtgattggccgcccagactttgagcacgctgtggaggccagcaagctgagcagccagatcaagtacaaggagaagtttgacaatgagatgaaggacaagaagcaccactacaaccccctggagagcgccagcttccggcagaaccagctggccgccaccctggccagcaatgtgaagtacaagaaggacatccagaacatgcatgaccctgtgtctgacctgcccaacctgctcttcctggaccacgtgctgaaggccagcaagatgctgagcggccgggagtacaagaagctgtttgaggagaacaagggcatgtaccactttgatgctgatgctgtggagcacctgcaccacaagggaaatgctgtgctgcagagccaggtgaagtacaaggaggagtatgagaagaacaagggcaagcccatgctggagtttgtggagacccccagctaccaggccagcaaggaggcccagaagatgcagagcgagaaggtgtacaaggaggactttgagaaggagatcaagggccgcagcagcctggacctggacaagaccccagagttcctgcacgtgaagtacatcaccaacctgctgcgggagaaggagtacaagaaggacctggagaatgagatcaagggcaagggcatggagctgaacagcgaggtgctggacatccagagggccaagagggccagcgagatggccagcgagaaggagtacaagaaggacctggagagcatcatcaagggcaagggcatgcaggccggcacagacaccctggagatgcagcacgccaagaaggctgctgagatcgccagcgagaaggactacaagagggacctggagacagagatcaagggcaagggcatgcaggtgtccacagacaccctggatgtgcagagggccaagaaggccagcgagatggccagccagaagcagtacaagaaggacctggagaatgagatcaagggcaagggcatgcaggtgtccatggacatcccagacatcctgcgggccaagaggaccagcgagatctacagccagaggaagtacaaggatgaggccgagaagatgctgagcaactacagcaccatcgctgacaccccagagatccagaggatcaagaccacccagcagaacatctctgctgtgttctacaagaaggaggtgggcgccggcacagctgtgaaggacagccctgagattgagcgggtgaagaagaaccagcagaacatcagctctgtgaagtacaaggaggagatcaagcacgccacagccatcagtgaccccccagagctgaagagggtgaaggagaaccagaagaacatcagcaacctgcagtacaaggagcagaactacaaggccacccctgtgtccatgaccccagaaattgagcgggtgagaagaaaccaggagcagctgtctgctgtgaagtacaagggggagctgcagaggggcacagccatcagtgaccccccagagctgaagagggccaaggagaaccagaagaacatcagcaatgtgtactaccggggccagctgggccgggccaccaccctgtctgtgaccccagagatggagcgggtgaagaagaaccaggagaacatcagctctgtgaagtacacccaggaccacaagcagatgaagggccggcccagcctcatcctggacaccccagccatgagacatgtgaaggaggcccagaaccacatctccatggtgaagtaccatgaagattttgagaagaccaagggccggggcttcacccctgtggtggatgatcctgtgacagagcgggtgaggaagaacacccaggtggtgtctgatgctgcctacaagggcgtgcacccccacatcgtggagatggacagaagacctggcatcatcgtggacctgaaggtgtggaggacagaccccggcagcatctttgacctggaccccctggaggacaacatccagagccgcagcctgcacatgctgtctgagaaggccagccactacagaagacactggagccgcagccacagcagcagcacctttggaacaggcctgggagatgacagaagtgagatcagcgagatctaccccagcttcagctgctgcagcgaggtgacccggcccagtgatgagggcgcccctgtgctgcccggggcctaccagcagagccacagccagggctacggctacatgcaccagacctctgtgtcctccatgaggtccatgcagcacagccccaacctgcggacctaccgggccatgtatgactacagcgcccaggatgaagatgaggtgtccttcagagatggagactacatcgtgaatgtgcagcccattgatgatggctggatgtatggaacagtgcagaggactggaagaacaggcatgctgcctgccaactacatcgagtttgtgaactag

SEQ ID NO: 161319 - DNA, 711 bp, synthetic construct
  misc_feature 1..711: note = Description of Artificial Sequence: Synthetic coding sequence
  source 1..711: mol_type = other DNA
atgctgcacttctactatgagtggctgcacagcggcagcagaggagctgtgcccaagcccctgcactaccccaagcagagcttcaccaccgtggccgacaccccagagaacctgcggctgaagcagcagagcgagctgcagagccaggtgaagtacaagagggactttgaggagagcaagggccggggcttcagcatcgtgacagacaccccagagctgcagaggctgaagaggacccaggagcagatcagcaatgtgaagtaccacgaggactttgagaagaccaagggccggggcttcacccctgtggtggatgatcctgtgacagagcgggtgaggaagaacacccaggtggtgtctgatgctgcctacaagggcgtgcacccccacatcgtggagatggaccggcggcccggcatcatcgtggcccctgtgctgcccggggcctaccagcagagccacagccagggctacggctacatgcaccagacctctgtgtcctccatgaggtccatgcagcacagccccaacctgcggacctaccgggccatgtatgactacagcgcccaggatgaagatgaggtgtccttcagagatggagactacatcgtgaatgtgcagcccattgatgatggctggatgtatggaacagtgcagaggactggaagaacaggcatgctgcctgccaactacatcgagtttgtgaactag

SEQ ID NO: 161320 - DNA, 813 bp, synthetic construct
  misc_feature 1..813: note = Description of Artificial Sequence: Synthetic coding sequence
  source 1..813: mol_type = other DNA
atgaacccccagtgtgcccgctgtgggaaggtggtgtaccccacagagaaggtgaactgcctggacaagtactggcacaagggctgcttccactgtgaggtgtgcaagatggccctgaacatgaacaactacaagggctatgagaagaagccctactgcaatgcccactaccccaagcagagcttcaccaccgtggccgacaccccagagaacctgcggctgaagcagcagagcgagctgcagagccaggtgaagtacaagagggactttgaggagagcaagggccggggcttcagcatcgtgacagacaccccagagctgcagaggctgaagaggacccaggagcagatcagcaatgtgaagtaccacgaggactttgagaagaccaagggccggggcttcacccctgtggtggatgatcctgtgacagagcgggtgaggaagaacacccaggtggtgtctgatgctgcctacaagggcgtgcacccccacatcgtggagatggaccggcggcccggcatcatcgtggcccctgtgctgcccggggcctaccagcagagccacagccagggctacggctacatgcaccagacctctgtgtcctccatgaggtccatgcagcacagccccaacctgcggacctaccgggccatgtatgactacagcgcccaggatgaagatgaggtgtccttcagagatggagactacatcgtgaatgtgcagcccattgatgatggctggatgtatggaacagtgcagaggactggaagaacaggcatgctgcctgccaactacatcgagtttgtgaactag

SEQ ID NO: 161321 - DNA, 354 bp, synthetic construct
  misc_feature 1..354: note = Description of Artificial Sequence: Synthetic coding sequence
  source 1..354: mol_type = other DNA
atgaggaacaactgcacagccagcctgatgaaggtgttctacaagcctgtgattgaggacctgtccatggagctggccaggaagtgcacagagctgatcagtgacatccgctacaaggaggagttcaagaagagcaaggacaagtgcacctttgtgacagacagccccatgctgaaccacgtgaagaacatcggggccttcatcagcgaggccaagtacaagggcaccatcaaggctgacctgagcaacagcctgtacaagaggatgcctgccaccattgattctgtgtttgctggggaggtgacccagctgcagagcgaggtggcctacaagcagaagcatgatgctgcctag

SEQ ID NO: 161322 - DNA, 20010 bp, synthetic construct
  misc_feature 1..20010: note = Description of Artificial Sequence: Synthetic coding sequence
  source 1..20010: mol_type = other DNA
atggctgatgatgaagattatgaggaggtggtggagtactacacagaggaggtggtgtatgaggaggtgcctggagagaccatcaccaagatctatgagaccaccaccaccaggaccagtgactatgagcagagcgagaccagcaagccagccctggcccagcctgccctggcccagcctgccagcgccaagcctgtggagaggaggaaggtgatcaggaagaaggtggaccccagcaagttcatgaccccctacatcgcccacagccagaagatgcaggacctcttcagccccaacaagtacaaggagaagtttgagaagaccaagggccagccctatgccagcaccacagacaccccagagctgcggcgcatcaagaaggtgcaggaccagctgtctgaggtgaagtacaggatggatggagatgtggccaagaccatctgccacgtggatgagaaggccaaggacattgaacatgccaagaaggtgtcccagcaggtgtccaaggtgctgtacaagcagaactgggaggacaccaaggacaagtacctgctgcccccagatgcccctgagctggtgcaggccgtgaagaacacagccatgttcagcaagaagctgtacacagaggactgggaggccgacaagagcctcttctacccctacaatgacagccctgagctgcggcgggtggcccaggcccagaaggccctgagtgatgtggcctacaagaagggcctggccgagcagcaggcccagttcacccccctggccgaccccccagacatcgagtttgccaagaaggtgaccaaccaggtgtccaagcagaagtacaaggaggactatgagaacaagatcaagggcaagtggagcgagaccccctgctttgaggtggccaatgccaggatgaatgctgacaacatcagcaccaggaagtaccaggaggactttgagaacatgaaggaccagatctacttcatgcagacagagaccccagagtacaagatgaacaagaaggccggcgtggccgccagcaaggtgaagtacaaggaggactatgagaagaacaagggcaaggctgactacaacgtgctgcctgccagcgagaacccccagctgcggcagctgaaggctgctggagatgccctgagtgacaagctgtacaaggaaaattatgagaagaccaaggccaagagcatcaactactgtgagacccccaagttcaagctggacacagtgctgcagaacttcagcagtgacaagaagtacaaggacagctacctgaaggacatcctgggccactacgtgggcagctttgaggacccctaccacagccactgcatgaaggtgacagcccagaacagcgacaagaactacaaggccgagtatgaggaggaccggggcaagggcttcttcccccagaccatcacccaggagtatgaggccatcaagaagctggaccagtgcaaggaccacacctacaaggtgcacccagacaagaccaagttcacccaggtgacagacagccctgtgctgctgcaggcccaggtgaacagcaagcagctgagtgacctgaactacaaggccaagcatgagagcgagaagttcaagtgccacatccccccagacaccccagccttcatccagcacaaggtgaatgcctacaacctgagtgacaacctgtacaagcaggactgggagaagagcaaggccaagaagtttgacatcaaggtggatgccatccccctgctggccgccaaggccaacaccaagaacaccagtgatgtgatgtacaagaaggactatgagaagaacaagggcaagatgattggagtgctgagcatcaatgatgaccccaagatgctgcacagcctgaaggtggccaagaaccagagcgaccggctgtacaaggaaaattatgagaagaccaaggccaagtccatgaactactgtgagacccccaagtaccagctggacacccagctgaagaacttcagcgaggcccgctacaaggacctgtatgtgaaggatgtgctgggccactacgtgggctccatggaggacccctaccacacccactgcatgaaggtggccgcccagaacagcgacaagagctacaaggccgagtatgaagaagataaaggcaagtgctacttcccccagaccatcacccaggagtatgaggccatcaagaagctggaccagtgcaaggaccacacctacaaggtgcacccagacaagaccaagttcaccgctgtgacagacagccctgtgctgctgcaggcccagctgaacaccaagcagctgagtgacctgaactacaaggccaagcatgaaggagagaagttcaagtgccacatcccagcagatgccccccagttcatccagcaccgggtgaatgcctacaacctgagtgacaacgtgtacaagcaggactgggagaagagcaaggccaagaagtttgacatcaaggtggatgccatccccctgctggccgccaaggccaacaccaagaacaccagtgatgtgatgtacaagaaggactatgagaagagcaagggcaagatgattggagccctgagcatcaatgatgaccccaagatgctgcacagcctgaagacagccaagaaccagagcgaccgggagtacaggaaggactatgagaagagcaagaccatctacacagcccccctggacatgctgcaggtgacccaggccaagaagagccaggccatcgccagtgatgtggactacaagcacatcctgcacagctacagctaccccccagacagcatcaacgtggacctggccaagaaggcctatgccctgcagagtgatgtggagtacaaggctgactacaacagctggatgaagggctgcggctgggtgcccttcggcagcctggagatggagaaggccaagagggccagtgacatcctgaatgagaagaagtaccggcagcacccagacaccctgaagttcaccagcattgaagatgcccccatcaccgtgcagagcaagatcaaccaggcccagaggagtgacatcgcctacaaggccaagggggaggagatcatccacaagtacaacctgcccccagacctgccccagttcatccaggccaaggtgaatgcctacaacatcagcgagaacatgtacaaggctgacctgaaggacctgagcaagaagggctatgacctgaggacagatgccatccccatccgggccgccaaggccgcccggcaggccgccagtgatgtgcagtacaagaaggactatgagaaggccaagggcaagatggtgggcttccagagcctgcaggatgaccccaagctggtgcactacatgaatgtggccaagatccagagcgaccgggagtacaagaaggactatgagaagaccaagagcaagtacaacacccctcatgacatgtttaatgtggtggccgccaagaaggcccaggatgtggtgtccaatgtgaactacaagcacagcctgcaccactacacctacctgcctgatgccatggacctggagctgagcaagaacatgatgcagatccagagcgacaacgtgtacaaggaggactacaacaactggatgaagggcatcggctggatccccatcggcagcctggatgtggagaaggtgaagaaggctggagatgccctgaatgagaagaagtaccggcagcacccagacaccctgaagttcaccagcatcgtggacagccctgtgatggtgcaggccaagcagaacaccaagcaggtgtctgacatcctgtacaaggccaagggggaggatgtgaagcacaagtacaccatgagcccagacctgccccagttcctgcaggccaagtgcaatgcctacaacatcagtgatgtgtgctacaagagggactggtatgacctgattgccaagggcaacaacgtgctgggagatgccatccccatcacagctgccaaggccagcaggaacatcgccagtgactacaagtacaaggaggcctatgagaagagcaagggcaagcacgtgggcttccgcagcctgcaggatgaccccaagctggtgcactacatgaatgtggccaagctgcagagcgaccgggagtacaagaagaactatgagaacaccaagaccagctaccacacccctggggacatggtgtccatcacagctgccaagatggcccaggatgtggccaccaacgtgaactacaagcagcccctgcaccactacacctacctgcctgatgccatgagcctggagcacaccagaaatgtgaaccagatccagagcgacaacgtgtacaaggatgagtacaacagcttcctgaagggcatcggctggatccccatcggcagcctggaggtggagaaggtgaagaaggctggagatgccctgaatgaaaggaagtaccggcagcacccagacacagtgaagttcacctctgtgcctgacagcatgggcatggtgctggcccagcacaacaccaagcagctgagtgacctgaactacaaggtggagggggagaagctgaagcacaagtacaccatcgaccctgagctgccccagttcatccaggccaaggtgaatgccctgaacatgtctgatgcccactacaaggctgactggaagaagaccatcgccaagggctatgacctgcggccagatgccatccccatcgtggccgccaagagcagcaggaacatcgccagtgactgcaagtacaaggaggcctatgagaaggccaagggcaagcaggtgggcttcctgagcctgcaggatgaccccaagctggtgcactacatgaatgtggccaagatccagagcgaccgggagtacaagaagggctatgaggccagcaagaccaagtaccacacccccctggacatggtgtctgtgacagctgccaagaagagccaggaggtggccaccaatgccaactaccggcagagctaccaccactacaccctgctgcctgatgccctgaatgtggagcacagcagaaatgccatgcagatccagagcgacaacctgtacaagagtgacttcaccaactggatgaagggcatcggctgggtgcccatcgagagcctggaggtggagaaggccaagaaggccggggagatcctgtctgagaagaagtaccggcagcaccctgagaagctgaagttcacctacgccatggacaccatggagcaggccctgaacaagagcaacaagctgaacatggacaagaggctgtacacagagaagtggaacaaggacaagaccaccatccacgtgatgccagacaccccagacatcctgctgagccgggtgaaccagatcaccatgtctgacaagctgtacaaggccggctgggaggaggagaagaagaagggctatgacctgcggccagatgccatcgccatcaaggccgcccgggccagccgggacatcgccagtgactacaagtacaagaaggcctatgagcaggccaagggcaagcacatcggcttccgcagcctggaggatgaccccaagctggtgcacttcatgcaggtggccaagatgcagagcgaccgggagtacaagaagggctatgagaagagcaagaccagcttccacacccctgtggacatgctgtctgtggtggccgccaagaagagccaggaggtggccaccaatgccaactacagaaatgtcatccacacctacaacatgctgcctgatgccatgagctttgagctggccaagaacatgatgcagatccagagcgacaaccagtacaaggctgactatgctgacttcatgaagggcatcggctggctgcccctgggcagcctggaggccgagaagaacaagaaggccatggagatcatcagcgagaagaagtaccggcagcacccagacaccctgaagtacagcaccctgatggacagcatgaacatggtgctggcccagaacaatgccaagatcatgaatgagcacctgtacaagcaggcctgggaggccgacaagaccaaggtgcacatcatgccagacatcccccagatcatcctggccaaggccaatgccatcaacatgtctgacaagctgtacaagctgagcctggaggagagcaagaagaagggctatgacctgcggccagatgccatccccatcaaggccgccaaggccagccgggacatcgccagtgactacaagtacaagtacaactatgagaagggcaagggcaagatggtgggcttccgcagcctggaggatgaccccaagctggtgcacagcatgcaggtggccaagatgcagagcgaccgggagtacaagaagaactatgagaacaccaagaccagctaccacaccccagctgacatgctgtctgtgacagctgccaaggatgcccaggccaacatcaccaacaccaactacaagcacctgatccacaagtacatcctgctgcctgatgccatgaacatcgagctgaccaggaacatgaaccgcatccagagcgacaatgagtacaagcaggactacaatgagtggtacaagggcctgggctggagccctgctggcagcctggaggtggagaaggccaagaaggccacagaatatgccagtgaccagaagtaccggcagcaccccagcaacttccagttcaagaagctgacagacagcatggacatggtgctggccaagcagaatgcccacaccatgaacaagcacctgtacaccatcgactggaacaaggacaagaccaagatccacgtgatgccagacaccccagacatcctgcaggccaagcagaaccagaccctgtacagccagaagctgtacaagctgggctgggaggaggccctgaagaagggctatgacctgcctgtggatgccatctctgtgcagctggccaaggccagccgggacatcgccagtgactacaagtacaagcagggctacaggaagcagctgggccaccacgtgggcttccgcagcctgcaggatgaccccaagctggtgctgtccatgaatgtggccaagatgcagagcgagcgggagtacaagaaggactttgagaagtggaagaccaagttcagcagccctgtggacatgctgggcgtggtgctggccaagaagtgccaggagctggtgtctgatgtggactacaagaactacctgcaccagtggacctgcctgcctgaccagaatgatgtggtgcaggccaagaaggtgtatgagctgcagagtgaaaatctctacaagagtgacctggagtggctgcggggcatcggctggagccccctgggcagcctggaggccgagaagaacaagagggccagcgagatcatcagcgagaagaagtaccggcagcccccagacaggaacaagttcaccagcatcccagatgccatggacatcgtgctggccaagaccaatgccaagaacagaagtgaccggctgtaccgggaggcctgggacaaggacaagacccagatccacatcatgccagacaccccagacatcgtgctggccaaggccaacctgatcaacaccagtgacaagctgtacaggatgggctatgaggagctgaagaggaagggctatgacctgcctgtggatgccatccccatcaaggccgccaaggccagccgggagatcgccagcgagtacaagtacaaggagggcttcaggaagcagctgggccaccacatcggggccaggaacattgaagatgaccccaagatgatgtggagcatgcacgtggccaagatccagagcgaccgggagtacaagaaggactttgagaagtggaagaccaagttcagcagccctgtggacatgctgggcgtggtgctggccaagaagtgccagaccctggtgtctgatgtggactacaagaactacctgcaccagtggacctgcctgcctgaccagagtgatgtgatccacgcccggcaggcctatgacctgcagagcgacaacctgtacaagagtgacctgcagtggctgaagggcatcggctggatgaccagcggcagcctggaggatgagaagaacaagagggccacccagatcctgagtgaccacgtgtaccggcagcacccagaccagttcaagttcagcagcctgatggacagcatccccatggtgctggccaagaacaatgccatcaccatgaaccaccggctgtacacagaggcctgggacaaggacaagaccaccgtgcacatcatgccagacaccccagaggtgctgctggccaagcagaacaaggtgaactacagcgagaagctgtacaagctgggcctggaggaggccaagaggaagggctatgacatgagggtggatgccatccccatcaaggccgccaaggccagccgggacatcgccagcgagttcaagtacaaggagggctacaggaagcagctgggccaccacatcggggcccgggccatcagagatgaccccaagatgatgtggagcatgcacgtggccaagatccagagcgaccgggagtacaagaaggactttgagaagtggaagaccaagttcagcagccctgtggacatgctgggcgtggtgctggccaagaagtgccagaccctggtgtctgatgtggactacaagaactacctgcaccagtggacctgcctgcctgaccagagtgatgtgattcatgcccggcaggcctatgacctgcagagcgacaacatgtacaagagtgacctgcagtggatgaggggcatcggctgggtgtccatcggcagcctggatgtggagaagtgcaagagggccacagagatcctgagtgacaagatctaccggcagcccccagaccgcttcaagttcacctctgtgacagacagcctggagcaggtgctggccaagaacaatgccatcaccatgaacaagaggctgtacacagaggcctgggacaaggacaagacccagatccacatcatgccagacaccccagagatcatgctggcccggcagaacaagatcaactacagcgagaccctgtacaagctggccaatgaggaggccaagaagaagggctatgacctgcggagtgatgccatccccatcgtggccgccaaggccagcagagatgtgatcagtgactacaagtacaaggatggctacaggaagcagctgggccaccacatcggggccaggaacattgaagatgaccccaagatgatgtggagcatgcacgtggccaagatccagagcgaccgggagtacaagaaggactttgagaagtggaagaccaagttcagcagccctgtggacatgctgggcgtggtgctggccaagaagtgccagaccctggtgtctgatgtggactacaagaactacctgcacgagtggacctgcctgcctgaccagaatgatgtgatccacgcccggcaggcctatgacctgcagagcgacaacatctacaagagtgacctgcagtggctgcggggcatcggctgggtgcccatcggctccatggatgtggtgaagtgcaagagagctgctgagatcctgagtgacaacatctaccggcagcccccagacaagctgaagttcacctctgtgacagacagcctggagcaggtgctggccaagaacaatgccctgaacatgaacaagaggctgtacacagaggcctgggacaaggacaagacccaggtgcacatcatgccagacaccccagagatcatgctggcccggcagaacaagatcaactacagcgagagcctgtaccggcaggccatggaggaggccaagaaggagggctatgacctgcggagtgatgccatccccatcgtggccgccaaggccagccgggacatcgccagtgactacaagtacaaggaggcctacaggaagcagctgggccaccacatcggggcccgggctgtgcatgatgaccccaagatcatgtggagcctgcacatcgccaaggtgcagagcgaccgggagtacaagaaggactttgagaagtacaagacccgctacagcagccctgtggacatgctgggcatcgtgctggccaagaagtgccagaccctggtgtctgatgtggactacaagcaccccctgcacgagtggatctgcctgcctgaccagaatgacatcatccacgccaggaaggcctatgacctgcagagcgacaacctgtacaagagtgacctggagtggatgaagggcatcggctgggtgcccatcgacagcctggaggtggtgcgggccaagagagctggggagctgctgagtgacaccatctaccggcagaggcctgagaccctgaagttcaccagcatcacagacaccccagagcaggtgctggccaagaacaatgccctgaacatgaacaagaggctgtacacagaggcctgggacaatgacaagaagaccatccacgtgatgccagacaccccagagatcatgctggccaagctgaaccgcatcaactacagcgacaagctgtacaagctggccctggaggagagcaagaaggagggctatgacctgcggctggatgccatccccatccaggccgccaaggccagccgggacatcgccagtgactacaagtacaaggagggctacaggaagcagctgggccaccacatcggggccaggaacatcaaggatgaccccaagatgatgtggagcatccacgtggccaagatccagagcgaccgggagtacaagaaggagtttgagaagtggaagaccaagttcagcagccctgtggacatgctgggcgtggtgctggccaagaagtgccagatcctggtgtctgacatcgactacaagcaccccctgcacgagtggacctgcctgcctgaccagaatgatgtgatccaggccaggaaggcctatgacctgcagagtgatgccatctacaagagtgacctggagtggctgcggggcatcggctgggtgcccatcggctctgtggaggtggagaaggtgaagagagctggggagatcctgagtgacaggaagtaccggcagcctgctgaccagctgaagttcacctgcatcacagacaccccagagatcgtgctggccaagaacaatgccctgaccatgagcaagcacctgtacacagaggcctgggatgctgacaagaccagcatccacgtgatgccagacaccccagacatcctgctggccaagagcaacagcgccaacatcagccagaagctgtacaccaagggctgggatgagagcaagatgaaggactatgacctgcgggcagatgccatcagcatcaagagcgccaaggccagccgggacatcgccagtgactacaagtacaaggaggcctatgagaagcagaagggccaccacatcggggcccagagcattgaagatgaccccaagatcatgtgtgccatccatgctgggaagatccagagcgagcgggagtacaagaaggagttccagaagtggaagaccaagttcagcagccctgtggacatgctgagcatcctgctggccaagaagtgccagaccctggtgacagacatcgactacagaaactacctgcacgagtggacctgcatgccagaccagaatgacatcatccaggccaagaaggcctatgacctgcagagtgatgccctgtacaaggctgacctggagtggctgcggggcatcggctggatgccccagggcagccctgaggtgctgcgggtgaagaatgcccagaacatcttctgtgacagcgtgtaccgcacccctgtggtgaacctgaagtacaccagcatcgtggacaccccagaggtggtgctggccaagagcaatgctgagaacatcagcatccccaagtaccgggaggtgtgggacaaggacaagaccagcatccacatcatgccagacaccccagagatcaacctggcccgggccaatgccctgaatgtgagcaacaagctgtaccgggagggctgggatgagatgaaggccggctgtgatgtgcggctggatgccatccccatccaggccgccaaggccagccgggagatcgccagtgactacaagtacaagctggaccacgagaagcagaagggccactacgtgggcaccctgacagccagagatgacaacaagatccgctgggccctgattgctgacaagctgcagaatgaaagagagtaccgcctggactgggccaagtggaaggccaagatccagagccctgtggacatgctgagcatcctgcacagcaagaacagccaggccctggtgtctgacatggactacagaaactacctgcaccagtggacctgcatgccagaccagaatgatgtgatccaggccaagaaggcctatgagctgcagagcgacaacgtgtacaaggctgacctggagtggctgcggggcatcggctggatgcccaatgattctgtgtctgtgaaccacgccaagcacgccgctgacatcttcagcgagaagaagtaccgcaccaagattgagaccctgaacttcacccctgtggatgacagagtggactatgtgacagccaagcagagcggggagatcctggatgacatcaagtacaggaaggactggaatgccaccaagagcaagtacaccctgacagagacccccctgctgcacacagcccaggaggccgcccgcatcctggaccagtacctgtacaaggagggctgggagcggcagaaggccaccggctacatcctgcccccagatgctgtgccctttgtgcacgcccaccactgcaatgatgtgcagagcgagctgaagtacaaggccgagcacgtgaagcagaagggccactacgtgggcgtgcccaccatgagagatgaccccaagctggtgtggtttgagcacgccggccagatccagaatgaaagactctacaaggaggactaccacaagaccaaggccaagatcaacatcccagctgacatggtgtctgtgctggccgccaagcagggccagaccctggtgtctgacatcgactacagaaactacctgcaccagtggatgtgccacccagaccagaatgatgtgatccaggccaggaaggcctatgacctgcagagcgacaacgtgtacagagctgacctggagtggctgcggggcatcggctggatccccctggacagcgtggaccacgtgcgggtgaccaagaaccaggagatgatgagccagatcaagtacaagaagaatgccctggagaactaccccaacttccgctctgtggtggaccccccagaaattgtgctggccaagatcaacagcgtgaaccagagtgatgtgaagtacaaggagaccttcaacaaggccaagggcaagtacaccttctccccagacaccccccacatcagccacagcaaggacatgggcaagctgtacagcaccatcctgtacaagggggcctgggagggcaccaaggcctacggctacaccctggatgagcgctacatccccatcgtgggcgccaagcacgccgacctggtgaacagcgagctgaagtacaaggagacctatgagaagcagaagggccactacctggccggcaaggtgattggagagttccctggggtggtgcactgcctggacttccagaagatgaggtctgccctgaactacaggaagcactatgaggacaccaaggccaacgtgcacatccccaatgacatgatgaaccacgtgctggccaagcgctgccagtacatcctgagtgacctggagtaccgccactacttccaccagtggaccagcctgctggaggagcccaacgtcatccgggtgagaaatgcccaggagatcctgagtgacaacgtgtacaaggatgacctgaactggctgaagggcatcggctgctacgtgtgggacaccccccagatcctgcacgccaagaagagctatgacctgcagagccagctgcagtacacagctgctgggaaggagaacctgcagaactacaacctggtgacagacacccccctgtatgtgacagctgtgcagagcggcatcaatgccagcgaggtgaagtacaaggagaactaccaccagatcaaggacaagtacaccaccgtgctggagaccgtggactatgacaggaccaggaacctgaagaacctgtacagcagcaacctgtacaaggaggcctgggacagagtgaaggccaccagctacatcctgcccagcagcaccctgagcctgacccacgccaagaaccagaagcacctggccagccacatcaagtaccgggaggagtatgagaagttcaaggccctgtacaccctgcccaggtctgtggatgatgaccccaacacagcccgctgcctgcgggtgggcaagctgaacatcgaccggctgtacagatctgtgtatgagaagaacaagatgaagatccacatcgtgcctgacatggtggagatggtgacagccaaggacagccagaagaaggtgtctgaaattgactaccgcctgcggctgcacgagtggatctgccacccagacctgcaggtgaatgaccacgtgaggaaggtgacagaccagatcagtgacatcgtgtacaaggatgacctgaactggctgaagggcatcggctgctacgtgtgggacaccccagagatcctgcacgccaagcacgcctatgacctgagagatgacatcaagtacaaggcccacatgctgaagaccagaaatgactacaagctggtgacagacacccctgtgtatgtgcaggccgtgaagagcggcaagcagctgagtgatgctgtgtaccactatgactatgtgcacagcgtgcggggcaaggtggcccccaccaccaagacagtggacctggaccgggccctgcacgcctacaagctgcagagcagcaacctgtacaagaccagcctgcggaccctgcccaccggctaccgcctgcccggggacaccccccacttcaagcacatcaaggacacccgctacatgagcagctacttcaagtacaaggaggcctatgagcacaccaaggcctacggctacaccctgggccccaaggatgtgccctttgtgcacgtgcggcgggtgaacaacgtgaccagcgagcggctgtaccgggagctgtaccacaagctgaaggacaagatccacaccaccccagacaccccagagatccggcaggtgaagaagacccaggaggccgtgtctgagctgatctacaagagtgacttcttcaagatgcagggccacatgatcagcctgccctacaccccccaggtgatccactgccgctacgtgggggacatcaccagtgacatcaagtacaaggaggacctgcaggtgctgaagggcttcggctgcttcctgtatgacaccccagacatggtgcgcagccgccacctgaggaagctgtggagcaactacctgtacacagacaaggccaggaagatgagggacaagtacaaggtggtgctggacaccccagagtacaggaaggtgcaggagctgaagacccacctgtctgagctggtgtacagagctgctgggaagaagcagaagagcatcttcacctctgtgcctgacaccccagacctgctgcgggccaagaggggccagaagctgcagagccagtacctgtatgtggagctggccaccaaggagcggccccaccaccacgccggcaaccagaccacagccctgaagcacgccaaggatgtgaaggacatggtgtctgagaagaagtacaagatccagtatgagaagatgaaggacaagtacacccctgtgcctgacacccccatcctgatccgggccaagagggcctactggaatgccagtgacctgcgctacaaggagaccttccagaagaccaagggcaagtaccacacagtgaaggatgccctggacatcgtgtaccacaggaaggtgacagatgacatcagcaagatcaagtacaaggagaactacatgagccagctgggcatctggaggagcatcccagacaggcctgagcacttccaccacagagctgtgacagacacagtgtctgatgtgaagtacaaggaggacctgacctggctgaagggcatcggctgctacgcctatgacaccccagacttcaccctggccgagaagaacaagaccctgtacagcaagtacaagtacaaggaggtgtttgagaggaccaagagtgacttcaagtatgtggccgacagccccatcaacagacacttcaagtatgccacccagctgatgaatgagaagaagtacagagctgactatgagcagaggaaggacaagtaccacctggtggtggatgagcccaggcacctgctggccaagacagctggggaccagatcagccagatcaagtacaggaagaactatgagaagagcaaggacaagttcaccagcatcgtggacaccccagagcacctgcggaccaccaaggtgaacaagcagatcagtgacatcctgtacaagctggagtacaacaaggccaagccccggggctacaccaccatccatgacacccccatgctgctgcacgtgaggaaggtgaaggatgaggtgtctgacctgaagtacaaggaggtgtaccagaggaacaagagcaactgcaccattgaaccagatgctgtgcacatcaaggccgccaaggatgcctacaaggtgaacaccaacctggactacaagaagcagtatgaggccaacaaggcccactggaagtggaccccagacagaccagacttcctgcaggccgccaagagcagcctgcagcagagcgactttgagtacaagctggaccgggagttcctgaagggctgcaagctgtctgtgacagatgacaagaacacagtgctggccctgaggaacaccctgattgaaagtgacctgaagtacaaggagaagcacgtgaaggagcggggcacctgccacgctgtgcctgacaccccccagatcctgctggccaagacagtgagcaacctggtgtctgagaacaagtacaaggaccacgtgaagaagcacctggcccagggcagctacaccaccctgcctgagacccgggacacagtgcacgtgaaggaggtgaccaagcacgtgtctgacaccaactacaagaagaagtttgtgaaggagaagggcaagagcaactacagcatcatgctggagcccccagaggtgaagcacgccatggaggtggccaagaagcagagtgatgtggcctacaggaaggatgccaaggagaacctgcactacaccaccgtggccgacagaccagacatcaagaaggccacccaggccgccaagcaggccagcgaggtggagtaccgggccaagcacaggaaggagggcagccacggcctgtccatgctgggccgcccagacatcgagatggccaagaaggccgccaagctgagcagccaggtgaagtacagagaaaattttgacaaggagaagggcaagacccccaagtacaaccccaaggacagccagctgtacaaggtgatgaaggatgccaacaacctggccagcgaggtgaagtacaaggctgacctgaagaagctgcacaagcctgtgacagacatgaaggagagcctcatcatgaaccacgtgctgaacaccagccagctggccagcagctaccagtacaagaagaagtatgagaagagcaagggccactaccacaccatcccagacaacctggagcagctgcacctgaaggaggccacagagctgcagagcatcgtgaagtacaaggagaagtatgagaaggagcggggcaagcccatgctggactttgagacccccacctacatcacagccaaggagagccagcagatgcagagcggcaaggagtacaggaaggactatgaggagagcatcaagggcaggaacctgaccggcctggaggtgaccccagccctgctgcacgtgaagtatgccaccaagatcgccagcgagaaggagtacaggaaggacctggaggagagcatccggggcaagggcctgacagagatggaggacaccccagacatgctgcgggccaagaatgccacccagatcctgaatgagaaggagtacaagagggacctggagctggaggtgaagggccggggcctgaatgccatggccaatgagaccccagacttcatgagggccagaaatgccacagacatcgccagccagatcaagtacaagcagagcgctgagatggagaaggccaacttcacctctgtggtggacaccccagagatcatccacgcccagcaggtgaagaacctgagcagccagaagaagtacaaggaggatgctgagaagtccatgagctactatgaaacagtgctggacaccccagagatccagagggtgcgggagaaccagaagaacttcagcctgctgcagtaccagtgtgacctgaagaacagcaagggcaagatcaccgtggtgcaggacaccccagagatcctgcgggtgaaggagaaccagaagaacttcagctctgtgctgtacaaggaggatgtgtccccaggcacagccatcggcaagaccccagagatgatgagggtgaagcagacccaggaccacatcagctctgtgaagtacaaggaggccatcggccagggcacccccatcccagacctgcctgaggtgaagagggtgaaggagacccagaagcacatcagctctgtgatgtacaaggagaacctgggcaccggcatccccaccaccgtgaccccagaaattgaaagagtgaagaggaaccaggagaacttcagctctgtgctgtacaaggagaacctgggcaagggcatccccacccccatcaccccagagatggagcgggtgaagaggaaccaggagaacttcagctctgtgctgtacaaggagaacatgggcaagggcacccccctggccgtgaccccagagatggagcgggtgaagcacaaccaggagaacatcagctctgtgctgtacaaggaaaatgtgggcaaggccacagccacccctgtgaccccagagatgcagagggtgaagaggaaccaggagaacatcagctctgtgctgtacaaggagaacctgggcaaggccacccccacccccttcaccccagagatggagcgggtgaagaggaaccaggagaacttcagctctgtgctgtacaaggagaacatgaggaaggccacccccacccctgtgaccccagagatggagcgggccaagaggaaccaggagaacatcagctctgtgctgtacagcgacagcttcaggaagcagatccagggcaaggccgcctacgtgctggacaccccagagatgagaagagtgcgggagacccagaggcacatcagcacagtgaagtaccacgaggactttgagaagcacaagggctgcttcacccctgtggtgacagaccccatcacagagcgggtgaagaagaacatgcaggacttcagtgacatcaactaccggggcatccagaggaaggtggtggagatggagcagaagagaaatgaccaggaccaggagaccatcaccggcctgcgggtgtggaggaccaaccctggctctgtgtttgattatgaccctgctgaggacaacatccagagccgcagcctgcacatgatcaacgtgcaggcccagaggaggagccgggagcagagccgcagcgccagcgccctgagcatctctggaggagaggagaagtctgagcacagcgaggccccagaccaccacctgagcacctacagtgatggcggcgtgtttgctgtgtccacagcctacaagcacgccaagaccacagagctgccccagcagaggagcagctctgtggccacccagcagaccaccgtgagcagcatccccagccaccccagcacagctgggaagatcttccgggccatgtatgactacatggccgcagatgctgatgaggtgtccttcaaggatggagatgccatcatcaacgtgcaggccattgatgagggctggatgtatggaacagtgcagaggactggaagaacaggcatgctgcctgccaactacgtggaggccatctag

SEQ ID NO: 161323 - DNA, 1503 bp, synthetic construct
  misc_feature 1..1503: note = Description of Artificial Sequence: Synthetic coding sequence
  source 1..1503: mol_type = other DNA
atggagcgggtgaagaggaaccaggagaacttcagctctgtgctgtacaaggagaacctgggcaccggcatccccatccccatcaccccagagatgcagagggtgaagcacaaccaggagaacctgagctctgtgctgtacaaggagaacatgggcaagggcacccccctgcctgtgaccccagagatggagcgggtgaagcacaaccaggagaacatcagctctgtgctgtacaaggagaacatgggcaagggcacccccctgcctgtgaccccagagatggagcgggtgaagcacaaccaggagaacatcagctctgtgctgtacaaggagaacatgggcaagggcacccccctggccgtgaccccagagatggagcgggtgaagcacaaccaggagaacatcagctctgtgctgtacaaggaaaatgtgggcaaggccacagccacccctgtgaccccagagatgcagagggtgaagaggaaccaggagaacatcagctctgtgctgtacaaggagaacctgggcaaggccacccccacccccttcaccccagagatggagcgggtgaagaggaaccaggagaacttcagctctgtgctgtacaaggagaacatgaggaaggccacccccacccctgtgaccccagagatggagcgggccaagaggaaccaggagaacatcagctctgtgctgtacagcgacagcttcaggaagcagatccagggcaaggccgcctacgtgctggacaccccagagatgagaagagtgcgggagacccagaggcacatcagcacagtgaagtaccatgaagattttgagaagcacaagggctgcttcacccctgtggtgacagaccccatcacagagcgggtgaagaagaacatgcaggacttcagtgacatcaactaccggggcatccagaggaaggtggtggagatggagcagaagagaaatgaccaggaccaggagaccatcaccggcctgcgggtgtggaggaccaaccctggctctgtgtttgattatgaccctgctgaggacaacatccagagccgcagcctgcacatgatcaacgtgcaggcccagaggaggagccgggagcagagccgcagcgccagcgccctgagcatcagcggcggggaggagaagtctgagcacagcgaggccccagaccaccacctgagcacctacagtgatggaggagtgtttgctgtgtccacagcctacaagcacgccaagaccacagagctgccccagcagaggagcagctctgtggccacccagcagaccaccgtgagcagcatccccagccaccccagcacagctgggaagatcttccgggccatgtatgactacatggctgctgatgctgatgaggtgtccttcaaggatggagatgccatcatcaacgtgcaggccattgatgagggctggatgtatggcaccgtgcagaggacaggccgcacaggcatgctgcctgccaactacgtggaggccatctag

SEQ ID NO: 161324 - DNA, 7878 bp, synthetic construct
  misc_feature 1..7878: note = Description of Artificial Sequence: Synthetic coding sequence
  source 1..7878: mol_type = other DNA
atgccagacaccccagagatcaacctggcccgggccaatgccctgaatgtgagcaacaagctgtaccgggagggctgggatgagatgaaggccggctgtgatgtgcggctggatgccatccccatccaggccgccaaggccagccgggagatcgccagtgactacaagtacaagctggaccacgagaagcagaagggccactacgtgggcaccctgacagccagagatgacaacaagatccgctgggccctgattgctgacaagctgcagaatgaaagagagtaccgcctggactgggccaagtggaaggccaagatccagagccctgtggacatgctgagcatcctgcacagcaagaacagccaggccctggtgtctgacatggactacagaaactacctgcaccagtggacctgcatgccagaccagaatgatgtgatccaggccaagaaggcctatgagctgcagagcgacaacgtgtacaaggctgacctggagtggctgcggggcatcggctggatgcccaatgacagcgtgtctgtgaaccacgccaagcatgctgctgacatcttcagcgagaagaagtaccgcaccaagattgagaccctgaacttcacccctgtggatgacagagtggactatgtgacagccaagcagagcggggagatcctggatgacatcaagtacaggaaggactggaatgccaccaagagcaagtacaccctgacagagacccccctgctgcacacagcccaggaggccgcccgcatcctggaccagtacctgtacaaggagggctgggagcggcagaaggccaccggctacatcctgcccccagatgctgtgccctttgtgcacgcccaccactgcaatgatgtgcagagcgagctgaagtacaaggccgagcacgtgaagcagaagggccactacgtgggcgtgcccaccatgagagatgaccccaagctggtgtggtttgaacatgctggccagatccagaatgaaaggctgtacaaggaggactaccacaagaccaaggccaagatcaacatcccagctgacatggtgtctgtgctggccgccaagcagggccagaccctggtgtctgacatcgactacagaaactacctgcaccagtggatgtgccacccagaccagaatgatgtgatccaggccaggaaggcctatgacctgcagagcgacaacgtgtacagagctgacctggagtggctgcggggcatcggctggatccccctggacagcgtggaccacgtgcgggtgaccaagaaccaggagatgatgagccagatcaagtacaagaagaatgccctggagaactaccccaacttccgctctgtggtggaccccccagagatcgtgctggccaagatcaacagcgtgaaccagagtgatgtgaagtacaaggagaccttcaacaaggccaagggcaagtacaccttctccccagacaccccccacatcagccacagcaaggacatgggcaagctgtacagcaccatcctgtacaagggggcctgggagggcaccaaggcctacggctacaccctggatgagcgctacatccccatcgtgggcgccaagcatgctgacctggtgaacagcgagctgaagtacaaggagacctatgagaagcagaagggccactacctggccggcaaggtgattggagagttccctggggtggtgcactgcctggacttccagaagatgaggtctgccctgaactacaggaagcactatgaggacaccaaggccaacgtgcacatccccaatgacatgatgaaccacgtgctggccaagcgctgccagtacatcctgagtgacctggagtaccgccactacttccaccagtggaccagcctgctggaggagcccaacgtcatccgggtgagaaatgcccaggagatcctgagtgacaacgtgtacaaggatgacctgaactggctgaagggcatcggctgctacgtgtgggacaccccccagatcctgcacgccaagaagagctatgacctgcagagccagctgcagtacacagctgctgggaaggagaacctgcagaactacaacctggtgacagacacccccctgtatgtgacagctgtgcagagcggcatcaatgccagcgaggtgaagtacaaggagaactaccaccagatcaaggacaagtacaccaccgtgctggagaccgtggactatgacaggaccaggaacctgaagaacctgtacagcagcaacctgtacaaggaggcctgggacagagtgaaggccaccagctacatcctgcccagcagcaccctgagcctgacccacgccaagaaccagaagcacctggccagccacatcaagtaccgggaggagtatgagaagttcaaggccctgtacaccctgcccaggtctgtggatgatgaccccaacacagcccgctgcctgcgggtgggcaagctgaacatcgaccggctgtacagatctgtgtatgagaagaacaagatgaagatccacatcgtgcctgacatggtggagatggtgacagccaaggacagccagaagaaggtgtctgaaattgactaccgcctgcggctgcacgagtggatctgccacccagacctgcaggtgaatgaccacgtgaggaaggtgacagaccagatcagtgacatcgtgtacaaggatgacctgaactggctgaagggcatcggctgctacgtgtgggacaccccagagatcctgcacgccaagcacgcctatgacctgagagatgacatcaagtacaaggcccacatgctgaagaccagaaatgactacaagctggtgacagacacccctgtgtatgtgcaggccgtgaagagcggcaagcagctgagtgatgctgtgtaccactatgactatgtgcacagcgtgcggggcaaggtggcccccaccaccaagacagtggacctggaccgggccctgcacgcctacaagctgcagagcagcaacctgtacaagaccagcctgcggaccctgcccaccggctaccgcctgcccggggacaccccccacttcaagcacatcaaggacacccgctacatgagcagctacttcaagtacaaggaggcctatgagcacaccaaggcctacggctacaccctgggccccaaggatgtgccctttgtgcacgtgagaagagtgaacaacgtgaccagcgagcggctgtaccgggagctgtaccacaagctgaaggacaagatccacaccaccccagacaccccagagatccggcaggtgaagaagacccaggaggccgtgtctgagctgatctacaagagtgacttcttcaagatgcagggccacatgatcagcctgccctacaccccccaggtgatccactgccgctacgtgggggacatcaccagtgacatcaagtacaaggaggacctgcaggtgctgaagggcttcggctgcttcctgtatgacaccccagacatggtgcgcagccgccacctgaggaagctgtggagcaactacctgtacacagacaaggccaggaagatgagggacaagtacaaggtggtgctggacaccccagagtacaggaaggtgcaggagctgaagacccacctgtctgagctggtgtacagagctgctgggaagaagcagaagagcatcttcacctctgtgcctgacaccccagacctgctgcgggccaagaggggccagaagctgcagagccagtacctgtatgtggagctggccaccaaggagcggccccaccaccacgccggcaaccagaccacagccctgaagcacgccaaggatgtgaaggacatggtgtctgagaagaagtacaagatccagtatgagaagatgaaggacaagtacacccctgtgcctgacacccccatcctgatccgggccaagagggcctactggaatgccagtgacctgcgctacaaggagaccttccagaagaccaagggcaagtaccacacagtgaaggatgccctggacatcgtgtaccacaggaaggtgacagatgacatcagcaagatcaagtacaaggagaactacatgagccagctgggcatctggaggagcatcccagacaggcctgagcacttccaccacagagctgtgacagacacagtgtctgatgtgaagtacaaggaggacctgacctggctgaagggcatcggctgctacgcctatgacaccccagacttcaccctggccgagaagaacaagaccctgtacagcaagtacaagtacaaggaggtgtttgagaggaccaagagtgacttcaagtatgtggccgacagccccatcaacagacacttcaagtatgccacccagctgatgaatgagaagaagtacagagctgactatgagcagaggaaggacaagtaccacctggtggtggatgagcccaggcacctgctggccaagacagctggggaccagatcagccagatcaagtacaggaagaactatgagaagagcaaggacaagttcaccagcatcgtggacaccccagagcacctgcggaccaccaaggtgaacaagcagatcagtgacatcctgtacaagctggagtacaacaaggccaagccccggggctacaccaccatccatgacacccccatgctgctgcacgtgaggaaggtgaaggatgaggtgtctgacctgaagtacaaggaggtgtaccagaggaacaagagcaactgcaccatcgagccagatgctgtgcacatcaaggccgccaaggatgcctacaaggtgaacaccaacctggactacaagaagcagtatgaggccaacaaggcccactggaagtggaccccagacagaccagacttcctgcaggccgccaagagcagcctgcagcagagcgactttgagtacaagctggaccgggagttcctgaagggctgcaagctgtctgtgacagatgacaagaacacagtgctggccctgaggaacaccctcatcgagagtgacctgaagtacaaggagaagcacgtgaaggagcggggcacctgccacgctgtgcctgacaccccccagatcctgctggccaagacagtgagcaacctggtgtctgagaacaagtacaaggaccacgtgaagaagcacctggcccagggcagctacaccaccctgcctgagacccgggacacagtgcacgtgaaggaggtgaccaagcacgtgtctgacaccaactacaagaagaagtttgtgaaggagaagggcaagagcaactacagcatcatgctggagcccccagaggtgaagcacgccatggaggtggccaagaagcagagtgatgtggcctacaggaaggatgccaaggagaacctgcactacaccaccgtggccgacagaccagacatcaagaaggccacccaggccgccaagcaggccagcgaggtggagtaccgggccaagcacaggaaggagggcagccacggcctgtccatgctgggccgcccagacatcgagatggccaagaaggccgccaagctgagcagccaggtgaagtaccgggagaactttgacaaggagaagggcaagacccccaagtacaaccccaaggacagccagctgtacaaggtgatgaaggatgccaacaacctggccagcgaggtgaagtacaaggctgacctgaagaagctgcacaagcctgtgacagacatgaaggagagcctcatcatgaaccacgtgctgaacaccagccagctggccagcagctaccagtacaagaagaagtatgagaagagcaagggccactaccacaccatcccagacaacctggagcagctgcacctgaaggaggccacagagctgcagagcatcgtgaagtacaaggagaagtatgagaaggagcggggcaagcccatgctggactttgagacccccacctacatcacagccaaggagagccagcagatgcagagcggcaaggagtacaggaaggactatgaggagagcatcaagggcaggaacctgaccggcctggaggtgaccccagccctgctgcacgtgaagtatgccaccaagatcgccagcgagaaggagtacaggaaggacctggaggagagcatccggggcaagggcctgacagagatggaggacaccccagacatgctgcgggccaagaatgccacccagatcctgaatgagaaggagtacaagagggacctggagctggaggtgaagggccggggcctgaatgccatggccaatgagaccccagacttcatgagggccagaaatgccacagacatcgccagccagatcaagtacaagcagagcgctgagatggagaaggccaacttcacctctgtggtggacaccccagagatcatccacgcccagcaggtgaagaacctgagcagccagaagaagtacaaggaggatgctgagaagtccatgagctactatgagaccgtgctggacaccccagagatccagagggtgcgggagaaccagaagaacttcagcctgctgcagtaccagtgtgacctgaagaacagcaagggcaagatcaccgtggtgcaggacaccccagagatcctgcgggtgaaggagaaccagaagaacttcagctctgtgctgtacaaggaggatgtgtccccaggcacagccatcggcaagaccccagagatgatgagggtgaagcagacccaggaccacatcagctctgtgaagtacaaggaggccatcggccagggcacccccatcccagacctgcctgaggtgaagagggtgaaggagacccagaagcacatcagctctgtgatgtacaaggagaacctgggcaccggcatccccaccaccgtgaccccagaaattgagcgggtgaagaggaaccaggagaacttcagctctgtgctgtacaaggagaacatgggcaagggcacccccctgcctgtgaccccagagatggagcgggtgaagcacaaccaggagaacatcagctctgtgctgtacaaggaaaatgtgggcaaggccacagccacccctgtgaccccagagatgcagagggtgaagaggaaccaggagaacatcagctctgtgctgtacagcgacagcttcaggaagcagatccagggcaaggccgcctacgtgctggacaccccagagatgagaagagtgcgggagacccagaggcacatcagcacagtgaagtaccacgaggactttgagaagcacaagggctgcttcacccctgtggtgacagaccccatcacagagcgggtgaagaagaacatgcaggacttcagtgacatcaactaccggggcatccagaggaaggtggtggagatggagcagaagagaaatgaccaggaccaggagaccatcaccggcctgcgggtgtggaggaccaaccctggctctgtgtttgattatgaccctgctgaggacaacatccagagccgcagcctgcacatgatcaacgtgcaggcccagaggaggagccgggagcagagccgcagcgccagcgccctgagcatctctggaggagaggagaagtctgagcacagcgaggccccagaccaccacctgagcacctacagtgatggcggcgtgtttgctgtgtccacagcctacaagcacgccaagaccacagagctgccccagcagaggagcagctctgtggccacccagcagaccaccgtgagcagcatccccagccaccccagcacagctgggaagatcttccgggccatgtatgactacatggccgcagatgctgatgaggtgtccttcaaggatggagatgccatcatcaacgtgcaggccattgatgagggctggatgtatggaacagtgcagaggactggaagaacaggcatgctgcctgccaactacgtggaggccatctag

SEQ ID NO: 161325 - DNA, 25578 bp, synthetic construct
  misc_feature 1..25578: note = Description of Artificial Sequence: Synthetic coding sequence
  source 1..25578: mol_type = other DNA
atggctgatgatgaagattatgaggaggtggtggagtactacacagaggaggtggtgtatgaggaggtgcctggagagaccatcaccaagatctatgagaccaccaccaccaggaccagtgactatgagcagagcgagaccagcaagccagccctggcccagcctgccctggcccagcctgccagcgccaagcctgtggagaggaggaaggtgatcaggaagaaggtggaccccagcaagttcatgaccccctacatcgcccacagccagaagatgcaggacctcttcagccccaacaagtacaaggagaagtttgagaagaccaagggccagccctatgccagcaccacagacaccccagagctgcggcgcatcaagaaggtgcaggaccagctgtctgaggtgaagtacaggatggatggagatgtggccaagaccatctgccacgtggatgagaaggccaaggacattgaacatgccaagaaggtgtcccagcaggtgtccaaggtgctgtacaagcagaactgggaggacaccaaggacaagtacctgctgcccccagatgcccctgagctggtgcaggccgtgaagaacacagccatgttcagcaagaagctgtacacagaggactgggaggccgacaagagcctcttctacccctacaatgacagccctgagctgcggcgggtggcccaggcccagaaggccctgagtgatgtggcctacaagaagggcctggccgagcagcaggcccagttcacccccctggccgaccccccagacatcgagtttgccaagaaggtgaccaaccaggtgtccaagcagaagtacaaggaggactatgagaacaagatcaagggcaagtggagcgagaccccctgctttgaggtggccaatgccaggatgaatgctgacaacatcagcaccaggaagtaccaggaggactttgagaacatgaaggaccagatctacttcatgcagacagagaccccagagtacaagatgaacaagaaggccggcgtggccgccagcaaggtgaagtacaaggaggactatgagaagaacaagggcaaggctgactacaacgtgctgcctgccagcgagaacccccagctgcggcagctgaaggctgctggagatgccctgagtgacaagctgtacaaggaaaattatgagaagaccaaggccaagagcatcaactactgtgagacccccaagttcaagctggacacagtgctgcagaacttcagcagtgacaagaagtacaaggacagctacctgaaggacatcctgggccactacgtgggcagctttgaggacccctaccacagccactgcatgaaggtgacagcccagaacagcgacaagaactacaaggccgagtatgaggaggaccggggcaagggcttcttcccccagaccatcacccaggagtatgaggccatcaagaagctggaccagtgcaaggaccacacctacaaggtgcacccagacaagaccaagttcacccaggtgacagacagccctgtgctgctgcaggcccaggtgaacagcaagcagctgagtgacctgaactacaaggccaagcatgagagcgagaagttcaagtgccacatccccccagacaccccagccttcatccagcacaaggtgaatgcctacaacctgagtgacaacctgtacaagcaggactgggagaagagcaaggccaagaagtttgacatcaaggtggatgccatccccctgctggccgccaaggccaacaccaagaacaccagtgatgtgatgtacaagaaggactatgagaagaacaagggcaagatgattggagtgctgagcatcaatgatgaccccaagatgctgcacagcctgaaggtggccaagaaccagagcgaccggctgtacaaggaaaattatgagaagaccaaggccaagtccatgaactactgtgagacccccaagtaccagctggacacccagctgaagaacttcagcgaggcccgctacaaggacctgtatgtgaaggatgtgctgggccactacgtgggctccatggaggacccctaccacacccactgcatgaaggtggccgcccagaacagcgacaagagctacaaggccgagtatgaagaagataaaggcaagtgctacttcccccagaccatcacccaggagtatgaggccatcaagaagctggaccagtgcaaggaccacacctacaaggtgcacccagacaagaccaagttcaccgctgtgacagacagccctgtgctgctgcaggcccagctgaacaccaagcagctgagtgacctgaactacaaggccaagcatgaaggagagaagttcaagtgccacatcccagcagatgccccccagttcatccagcaccgggtgaatgcctacaacctgagtgacaacgtgtacaagcaggactgggagaagagcaaggccaagaagtttgacatcaaggtggatgccatccccctgctggccgccaaggccaacaccaagaacaccagtgatgtgatgtacaagaaggactatgagaagagcaagggcaagatgattggagccctgagcatcaatgatgaccccaagatgctgcacagcctgaagacagccaagaaccagagcgaccgggagtacaggaaggactatgagaagagcaagaccatctacacagcccccctggacatgctgcaggtgacccaggccaagaagagccaggccatcgccagtgatgtggactacaagcacatcctgcacagctacagctaccccccagacagcatcaacgtggacctggccaagaaggcctatgccctgcagagtgatgtggagtacaaggctgactacaacagctggatgaagggctgcggctgggtgcccttcggcagcctggagatggagaaggccaagagggccagtgacatcctgaatgagaagaagtaccggcagcacccagacaccctgaagttcaccagcattgaagatgcccccatcaccgtgcagagcaagatcaaccaggcccagaggagtgacatcgcctacaaggccaagggggaggagatcatccacaagtacaacctgcccccagacctgccccagttcatccaggccaaggtgaatgcctacaacatcagcgagaacatgtacaaggctgacctgaaggacctgagcaagaagggctatgacctgaggacagatgccatccccatccgggccgccaaggccgcccggcaggccgccagtgatgtgcagtacaagaaggactatgagaaggccaagggcaagatggtgggcttccagagcctgcaggatgaccccaagctggtgcactacatgaatgtggccaagatccagagcgaccgggagtacaagaaggactatgagaagaccaagagcaagtacaacacccctcatgacatgtttaatgtggtggccgccaagaaggcccaggatgtggtgtccaatgtgaactacaagcacagcctgcaccactacacctacctgcctgatgccatggacctggagctgagcaagaacatgatgcagatccagagcgacaacgtgtacaaggaggactacaacaactggatgaagggcatcggctggatccccatcggcagcctggatgtggagaaggtgaagaaggctggagatgccctgaatgagaagaagtaccggcagcacccagacaccctgaagttcaccagcatcgtggacagccctgtgatggtgcaggccaagcagaacaccaagcaggtgtctgacatcctgtacaaggccaagggggaggatgtgaagcacaagtacaccatgagcccagacctgccccagttcctgcaggccaagtgcaatgcctacaacatcagtgatgtgtgctacaagagggactggtatgacctgattgccaagggcaacaacgtgctgggagatgccatccccatcacagctgccaaggccagcaggaacatcgccagtgactacaagtacaaggaggcctatgagaagagcaagggcaagcacgtgggcttccgcagcctgcaggatgaccccaagctggtgcactacatgaatgtggccaagctgcagagcgaccgggagtacaagaagaactatgagaacaccaagaccagctaccacacccctggggacatggtgtccatcacagctgccaagatggcccaggatgtggccaccaacgtgaactacaagcagcccctgcaccactacacctacctgcctgatgccatgagcctggagcacaccagaaatgtgaaccagatccagagcgacaacgtgtacaaggatgagtacaacagcttcctgaagggcatcggctggatccccatcggcagcctggaggtggagaaggtgaagaaggctggagatgccctgaatgaaaggaagtaccggcagcacccagacacagtgaagttcacctctgtgcctgacagcatgggcatggtgctggcccagcacaacaccaagcagctgagtgacctgaactacaaggtggagggggagaagctgaagcacaagtacaccatcgaccctgagctgccccagttcatccaggccaaggtgaatgccctgaacatgtctgatgcccactacaaggctgactggaagaagaccatcgccaagggctatgacctgcggccagatgccatccccatcgtggccgccaagagcagcaggaacatcgccagtgactgcaagtacaaggaggcctatgagaaggccaagggcaagcaggtgggcttcctgagcctgcaggatgaccccaagctggtgcactacatgaatgtggccaagatccagagcgaccgggagtacaagaagggctatgaggccagcaagaccaagtaccacacccccctggacatggtgtctgtgacagctgccaagaagagccaggaggtggccaccaatgccaactaccggcagagctaccaccactacaccctgctgcctgatgccctgaatgtggagcacagcagaaatgccatgcagatccagagcgacaacctgtacaagagtgacttcaccaactggatgaagggcatcggctgggtgcccatcgagagcctggaggtggagaaggccaagaaggccggggagatcctgtctgagaagaagtaccggcagcaccctgagaagctgaagttcacctacgccatggacaccatggagcaggccctgaacaagagcaacaagctgaacatggacaagaggctgtacacagagaagtggaacaaggacaagaccaccatccacgtgatgccagacaccccagacatcctgctgagccgggtgaaccagatcaccatgtctgacaagctgtacaaggccggctgggaggaggagaagaagaagggctatgacctgcggccagatgccatcgccatcaaggccgcccgggccagccgggacatcgccagtgactacaagtacaagaaggcctatgagcaggccaagggcaagcacatcggcttccgcagcctggaggatgaccccaagctggtgcacttcatgcaggtggccaagatgcagagcgaccgggagtacaagaagggctatgagaagagcaagaccagcttccacacccctgtggacatgctgtctgtggtggccgccaagaagagccaggaggtggccaccaatgccaactacagaaatgtcatccacacctacaacatgctgcctgatgccatgagctttgagctggccaagaacatgatgcagatccagagcgacaaccagtacaaggctgactatgctgacttcatgaagggcatcggctggctgcccctgggcagcctggaggccgagaagaacaagaaggccatggagatcatcagcgagaagaagtaccggcagcacccagacaccctgaagtacagcaccctgatggacagcatgaacatggtgctggcccagaacaatgccaagatcatgaatgagcacctgtacaagcaggcctgggaggccgacaagaccaaggtgcacatcatgccagacatcccccagatcatcctggccaaggccaatgccatcaacatgtctgacaagctgtacaagctgagcctggaggagagcaagaagaagggctatgacctgcggccagatgccatccccatcaaggccgccaaggccagccgggacatcgccagtgactacaagtacaagtacaactatgagaagggcaagggcaagatggtgggcttccgcagcctggaggatgaccccaagctggtgcacagcatgcaggtggccaagatgcagagcgaccgggagtacaagaagaactatgagaacaccaagaccagctaccacaccccagctgacatgctgtctgtgacagctgccaaggatgcccaggccaacatcaccaacaccaactacaagcacctgatccacaagtacatcctgctgcctgatgccatgaacatcgagctgaccaggaacatgaaccgcatccagagcgacaatgagtacaagcaggactacaatgagtggtacaagggcctgggctggagccctgctggcagcctggaggtggagaaggccaagaaggccacagaatatgccagtgaccagaagtaccggcagcaccccagcaacttccagttcaagaagctgacagacagcatggacatggtgctggccaagcagaatgcccacaccatgaacaagcacctgtacaccatcgactggaacaaggacaagaccaagatccacgtgatgccagacaccccagacatcctgcaggccaagcagaaccagaccctgtacagccagaagctgtacaagctgggctgggaggaggccctgaagaagggctatgacctgcctgtggatgccatctctgtgcagctggccaaggccagccgggacatcgccagtgactacaagtacaagcagggctacaggaagcagctgggccaccacgtgggcttccgcagcctgcaggatgaccccaagctggtgctgtccatgaatgtggccaagatgcagagcgagcgggagtacaagaaggactttgagaagtggaagaccaagttcagcagccctgtggacatgctgggcgtggtgctggccaagaagtgccaggagctggtgtctgatgtggactacaagaactacctgcaccagtggacctgcctgcctgaccagaatgatgtggtgcaggccaagaaggtgtatgagctgcagagtgaaaatctctacaagagtgacctggagtggctgcggggcatcggctggagccccctgggcagcctggaggccgagaagaacaagagggccagcgagatcatcagcgagaagaagtaccggcagcccccagacaggaacaagttcaccagcatcccagatgccatggacatcgtgctggccaagaccaatgccaagaacagaagtgaccggctgtaccgggaggcctgggacaaggacaagacccagatccacatcatgccagacaccccagacatcgtgctggccaaggccaacctgatcaacaccagtgacaagctgtacaggatgggctatgaggagctgaagaggaagggctatgacctgcctgtggatgccatccccatcaaggccgccaaggccagccgggagatcgccagcgagtacaagtacaaggagggcttcaggaagcagctgggccaccacatcggggccaggaacattgaagatgaccccaagatgatgtggagcatgcacgtggccaagatccagagcgaccgggagtacaagaaggactttgagaagtggaagaccaagttcagcagccctgtggacatgctgggcgtggtgctggccaagaagtgccagaccctggtgtctgatgtggactacaagaactacctgcaccagtggacctgcctgcctgaccagagtgatgtgatccacgcccggcaggcctatgacctgcagagcgacaacctgtacaagagtgacctgcagtggctgaagggcatcggctggatgaccagcggcagcctggaggatgagaagaacaagagggccacccagatcctgagtgaccacgtgtaccggcagcacccagaccagttcaagttcagcagcctgatggacagcatccccatggtgctggccaagaacaatgccatcaccatgaaccaccggctgtacacagaggcctgggacaaggacaagaccaccgtgcacatcatgccagacaccccagaggtgctgctggccaagcagaacaaggtgaactacagcgagaagctgtacaagctgggcctggaggaggccaagaggaagggctatgacatgagggtggatgccatccccatcaaggccgccaaggccagccgggacatcgccagcgagttcaagtacaaggagggctacaggaagcagctgggccaccacatcggggcccgggccatcagagatgaccccaagatgatgtggagcatgcacgtggccaagatccagagcgaccgggagtacaagaaggactttgagaagtggaagaccaagttcagcagccctgtggacatgctgggcgtggtgctggccaagaagtgccagaccctggtgtctgatgtggactacaagaactacctgcaccagtggacctgcctgcctgaccagagtgatgtgattcatgcccggcaggcctatgacctgcagagcgacaacatgtacaagagtgacctgcagtggatgaggggcatcggctgggtgtccatcggcagcctggatgtggagaagtgcaagagggccacagagatcctgagtgacaagatctaccggcagcccccagaccgcttcaagttcacctctgtgacagacagcctggagcaggtgctggccaagaacaatgccatcaccatgaacaagaggctgtacacagaggcctgggacaaggacaagacccagatccacatcatgccagacaccccagagatcatgctggccaggatgaacaagatcaactacagcgagagcctgtacaagctggccaatgaggaggccaagaagaagggctatgacctgcggagtgatgccatccccatcgtggccgccaaggccagccgggacatcatcagtgactacaagtacaaggatggctactgcaagcagctgggccaccacatcggggccaggaacattgaagatgaccccaagatgatgtggagcatgcacgtggccaagatccagagcgaccgggagtacaagaaggactttgagaagtggaagaccaagttcagcagccctgtggacatgctgggcgtggtgctggccaagaagtgccagaccctggtgtctgatgtggactacaagaactacctgcacgagtggacctgcctgcctgaccagagtgatgtgatccacgcccggcaggcctatgacctgcagagcgacaacatctacaagagtgacctgcagtggctgcggggcatcggctgggtgcccatcggctccatggatgtggtgaagtgcaagagggccacagagatcctgagtgacaacatctaccggcagcccccagacaagctgaagttcacctctgtgacagacagcctggagcaggtgctggccaagaacaatgccctgaacatgaacaagaggctgtacacagaggcctgggacaaggacaagacccagatccacatcatgccagacaccccagagatcatgctggcccggcagaacaagatcaactacagcgagaccctgtacaagctggccaatgaggaggccaagaagaagggctatgacctgcggagtgatgccatccccatcgtggccgccaaggccagcagagatgtgatcagtgactacaagtacaaggatggctacaggaagcagctgggccaccacatcggggccagaaatattgaagatgaccccaagatgatgtggagcatgcacgtggccaagatccagagcgaccgggagtacaagaaggactttgagaagtggaagaccaagttcagcagccctgtggacatgctgggcgtggtgctggccaagaagtgccagaccctggtgtctgatgtggactacaagaactacctgcacgagtggacctgcctgcctgaccagaatgatgtgattcatgcccggcaggcctatgacctgcagagcgacaacatctacaagagtgacctgcagtggctgcggggcatcggctgggtgcccatcggctccatggatgtggtgaagtgcaagagagctgctgagatcctgagtgacaacatctaccggcagcccccagacaagctgaagttcacctctgtgacagacagcctggagcaggtgctggccaagaacaatgccctgaacatgaacaagaggctgtacacagaggcctgggacaaggacaagacccaggtgcacatcatgccagacaccccagagatcatgctggcccggcagaacaagatcaactacagcgagagcctgtaccggcaggccatggaggaggccaagaaggagggctatgacctgcggagtgatgccatccccatcgtggccgccaaggccagccgggacatcgccagtgactacaagtacaaggaggcctacaggaagcagctgggccaccacatcggggcccgggctgtgcatgatgaccccaagatcatgtggagcctgcacatcgccaaggtgcagagcgaccgggagtacaagaaggactttgagaagtacaagacccgctacagcagccctgtggacatgctgggcatcgtgctggccaagaagtgccagaccctggtgtctgatgtggactacaagcaccccctgcacgagtggatctgcctgcctgaccagaatgacatcatccacgccaggaaggcctatgacctgcagagcgacaacctgtacaagagtgacctggagtggatgaagggcatcggctgggtgcccatcgacagcctggaggtggtgcgggccaagagagctggggagctgctgagtgacaccatctaccggcagaggcctgagaccctgaagttcaccagcatcacagacaccccagagcaggtgctggccaagaacaatgccctgaacatgaacaagaggctgtacacagaggcctgggacaatgacaagaagaccatccacgtgatgccagacaccccagagatcatgctggccaagctgaaccgcatcaactacagcgacaagctgtacaagctggccctggaggagagcaagaaggagggctatgacctgcggctggatgccatccccatccaggccgccaaggccagccgggacatcgccagtgactacaagtacaaggagggctacaggaagcagctgggccaccacatcggggccaggaacatcaaggatgaccccaagatgatgtggagcatccacgtggccaagatccagagcgaccgggagtacaagaaggagtttgagaagtggaagaccaagttcagcagccctgtggacatgctgggcgtggtgctggccaagaagtgccagatcctggtgtctgacatcgactacaagcaccccctgcacgagtggacctgcctgcctgaccagaatgatgtgatccaggccaggaaggcctatgacctgcagagtgatgccatctacaagagtgacctggagtggctgcggggcatcggctgggtgcccatcggctctgtggaggtggagaaggtgaagagagctggggagatcctgagtgacaggaagtaccggcagcctgctgaccagctgaagttcacctgcatcacagacaccccagaaattgtgctggccaagaacaatgccctgaccatgagcaagcacctgtacacagaggcctgggatgctgacaagaccagcatccacgtgatgccagacaccccagacatcctgctggccaagagcaacagcgccaacatcagccagaagctgtacaccaagggctgggatgagagcaagatgaaggactatgacctgcgggcagatgccatcagcatcaagagcgccaaggccagccgggacatcgccagtgactacaagtacaaggaggcctatgagaagcagaagggccaccacatcggggcccagagcattgaagatgaccccaagatcatgtgtgccatccacgccggcaagatccagagcgagcgggagtacaagaaggagttccagaagtggaagaccaagttcagcagccctgtggacatgctgagcatcctgctggccaagaagtgccagaccctggtgacagacatcgactacagaaactacctgcacgagtggacctgcatgccagaccagaatgacatcatccaggccaagaaggcctatgacctgcagagcgacagcgtgtacaaggctgacctggagtggctgcggggcatcggctggatgcctgagggctctgtggagatgaacagagtgaaggtggcccaggacctggtgaatgaaagactctaccgcaccaggcctgaggccctgtccttcaccagcatcgtggacaccccagaggtggtgctggccaaggccaacagcctgcagatcagcgagaagctgtaccaggaggcctggaacaaggacaagagcaacatcaccatccccagcgacaccccagagatgctgcaggcccacatcaatgccctgcagatcagcaacaagctgtaccagaaggactggaatgatgccaagcagaagggctatgacatccgggcagatgccatcgagatcaagcacgccaaggccagccgggagatcgccagcgagtacaagtacaaggagggctacaggaagcagctgggccaccacatgggcttccgcaccctgcaggatgaccccaagtctgtgtgggccatccatgctgccaagatccagagcgaccgggagtacaagaaggcctatgagaagagcaagggcatccacaacacccccctggacatgatgagcatcgtgcaggccaagaagtgccaggtgctggtgtctgacatcgactacagaaactacctgcaccagtggacctgcctgcctgaccagaatgatgtgatccaggccaagaaggcctatgacctgcagagcgacaacctgtacaagagtgacctggagtggctgaagggcatcggctggctgcctgagggctctgtggaggtgatgagggtgaagaatgcccagaacctgctgaatgaaaggctgtaccgcatcaagccagaggccctgaagttcaccagcatcgtggacaccccagaggtgatccaggccaagatcaatgctgtgcagatcagcgagcccctgtacagagatgcctgggagaaggagaaggccaacgtgaatgtgcctgctgacacccccctgatgctgcagagcaagatcaatgccctgcagatcagcaacaagcgctaccagcaggcctgggaggatgtgaagatgacaggctatgacctgcgggcagatgccatcggcatccagcacgccaaggccagccgggacatcgccagtgactacctgtacaagacagcctatgagaagcagaagggccactacatcggctgccgcagcgccaaggaggaccccaagctggtgtgggccgccaacgtgctgaagatgcagaatgaccggctgtacaagaaggcctacaatgaccacaaggccaagatcagcatccctgtggacatggtgtccatctctgctgccaaggagggccaggccctggccagtgatgtggactaccgccactacctgcaccactggagctgcttcccagaccagaatgatgtgatccaggccaggaaggcctatgacctgcagagcgacagcgtgtacaaggctgacctggagtggctgcggggcatcggctggatgcctgagggctctgtggagatgaacagagtgaaggtggcccaggacctggtgaatgaaagactctaccgcaccaggcctgaggccctgtccttcaccagcatcgtggacaccccagaggtggtgctggccaaggccaacagcctgcagatcagcgagaagctgtaccaggaggcctggaacaaggacaagagcaacatcaccatccccagcgacaccccagagatgctgcaggcccacatcaatgccctgcagatcagcaacaagctgtaccagaaggactggaatgacaccaagcagaagggctatgacatccgggcagatgccatcgagatcaagcacgccaaggccagccgggagatcgccagcgagtacaagtacaaggagggctacaggaagcagctgggccaccacatgggcttccgcaccctgcaggatgaccccaagtctgtgtgggccatccatgctgccaagatccagagcgaccgggagtacaagaaggcctatgagaagagcaagggcatccacaacacccccctggacatgatgagcatcgtgcaggccaagaagtgccaggtgctggtgtctgacatcgactacagaaactacctgcaccagtggacctgcctgcctgaccagaatgatgtgatccaggccaagaaggcctatgacctgcagagcgacaacctgtacaagagtgacctggagtggctgaagggcatcggctggctgcctgagggctctgtggaggtgatgagggtgaagaatgcccagaacctgctgaatgaaaggctgtaccgcatcaagccagaggccctgaagttcaccagcatcgtggacaccccagaggtgatccaggccaagatcaatgctgtgcagatcagcgagcccctgtacagaaatgcctgggagaaggagaaggccaacgtgaatgtgcctgctgacacccccctgatgctgcagagcaagatcaatgccctgcagatcagcaacaagcgctaccagcaggcctgggaggatgtgaagatgacaggctatgacctgcgggcagatgccatcggcatccagcacgccaaggccagccgggacatcgccagtgactacctgtacaagacagcctatgagaagcagaagggccactacatcggctgccgcagcgccaaggaggaccccaagctggtgtgggccgccaacgtgctgaagatgcagaatgaccggctgtacaagaaggcctacaatgaccacaaggccaagatcagcatccctgtggacatggtgtccatctctgctgccaaggagggccaggccctggccagtgatgtggactaccgccactacctgcaccactggagctgcttcccagaccagaatgatgtgatccaggccaggaaggcctatgacctgcagagcgacagcgtgtacaaggctgacctggagtggctgcggggcatcggctggatgcctgagggctctgtggagatgaacagagtgaaggtggcccaggacctggtgaatgaaagactctaccgcaccaggcctgaggccctgtccttcaccagcatcgtggacaccccagaggtggtgctggccaaggccaacagcctgcagatcagcgagaagctgtaccaggaggcctggaacaaggacaagagcaacatcaccatccccagcgacaccccagagatgctgcaggcccacatcaatgccctgcagatcagcaacaagctgtaccagaaggactggaatgacaccaagcagaagggctatgacatccgggcagatgccatcgagatcaagcacgccaaggccagccgggagatcgccagcgagtacaagtacaaggagggctacaggaagcagctgggccaccacatgggcttccgcaccctgcaggatgaccccaagtctgtgtgggccatccatgctgccaagatccagagcgaccgggagtacaagaaggcctatgagaagagcaagggcatccacaacacccccctggacatgatgagcatcgtgcaggccaagaagtgccaggtgctggtgtctgacatcgactacagaaactacctgcaccagtggacctgcctgcctgaccagaatgatgtgatccaggccaagaaggcctatgacctgcagagcgacaacctgtacaagagtgacctggagtggctgaagggcatcggctggctgcctgagggctctgtggaggtgatgagggtgaagaatgcccagaacctgctgaatgaaaggctgtaccgcatcaagccagaggccctgaagttcaccagcatcgtggacaccccagaggtgatccaggccaagatcaatgctgtgcagatcagcgagcccctgtacagagatgcctgggagaaggagaaggccaacgtgaatgtgcctgctgacacccccctgatgctgcagagcaagatcaatgccctgcagatcagcaacaagcgctaccagcaggcctgggaggatgtgaagatgacaggctatgacctgcgggcagatgccatcggcatccagcacgccaaggccagccgggacatcgccagtgactacctgtacaagacagcctatgagaagcagaagggccactacatcggctgccgcagcgccaaggaggaccccaagctggtgtgggccgccaacgtgctgaagatgcagaatgaccggctgtacaagaaggcctacaatgaccacaaggccaagatcagcatccctgtggacatggtgtccatctctgctgccaaggagggccaggccctggccagtgatgtggactaccgccactacctgcaccgctggagctgcttcccagaccagaatgatgtgatccaggccaggaaggcctatgacctgcagagtgatgccctgtacaaggctgacctggagtggctgcggggcatcggctggatgccccagggcagccctgaggtgctgcgggtgaagaatgcccagaacatcttctgtgacagcgtgtaccgcacccctgtggtgaacctgaagtacaccagcatcgtggacaccccagaggtggtgctggccaagagcaatgctgagaacatcagcatccccaagtaccgggaggtgtgggacaaggacaagaccagcatccacatcatgccagacaccccagagatcaacctggcccgggccaatgccctgaatgtgagcaacaagctgtaccgggagggctgggatgagatgaaggccggctgtgatgtgcggctggatgccatccccatccaggccgccaaggccagccgggagatcgccagtgactacaagtacaagctggaccacgagaagcagaagggccactacgtgggcaccctgacagccagagatgacaacaagatccgctgggccctgattgctgacaagctgcagaatgaaagagagtaccgcctggactgggccaagtggaaggccaagatccagagccctgtggacatgctgagcatcctgcacagcaagaacagccaggccctggtgtctgacatggactacagaaactacctgcaccagtggacctgcatgccagaccagaatgatgtgatccaggccaagaaggcctatgagctgcagagcgacaacgtgtacaaggctgacctggagtggctgcggggcatcggctggatgcccaatgacagcgtgtctgtgaaccacgccaagcatgctgctgacatcttcagcgagaagaagtaccgcaccaagattgagaccctgaacttcacccctgtggatgacagagtggactatgtgacagccaagcagagcggggagatcctggatgacatcaagtacaggaaggactggaatgccaccaagagcaagtacaccctgacagagacccccctgctgcacacagcccaggaggccgcccgcatcctggaccagtacctgtacaaggagggctgggagcggcagaaggccaccggctacatcctgcccccagatgctgtgccctttgtgcacgcccaccactgcaatgatgtgcagagcgagctgaagtacaaggccgagcacgtgaagcagaagggccactacgtgggcgtgcccaccatgagagatgaccccaagctggtgtggtttgaacatgctggccagatccagaatgaaaggctgtacaaggaggactaccacaagaccaaggccaagatcaacatcccagctgacatggtgtctgtgctggccgccaagcagggccagaccctggtgtctgacatcgactacagaaactacctgcaccagtggatgtgccacccagaccagaatgatgtgatccaggccaggaaggcctatgacctgcagagcgacaacgtgtacagagctgacctggagtggctgcggggcatcggctggatccccctggacagcgtggaccacgtgcgggtgaccaagaaccaggagatgatgagccagatcaagtacaagaagaatgccctggagaactaccccaacttccgctctgtggtggaccccccagagatcgtgctggccaagatcaacagcgtgaaccagagtgatgtgaagtacaaggagaccttcaacaaggccaagggcaagtacaccttctccccagacaccccccacatcagccacagcaaggacatgggcaagctgtacagcaccatcctgtacaagggggcctgggagggcaccaaggcctacggctacaccctggatgagcgctacatccccatcgtgggcgccaagcatgctgacctggtgaacagcgagctgaagtacaaggagacctatgagaagcagaagggccactacctggccggcaaggtgattggagagttccctggggtggtgcactgcctggacttccagaagatgaggtctgccctgaactacaggaagcactatgaggacaccaaggccaacgtgcacatccccaatgacatgatgaaccacgtgctggccaagcgctgccagtacatcctgagtgacctggagtaccgccactacttccaccagtggaccagcctgctggaggagcccaacgtcatccgggtgagaaatgcccaggagatcctgagtgacaacgtgtacaaggatgacctgaactggctgaagggcatcggctgctacgtgtgggacaccccccagatcctgcacgccaagaagagctatgacctgcagagccagctgcagtacacagctgctgggaaggagaacctgcagaactacaacctggtgacagacacccccctgtatgtgacagctgtgcagagcggcatcaatgccagcgaggtgaagtacaaggagaactaccaccagatcaaggacaagtacaccaccgtgctggagaccgtggactatgacaggaccaggaacctgaagaacctgtacagcagcaacctgtacaaggaggcctgggacagagtgaaggccaccagctacatcctgcccagcagcaccctgagcctgacccacgccaagaaccagaagcacctggccagccacatcaagtaccgggaggagtatgagaagttcaaggccctgtacaccctgcccaggtctgtggatgatgaccccaacacagcccgctgcctgcgggtgggcaagctgaacatcgaccggctgtacagatctgtgtatgagaagaacaagatgaagatccacatcgtgcctgacatggtggagatggtgacagccaaggacagccagaagaaggtgtctgaaattgactaccgcctgcggctgcacgagtggatctgccacccagacctgcaggtgaatgaccacgtgaggaaggtgacagaccagatcagtgacatcgtgtacaaggatgacctgaactggctgaagggcatcggctgctacgtgtgggacaccccagagatcctgcacgccaagcacgcctatgacctgagagatgacatcaagtacaaggcccacatgctgaagaccagaaatgactacaagctggtgacagacacccctgtgtatgtgcaggccgtgaagagcggcaagcagctgagtgatgctgtgtaccactatgactatgtgcacagcgtgcggggcaaggtggcccccaccaccaagacagtggacctggaccgggccctgcacgcctacaagctgcagagcagcaacctgtacaagaccagcctgcggaccctgcccaccggctaccgcctgcccggggacaccccccacttcaagcacatcaaggacacccgctacatgagcagctacttcaagtacaaggaggcctatgagcacaccaaggcctacggctacaccctgggccccaaggatgtgccctttgtgcacgtgagaagagtgaacaacgtgaccagcgagcggctgtaccgggagctgtaccacaagctgaaggacaagatccacaccaccccagacaccccagagatccggcaggtgaagaagacccaggaggccgtgtctgagctgatctacaagagtgacttcttcaagatgcagggccacatgatcagcctgccctacaccccccaggtgatccactgccgctacgtgggggacatcaccagtgacatcaagtacaaggaggacctgcaggtgctgaagggcttcggctgcttcctgtatgacaccccagacatggtgcgcagccgccacctgaggaagctgtggagcaactacctgtacacagacaaggccaggaagatgagggacaagtacaaggtggtgctggacaccccagagtacaggaaggtgcaggagctgaagacccacctgtctgagctggtgtacagagctgctgggaagaagcagaagagcatcttcacctctgtgcctgacaccccagacctgctgcgggccaagaggggccagaagctgcagagccagtacctgtatgtggagctggccaccaaggagcggccccaccaccacgccggcaaccagaccacagccctgaagcacgccaaggatgtgaaggacatggtgtctgagaagaagtacaagatccagtatgagaagatgaaggacaagtacacccctgtgcctgacacccccatcctgatccgggccaagagggcctactggaatgccagtgacctgcgctacaaggagaccttccagaagaccaagggcaagtaccacacagtgaaggatgccctggacatcgtgtaccacaggaaggtgacagatgacatcagcaagatcaagtacaaggagaactacatgagccagctgggcatctggaggagcatcccagacaggcctgagcacttccaccacagagctgtgacagacacagtgtctgatgtgaagtacaaggaggacctgacctggctgaagggcatcggctgctacgcctatgacaccccagacttcaccctggccgagaagaacaagaccctgtacagcaagtacaagtacaaggaggtgtttgagaggaccaagagtgacttcaagtatgtggccgacagccccatcaacagacacttcaagtatgccacccagctgatgaatgaaaggaagtacaagagcagcgccaagatgttcctgcagcacggctgcaatgagatcctgcggccagacatgctgacagccctgtacaacagccacatgtggagccagatcaagtacaggaagaactatgagaagagcaaggacaagttcaccagcatcgtggacaccccagagcacctgcggaccaccaaggtgaacaagcagatcagtgacatcctgtacaagctggagtacaacaaggccaagccccggggctacaccaccatccatgacacccccatgctgctgcacgtgaggaaggtgaaggatgaggtgtctgacctgaagtacaaggaggtgtaccagaggaacaagagcaactgcaccatcgagccagatgctgtgcacatcaaggccgccaaggatgcctacaaggtgaacaccaacctggactacaagaagcagtatgaggccaacaaggcccactggaagtggaccccagacagaccagacttcctgcaggccgccaagagcagcctgcagcagagcgactttgagtacaagctggaccgggagttcctgaagggctgcaagctgtctgtgacagatgacaagaacacagtgctggccctgaggaacaccctcatcgagagtgacctgaagtacaaggagaagcacgtgaaggagcggggcacctgccacgctgtgcctgacaccccccagatcctgctggccaagacagtgagcaacctggtgtctgagaacaagtacaaggaccacgtgaagaagcacctggcccagggcagctacaccaccctgcctgagacccgggacacagtgcacgtgaaggaggtgaccaagcacgtgtctgacaccaactacaagaagaagtttgtgaaggagaagggcaagagcaactacagcatcatgctggagcccccagaggtgaagcacgccatggaggtggccaagaagcagagtgatgtggcctacaggaaggatgccaaggagaacctgcactacaccaccgtggccgacagaccagacatcaagaaggccacccaggccgccaagcaggccagcgaggtggagtaccgggccaagcacaggaaggagggcagccacggcctgtccatgctgggccgcccagacatcgagatggccaagaaggccgccaagctgagcagccaggtgaagtaccgggagaactttgacaaggagaagggcaagacccccaagtacaaccccaaggacagccagctgtacaaggtgatgaaggatgccaacaacctggccagcgaggtgaagtacaaggctgacctgaagaagctgcacaagcctgtgacagacatgaaggagagcctcatcatgaaccacgtgctgaacaccagccagctggccagcagctaccagtacaagaagaagtatgagaagagcaagggccactaccacaccatcccagacaacctggagcagctgcacctgaaggaggccacagagctgcagagcatcgtgaagtacaaggagaagtatgagaaggagcggggcaagcccatgctggactttgagacccccacctacatcacagccaaggagagccagcagatgcagagcggcaaggagtacaggaaggactatgaggagagcatcaagggcaggaacctgaccggcctggaggtgaccccagccctgctgcacgtgaagtatgccaccaagatcgccagcgagaaggagtacaggaaggacctggaggagagcatccggggcaagggcctgacagagatggaggacaccccagacatgctgcgggccaagaatgccacccagatcctgaatgagaaggagtacaagagggacctggagctggaggtgaagggccggggcctgaatgccatggccaatgagaccccagacttcatgagggccagaaatgccacagacatcgccagccagatcaagtacaagcagagcgctgagatggagaaggccaacttcacctctgtggtggacaccccagagatcatccacgcccagcaggtgaagaacctgagcagccagaagaagtacaaggaggatgctgagaagtccatgagctactatgagaccgtgctggacaccccagagatccagagggtgcgggagaaccagaagaacttcagcctgctgcagtaccagtgtgacctgaagaacagcaagggcaagatcaccgtggtgcaggacaccccagagatcctgcgggtgaaggagaaccagaagaacttcagctctgtgctgtacaaggaggatgtgtccccaggcacagccatcggcaagaccccagagatgatgagggtgaagcagacccaggaccacatcagctctgtgaagtacaaggaggccatcggccagggcacccccatcccagacctgcctgaggtgaagagggtgaaggagacccagaagcacatcagctctgtgatgtacaaggagaacctgggcaccggcatccccaccaccgtgaccccagaaattgagcgggtgaagaggaaccaggagaacttcagctctgtgctgtacaaggagaacctgggcaagggcatccccacccccatcaccccagagatggagcgggtgaagaggaaccaggagaacttcagcagcatcctgtacaaggagaacctgagcaagggcacccccctgcctgtgaccccagagatggagcgggtgaagctgaaccaggagaacttcagctctgtgctgtacaaggaaaatgtgggcaagggcatccccatccccatcaccccagagatggagcgggtgaagcacaaccaggagaacttcagctctgtgctgtacaaggagaacctgggcaccggcatccccatccccatcaccccagagatgcagagggtgaagcacaaccaggagaacctgagctctgtgctgtacaaggagaacatgggcaagggcacccccctgcctgtgaccccagagatggagcgggtgaagcacaaccaggagaacatcagctctgtgctgtacaaggagaacatgggcaagggcacccccctgcctgtgaccccagagatggagcgggtgaagcacaaccaggagaacatcagctctgtgctgtacaaggagaacatgggcaagggcacccccctggccgtgaccccagagatggagcgggtgaagcacaaccaggagaacatcagctctgtgctgtacaaggaaaatgtgggcaaggccacagccacccctgtgaccccagagatgcagagggtgaagaggaaccaggagaacatcagctctgtgctgtacaaggagaacctgggcaaggccacccccacccccttcaccccagagatggagcgggtgaagaggaaccaggagaacttcagctctgtgctgtacaaggagaacatgaggaaggccacccccacccctgtgaccccagagatggagcgggccaagaggaaccaggagaacatcagctctgtgctgtacagcgacagcttcaggaagcagatccagggcaaggccgcctacgtgctggacaccccagagatgagaagagtgcgggagacccagaggcacatcagcacagtgaagtaccacgaggactttgagaagcacaagggctgcttcacccctgtggtgacagaccccatcacagagcgggtgaagaagaacatgcaggacttcagtgacatcaactaccggggcatccagaggaaggtggtggagatggagcagaagagaaatgaccaggaccaggagaccatcaccggcctgcgggtgtggaggaccaaccctggctctgtgtttgattatgaccctgctgaggacaacatccagagccgcagcctgcacatgatcaacgtgcaggcccagaggaggagccgggagcagagccgcagcgccagcgccctgagcatctctggaggagaggagaagtctgagcacagcgaggccccagaccaccacctgagcacctacagtgatggcggcgtgtttgctgtgtccacagcctacaagcacgccaagaccacagagctgccccagcagaggagcagctctgtggccacccagcagaccaccgtgagcagcatccccagccaccccagcacagctgggaagatcttccgggccatgtatgactacatggccgcagatgctgatgaggtgtccttcaaggatggagatgccatcatcaacgtgcaggccattgatgagggctggatgtatggaacagtgcagaggactggaagaacaggcatgctgcctgccaactacgtggaggccatctag

SEQ ID NO: 161326 - DNA, 20010 bp, synthetic construct
  misc_feature 1..20010: note = Description of Artificial Sequence: Synthetic coding sequence
  source 1..20010: mol_type = other DNA
atggctgatgatgaagattatgaggaggtggtggagtactacacagaggaggtggtgtatgaggaggtgcctggagagaccatcaccaagatctatgagaccaccaccaccaggaccagtgactatgagcagagcgagaccagcaagccagccctggcccagcctgccctggcccagcctgccagcgccaagcctgtggagaggaggaaggtgatcaggaagaaggtggaccccagcaagttcatgaccccctacatcgcccacagccagaagatgcaggacctcttcagccccaacaagtacaaggagaagtttgagaagaccaagggccagccctatgccagcaccacagacaccccagagctgcggcgcatcaagaaggtgcaggaccagctgtctgaggtgaagtacaggatggatggagatgtggccaagaccatctgccacgtggatgagaaggccaaggacattgaacatgccaagaaggtgtcccagcaggtgtccaaggtgctgtacaagcagaactgggaggacaccaaggacaagtacctgctgcccccagatgcccctgagctggtgcaggccgtgaagaacacagccatgttcagcaagaagctgtacacagaggactgggaggccgacaagagcctcttctacccctacaatgacagccctgagctgcggcgggtggcccaggcccagaaggccctgagtgatgtggcctacaagaagggcctggccgagcagcaggcccagttcacccccctggccgaccccccagacatcgagtttgccaagaaggtgaccaaccaggtgtccaagcagaagtacaaggaggactatgagaacaagatcaagggcaagtggagcgagaccccctgctttgaggtggccaatgccaggatgaatgctgacaacatcagcaccaggaagtaccaggaggactttgagaacatgaaggaccagatctacttcatgcagacagagaccccagagtacaagatgaacaagaaggccggcgtggccgccagcaaggtgaagtacaaggaggactatgagaagaacaagggcaaggctgactacaacgtgctgcctgccagcgagaacccccagctgcggcagctgaaggctgctggagatgccctgagtgacaagctgtacaaggaaaattatgagaagaccaaggccaagagcatcaactactgtgagacccccaagttcaagctggacacagtgctgcagaacttcagcagtgacaagaagtacaaggacagctacctgaaggacatcctgggccactacgtgggcagctttgaggacccctaccacagccactgcatgaaggtgacagcccagaacagcgacaagaactacaaggccgagtatgaggaggaccggggcaagggcttcttcccccagaccatcacccaggagtatgaggccatcaagaagctggaccagtgcaaggaccacacctacaaggtgcacccagacaagaccaagttcacccaggtgacagacagccctgtgctgctgcaggcccaggtgaacagcaagcagctgagtgacctgaactacaaggccaagcatgagagcgagaagttcaagtgccacatccccccagacaccccagccttcatccagcacaaggtgaatgcctacaacctgagtgacaacctgtacaagcaggactgggagaagagcaaggccaagaagtttgacatcaaggtggatgccatccccctgctggccgccaaggccaacaccaagaacaccagtgatgtgatgtacaagaaggactatgagaagaacaagggcaagatgattggagtgctgagcatcaatgatgaccccaagatgctgcacagcctgaaggtggccaagaaccagagcgaccggctgtacaaggaaaattatgagaagaccaaggccaagtccatgaactactgtgagacccccaagtaccagctggacacccagctgaagaacttcagcgaggcccgctacaaggacctgtatgtgaaggatgtgctgggccactacgtgggctccatggaggacccctaccacacccactgcatgaaggtggccgcccagaacagcgacaagagctacaaggccgagtatgaagaagataaaggcaagtgctacttcccccagaccatcacccaggagtatgaggccatcaagaagctggaccagtgcaaggaccacacctacaaggtgcacccagacaagaccaagttcaccgctgtgacagacagccctgtgctgctgcaggcccagctgaacaccaagcagctgagtgacctgaactacaaggccaagcatgaaggagagaagttcaagtgccacatcccagcagatgccccccagttcatccagcaccgggtgaatgcctacaacctgagtgacaacgtgtacaagcaggactgggagaagagcaaggccaagaagtttgacatcaaggtggatgccatccccctgctggccgccaaggccaacaccaagaacaccagtgatgtgatgtacaagaaggactatgagaagagcaagggcaagatgattggagccctgagcatcaatgatgaccccaagatgctgcacagcctgaagacagccaagaaccagagcgaccgggagtacaggaaggactatgagaagagcaagaccatctacacagcccccctggacatgctgcaggtgacccaggccaagaagagccaggccatcgccagtgatgtggactacaagcacatcctgcacagctacagctaccccccagacagcatcaacgtggacctggccaagaaggcctatgccctgcagagtgatgtggagtacaaggctgactacaacagctggatgaagggctgcggctgggtgcccttcggcagcctggagatggagaaggccaagagggccagtgacatcctgaatgagaagaagtaccggcagcacccagacaccctgaagttcaccagcattgaagatgcccccatcaccgtgcagagcaagatcaaccaggcccagaggagtgacatcgcctacaaggccaagggggaggagatcatccacaagtacaacctgcccccagacctgccccagttcatccaggccaaggtgaatgcctacaacatcagcgagaacatgtacaaggctgacctgaaggacctgagcaagaagggctatgacctgaggacagatgccatccccatccgggccgccaaggccgcccggcaggccgccagtgatgtgcagtacaagaaggactatgagaaggccaagggcaagatggtgggcttccagagcctgcaggatgaccccaagctggtgcactacatgaatgtggccaagatccagagcgaccgggagtacaagaaggactatgagaagaccaagagcaagtacaacacccctcatgacatgtttaatgtggtggccgccaagaaggcccaggatgtggtgtccaatgtgaactacaagcacagcctgcaccactacacctacctgcctgatgccatggacctggagctgagcaagaacatgatgcagatccagagcgacaacgtgtacaaggaggactacaacaactggatgaagggcatcggctggatccccatcggcagcctggatgtggagaaggtgaagaaggctggagatgccctgaatgagaagaagtaccggcagcacccagacaccctgaagttcaccagcatcgtggacagccctgtgatggtgcaggccaagcagaacaccaagcaggtgtctgacatcctgtacaaggccaagggggaggatgtgaagcacaagtacaccatgagcccagacctgccccagttcctgcaggccaagtgcaatgcctacaacatcagtgatgtgtgctacaagagggactggtatgacctgattgccaagggcaacaacgtgctgggagatgccatccccatcacagctgccaaggccagcaggaacatcgccagtgactacaagtacaaggaggcctatgagaagagcaagggcaagcacgtgggcttccgcagcctgcaggatgaccccaagctggtgcactacatgaatgtggccaagctgcagagcgaccgggagtacaagaagaactatgagaacaccaagaccagctaccacacccctggggacatggtgtccatcacagctgccaagatggcccaggatgtggccaccaacgtgaactacaagcagcccctgcaccactacacctacctgcctgatgccatgagcctggagcacaccagaaatgtgaaccagatccagagcgacaacgtgtacaaggatgagtacaacagcttcctgaagggcatcggctggatccccatcggcagcctggaggtggagaaggtgaagaaggctggagatgccctgaatgaaaggaagtaccggcagcacccagacacagtgaagttcacctctgtgcctgacagcatgggcatggtgctggcccagcacaacaccaagcagctgagtgacctgaactacaaggtggagggggagaagctgaagcacaagtacaccatcgaccctgagctgccccagttcatccaggccaaggtgaatgccctgaacatgtctgatgcccactacaaggctgactggaagaagaccatcgccaagggctatgacctgcggccagatgccatccccatcgtggccgccaagagcagcaggaacatcgccagtgactgcaagtacaaggaggcctatgagaaggccaagggcaagcaggtgggcttcctgagcctgcaggatgaccccaagctggtgcactacatgaatgtggccaagatccagagcgaccgggagtacaagaagggctatgaggccagcaagaccaagtaccacacccccctggacatggtgtctgtgacagctgccaagaagagccaggaggtggccaccaatgccaactaccggcagagctaccaccactacaccctgctgcctgatgccctgaatgtggagcacagcagaaatgccatgcagatccagagcgacaacctgtacaagagtgacttcaccaactggatgaagggcatcggctgggtgcccatcgagagcctggaggtggagaaggccaagaaggccggggagatcctgtctgagaagaagtaccggcagcaccctgagaagctgaagttcacctacgccatggacaccatggagcaggccctgaacaagagcaacaagctgaacatggacaagaggctgtacacagagaagtggaacaaggacaagaccaccatccacgtgatgccagacaccccagacatcctgctgagccgggtgaaccagatcaccatgtctgacaagctgtacaaggccggctgggaggaggagaagaagaagggctatgacctgcggccagatgccatcgccatcaaggccgcccgggccagccgggacatcgccagtgactacaagtacaagaaggcctatgagcaggccaagggcaagcacatcggcttccgcagcctggaggatgaccccaagctggtgcacttcatgcaggtggccaagatgcagagcgaccgggagtacaagaagggctatgagaagagcaagaccagcttccacacccctgtggacatgctgtctgtggtggccgccaagaagagccaggaggtggccaccaatgccaactacagaaatgtcatccacacctacaacatgctgcctgatgccatgagctttgagctggccaagaacatgatgcagatccagagcgacaaccagtacaaggctgactatgctgacttcatgaagggcatcggctggctgcccctgggcagcctggaggccgagaagaacaagaaggccatggagatcatcagcgagaagaagtaccggcagcacccagacaccctgaagtacagcaccctgatggacagcatgaacatggtgctggcccagaacaatgccaagatcatgaatgagcacctgtacaagcaggcctgggaggccgacaagaccaaggtgcacatcatgccagacatcccccagatcatcctggccaaggccaatgccatcaacatgtctgacaagctgtacaagctgagcctggaggagagcaagaagaagggctatgacctgcggccagatgccatccccatcaaggccgccaaggccagccgggacatcgccagtgactacaagtacaagtacaactatgagaagggcaagggcaagatggtgggcttccgcagcctggaggatgaccccaagctggtgcacagcatgcaggtggccaagatgcagagcgaccgggagtacaagaagaactatgagaacaccaagaccagctaccacaccccagctgacatgctgtctgtgacagctgccaaggatgcccaggccaacatcaccaacaccaactacaagcacctgatccacaagtacatcctgctgcctgatgccatgaacatcgagctgaccaggaacatgaaccgcatccagagcgacaatgagtacaagcaggactacaatgagtggtacaagggcctgggctggagccctgctggcagcctggaggtggagaaggccaagaaggccacagaatatgccagtgaccagaagtaccggcagcaccccagcaacttccagttcaagaagctgacagacagcatggacatggtgctggccaagcagaatgcccacaccatgaacaagcacctgtacaccatcgactggaacaaggacaagaccaagatccacgtgatgccagacaccccagacatcctgcaggccaagcagaaccagaccctgtacagccagaagctgtacaagctgggctgggaggaggccctgaagaagggctatgacctgcctgtggatgccatctctgtgcagctggccaaggccagccgggacatcgccagtgactacaagtacaagcagggctacaggaagcagctgggccaccacgtgggcttccgcagcctgcaggatgaccccaagctggtgctgtccatgaatgtggccaagatgcagagcgagcgggagtacaagaaggactttgagaagtggaagaccaagttcagcagccctgtggacatgctgggcgtggtgctggccaagaagtgccaggagctggtgtctgatgtggactacaagaactacctgcaccagtggacctgcctgcctgaccagaatgatgtggtgcaggccaagaaggtgtatgagctgcagagtgaaaatctctacaagagtgacctggagtggctgcggggcatcggctggagccccctgggcagcctggaggccgagaagaacaagagggccagcgagatcatcagcgagaagaagtaccggcagcccccagacaggaacaagttcaccagcatcccagatgccatggacatcgtgctggccaagaccaatgccaagaacagaagtgaccggctgtaccgggaggcctgggacaaggacaagacccagatccacatcatgccagacaccccagacatcgtgctggccaaggccaacctgatcaacaccagtgacaagctgtacaggatgggctatgaggagctgaagaggaagggctatgacctgcctgtggatgccatccccatcaaggccgccaaggccagccgggagatcgccagcgagtacaagtacaaggagggcttcaggaagcagctgggccaccacatcggggccaggaacattgaagatgaccccaagatgatgtggagcatgcacgtggccaagatccagagcgaccgggagtacaagaaggactttgagaagtggaagaccaagttcagcagccctgtggacatgctgggcgtggtgctggccaagaagtgccagaccctggtgtctgatgtggactacaagaactacctgcaccagtggacctgcctgcctgaccagagtgatgtgatccacgcccggcaggcctatgacctgcagagcgacaacctgtacaagagtgacctgcagtggctgaagggcatcggctggatgaccagcggcagcctggaggatgagaagaacaagagggccacccagatcctgagtgaccacgtgtaccggcagcacccagaccagttcaagttcagcagcctgatggacagcatccccatggtgctggccaagaacaatgccatcaccatgaaccaccggctgtacacagaggcctgggacaaggacaagaccaccgtgcacatcatgccagacaccccagaggtgctgctggccaagcagaacaaggtgaactacagcgagaagctgtacaagctgggcctggaggaggccaagaggaagggctatgacatgagggtggatgccatccccatcaaggccgccaaggccagccgggacatcgccagcgagttcaagtacaaggagggctacaggaagcagctgggccaccacatcggggcccgggccatcagagatgaccccaagatgatgtggagcatgcacgtggccaagatccagagcgaccgggagtacaagaaggactttgagaagtggaagaccaagttcagcagccctgtggacatgctgggcgtggtgctggccaagaagtgccagaccctggtgtctgatgtggactacaagaactacctgcaccagtggacctgcctgcctgaccagagtgatgtgattcatgcccggcaggcctatgacctgcagagcgacaacatgtacaagagtgacctgcagtggatgaggggcatcggctgggtgtccatcggcagcctggatgtggagaagtgcaagagggccacagagatcctgagtgacaagatctaccggcagcccccagaccgcttcaagttcacctctgtgacagacagcctggagcaggtgctggccaagaacaatgccctgaacatgaacaagaggctgtacacagaggcctgggacaaggacaagacccagatccacatcatgccagacaccccagagatcatgctggcccggcagaacaagatcaactacagcgagaccctgtacaagctggccaatgaggaggccaagaagaagggctatgacctgcggagtgatgccatccccatcgtggccgccaaggccagcagagatgtgatcagtgactacaagtacaaggatggctacaggaagcagctgggccaccacatcggggccaggaacattgaagatgaccccaagatgatgtggagcatgcacgtggccaagatccagagcgaccgggagtacaagaaggactttgagaagtggaagaccaagttcagcagccctgtggacatgctgggcgtggtgctggccaagaagtgccagaccctggtgtctgatgtggactacaagaactacctgcacgagtggacctgcctgcctgaccagaatgatgtgatccacgcccggcaggcctatgacctgcagagcgacaacatctacaagagtgacctgcagtggctgcggggcatcggctgggtgcccatcggctccatggatgtggtgaagtgcaagagagctgctgagatcctgagtgacaacatctaccggcagcccccagacaagctgaagttcacctctgtgacagacagcctggagcaggtgctggccaagaacaatgccctgaacatgaacaagaggctgtacacagaggcctgggacaaggacaagacccaggtgcacatcatgccagacaccccagagatcatgctggcccggcagaacaagatcaactacagcgagagcctgtaccggcaggccatggaggaggccaagaaggagggctatgacctgcggagtgatgccatccccatcgtggccgccaaggccagccgggacatcgccagtgactacaagtacaaggaggcctacaggaagcagctgggccaccacatcggggcccgggctgtgcatgatgaccccaagatcatgtggagcctgcacatcgccaaggtgcagagcgaccgggagtacaagaaggactttgagaagtacaagacccgctacagcagccctgtggacatgctgggcatcgtgctggccaagaagtgccagaccctggtgtctgatgtggactacaagcaccccctgcacgagtggatctgcctgcctgaccagaatgacatcatccacgccaggaaggcctatgacctgcagagcgacaacctgtacaagagtgacctggagtggatgaagggcatcggctgggtgcccatcgacagcctggaggtggtgcgggccaagagagctggggagctgctgagtgacaccatctaccggcagaggcctgagaccctgaagttcaccagcatcacagacaccccagagcaggtgctggccaagaacaatgccctgaacatgaacaagaggctgtacacagaggcctgggacaatgacaagaagaccatccacgtgatgccagacaccccagagatcatgctggccaagctgaaccgcatcaactacagcgacaagctgtacaagctggccctggaggagagcaagaaggagggctatgacctgcggctggatgccatccccatccaggccgccaaggccagccgggacatcgccagtgactacaagtacaaggagggctacaggaagcagctgggccaccacatcggggccaggaacatcaaggatgaccccaagatgatgtggagcatccacgtggccaagatccagagcgaccgggagtacaagaaggagtttgagaagtggaagaccaagttcagcagccctgtggacatgctgggcgtggtgctggccaagaagtgccagatcctggtgtctgacatcgactacaagcaccccctgcacgagtggacctgcctgcctgaccagaatgatgtgatccaggccaggaaggcctatgacctgcagagtgatgccatctacaagagtgacctggagtggctgcggggcatcggctgggtgcccatcggctctgtggaggtggagaaggtgaagagagctggggagatcctgagtgacaggaagtaccggcagcctgctgaccagctgaagttcacctgcatcacagacaccccagagatcgtgctggccaagaacaatgccctgaccatgagcaagcacctgtacacagaggcctgggatgctgacaagaccagcatccacgtgatgccagacaccccagacatcctgctggccaagagcaacagcgccaacatcagccagaagctgtacaccaagggctgggatgagagcaagatgaaggactatgacctgcgggcagatgccatcagcatcaagagcgccaaggccagccgggacatcgccagtgactacaagtacaaggaggcctatgagaagcagaagggccaccacatcggggcccagagcattgaagatgaccccaagatcatgtgtgccatccatgctgggaagatccagagcgagcgggagtacaagaaggagttccagaagtggaagaccaagttcagcagccctgtggacatgctgagcatcctgctggccaagaagtgccagaccctggtgacagacatcgactacagaaactacctgcacgagtggacctgcatgccagaccagaatgacatcatccaggccaagaaggcctatgacctgcagagtgatgccctgtacaaggctgacctggagtggctgcggggcatcggctggatgccccagggcagccctgaggtgctgcgggtgaagaatgcccagaacatcttctgtgacagcgtgtaccgcacccctgtggtgaacctgaagtacaccagcatcgtggacaccccagaggtggtgctggccaagagcaatgctgagaacatcagcatccccaagtaccgggaggtgtgggacaaggacaagaccagcatccacatcatgccagacaccccagagatcaacctggcccgggccaatgccctgaatgtgagcaacaagctgtaccgggagggctgggatgagatgaaggccggctgtgatgtgcggctggatgccatccccatccaggccgccaaggccagccgggagatcgccagtgactacaagtacaagctggaccacgagaagcagaagggccactacgtgggcaccctgacagccagagatgacaacaagatccgctgggccctgattgctgacaagctgcagaatgaaagagagtaccgcctggactgggccaagtggaaggccaagatccagagccctgtggacatgctgagcatcctgcacagcaagaacagccaggccctggtgtctgacatggactacagaaactacctgcaccagtggacctgcatgccagaccagaatgatgtgatccaggccaagaaggcctatgagctgcagagcgacaacgtgtacaaggctgacctggagtggctgcggggcatcggctggatgcccaatgattctgtgtctgtgaaccacgccaagcacgccgctgacatcttcagcgagaagaagtaccgcaccaagattgagaccctgaacttcacccctgtggatgacagagtggactatgtgacagccaagcagagcggggagatcctggatgacatcaagtacaggaaggactggaatgccaccaagagcaagtacaccctgacagagacccccctgctgcacacagcccaggaggccgcccgcatcctggaccagtacctgtacaaggagggctgggagcggcagaaggccaccggctacatcctgcccccagatgctgtgccctttgtgcacgcccaccactgcaatgatgtgcagagcgagctgaagtacaaggccgagcacgtgaagcagaagggccactacgtgggcgtgcccaccatgagagatgaccccaagctggtgtggtttgagcacgccggccagatccagaatgaaagactctacaaggaggactaccacaagaccaaggccaagatcaacatcccagctgacatggtgtctgtgctggccgccaagcagggccagaccctggtgtctgacatcgactacagaaactacctgcaccagtggatgtgccacccagaccagaatgatgtgatccaggccaggaaggcctatgacctgcagagcgacaacgtgtacagagctgacctggagtggctgcggggcatcggctggatccccctggacagcgtggaccacgtgcgggtgaccaagaaccaggagatgatgagccagatcaagtacaagaagaatgccctggagaactaccccaacttccgctctgtggtggaccccccagaaattgtgctggccaagatcaacagcgtgaaccagagtgatgtgaagtacaaggagaccttcaacaaggccaagggcaagtacaccttctccccagacaccccccacatcagccacagcaaggacatgggcaagctgtacagcaccatcctgtacaagggggcctgggagggcaccaaggcctacggctacaccctggatgagcgctacatccccatcgtgggcgccaagcacgccgacctggtgaacagcgagctgaagtacaaggagacctatgagaagcagaagggccactacctggccggcaaggtgattggagagttccctggggtggtgcactgcctggacttccagaagatgaggtctgccctgaactacaggaagcactatgaggacaccaaggccaacgtgcacatccccaatgacatgatgaaccacgtgctggccaagcgctgccagtacatcctgagtgacctggagtaccgccactacttccaccagtggaccagcctgctggaggagcccaacgtcatccgggtgagaaatgcccaggagatcctgagtgacaacgtgtacaaggatgacctgaactggctgaagggcatcggctgctacgtgtgggacaccccccagatcctgcacgccaagaagagctatgacctgcagagccagctgcagtacacagctgctgggaaggagaacctgcagaactacaacctggtgacagacacccccctgtatgtgacagctgtgcagagcggcatcaatgccagcgaggtgaagtacaaggagaactaccaccagatcaaggacaagtacaccaccgtgctggagaccgtggactatgacaggaccaggaacctgaagaacctgtacagcagcaacctgtacaaggaggcctgggacagagtgaaggccaccagctacatcctgcccagcagcaccctgagcctgacccacgccaagaaccagaagcacctggccagccacatcaagtaccgggaggagtatgagaagttcaaggccctgtacaccctgcccaggtctgtggatgatgaccccaacacagcccgctgcctgcgggtgggcaagctgaacatcgaccggctgtacagatctgtgtatgagaagaacaagatgaagatccacatcgtgcctgacatggtggagatggtgacagccaaggacagccagaagaaggtgtctgaaattgactaccgcctgcggctgcacgagtggatctgccacccagacctgcaggtgaatgaccacgtgaggaaggtgacagaccagatcagtgacatcgtgtacaaggatgacctgaactggctgaagggcatcggctgctacgtgtgggacaccccagagatcctgcacgccaagcacgcctatgacctgagagatgacatcaagtacaaggcccacatgctgaagaccagaaatgactacaagctggtgacagacacccctgtgtatgtgcaggccgtgaagagcggcaagcagctgagtgatgctgtgtaccactatgactatgtgcacagcgtgcggggcaaggtggcccccaccaccaagacagtggacctggaccgggccctgcacgcctacaagctgcagagcagcaacctgtacaagaccagcctgcggaccctgcccaccggctaccgcctgcccggggacaccccccacttcaagcacatcaaggacacccgctacatgagcagctacttcaagtacaaggaggcctatgagcacaccaaggcctacggctacaccctgggccccaaggatgtgccctttgtgcacgtgcggcgggtgaacaacgtgaccagcgagcggctgtaccgggagctgtaccacaagctgaaggacaagatccacaccaccccagacaccccagagatccggcaggtgaagaagacccaggaggccgtgtctgagctgatctacaagagtgacttcttcaagatgcagggccacatgatcagcctgccctacaccccccaggtgatccactgccgctacgtgggggacatcaccagtgacatcaagtacaaggaggacctgcaggtgctgaagggcttcggctgcttcctgtatgacaccccagacatggtgcgcagccgccacctgaggaagctgtggagcaactacctgtacacagacaaggccaggaagatgagggacaagtacaaggtggtgctggacaccccagagtacaggaaggtgcaggagctgaagacccacctgtctgagctggtgtacagagctgctgggaagaagcagaagagcatcttcacctctgtgcctgacaccccagacctgctgcgggccaagaggggccagaagctgcagagccagtacctgtatgtggagctggccaccaaggagcggccccaccaccacgccggcaaccagaccacagccctgaagcacgccaaggatgtgaaggacatggtgtctgagaagaagtacaagatccagtatgagaagatgaaggacaagtacacccctgtgcctgacacccccatcctgatccgggccaagagggcctactggaatgccagtgacctgcgctacaaggagaccttccagaagaccaagggcaagtaccacacagtgaaggatgccctggacatcgtgtaccacaggaaggtgacagatgacatcagcaagatcaagtacaaggagaactacatgagccagctgggcatctggaggagcatcccagacaggcctgagcacttccaccacagagctgtgacagacacagtgtctgatgtgaagtacaaggaggacctgacctggctgaagggcatcggctgctacgcctatgacaccccagacttcaccctggccgagaagaacaagaccctgtacagcaagtacaagtacaaggaggtgtttgagaggaccaagagtgacttcaagtatgtggccgacagccccatcaacagacacttcaagtatgccacccagctgatgaatgagaagaagtacagagctgactatgagcagaggaaggacaagtaccacctggtggtggatgagcccaggcacctgctggccaagacagctggggaccagatcagccagatcaagtacaggaagaactatgagaagagcaaggacaagttcaccagcatcgtggacaccccagagcacctgcggaccaccaaggtgaacaagcagatcagtgacatcctgtacaagctggagtacaacaaggccaagccccggggctacaccaccatccatgacacccccatgctgctgcacgtgaggaaggtgaaggatgaggtgtctgacctgaagtacaaggaggtgtaccagaggaacaagagcaactgcaccattgaaccagatgctgtgcacatcaaggccgccaaggatgcctacaaggtgaacaccaacctggactacaagaagcagtatgaggccaacaaggcccactggaagtggaccccagacagaccagacttcctgcaggccgccaagagcagcctgcagcagagcgactttgagtacaagctggaccgggagttcctgaagggctgcaagctgtctgtgacagatgacaagaacacagtgctggccctgaggaacaccctgattgaaagtgacctgaagtacaaggagaagcacgtgaaggagcggggcacctgccacgctgtgcctgacaccccccagatcctgctggccaagacagtgagcaacctggtgtctgagaacaagtacaaggaccacgtgaagaagcacctggcccagggcagctacaccaccctgcctgagacccgggacacagtgcacgtgaaggaggtgaccaagcacgtgtctgacaccaactacaagaagaagtttgtgaaggagaagggcaagagcaactacagcatcatgctggagcccccagaggtgaagcacgccatggaggtggccaagaagcagagtgatgtggcctacaggaaggatgccaaggagaacctgcactacaccaccgtggccgacagaccagacatcaagaaggccacccaggccgccaagcaggccagcgaggtggagtaccgggccaagcacaggaaggagggcagccacggcctgtccatgctgggccgcccagacatcgagatggccaagaaggccgccaagctgagcagccaggtgaagtacagagaaaattttgacaaggagaagggcaagacccccaagtacaaccccaaggacagccagctgtacaaggtgatgaaggatgccaacaacctggccagcgaggtgaagtacaaggctgacctgaagaagctgcacaagcctgtgacagacatgaaggagagcctcatcatgaaccacgtgctgaacaccagccagctggccagcagctaccagtacaagaagaagtatgagaagagcaagggccactaccacaccatcccagacaacctggagcagctgcacctgaaggaggccacagagctgcagagcatcgtgaagtacaaggagaagtatgagaaggagcggggcaagcccatgctggactttgagacccccacctacatcacagccaaggagagccagcagatgcagagcggcaaggagtacaggaaggactatgaggagagcatcaagggcaggaacctgaccggcctggaggtgaccccagccctgctgcacgtgaagtatgccaccaagatcgccagcgagaaggagtacaggaaggacctggaggagagcatccggggcaagggcctgacagagatggaggacaccccagacatgctgcgggccaagaatgccacccagatcctgaatgagaaggagtacaagagggacctggagctggaggtgaagggccggggcctgaatgccatggccaatgagaccccagacttcatgagggccagaaatgccacagacatcgccagccagatcaagtacaagcagagcgctgagatggagaaggccaacttcacctctgtggtggacaccccagagatcatccacgcccagcaggtgaagaacctgagcagccagaagaagtacaaggaggatgctgagaagtccatgagctactatgaaacagtgctggacaccccagagatccagagggtgcgggagaaccagaagaacttcagcctgctgcagtaccagtgtgacctgaagaacagcaagggcaagatcaccgtggtgcaggacaccccagagatcctgcgggtgaaggagaaccagaagaacttcagctctgtgctgtacaaggaggatgtgtccccaggcacagccatcggcaagaccccagagatgatgagggtgaagcagacccaggaccacatcagctctgtgaagtacaaggaggccatcggccagggcacccccatcccagacctgcctgaggtgaagagggtgaaggagacccagaagcacatcagctctgtgatgtacaaggagaacctgggcaccggcatccccaccaccgtgaccccagaaattgaaagagtgaagaggaaccaggagaacttcagctctgtgctgtacaaggagaacctgggcaagggcatccccacccccatcaccccagagatggagcgggtgaagaggaaccaggagaacttcagctctgtgctgtacaaggagaacatgggcaagggcacccccctggccgtgaccccagagatggagcgggtgaagcacaaccaggagaacatcagctctgtgctgtacaaggaaaatgtgggcaaggccacagccacccctgtgaccccagagatgcagagggtgaagaggaaccaggagaacatcagctctgtgctgtacaaggagaacctgggcaaggccacccccacccccttcaccccagagatggagcgggtgaagaggaaccaggagaacttcagctctgtgctgtacaaggagaacatgaggaaggccacccccacccctgtgaccccagagatggagcgggccaagaggaaccaggagaacatcagctctgtgctgtacagcgacagcttcaggaagcagatccagggcaaggccgcctacgtgctggacaccccagagatgagaagagtgcgggagacccagaggcacatcagcacagtgaagtaccacgaggactttgagaagcacaagggctgcttcacccctgtggtgacagaccccatcacagagcgggtgaagaagaacatgcaggacttcagtgacatcaactaccggggcatccagaggaaggtggtggagatggagcagaagagaaatgaccaggaccaggagaccatcaccggcctgcgggtgtggaggaccaaccctggctctgtgtttgattatgaccctgctgaggacaacatccagagccgcagcctgcacatgatcaacgtgcaggcccagaggaggagccgggagcagagccgcagcgccagcgccctgagcatctctggaggagaggagaagtctgagcacagcgaggccccagaccaccacctgagcacctacagtgatggcggcgtgtttgctgtgtccacagcctacaagcacgccaagaccacagagctgccccagcagaggagcagctctgtggccacccagcagaccaccgtgagcagcatccccagccaccccagcacagctgggaagatcttccgggccatgtatgactacatggccgcagatgctgatgaggtgtccttcaaggatggagatgccatcatcaacgtgcaggccattgatgagggctggatgtatggaacagtgcagaggactggaagaacaggcatgctgcctgccaactacgtggaggccatctag

SEQ ID NO: 161327 - DNA, 25578 bp, synthetic construct
  misc_feature 1..25578: note = Description of Artificial Sequence: Synthetic coding sequence
  source 1..25578: mol_type = other DNA
atggctgatgatgaagattatgaggaggtggtggagtactacacagaggaggtggtgtatgaggaggtgcctggagagaccatcaccaagatctatgagaccaccaccaccaggaccagtgactatgagcagagcgagaccagcaagccagccctggcccagcctgccctggcccagcctgccagcgccaagcctgtggagaggaggaaggtgatcaggaagaaggtggaccccagcaagttcatgaccccctacatcgcccacagccagaagatgcaggacctcttcagccccaacaagtacaaggagaagtttgagaagaccaagggccagccctatgccagcaccacagacaccccagagctgcggcgcatcaagaaggtgcaggaccagctgtctgaggtgaagtacaggatggatggagatgtggccaagaccatctgccacgtggatgagaaggccaaggacattgaacatgccaagaaggtgtcccagcaggtgtccaaggtgctgtacaagcagaactgggaggacaccaaggacaagtacctgctgcccccagatgcccctgagctggtgcaggccgtgaagaacacagccatgttcagcaagaagctgtacacagaggactgggaggccgacaagagcctcttctacccctacaatgacagccctgagctgcggcgggtggcccaggcccagaaggccctgagtgatgtggcctacaagaagggcctggccgagcagcaggcccagttcacccccctggccgaccccccagacatcgagtttgccaagaaggtgaccaaccaggtgtccaagcagaagtacaaggaggactatgagaacaagatcaagggcaagtggagcgagaccccctgctttgaggtggccaatgccaggatgaatgctgacaacatcagcaccaggaagtaccaggaggactttgagaacatgaaggaccagatctacttcatgcagacagagaccccagagtacaagatgaacaagaaggccggcgtggccgccagcaaggtgaagtacaaggaggactatgagaagaacaagggcaaggctgactacaacgtgctgcctgccagcgagaacccccagctgcggcagctgaaggctgctggagatgccctgagtgacaagctgtacaaggaaaattatgagaagaccaaggccaagagcatcaactactgtgagacccccaagttcaagctggacacagtgctgcagaacttcagcagtgacaagaagtacaaggacagctacctgaaggacatcctgggccactacgtgggcagctttgaggacccctaccacagccactgcatgaaggtgacagcccagaacagcgacaagaactacaaggccgagtatgaggaggaccggggcaagggcttcttcccccagaccatcacccaggagtatgaggccatcaagaagctggaccagtgcaaggaccacacctacaaggtgcacccagacaagaccaagttcacccaggtgacagacagccctgtgctgctgcaggcccaggtgaacagcaagcagctgagtgacctgaactacaaggccaagcatgagagcgagaagttcaagtgccacatccccccagacaccccagccttcatccagcacaaggtgaatgcctacaacctgagtgacaacctgtacaagcaggactgggagaagagcaaggccaagaagtttgacatcaaggtggatgccatccccctgctggccgccaaggccaacaccaagaacaccagtgatgtgatgtacaagaaggactatgagaagaacaagggcaagatgattggagtgctgagcatcaatgatgaccccaagatgctgcacagcctgaaggtggccaagaaccagagcgaccggctgtacaaggaaaattatgagaagaccaaggccaagtccatgaactactgtgagacccccaagtaccagctggacacccagctgaagaacttcagcgaggcccgctacaaggacctgtatgtgaaggatgtgctgggccactacgtgggctccatggaggacccctaccacacccactgcatgaaggtggccgcccagaacagcgacaagagctacaaggccgagtatgaagaagataaaggcaagtgctacttcccccagaccatcacccaggagtatgaggccatcaagaagctggaccagtgcaaggaccacacctacaaggtgcacccagacaagaccaagttcaccgctgtgacagacagccctgtgctgctgcaggcccagctgaacaccaagcagctgagtgacctgaactacaaggccaagcatgaaggagagaagttcaagtgccacatcccagcagatgccccccagttcatccagcaccgggtgaatgcctacaacctgagtgacaacgtgtacaagcaggactgggagaagagcaaggccaagaagtttgacatcaaggtggatgccatccccctgctggccgccaaggccaacaccaagaacaccagtgatgtgatgtacaagaaggactatgagaagagcaagggcaagatgattggagccctgagcatcaatgatgaccccaagatgctgcacagcctgaagacagccaagaaccagagcgaccgggagtacaggaaggactatgagaagagcaagaccatctacacagcccccctggacatgctgcaggtgacccaggccaagaagagccaggccatcgccagtgatgtggactacaagcacatcctgcacagctacagctaccccccagacagcatcaacgtggacctggccaagaaggcctatgccctgcagagtgatgtggagtacaaggctgactacaacagctggatgaagggctgcggctgggtgcccttcggcagcctggagatggagaaggccaagagggccagtgacatcctgaatgagaagaagtaccggcagcacccagacaccctgaagttcaccagcattgaagatgcccccatcaccgtgcagagcaagatcaaccaggcccagaggagtgacatcgcctacaaggccaagggggaggagatcatccacaagtacaacctgcccccagacctgccccagttcatccaggccaaggtgaatgcctacaacatcagcgagaacatgtacaaggctgacctgaaggacctgagcaagaagggctatgacctgaggacagatgccatccccatccgggccgccaaggccgcccggcaggccgccagtgatgtgcagtacaagaaggactatgagaaggccaagggcaagatggtgggcttccagagcctgcaggatgaccccaagctggtgcactacatgaatgtggccaagatccagagcgaccgggagtacaagaaggactatgagaagaccaagagcaagtacaacacccctcatgacatgtttaatgtggtggccgccaagaaggcccaggatgtggtgtccaatgtgaactacaagcacagcctgcaccactacacctacctgcctgatgccatggacctggagctgagcaagaacatgatgcagatccagagcgacaacgtgtacaaggaggactacaacaactggatgaagggcatcggctggatccccatcggcagcctggatgtggagaaggtgaagaaggctggagatgccctgaatgagaagaagtaccggcagcacccagacaccctgaagttcaccagcatcgtggacagccctgtgatggtgcaggccaagcagaacaccaagcaggtgtctgacatcctgtacaaggccaagggggaggatgtgaagcacaagtacaccatgagcccagacctgccccagttcctgcaggccaagtgcaatgcctacaacatcagtgatgtgtgctacaagagggactggtatgacctgattgccaagggcaacaacgtgctgggagatgccatccccatcacagctgccaaggccagcaggaacatcgccagtgactacaagtacaaggaggcctatgagaagagcaagggcaagcacgtgggcttccgcagcctgcaggatgaccccaagctggtgcactacatgaatgtggccaagctgcagagcgaccgggagtacaagaagaactatgagaacaccaagaccagctaccacacccctggggacatggtgtccatcacagctgccaagatggcccaggatgtggccaccaacgtgaactacaagcagcccctgcaccactacacctacctgcctgatgccatgagcctggagcacaccagaaatgtgaaccagatccagagcgacaacgtgtacaaggatgagtacaacagcttcctgaagggcatcggctggatccccatcggcagcctggaggtggagaaggtgaagaaggctggagatgccctgaatgaaaggaagtaccggcagcacccagacacagtgaagttcacctctgtgcctgacagcatgggcatggtgctggcccagcacaacaccaagcagctgagtgacctgaactacaaggtggagggggagaagctgaagcacaagtacaccatcgaccctgagctgccccagttcatccaggccaaggtgaatgccctgaacatgtctgatgcccactacaaggctgactggaagaagaccatcgccaagggctatgacctgcggccagatgccatccccatcgtggccgccaagagcagcaggaacatcgccagtgactgcaagtacaaggaggcctatgagaaggccaagggcaagcaggtgggcttcctgagcctgcaggatgaccccaagctggtgcactacatgaatgtggccaagatccagagcgaccgggagtacaagaagggctatgaggccagcaagaccaagtaccacacccccctggacatggtgtctgtgacagctgccaagaagagccaggaggtggccaccaatgccaactaccggcagagctaccaccactacaccctgctgcctgatgccctgaatgtggagcacagcagaaatgccatgcagatccagagcgacaacctgtacaagagtgacttcaccaactggatgaagggcatcggctgggtgcccatcgagagcctggaggtggagaaggccaagaaggccggggagatcctgtctgagaagaagtaccggcagcaccctgagaagctgaagttcacctacgccatggacaccatggagcaggccctgaacaagagcaacaagctgaacatggacaagaggctgtacacagagaagtggaacaaggacaagaccaccatccacgtgatgccagacaccccagacatcctgctgagccgggtgaaccagatcaccatgtctgacaagctgtacaaggccggctgggaggaggagaagaagaagggctatgacctgcggccagatgccatcgccatcaaggccgcccgggccagccgggacatcgccagtgactacaagtacaagaaggcctatgagcaggccaagggcaagcacatcggcttccgcagcctggaggatgaccccaagctggtgcacttcatgcaggtggccaagatgcagagcgaccgggagtacaagaagggctatgagaagagcaagaccagcttccacacccctgtggacatgctgtctgtggtggccgccaagaagagccaggaggtggccaccaatgccaactacagaaatgtcatccacacctacaacatgctgcctgatgccatgagctttgagctggccaagaacatgatgcagatccagagcgacaaccagtacaaggctgactatgctgacttcatgaagggcatcggctggctgcccctgggcagcctggaggccgagaagaacaagaaggccatggagatcatcagcgagaagaagtaccggcagcacccagacaccctgaagtacagcaccctgatggacagcatgaacatggtgctggcccagaacaatgccaagatcatgaatgagcacctgtacaagcaggcctgggaggccgacaagaccaaggtgcacatcatgccagacatcccccagatcatcctggccaaggccaatgccatcaacatgtctgacaagctgtacaagctgagcctggaggagagcaagaagaagggctatgacctgcggccagatgccatccccatcaaggccgccaaggccagccgggacatcgccagtgactacaagtacaagtacaactatgagaagggcaagggcaagatggtgggcttccgcagcctggaggatgaccccaagctggtgcacagcatgcaggtggccaagatgcagagcgaccgggagtacaagaagaactatgagaacaccaagaccagctaccacaccccagctgacatgctgtctgtgacagctgccaaggatgcccaggccaacatcaccaacaccaactacaagcacctgatccacaagtacatcctgctgcctgatgccatgaacatcgagctgaccaggaacatgaaccgcatccagagcgacaatgagtacaagcaggactacaatgagtggtacaagggcctgggctggagccctgctggcagcctggaggtggagaaggccaagaaggccacagaatatgccagtgaccagaagtaccggcagcaccccagcaacttccagttcaagaagctgacagacagcatggacatggtgctggccaagcagaatgcccacaccatgaacaagcacctgtacaccatcgactggaacaaggacaagaccaagatccacgtgatgccagacaccccagacatcctgcaggccaagcagaaccagaccctgtacagccagaagctgtacaagctgggctgggaggaggccctgaagaagggctatgacctgcctgtggatgccatctctgtgcagctggccaaggccagccgggacatcgccagtgactacaagtacaagcagggctacaggaagcagctgggccaccacgtgggcttccgcagcctgcaggatgaccccaagctggtgctgtccatgaatgtggccaagatgcagagcgagcgggagtacaagaaggactttgagaagtggaagaccaagttcagcagccctgtggacatgctgggcgtggtgctggccaagaagtgccaggagctggtgtctgatgtggactacaagaactacctgcaccagtggacctgcctgcctgaccagaatgatgtggtgcaggccaagaaggtgtatgagctgcagagtgaaaatctctacaagagtgacctggagtggctgcggggcatcggctggagccccctgggcagcctggaggccgagaagaacaagagggccagcgagatcatcagcgagaagaagtaccggcagcccccagacaggaacaagttcaccagcatcccagatgccatggacatcgtgctggccaagaccaatgccaagaacagaagtgaccggctgtaccgggaggcctgggacaaggacaagacccagatccacatcatgccagacaccccagacatcgtgctggccaaggccaacctgatcaacaccagtgacaagctgtacaggatgggctatgaggagctgaagaggaagggctatgacctgcctgtggatgccatccccatcaaggccgccaaggccagccgggagatcgccagcgagtacaagtacaaggagggcttcaggaagcagctgggccaccacatcggggccaggaacattgaagatgaccccaagatgatgtggagcatgcacgtggccaagatccagagcgaccgggagtacaagaaggactttgagaagtggaagaccaagttcagcagccctgtggacatgctgggcgtggtgctggccaagaagtgccagaccctggtgtctgatgtggactacaagaactacctgcaccagtggacctgcctgcctgaccagagtgatgtgatccacgcccggcaggcctatgacctgcagagcgacaacctgtacaagagtgacctgcagtggctgaagggcatcggctggatgaccagcggcagcctggaggatgagaagaacaagagggccacccagatcctgagtgaccacgtgtaccggcagcacccagaccagttcaagttcagcagcctgatggacagcatccccatggtgctggccaagaacaatgccatcaccatgaaccaccggctgtacacagaggcctgggacaaggacaagaccaccgtgcacatcatgccagacaccccagaggtgctgctggccaagcagaacaaggtgaactacagcgagaagctgtacaagctgggcctggaggaggccaagaggaagggctatgacatgagggtggatgccatccccatcaaggccgccaaggccagccgggacatcgccagcgagttcaagtacaaggagggctacaggaagcagctgggccaccacatcggggcccgggccatcagagatgaccccaagatgatgtggagcatgcacgtggccaagatccagagcgaccgggagtacaagaaggactttgagaagtggaagaccaagttcagcagccctgtggacatgctgggcgtggtgctggccaagaagtgccagaccctggtgtctgatgtggactacaagaactacctgcaccagtggacctgcctgcctgaccagagtgatgtgattcatgcccggcaggcctatgacctgcagagcgacaacatgtacaagagtgacctgcagtggatgaggggcatcggctgggtgtccatcggcagcctggatgtggagaagtgcaagagggccacagagatcctgagtgacaagatctaccggcagcccccagaccgcttcaagttcacctctgtgacagacagcctggagcaggtgctggccaagaacaatgccatcaccatgaacaagaggctgtacacagaggcctgggacaaggacaagacccagatccacatcatgccagacaccccagagatcatgctggccaggatgaacaagatcaactacagcgagagcctgtacaagctggccaatgaggaggccaagaagaagggctatgacctgcggagtgatgccatccccatcgtggccgccaaggccagccgggacatcatcagtgactacaagtacaaggatggctactgcaagcagctgggccaccacatcggggccaggaacattgaagatgaccccaagatgatgtggagcatgcacgtggccaagatccagagcgaccgggagtacaagaaggactttgagaagtggaagaccaagttcagcagccctgtggacatgctgggcgtggtgctggccaagaagtgccagaccctggtgtctgatgtggactacaagaactacctgcacgagtggacctgcctgcctgaccagagtgatgtgatccacgcccggcaggcctatgacctgcagagcgacaacatctacaagagtgacctgcagtggctgcggggcatcggctgggtgcccatcggctccatggatgtggtgaagtgcaagagggccacagagatcctgagtgacaacatctaccggcagcccccagacaagctgaagttcacctctgtgacagacagcctggagcaggtgctggccaagaacaatgccctgaacatgaacaagaggctgtacacagaggcctgggacaaggacaagacccagatccacatcatgccagacaccccagagatcatgctggcccggcagaacaagatcaactacagcgagaccctgtacaagctggccaatgaggaggccaagaagaagggctatgacctgcggagtgatgccatccccatcgtggccgccaaggccagcagagatgtgatcagtgactacaagtacaaggatggctacaggaagcagctgggccaccacatcggggccagaaatattgaagatgaccccaagatgatgtggagcatgcacgtggccaagatccagagcgaccgggagtacaagaaggactttgagaagtggaagaccaagttcagcagccctgtggacatgctgggcgtggtgctggccaagaagtgccagaccctggtgtctgatgtggactacaagaactacctgcacgagtggacctgcctgcctgaccagaatgatgtgattcatgcccggcaggcctatgacctgcagagcgacaacatctacaagagtgacctgcagtggctgcggggcatcggctgggtgcccatcggctccatggatgtggtgaagtgcaagagagctgctgagatcctgagtgacaacatctaccggcagcccccagacaagctgaagttcacctctgtgacagacagcctggagcaggtgctggccaagaacaatgccctgaacatgaacaagaggctgtacacagaggcctgggacaaggacaagacccaggtgcacatcatgccagacaccccagagatcatgctggcccggcagaacaagatcaactacagcgagagcctgtaccggcaggccatggaggaggccaagaaggagggctatgacctgcggagtgatgccatccccatcgtggccgccaaggccagccgggacatcgccagtgactacaagtacaaggaggcctacaggaagcagctgggccaccacatcggggcccgggctgtgcatgatgaccccaagatcatgtggagcctgcacatcgccaaggtgcagagcgaccgggagtacaagaaggactttgagaagtacaagacccgctacagcagccctgtggacatgctgggcatcgtgctggccaagaagtgccagaccctggtgtctgatgtggactacaagcaccccctgcacgagtggatctgcctgcctgaccagaatgacatcatccacgccaggaaggcctatgacctgcagagcgacaacctgtacaagagtgacctggagtggatgaagggcatcggctgggtgcccatcgacagcctggaggtggtgcgggccaagagagctggggagctgctgagtgacaccatctaccggcagaggcctgagaccctgaagttcaccagcatcacagacaccccagagcaggtgctggccaagaacaatgccctgaacatgaacaagaggctgtacacagaggcctgggacaatgacaagaagaccatccacgtgatgccagacaccccagagatcatgctggccaagctgaaccgcatcaactacagcgacaagctgtacaagctggccctggaggagagcaagaaggagggctatgacctgcggctggatgccatccccatccaggccgccaaggccagccgggacatcgccagtgactacaagtacaaggagggctacaggaagcagctgggccaccacatcggggccaggaacatcaaggatgaccccaagatgatgtggagcatccacgtggccaagatccagagcgaccgggagtacaagaaggagtttgagaagtggaagaccaagttcagcagccctgtggacatgctgggcgtggtgctggccaagaagtgccagatcctggtgtctgacatcgactacaagcaccccctgcacgagtggacctgcctgcctgaccagaatgatgtgatccaggccaggaaggcctatgacctgcagagtgatgccatctacaagagtgacctggagtggctgcggggcatcggctgggtgcccatcggctctgtggaggtggagaaggtgaagagagctggggagatcctgagtgacaggaagtaccggcagcctgctgaccagctgaagttcacctgcatcacagacaccccagaaattgtgctggccaagaacaatgccctgaccatgagcaagcacctgtacacagaggcctgggatgctgacaagaccagcatccacgtgatgccagacaccccagacatcctgctggccaagagcaacagcgccaacatcagccagaagctgtacaccaagggctgggatgagagcaagatgaaggactatgacctgcgggcagatgccatcagcatcaagagcgccaaggccagccgggacatcgccagtgactacaagtacaaggaggcctatgagaagcagaagggccaccacatcggggcccagagcattgaagatgaccccaagatcatgtgtgccatccacgccggcaagatccagagcgagcgggagtacaagaaggagttccagaagtggaagaccaagttcagcagccctgtggacatgctgagcatcctgctggccaagaagtgccagaccctggtgacagacatcgactacagaaactacctgcacgagtggacctgcatgccagaccagaatgacatcatccaggccaagaaggcctatgacctgcagagcgacagcgtgtacaaggctgacctggagtggctgcggggcatcggctggatgcctgagggctctgtggagatgaacagagtgaaggtggcccaggacctggtgaatgaaagactctaccgcaccaggcctgaggccctgtccttcaccagcatcgtggacaccccagaggtggtgctggccaaggccaacagcctgcagatcagcgagaagctgtaccaggaggcctggaacaaggacaagagcaacatcaccatccccagcgacaccccagagatgctgcaggcccacatcaatgccctgcagatcagcaacaagctgtaccagaaggactggaatgatgccaagcagaagggctatgacatccgggcagatgccatcgagatcaagcacgccaaggccagccgggagatcgccagcgagtacaagtacaaggagggctacaggaagcagctgggccaccacatgggcttccgcaccctgcaggatgaccccaagtctgtgtgggccatccatgctgccaagatccagagcgaccgggagtacaagaaggcctatgagaagagcaagggcatccacaacacccccctggacatgatgagcatcgtgcaggccaagaagtgccaggtgctggtgtctgacatcgactacagaaactacctgcaccagtggacctgcctgcctgaccagaatgatgtgatccaggccaagaaggcctatgacctgcagagcgacaacctgtacaagagtgacctggagtggctgaagggcatcggctggctgcctgagggctctgtggaggtgatgagggtgaagaatgcccagaacctgctgaatgaaaggctgtaccgcatcaagccagaggccctgaagttcaccagcatcgtggacaccccagaggtgatccaggccaagatcaatgctgtgcagatcagcgagcccctgtacagagatgcctgggagaaggagaaggccaacgtgaatgtgcctgctgacacccccctgatgctgcagagcaagatcaatgccctgcagatcagcaacaagcgctaccagcaggcctgggaggatgtgaagatgacaggctatgacctgcgggcagatgccatcggcatccagcacgccaaggccagccgggacatcgccagtgactacctgtacaagacagcctatgagaagcagaagggccactacatcggctgccgcagcgccaaggaggaccccaagctggtgtgggccgccaacgtgctgaagatgcagaatgaccggctgtacaagaaggcctacaatgaccacaaggccaagatcagcatccctgtggacatggtgtccatctctgctgccaaggagggccaggccctggccagtgatgtggactaccgccactacctgcaccactggagctgcttcccagaccagaatgatgtgatccaggccaggaaggcctatgacctgcagagcgacagcgtgtacaaggctgacctggagtggctgcggggcatcggctggatgcctgagggctctgtggagatgaacagagtgaaggtggcccaggacctggtgaatgaaagactctaccgcaccaggcctgaggccctgtccttcaccagcatcgtggacaccccagaggtggtgctggccaaggccaacagcctgcagatcagcgagaagctgtaccaggaggcctggaacaaggacaagagcaacatcaccatccccagcgacaccccagagatgctgcaggcccacatcaatgccctgcagatcagcaacaagctgtaccagaaggactggaatgacaccaagcagaagggctatgacatccgggcagatgccatcgagatcaagcacgccaaggccagccgggagatcgccagcgagtacaagtacaaggagggctacaggaagcagctgggccaccacatgggcttccgcaccctgcaggatgaccccaagtctgtgtgggccatccatgctgccaagatccagagcgaccgggagtacaagaaggcctatgagaagagcaagggcatccacaacacccccctggacatgatgagcatcgtgcaggccaagaagtgccaggtgctggtgtctgacatcgactacagaaactacctgcaccagtggacctgcctgcctgaccagaatgatgtgatccaggccaagaaggcctatgacctgcagagcgacaacctgtacaagagtgacctggagtggctgaagggcatcggctggctgcctgagggctctgtggaggtgatgagggtgaagaatgcccagaacctgctgaatgaaaggctgtaccgcatcaagccagaggccctgaagttcaccagcatcgtggacaccccagaggtgatccaggccaagatcaatgctgtgcagatcagcgagcccctgtacagaaatgcctgggagaaggagaaggccaacgtgaatgtgcctgctgacacccccctgatgctgcagagcaagatcaatgccctgcagatcagcaacaagcgctaccagcaggcctgggaggatgtgaagatgacaggctatgacctgcgggcagatgccatcggcatccagcacgccaaggccagccgggacatcgccagtgactacctgtacaagacagcctatgagaagcagaagggccactacatcggctgccgcagcgccaaggaggaccccaagctggtgtgggccgccaacgtgctgaagatgcagaatgaccggctgtacaagaaggcctacaatgaccacaaggccaagatcagcatccctgtggacatggtgtccatctctgctgccaaggagggccaggccctggccagtgatgtggactaccgccactacctgcaccactggagctgcttcccagaccagaatgatgtgatccaggccaggaaggcctatgacctgcagagcgacagcgtgtacaaggctgacctggagtggctgcggggcatcggctggatgcctgagggctctgtggagatgaacagagtgaaggtggcccaggacctggtgaatgaaagactctaccgcaccaggcctgaggccctgtccttcaccagcatcgtggacaccccagaggtggtgctggccaaggccaacagcctgcagatcagcgagaagctgtaccaggaggcctggaacaaggacaagagcaacatcaccatccccagcgacaccccagagatgctgcaggcccacatcaatgccctgcagatcagcaacaagctgtaccagaaggactggaatgacaccaagcagaagggctatgacatccgggcagatgccatcgagatcaagcacgccaaggccagccgggagatcgccagcgagtacaagtacaaggagggctacaggaagcagctgggccaccacatgggcttccgcaccctgcaggatgaccccaagtctgtgtgggccatccatgctgccaagatccagagcgaccgggagtacaagaaggcctatgagaagagcaagggcatccacaacacccccctggacatgatgagcatcgtgcaggccaagaagtgccaggtgctggtgtctgacatcgactacagaaactacctgcaccagtggacctgcctgcctgaccagaatgatgtgatccaggccaagaaggcctatgacctgcagagcgacaacctgtacaagagtgacctggagtggctgaagggcatcggctggctgcctgagggctctgtggaggtgatgagggtgaagaatgcccagaacctgctgaatgaaaggctgtaccgcatcaagccagaggccctgaagttcaccagcatcgtggacaccccagaggtgatccaggccaagatcaatgctgtgcagatcagcgagcccctgtacagagatgcctgggagaaggagaaggccaacgtgaatgtgcctgctgacacccccctgatgctgcagagcaagatcaatgccctgcagatcagcaacaagcgctaccagcaggcctgggaggatgtgaagatgacaggctatgacctgcgggcagatgccatcggcatccagcacgccaaggccagccgggacatcgccagtgactacctgtacaagacagcctatgagaagcagaagggccactacatcggctgccgcagcgccaaggaggaccccaagctggtgtgggccgccaacgtgctgaagatgcagaatgaccggctgtacaagaaggcctacaatgaccacaaggccaagatcagcatccctgtggacatggtgtccatctctgctgccaaggagggccaggccctggccagtgatgtggactaccgccactacctgcaccgctggagctgcttcccagaccagaatgatgtgatccaggccaggaaggcctatgacctgcagagtgatgccctgtacaaggctgacctggagtggctgcggggcatcggctggatgccccagggcagccctgaggtgctgcgggtgaagaatgcccagaacatcttctgtgacagcgtgtaccgcacccctgtggtgaacctgaagtacaccagcatcgtggacaccccagaggtggtgctggccaagagcaatgctgagaacatcagcatccccaagtaccgggaggtgtgggacaaggacaagaccagcatccacatcatgccagacaccccagagatcaacctggcccgggccaatgccctgaatgtgagcaacaagctgtaccgggagggctgggatgagatgaaggccggctgtgatgtgcggctggatgccatccccatccaggccgccaaggccagccgggagatcgccagtgactacaagtacaagctggaccacgagaagcagaagggccactacgtgggcaccctgacagccagagatgacaacaagatccgctgggccctgattgctgacaagctgcagaatgaaagagagtaccgcctggactgggccaagtggaaggccaagatccagagccctgtggacatgctgagcatcctgcacagcaagaacagccaggccctggtgtctgacatggactacagaaactacctgcaccagtggacctgcatgccagaccagaatgatgtgatccaggccaagaaggcctatgagctgcagagcgacaacgtgtacaaggctgacctggagtggctgcggggcatcggctggatgcccaatgacagcgtgtctgtgaaccacgccaagcatgctgctgacatcttcagcgagaagaagtaccgcaccaagattgagaccctgaacttcacccctgtggatgacagagtggactatgtgacagccaagcagagcggggagatcctggatgacatcaagtacaggaaggactggaatgccaccaagagcaagtacaccctgacagagacccccctgctgcacacagcccaggaggccgcccgcatcctggaccagtacctgtacaaggagggctgggagcggcagaaggccaccggctacatcctgcccccagatgctgtgccctttgtgcacgcccaccactgcaatgatgtgcagagcgagctgaagtacaaggccgagcacgtgaagcagaagggccactacgtgggcgtgcccaccatgagagatgaccccaagctggtgtggtttgaacatgctggccagatccagaatgaaaggctgtacaaggaggactaccacaagaccaaggccaagatcaacatcccagctgacatggtgtctgtgctggccgccaagcagggccagaccctggtgtctgacatcgactacagaaactacctgcaccagtggatgtgccacccagaccagaatgatgtgatccaggccaggaaggcctatgacctgcagagcgacaacgtgtacagagctgacctggagtggctgcggggcatcggctggatccccctggacagcgtggaccacgtgcgggtgaccaagaaccaggagatgatgagccagatcaagtacaagaagaatgccctggagaactaccccaacttccgctctgtggtggaccccccagagatcgtgctggccaagatcaacagcgtgaaccagagtgatgtgaagtacaaggagaccttcaacaaggccaagggcaagtacaccttctccccagacaccccccacatcagccacagcaaggacatgggcaagctgtacagcaccatcctgtacaagggggcctgggagggcaccaaggcctacggctacaccctggatgagcgctacatccccatcgtgggcgccaagcatgctgacctggtgaacagcgagctgaagtacaaggagacctatgagaagcagaagggccactacctggccggcaaggtgattggagagttccctggggtggtgcactgcctggacttccagaagatgaggtctgccctgaactacaggaagcactatgaggacaccaaggccaacgtgcacatccccaatgacatgatgaaccacgtgctggccaagcgctgccagtacatcctgagtgacctggagtaccgccactacttccaccagtggaccagcctgctggaggagcccaacgtcatccgggtgagaaatgcccaggagatcctgagtgacaacgtgtacaaggatgacctgaactggctgaagggcatcggctgctacgtgtgggacaccccccagatcctgcacgccaagaagagctatgacctgcagagccagctgcagtacacagctgctgggaaggagaacctgcagaactacaacctggtgacagacacccccctgtatgtgacagctgtgcagagcggcatcaatgccagcgaggtgaagtacaaggagaactaccaccagatcaaggacaagtacaccaccgtgctggagaccgtggactatgacaggaccaggaacctgaagaacctgtacagcagcaacctgtacaaggaggcctgggacagagtgaaggccaccagctacatcctgcccagcagcaccctgagcctgacccacgccaagaaccagaagcacctggccagccacatcaagtaccgggaggagtatgagaagttcaaggccctgtacaccctgcccaggtctgtggatgatgaccccaacacagcccgctgcctgcgggtgggcaagctgaacatcgaccggctgtacagatctgtgtatgagaagaacaagatgaagatccacatcgtgcctgacatggtggagatggtgacagccaaggacagccagaagaaggtgtctgaaattgactaccgcctgcggctgcacgagtggatctgccacccagacctgcaggtgaatgaccacgtgaggaaggtgacagaccagatcagtgacatcgtgtacaaggatgacctgaactggctgaagggcatcggctgctacgtgtgggacaccccagagatcctgcacgccaagcacgcctatgacctgagagatgacatcaagtacaaggcccacatgctgaagaccagaaatgactacaagctggtgacagacacccctgtgtatgtgcaggccgtgaagagcggcaagcagctgagtgatgctgtgtaccactatgactatgtgcacagcgtgcggggcaaggtggcccccaccaccaagacagtggacctggaccgggccctgcacgcctacaagctgcagagcagcaacctgtacaagaccagcctgcggaccctgcccaccggctaccgcctgcccggggacaccccccacttcaagcacatcaaggacacccgctacatgagcagctacttcaagtacaaggaggcctatgagcacaccaaggcctacggctacaccctgggccccaaggatgtgccctttgtgcacgtgagaagagtgaacaacgtgaccagcgagcggctgtaccgggagctgtaccacaagctgaaggacaagatccacaccaccccagacaccccagagatccggcaggtgaagaagacccaggaggccgtgtctgagctgatctacaagagtgacttcttcaagatgcagggccacatgatcagcctgccctacaccccccaggtgatccactgccgctacgtgggggacatcaccagtgacatcaagtacaaggaggacctgcaggtgctgaagggcttcggctgcttcctgtatgacaccccagacatggtgcgcagccgccacctgaggaagctgtggagcaactacctgtacacagacaaggccaggaagatgagggacaagtacaaggtggtgctggacaccccagagtacaggaaggtgcaggagctgaagacccacctgtctgagctggtgtacagagctgctgggaagaagcagaagagcatcttcacctctgtgcctgacaccccagacctgctgcgggccaagaggggccagaagctgcagagccagtacctgtatgtggagctggccaccaaggagcggccccaccaccacgccggcaaccagaccacagccctgaagcacgccaaggatgtgaaggacatggtgtctgagaagaagtacaagatccagtatgagaagatgaaggacaagtacacccctgtgcctgacacccccatcctgatccgggccaagagggcctactggaatgccagtgacctgcgctacaaggagaccttccagaagaccaagggcaagtaccacacagtgaaggatgccctggacatcgtgtaccacaggaaggtgacagatgacatcagcaagatcaagtacaaggagaactacatgagccagctgggcatctggaggagcatcccagacaggcctgagcacttccaccacagagctgtgacagacacagtgtctgatgtgaagtacaaggaggacctgacctggctgaagggcatcggctgctacgcctatgacaccccagacttcaccctggccgagaagaacaagaccctgtacagcaagtacaagtacaaggaggtgtttgagaggaccaagagtgacttcaagtatgtggccgacagccccatcaacagacacttcaagtatgccacccagctgatgaatgagaagaagtacagagctgactatgagcagaggaaggacaagtaccacctggtggtggatgagcccaggcacctgctggccaagacagctggggaccagatcagccagatcaagtacaggaagaactatgagaagagcaaggacaagttcaccagcatcgtggacaccccagagcacctgcggaccaccaaggtgaacaagcagatcagtgacatcctgtacaagctggagtacaacaaggccaagccccggggctacaccaccatccatgacacccccatgctgctgcacgtgaggaaggtgaaggatgaggtgtctgacctgaagtacaaggaggtgtaccagaggaacaagagcaactgcaccatcgagccagatgctgtgcacatcaaggccgccaaggatgcctacaaggtgaacaccaacctggactacaagaagcagtatgaggccaacaaggcccactggaagtggaccccagacagaccagacttcctgcaggccgccaagagcagcctgcagcagagcgactttgagtacaagctggaccgggagttcctgaagggctgcaagctgtctgtgacagatgacaagaacacagtgctggccctgaggaacaccctcatcgagagtgacctgaagtacaaggagaagcacgtgaaggagcggggcacctgccacgctgtgcctgacaccccccagatcctgctggccaagacagtgagcaacctggtgtctgagaacaagtacaaggaccacgtgaagaagcacctggcccagggcagctacaccaccctgcctgagacccgggacacagtgcacgtgaaggaggtgaccaagcacgtgtctgacaccaactacaagaagaagtttgtgaaggagaagggcaagagcaactacagcatcatgctggagcccccagaggtgaagcacgccatggaggtggccaagaagcagagtgatgtggcctacaggaaggatgccaaggagaacctgcactacaccaccgtggccgacagaccagacatcaagaaggccacccaggccgccaagcaggccagcgaggtggagtaccgggccaagcacaggaaggagggcagccacggcctgtccatgctgggccgcccagacatcgagatggccaagaaggccgccaagctgagcagccaggtgaagtaccgggagaactttgacaaggagaagggcaagacccccaagtacaaccccaaggacagccagctgtacaaggtgatgaaggatgccaacaacctggccagcgaggtgaagtacaaggctgacctgaagaagctgcacaagcctgtgacagacatgaaggagagcctcatcatgaaccacgtgctgaacaccagccagctggccagcagctaccagtacaagaagaagtatgagaagagcaagggccactaccacaccatcccagacaacctggagcagctgcacctgaaggaggccacagagctgcagagcatcgtgaagtacaaggagaagtatgagaaggagcggggcaagcccatgctggactttgagacccccacctacatcacagccaaggagagccagcagatgcagagcggcaaggagtacaggaaggactatgaggagagcatcaagggcaggaacctgaccggcctggaggtgaccccagccctgctgcacgtgaagtatgccaccaagatcgccagcgagaaggagtacaggaaggacctggaggagagcatccggggcaagggcctgacagagatggaggacaccccagacatgctgcgggccaagaatgccacccagatcctgaatgagaaggagtacaagagggacctggagctggaggtgaagggccggggcctgaatgccatggccaatgagaccccagacttcatgagggccagaaatgccacagacatcgccagccagatcaagtacaagcagagcgctgagatggagaaggccaacttcacctctgtggtggacaccccagagatcatccacgcccagcaggtgaagaacctgagcagccagaagaagtacaaggaggatgctgagaagtccatgagctactatgagaccgtgctggacaccccagagatccagagggtgcgggagaaccagaagaacttcagcctgctgcagtaccagtgtgacctgaagaacagcaagggcaagatcaccgtggtgcaggacaccccagagatcctgcgggtgaaggagaaccagaagaacttcagctctgtgctgtacaaggaggatgtgtccccaggcacagccatcggcaagaccccagagatgatgagggtgaagcagacccaggaccacatcagctctgtgaagtacaaggaggccatcggccagggcacccccatcccagacctgcctgaggtgaagagggtgaaggagacccagaagcacatcagctctgtgatgtacaaggagaacctgggcaccggcatccccaccaccgtgaccccagaaattgagcgggtgaagaggaaccaggagaacttcagctctgtgctgtacaaggagaacctgggcaagggcatccccacccccatcaccccagagatggagcgggtgaagaggaaccaggagaacttcagcagcatcctgtacaaggagaacctgagcaagggcacccccctgcctgtgaccccagagatggagcgggtgaagctgaaccaggagaacttcagctctgtgctgtacaaggaaaatgtgggcaagggcatccccatccccatcaccccagagatggagcgggtgaagcacaaccaggagaacttcagctctgtgctgtacaaggagaacctgggcaccggcatccccatccccatcaccccagagatgcagagggtgaagcacaaccaggagaacctgagctctgtgctgtacaaggagaacatgggcaagggcacccccctgcctgtgaccccagagatggagcgggtgaagcacaaccaggagaacatcagctctgtgctgtacaaggagaacatgggcaagggcacccccctgcctgtgaccccagagatggagcgggtgaagcacaaccaggagaacatcagctctgtgctgtacaaggagaacatgggcaagggcacccccctggccgtgaccccagagatggagcgggtgaagcacaaccaggagaacatcagctctgtgctgtacaaggaaaatgtgggcaaggccacagccacccctgtgaccccagagatgcagagggtgaagaggaaccaggagaacatcagctctgtgctgtacaaggagaacctgggcaaggccacccccacccccttcaccccagagatggagcgggtgaagaggaaccaggagaacttcagctctgtgctgtacaaggagaacatgaggaaggccacccccacccctgtgaccccagagatggagcgggccaagaggaaccaggagaacatcagctctgtgctgtacagcgacagcttcaggaagcagatccagggcaaggccgcctacgtgctggacaccccagagatgagaagagtgcgggagacccagaggcacatcagcacagtgaagtaccacgaggactttgagaagcacaagggctgcttcacccctgtggtgacagaccccatcacagagcgggtgaagaagaacatgcaggacttcagtgacatcaactaccggggcatccagaggaaggtggtggagatggagcagaagagaaatgaccaggaccaggagaccatcaccggcctgcgggtgtggaggaccaaccctggctctgtgtttgattatgaccctgctgaggacaacatccagagccgcagcctgcacatgatcaacgtgcaggcccagaggaggagccgggagcagagccgcagcgccagcgccctgagcatctctggaggagaggagaagtctgagcacagcgaggccccagaccaccacctgagcacctacagtgatggcggcgtgtttgctgtgtccacagcctacaagcacgccaagaccacagagctgccccagcagaggagcagctctgtggccacccagcagaccaccgtgagcagcatccccagccaccccagcacagctgggaagatcttccgggccatgtatgactacatggccgcagatgctgatgaggtgtccttcaaggatggagatgccatcatcaacgtgcaggccattgatgagggctggatgtatggaacagtgcagaggactggaagaacaggcatgctgcctgccaactacgtggaggccatctag

SEQ ID NO: 161328 - DNA, 864 bp, synthetic construct
  misc_feature 1..864: note = Description of Artificial Sequence: Synthetic coding sequence
  source 1..864: mol_type = other DNA
atggctgatgatgaagattatgaggaggtggtggagtactacacagaggaggtggtgtatgaggaggtgcctggagagaccatcaccaagatctatgagaccaccaccaccaggaccagtgactatgagcagagcgagaccagcaagccagccctggcccagcctgccctggcccagcctgccagcgccaagcctgtggagaggaggaaggtgatcaggaagaaggtggaccccagcaagttcatgaccccctacatcgcccacagccagaagatgcaggacctcttcagccccaacaagtacaaggagaagtttgagaagaccaagggccagccctatgccagcaccacagacaccccagagctgcggcgcatcaagaaggtgcaggaccagctgtctgaggtgaagtacaggatggatggagatgtggccaagaccatctgccacgtggatgagaaggccaaggacattgaacatgccaagaaggtgtcccagcaggtgtccaaggtgctgtacaagcagaactgggaggacaccaaggacaagtacctgctgcccccagatgcccctgagctggtgcaggccgtgaagaacacagccatgttcagcaagaagctgtacacagaggactgggaggccgacaagagcctcttctacccctacaatgacagccctgagctgcggcgggtggcccaggcccagaaggccctgagtgatgtggcctacaagaagggcctggccgagcagcaggcccagttcacccccctggccgaccccccagacatcgagtttgccaagaaggtgaccaaccaggtgtccaagcagaaggagaagaagaggaagaagaagaggaagaaggtgtag

SEQ ID NO: 161329 - DNA, 1317 bp, synthetic construct
  misc_feature 1..1317: note = Description of Artificial Sequence: Synthetic coding sequence
  source 1..1317: mol_type = other DNA
atgatgagggtgaagcagacccaggaccacatcagctctgtgaagtacaaggaggccatcggccagggcacccccatcccagacctgcctgaggtgaagagggtgaaggagacccagaagcacatcagctctgtgatgtacaaggagaacctgggcaccggcatccccaccaccgtgaccccagaaattgagcgggtgaagaggaaccaggagaacttcagctctgtgctgtacaaggagaacatgggcaagggcacccccctggccgtgaccccagagatggagcgggtgaagcacaaccaggagaacatcagctctgtgctgtacaaggaaaatgtgggcaaggccacagccacccctgtgaccccagagatgcagagggtgaagaggaaccaggagaacatcagctctgtgctgtacaaggagaacatgaggaaggccacccccacccctgtgaccccagagatggagcgggccaagaggaaccaggagaacatcagctctgtgctgtacagcgacagcttcaggaagcagatccagggcaaggccgcctacgtgctggacaccccagagatgagaagagtgcgggagacccagaggcacatcagcacagtgaagtaccatgaagattttgagaagcacaagggctgcttcacccctgtggtgacagaccccatcacagagcgggtgaagaagaacatgcaggacttcagtgacatcaactaccggggcatccagaggaaggtggtggagatggagcagaagagaaatgaccaggaccaggagaccatcaccggcctgcgggtgtggaggaccaaccctggctctgtgtttgattatgaccctgctgaggacaacatccagagccgcagcctgcacatgatcaacgtgcaggcccagaggaggagccgggagcagagccgcagcgccagcgccctgagcatcagcggcggggaggagaagtctgagcacagcgaggccccagaccaccacctgagcacctacagtgatggaggagtgtttgctgtgtccacagcctacaagcacgccaagaccacagagctgccccagcagaggagcagctctgtggccacccagcagaccaccgtgagcagcatccccagccaccccagcacagctgggaagatcttccgggccatgtatgactacatggctgctgatgctgatgaggtgtccttcaaggatggagatgccatcatcaacgtgcaggccattgatgagggctggatgtatggcaccgtgcagaggacaggccgcacaggcatgctgcctgccaactacgtggaggccatctag

SEQ ID NO: 161330 - DNA, 1014 bp, synthetic construct
  misc_feature 1..1014: note = Description of Artificial Sequence: Synthetic coding sequence
  source 1..1014: mol_type = other DNA
cagaagtacaaggaggactatgagaacaagatcaagggcaagtggagcgagaccccctgctttgaggtggccaatgccaggatgaatgctgacaacatcagcaccaggaagtaccaggaggactttgagaacatgaaggaccagatctacttcatgcagacagagaccccagagtacaagatgaacaagaaggccggcgtggccgccagcaaggtgaagtacaaggaggactatgagaagaacaagggcaaggctgactacaacgtgctgcctgccagcgagaacccccagctgcggcagctgaaggctgctggagatgccctgagtgacaagctgtacaaggaaaattatgagaagaccaaggccaagagcatcaactactgtgagacccccaagttcaagctggacacagtgctgcagaacttcagcagtgacaagaagtacaaggacagctacctgaaggacatcctgggccactacgtgggcagctttgaggacccctaccacagccactgcatgaaggtgacagcccagaacagcgacaagaactacaaggccgagtatgaggaggaccggggcaagggcttcttcccccagaccatcacccaggagtatgaggccatcaagaagctggaccagtgcaaggaccacacctacaaggtgcacccagacaagaccaagttcacccaggtgacagacagccctgtgctgctgcaggcccaggtgaacagcaagcagctgagtgacctgaactacaaggccaagcatgagagcgagaagttcaagtgccacatccccccagacaccccagccttcatccagcacaaggtgaatgcctacaacctgagtgacaacctgtacaagcaggactgggagaagagcaaggccaagaagtttgacatcaaggtggatgccatccccctgctggccgccaaggccaacaccaagaacaccagtgatgtgatgtacaagaaggactatgagaagaacaaggtgaaggtgcagcagaggtag

SEQ ID NO: 161331 - DNA, 5193 bp, synthetic construct
  misc_feature 1..5193: note = Description of Artificial Sequence: Synthetic coding sequence
  source 1..5193: mol_type = other DNA
atgaatgtgcagccctgcagccgctgtggctatggagtgtacccagctgagaagatcagctgcatcgaccagatctggcacaaggcctgcttccactgtgaggtgtgcaagatgatgctgtctgtgaacaactttgtgagccaccagaagaagccctactgccacgcccacaaccccaagaacaacaccttcacctctgtgtaccacacccccctgaacctgaatgtgaggaccttccctgaggccatcagcggcatccatgaccaggaggatggagagcagtgcaagtctgtgttccactgggacatgaagagcaaggacaaggagggcgcccccaaccggcagcccctggccaatgaaagagcctactggacaggctatggagagggcaatgcctggtgccctggggccctgcctgaccctgagatcgtgaggatggtggaggccaggaagagcctgggggaggagtacacagaagattatgagcagccccggggcaagggcagcttccctgccatgatcaccccagcctaccagagggccaagaaggccaaccagctggccagccaggtggagtacaagaggggccatgatgagcgcatcagccgcttcagcacagtggtggacaccccagagctgctgcggagcaaggccggggcccagctgcagagtgatgtgcgctacacagaggactatgagcagcagaggggcaagggcagcttccctgccatgatcaccccagcctaccagatcgccaagagggccaatgagctggccagtgatgtgcgctaccaccagcagtaccagaaggagatgaggggcatggccggccctgccatcggggctgagggcatcctgaccagagaatgtgccgaccagtatggccagggctacccagaggagtatgaggagcaccggggcaagggcagcttccctgccatgatcaccccagcctaccagaatgccaagaaggcccacgagctggccagtgacatcaagtaccggcaggacttcaacaagatgaagggggccgcccactaccacagcctgcctgcccaggacaacctggtgctgaagcaggcccagagcgtgaacaagctggtgtctgaggtggagtacaagaaggacctggagagcagccggggccacagcatcaactactgtgagaccccccagttcagaaatgtgtccaagatcagcaagttcaccagtgacaacaagtacaaggagaactaccagaaccacatgaggggccgctatgagggcgtgggcatggacaggaggaccctgcacgccatgaaggtgggcagcctggccagcaatgtggcctacaaggctgactacaagcatgacatcgtggactacaactacccagccaccctgacccccagctaccagacagccatgaagctggtgcccctgaaggatgccaactaccggcagagcattgacaagctgaagtacagctctgtgacagacaccccccagatcgtgcaggccaagatcaatgcccagcagctgagccacgtgaactacagagctgactatgagaagaacaagctgaactacaccctgccccaggatgtgccccagctggtgaaggccaagaccaatgccaagctgttcagcgaggtgaagtacaaggagggctgggagaagaccaagggcaaaggatttgagatgaagctggatgccatgagcctgctggccgccaaggccagcggggagctggccagcaacatcaagtacaaggaggagtatgagaagaccaagggcaaggccatgggcacagctgacagccggctgctgcacagcctgcagatcgccaagatgagcagcgaggtggagtacaagaagggctttgaggagagcaagacccgcttccacctgcccatggacatggtgaacatcagacatgccaagaaggcccagaccctggccagtgacctggactacaggaagaagctgcacgagtacacagtgctgcctgaggacatgaagacccagtgggccaagaaggcctacggcctgcagagcgagctgcagtacaaggctgacctggcctggatgaagggcgtgggctggctgacagagggcagcctgaacctggagcaggccaagaaggccggccagctggtgtctgagaagaactaccggcagagggtggatgagctgaagttcacctctgtgacagacagcagccagatggagcacgccaagaagagccaggagctgcagagcggcgtggcctacaaggctggaaatgagcagagcgtgcaccagtacaccatcagcaaggatgagcccctcttcctgcaggcccgggccaatgctgccaacctgtctgagaagctgtacaagagctcctgggagaaccagaaggccaagggctttgagctgcggctggacagcctgaccttcctggccgccaaggccaagagggacctggccagcgaggtgaagtacaaggaggactatgaaagaagccggggcaagctgattggagccaaggatgtgcagggcgacagccagatgagccacagcctgcagatgagcaagctgcagagcgagctggagtacaagaagggctttgaggacaccaagagccagtgccacgtgtccctggacatggtgcacctggtgcacgccaggaaggcccagcacctggccacagatgtgggctacaagacagctgagcaccacttcaccgccctgcccacagacatgaaggtggagtgggccaagaaggcctacggcctgcagagcgacaaccagtacagagcagatgtgaagtggatgaagggcatgggctgggtggccaccggcagcctgaatgtggagcaggccaagaaggccggggagctgatcagcgagaagaagtaccggcagcacccagatgccctgaagttcaccagcatcaaggacaccccagagatggtgcaggcccgcatctcctacacccaggccgtggaccggctgtaccgggagcagggcgagaacatcaagcaccactacacccccacagctgacctgcctgaggtgctgctggccaagctgaatgccatgaacatcagcgagacccgctacaaggagagctggagcaagctgagagatggcggctacaagctgcggctggatgccctgcccttccaggccgccaaggccagcggggagatcatcagtgactacaagtacaaggaggcctttgagaagatgaagggccagatgctgggcagccgcagcctggaggatgacatcagcctggcccacagcgtgtatgccaccagcctgcagagtgatgtgaactacaagaagggctttgagcacagcaaggcccagttccacctgcccctggacatggccgccctggtgcacgccaagaaggcccagaccctggccagcaaccaggactacaagcaccccctgccccagtacaccagcctggccgaggacctgcggctgagctgtgccaagaaggcccacaagctgcagagcgagaacctgtacagaagtgacctgaacttcatgaggggcgtggcctgtgtgattcctggcaccctggagattgagggcaggaagaaggccagcgagctgatcagcgagagcaagtaccggcagcacccccacagcttcaagtacacagctgtgacagacacccccaacctgctgcacgccaagttcagcaaccagatcaccaatgaaaggctgtacaaggccgccggggaggatgcccggcatgagtacaccatgaccctgggcctgcctgagttcatccgggccaagaccaatgctgccaacctgagtgatgcccgctacaaggagagctggaggaacctgcgggcccagggctacaagctgaccatcgaggccctgcccttccaggccgcccgggccagcggggacatcgccagtgacttcctgtacagacatgactttgtgaaggagcggggcaagctgattggcccccagagcgtgagagatgacccccgcatccagcactgcaggaggatgggccagctgcagagcgagctgcagtacagaagaggagccaccagcagccaggcccagttccacctgcccatggacatggtgcacctggtgcacgccaagaatgcccaggccctggccagtgaccatgactaccgcacccagtaccacaagttcaccgccctgcctgaggacctgaagatggcctgggccaagaaggcccacgccctgcagagcgagctgcgctacaagagtgacctgattggcatgaagggcatcggctggctggccctgcggagcccccagatggagagcgccaagaaggccggggagctgatcagcgagaccaagtacaggaagaagccagacagcatcaagttcaccaccgtggtggacagcccagacctggtgcacgccaagaacagctacatgcactgcaatgaaagaatgtacagaagtggagatgctgagagcctgcaccgctacaccctcatcccagaccacccagacttcacccgggcccggctgaatgccctgcacctgagtgacaaggtgtacagaaacagctgggagcagacccgggccggcagctatgacttccggctggatgccatccccttccagacagcccgggccagccgggagatcgccagtgacttccgctacaaggaggccttcctgcgggaccggggcctgcagatcggctacagatctgtggatgatgaccccaggatgaagcacttcctgaatgtgggccgcctgcagagcgacaatgagtacaagaaggactttgccaagagccgcagccagttccacagcagcacagaccagcccggcctgctgcaggccaagaggagccagcagctggccagtgatgtgcactaccggcagcccctgccccagcccacctgtgaccctgagcagctgggcctgcggcatgcccagaaggcccaccagctgcagagtgatgtgaagtacaagagtgacctgaacctgacccggggcgtgggctggaccccacctggcagctacaaggtggagatggccaggagagctgctgagctggccaatgcccggggcctgggcctgcagggcgcctacagaggagctgaggccgtggaggccggggaccaccagagcggggaggtgaacccagatgccacagagatcctgcacgtgaagaagaagaaggccctgctgctgtag

SEQ ID NO: 161332 - DNA, 5088 bp, synthetic construct
  misc_feature 1..5088: note = Description of Artificial Sequence: Synthetic coding sequence
  source 1..5088: mol_type = other DNA
atgaatgtgcagccctgcagccgctgtggctatggagtgtacccagctgagaagatcagctgcatcgaccagatctggcacaaggcctgcttccactgtgaggtgtgcaagatgatgctgtctgtgaacaactttgtgagccaccagaagaagccctactgccacgcccacaaccccaagaacaacaccttcacctctgtgtaccacacccccctgaacctgaatgtgaggaccttccctgaggccatcagcggcatccatgaccaggaggatggagagcagtgcaagtctgtgttccactgggacatgaagagcaaggacaaggagggcgcccccaaccggcagcccctggccaatgaaagagcctactggacaggctatggagagggcaatgcctggtgccctggggccctgcctgaccctgagatcgtgaggatggtggaggccaggaagagcctgggggaggagtacacagaagattatgagcagccccggggcaagggcagcttccctgccatgatcaccccagcctaccagagggccaagaaggccaaccagctggccagccaggtggagtacaagaggggccatgatgagcgcatcagccgcttcagcacagtggtggacaccccagagctgctgcggagcaaggccggggcccagctgcagagtgatgtgcgctacacagaggactatgagcagcagaggggcaagggcagcttccctgccatgatcaccccagcctaccagatcgccaagagggccaatgagctggccagtgatgtgcgctaccaccagcagtaccagaaggagatgaggggcatggccggccctgccatcggggctgagggcatcctgaccagagaatgtgccgaccagtatggccagggctacccagaggagtatgaggagcaccggggcaagggcagcttccctgccatgatcaccccagcctaccagaatgccaagaaggcccacgagctggccagtgacatcaagtaccggcaggacttcaacaagatgaagggggccgcccactaccacagcctgcctgcccaggacaacctggtgctgaagcaggcccagagcgtgaacaagctggtgtctgagaacaagtacaaggagaactaccagaaccacatgaggggccgctatgaaggagtgggcatggacaggaggaccctgcacgccatgaaggtgggcagcctggccagcaatgtggcctacaaggctgactacaagcatgacatcgtggactacaactacccagccaccctgacccccagctaccagacagccatgaagctggtgcccctgaaggatgccaactaccggcagagcattgacaagctgaagtacagctctgtgacagacaccccccagatcgtgcaggccaagatcaatgcccagcagctgagccacgtgaactacagagctgactatgagaagaacaagctgaactacaccctgccccaggatgtgccccagctggtgaaggccaagaccaatgccaagctgttcagcgaggtgaagtacaaggagggctgggagaagaccaagggcaagggctttgagatgaagctggatgccatgagcctgctggccgccaaggccagcggggagctggccagcaacatcaagtacaaggaggagtatgagaagaccaagggcaaggccatgggcacagctgacagccggctgctgcacagcctgcagatcgccaagatgagcagcgaggtggagtacaagaagggctttgaggagagcaagacccgcttccacctgcccatggacatggtgaacatcagacatgccaagaaggcccagaccctggccagtgacctggactacaggaagaagctgcacgagtacacagtgctgcctgaggacatgaagacccagtgggccaagaaggcctacggcctgcagagcgagctgcagtacaaggctgacctggcctggatgaagggcgtgggctggctgacagagggcagcctgaacctggagcaggccaagaaggccggccagctggtgtctgagaagaactaccggcagagggtggatgagctgaagttcacctctgtgacagacagcagccagatggagcacgccaagaagagccaggagctgcagagcggcgtggcctacaaggctggaaatgagcagagcgtgcaccagtacaccatcagcaaggatgagcccctcttcctgcaggcccgggccaatgctgccaacctgtctgagaagctgtacaagagctcctgggagaaccagaaggccaagggctttgagctgcggctggacagcctgaccttcctggccgccaaggccaagagggacctggccagcgaggtgaagtacaaggaggactatgaaagaagccggggcaagctgattggagccaaggatgtgcagggcgacagccagatgagccacagcctgcagatgagcaagctgcagagcgagctggagtacaagaagggctttgaggacaccaagagccagtgccacgtgtccctggacatggtgcacctggtgcacgccaggaaggcccagcacctggccacagatgtgggctacaagacagctgagcaccacttcaccgccctgcccacagacatgaaggtggagtgggccaagaaggcctacggcctgcagagcgacaaccagtacagagcagatgtgaagtggatgaagggcatgggctgggtggccaccggcagcctgaatgtggagcaggccaagaaggccggggagctgatcagcgagaagaagtaccggcagcacccagatgccctgaagttcaccagcatcaaggacaccccagagatggtgcaggcccgcatctcctacacccaggccgtggaccggctgtaccgggagcagggcgagaacatcaagcaccactacacccccacagctgacctgcctgaggtgctgctggccaagctgaatgccatgaacatcagcgagacccgctacaaggagagctggagcaagctgagagatggcggctacaagctgcggctggatgccctgcccttccaggccgccaaggccagcggggagatcatcagtgactacaagtacaaggaggcctttgagaagatgaagggccagatgctgggcagccgcagcctggaggatgacatcagcctggcccacagcgtgtatgccaccagcctgcagagtgatgtgaactacaagaagggctttgagcacagcaaggcccagttccacctgcccctggacatggccgccctggtgcacgccaagaaggcccagaccctggccagcaaccaggactacaagcaccccctgccccagtacaccagcctggccgaggacctgcggctgagctgtgccaagaaggcccacaagctgcagagtgaaaatctctacagaagtgacctgaacttcatgagaggagtggcctgcgtcatccctggcaccctggagattgagggcaggaagaaggccagcgagctgatcagcgagagcaagtaccggcagcacccccacagcttcaagtacacagctgtgacagacacccccaacctgctgcacgccaagttcagcaaccagatcaccaatgaaagactctacaaggctgctggagaagatgcccggcatgagtacaccatgaccctgggcctgcctgagttcatccgggccaagaccaatgctgccaacctgagtgatgcccgctacaaggagagctggaggaacctgcgggcccagggctacaagctgaccatcgaggccctgcccttccaggccgcccgggccagcggggacatcgccagtgacttcctgtacagacatgactttgtgaaggagcggggcaagctgattggcccccagagcgtgagagatgacccccgcatccagcactgcaggaggatgggccagctgcagagcgagctgcagtaccgccgcggggccaccagcagccaggcccagttccacctgcccatggacatggtgcacctggtgcacgccaagaatgcccaggccctggccagtgaccatgactaccgcacccagtaccacaagttcaccgccctgcctgaggacctgaagatggcctgggccaagaaggcccacgccctgcagagcgagctgcgctacaagagtgacctgattggcatgaagggcatcggctggctggccctgcggagcccccagatggagagcgccaagaaggccggggagctgatcagcgagaccaagtacaggaagaagccagacagcatcaagttcaccaccgtggtggacagcccagacctggtgcacgccaagaacagctacatgcactgcaatgaaagaatgtacagaagtggagatgctgagagcctgcaccgctacaccctcatcccagaccacccagacttcacccgggcccggctgaatgccctgcacctgagtgacaaggtgtacagaaattcctgggagcagaccagggctggcagctatgacttccggctggatgccatccccttccagacagcccgggccagccgggagatcgccagtgacttccgctacaaggaggccttcctgcgggaccggggcctgcagatcggctacagatctgtggatgatgaccccaggatgaagcacttcctgaatgtgggccgcctgcagagcgacaatgagtacaagaaggactttgccaagagccgcagccagttccacagcagcacagaccagcccggcctgctgcaggccaagaggagccagcagctggccagtgatgtgcactaccggcagcccctgccccagcccacctgtgaccctgagcagctgggcctgcggcatgcccagaaggcccaccagctgcagagtgatgtgaagtacaagagtgacctgaacctgacccggggcgtgggctggaccccacctggcagctacaaggtggagatggcccggcgggctgctgagctggccaatgcccggggcctgggcctgcagggcgcctacagaggagctgaggccgtggaggccggggaccaccagagcggggaggtgaacccagatgccacagagatcctgcacgtgaagaagaagaaggccctgctgctgtag

SEQ ID NO: 161333 - DNA, 2559 bp, synthetic construct
  misc_feature 1..2559: note = Description of Artificial Sequence: Synthetic coding sequence
  source 1..2559: mol_type = other DNA
atgaggggcatggccggccctgccatcggggctgagggcatcctgacccgggagtgtgccgaccagtatggccagggctacccagaggagtatgaggagcaccggggcaagggcagcttccctgccatgatcaccccagcctaccagaatgccaagaaggcccacgagctggccagtgacatcaagtaccggcaggacttcaacaagatgaagggagctgcccactaccacagcctgcctgcccaggacaacctggtgctgaagcaggcccagagcgtgaacaagctggtgtctgaggtggagtacaagaaggacctggagagcagccggggccacagcatcaactactgtgagaccccccagttcagaaatgtgtccaagatcagcaagttcaccagtgacaacaagtacaaggagaactaccagaaccacatgaggggccgctatgaaggagtgggcatggacaggaggaccctgcacgccatgaaggtgggcagcctggccagcaatgtggcctacaaggctgactacaagcatgacatcgtggactacaactacccagccaccctgacccccagctaccagacagccatgaagctggtgcccctgaaggatgccaactaccggcagagcattgacaagctgaagtacagctctgtgacagacaccccccagatcgtgcaggccaagatcaatgcccagcagctgagccacgtgaactacagagctgactatgagaagaacaagctgaactacaccctgccccaggatgtgccccagctggtgaaggccaagaccaatgccaagctgttcagcgaggtgaagtacaaggagggctgggagaagaccaagggcaagggctttgagatgaagctggatgccatgagcctgctggccgccaaggccagcggggagctggccagcaatgtgcacctgctgctgagcctgaagatcaagtacaaggaggagtatgagaagaccaagggcaaggccatgggcacagctgacagccggctgctgcacagcctgcagatcgccaagatgagcagcgaggtggagtacaagaagggctttgaggagagcaagacccgcttccacctgcccatggacatgggcgtgggctggctgacagagggcagcctgaacctggagcaggccaagaaggccggccagctggtgtctgagaagaactaccggcagagggtggatgagctgaagttcacctctgtgacagacagcagccagatggagcacgccaagaagagccaggagctgcagagcggcgtggcctacaaggctggaaatgagcagagcgtgcaccagtacaccatcagcaaggatgagcccctcttcctgcaggcccgggccaatgctgccaacctgtctgagttcctgtacagacatgactttgtgaaggagcggggcaagctgattggcccccagagcgtgagagatgacccccgcatccagcactgcaggaggatgggccagctgcagagcgagctgcagtacagaagaggagccaccagcagccaggcccagttccacctgcccatggacatggtgcacctggtgcacgccaagaatgcccaggccctggccagtgaccatgactaccgcacccagtaccacaagttcaccgccctgcctgaggacctgaagatggcctgggccaagaaggcccacgccctgcagagcgagctgcgctacaagagtgacctgattggcatgaagggcatcggctggctggccctgcggagcccccagatggagagcgccaagaaggccggggagctgatcagcgagaccaagtacaggaagaagccagacagcatcaagttcaccaccgtggtggacagcccagacctggtgcacgccaagaacagctacatgcactgcaatgaaagaatgtacagaagtggagatgctgagagcctgcaccgctacaccctcatcccagaccacccagacttcacccgggcccggctgaatgccctgcacctgagtgacttccgctacaaggaggccttcctgcgggaccggggcctgcagatcggctacagatctgtggatgatgaccccaggatgaagcacttcctgaatgtgggccgcctgcagagcgacaatgagtacaagaaggactttgccaagagccgcagccagttccacagcagcacagaccagcccggcctgctgcaggccaagaggagccagcagctggccagtgatgtgcactaccggcagcccctgccccagcccacctgtgaccctgagcagctgggcctgcggcatgcccagaaggcccaccagctgcagagtgatgtgaagtacaagagtgacctgaacctgacccggggcgtgggctggaccccacctggcagctacaaggtggagatggccaggagagctgctgagctggccaatgcccggggcctgggcctgcagggcgcctacagaggagctgaggccgtggaggccggggaccaccagagcggggaggtgaacccagatgccacagagatcctgcacgtgaagaagaagaaggccctgctgctgtag

SEQ ID NO: 161334 - DNA, 5217 bp, synthetic construct
  misc_feature 1..5217: note = Description of Artificial Sequence: Synthetic coding sequence
  source 1..5217: mol_type = other DNA
atgaatgtgcagccctgcagccgctgtggctatggagtgtacccagctgagaagatcagctgcatcgaccagatctggcacaaggcctgcttccactgtgaggtgtgcaagatgatgctgtctgtgaacaactttgtgagccaccagaagaagccctactgccacgcccacaaccccaagaacaacaccttcacctctgtgtaccacacccccctgaacctgaatgtgaggaccttccctgaggccatcagcggcatccatgaccaggaggatggagagcagtgcaagtctgtgttccactgggacatgaagagcaaggacaaggagggcgcccccaaccggcagcccctggccaatgaaagagcctactggacaggctatggagagggcaatgcctggtgccctggggccctgcctgaccctgagatcgtgaggatggtggaggccaggaagagcctgggggaggagtacacagaagattatgagcagccccggggcaagggcagcttccctgccatgatcaccccagcctaccagagggccaagaaggccaaccagctggccagccaggtggagtacaagaggggccatgatgagcgcatcagccgcttcagcacagtggtggacaccccagagctgctgcggagcaaggccggggcccagctgcagagtgatgtgcgctacacagaggactatgagcagcagaggggcaagggcagcttccctgccatgatcaccccagcctaccagatcgccaagagggccaatgagctggccagtgatgtgcgctaccaccagcagtaccagaaggagatgaggggcatggccggccctgccatcggggctgagggcatcctgaccagagaatgtgccgaccagtatggccagggctacccagaggagtatgaggagcaccggggcaagggcagcttccctgccatgatcaccccagcctaccagaatgccaagaaggcccacgagctggccagtgacatcaagtaccggcaggacttcaacaagatgaagggggccgcccactaccacagcctgcctgcccaggacaacctggtgctgaagcaggcccagagcgtgaacaagctggtgtctgaggtggagtacaagaaggacctggagagcagccggggccacagcatcaactactgtgagaccccccagttcagaaatgtgtccaagatcagcaagttcaccagtgacaacaagtacaaggagaactaccagaaccacatgaggggccgctatgagggcgtgggcatggacaggaggaccctgcacgccatgaaggtgggcagcctggccagcaatgtggcctacaaggctgactacaagcatgacatcgtggactacaactacccagccaccctgacccccagctaccagacagccatgaagctggtgcccctgaaggatgccaactaccggcagagcattgacaagctgaagtacagctctgtgacagacaccccccagatcgtgcaggccaagatcaatgcccagcagctgagccacgtgaactacagagctgactatgagaagaacaagctgaactacaccctgccccaggatgtgccccagctggtgaaggccaagaccaatgccaagctgttcagcgaggtgaagtacaaggagggctgggagaagaccaagggcaaaggatttgagatgaagctggatgccatgagcctgctggccgccaaggccagcggggagctggccagcaatgtgcacctgctgctgagcctgaagatcaagtacaaggaggagtatgagaagaccaagggcaaggccatgggcacagctgacagccggctgctgcacagcctgcagatcgccaagatgagcagcgaggtggagtacaagaagggctttgaggagagcaagacccgcttccacctgcccatggacatggtgaacatcagacatgccaagaaggcccagaccctggccagtgacctggactacaggaagaagctgcacgagtacacagtgctgcctgaggacatgaagacccagtgggccaagaaggcctacggcctgcagagcgagctgcagtacaaggctgacctggcctggatgaagggcgtgggctggctgacagagggcagcctgaacctggagcaggccaagaaggccggccagctggtgtctgagaagaactaccggcagagggtggatgagctgaagttcacctctgtgacagacagcagccagatggagcacgccaagaagagccaggagctgcagagcggcgtggcctacaaggctggaaatgagcagagcgtgcaccagtacaccatcagcaaggatgagcccctcttcctgcaggcccgggccaatgctgccaacctgtctgagaagctgtacaagagctcctgggagaaccagaaggccaagggctttgagctgcggctggacagcctgaccttcctggccgccaaggccaagagggacctggccagcgaggtgaagtacaaggaggactatgaaagaagccggggcaagctgattggagccaaggatgtgcagggcgacagccagatgagccacagcctgcagatgagcaagctgcagagcgagctggagtacaagaagggctttgaggacaccaagagccagtgccacgtgtccctggacatggtgcacctggtgcacgccaggaaggcccagcacctggccacagatgtgggctacaagacagctgagcaccacttcaccgccctgcccacagacatgaaggtggagtgggccaagaaggcctacggcctgcagagcgacaaccagtacagagcagatgtgaagtggatgaagggcatgggctgggtggccaccggcagcctgaatgtggagcaggccaagaaggccggggagctgatcagcgagaagaagtaccggcagcacccagatgccctgaagttcaccagcatcaaggacaccccagagatggtgcaggcccgcatctcctacacccaggccgtggaccggctgtaccgggagcagggcgagaacatcaagcaccactacacccccacagctgacctgcctgaggtgctgctggccaagctgaatgccatgaacatcagcgagacccgctacaaggagagctggagcaagctgagagatggcggctacaagctgcggctggatgccctgcccttccaggccgccaaggccagcggggagatcatcagtgactacaagtacaaggaggcctttgagaagatgaagggccagatgctgggcagccgcagcctggaggatgacatcagcctggcccacagcgtgtatgccaccagcctgcagagtgatgtgaactacaagaagggctttgagcacagcaaggcccagttccacctgcccctggacatggccgccctggtgcacgccaagaaggcccagaccctggccagcaaccaggactacaagcaccccctgccccagtacaccagcctggccgaggacctgcggctgagctgtgccaagaaggcccacaagctgcagagcgagaacctgtacagaagtgacctgaacttcatgaggggcgtggcctgtgtgattcctggcaccctggagattgagggcaggaagaaggccagcgagctgatcagcgagagcaagtaccggcagcacccccacagcttcaagtacacagctgtgacagacacccccaacctgctgcacgccaagttcagcaaccagatcaccaatgaaaggctgtacaaggccgccggggaggatgcccggcatgagtacaccatgaccctgggcctgcctgagttcatccgggccaagaccaatgctgccaacctgagtgatgcccgctacaaggagagctggaggaacctgcgggcccagggctacaagctgaccatcgaggccctgcccttccaggccgcccgggccagcggggacatcgccagtgacttcctgtacagacatgactttgtgaaggagcggggcaagctgattggcccccagagcgtgagagatgacccccgcatccagcactgcaggaggatgggccagctgcagagcgagctgcagtacagaagaggagccaccagcagccaggcccagttccacctgcccatggacatggtgcacctggtgcacgccaagaatgcccaggccctggccagtgaccatgactaccgcacccagtaccacaagttcaccgccctgcctgaggacctgaagatggcctgggccaagaaggcccacgccctgcagagcgagctgcgctacaagagtgacctgattggcatgaagggcatcggctggctggccctgcggagcccccagatggagagcgccaagaaggccggggagctgatcagcgagaccaagtacaggaagaagccagacagcatcaagttcaccaccgtggtggacagcccagacctggtgcacgccaagaacagctacatgcactgcaatgaaagaatgtacagaagtggagatgctgagagcctgcaccgctacaccctcatcccagaccacccagacttcacccgggcccggctgaatgccctgcacctgagtgacaaggtgtacagaaacagctgggagcagacccgggccggcagctatgacttccggctggatgccatccccttccagacagcccgggccagccgggagatcgccagtgacttccgctacaaggaggccttcctgcgggaccggggcctgcagatcggctacagatctgtggatgatgaccccaggatgaagcacttcctgaatgtgggccgcctgcagagcgacaatgagtacaagaaggactttgccaagagccgcagccagttccacagcagcacagaccagcccggcctgctgcaggccaagaggagccagcagctggccagtgatgtgcactaccggcagcccctgccccagcccacctgtgaccctgagcagctgggcctgcggcatgcccagaaggcccaccagctgcagagtgatgtgaagtacaagagtgacctgaacctgacccggggcgtgggctggaccccacctggcagctacaaggtggagatggccaggagagctgctgagctggccaatgcccggggcctgggcctgcagggcgcctacagaggagctgaggccgtggaggccggggaccaccagagcggggaggtgaacccagatgccacagagatcctgcacgtgaagaagaagaaggccctgctgctgtag

SEQ ID NO: 161335 - DNA, 5112 bp, synthetic construct
  misc_feature 1..5112: note = Description of Artificial Sequence: Synthetic coding sequence
  source 1..5112: mol_type = other DNA
atgaatgtgcagccctgcagccgctgtggctatggagtgtacccagctgagaagatcagctgcatcgaccagatctggcacaaggcctgcttccactgtgaggtgtgcaagatgatgctgtctgtgaacaactttgtgagccaccagaagaagccctactgccacgcccacaaccccaagaacaacaccttcacctctgtgtaccacacccccctgaacctgaatgtgaggaccttccctgaggccatcagcggcatccatgaccaggaggatggagagcagtgcaagtctgtgttccactgggacatgaagagcaaggacaaggagggcgcccccaaccggcagcccctggccaatgaaagagcctactggacaggctatggagagggcaatgcctggtgccctggggccctgcctgaccctgagatcgtgaggatggtggaggccaggaagagcctgggggaggagtacacagaagattatgagcagccccggggcaagggcagcttccctgccatgatcaccccagcctaccagagggccaagaaggccaaccagctggccagccaggtggagtacaagaggggccatgatgagcgcatcagccgcttcagcacagtggtggacaccccagagctgctgcggagcaaggccggggcccagctgcagagtgatgtgcgctacacagaggactatgagcagcagaggggcaagggcagcttccctgccatgatcaccccagcctaccagatcgccaagagggccaatgagctggccagtgatgtgcgctaccaccagcagtaccagaaggagatgaggggcatggccggccctgccatcggggctgagggcatcctgaccagagaatgtgccgaccagtatggccagggctacccagaggagtatgaggagcaccggggcaagggcagcttccctgccatgatcaccccagcctaccagaatgccaagaaggcccacgagctggccagtgacatcaagtaccggcaggacttcaacaagatgaagggggccgcccactaccacagcctgcctgcccaggacaacctggtgctgaagcaggcccagagcgtgaacaagctggtgtctgagaacaagtacaaggagaactaccagaaccacatgaggggccgctatgaaggagtgggcatggacaggaggaccctgcacgccatgaaggtgggcagcctggccagcaatgtggcctacaaggctgactacaagcatgacatcgtggactacaactacccagccaccctgacccccagctaccagacagccatgaagctggtgcccctgaaggatgccaactaccggcagagcattgacaagctgaagtacagctctgtgacagacaccccccagatcgtgcaggccaagatcaatgcccagcagctgagccacgtgaactacagagctgactatgagaagaacaagctgaactacaccctgccccaggatgtgccccagctggtgaaggccaagaccaatgccaagctgttcagcgaggtgaagtacaaggagggctgggagaagaccaagggcaagggctttgagatgaagctggatgccatgagcctgctggccgccaaggccagcggggagctggccagcaatgtgcacctgctgctgagcctgaagatcaagtacaaggaggagtatgagaagaccaagggcaaggccatgggcacagctgacagccggctgctgcacagcctgcagatcgccaagatgagcagcgaggtggagtacaagaagggctttgaggagagcaagacccgcttccacctgcccatggacatggtgaacatcagacatgccaagaaggcccagaccctggccagtgacctggactacaggaagaagctgcacgagtacacagtgctgcctgaggacatgaagacccagtgggccaagaaggcctacggcctgcagagcgagctgcagtacaaggctgacctggcctggatgaagggcgtgggctggctgacagagggcagcctgaacctggagcaggccaagaaggccggccagctggtgtctgagaagaactaccggcagagggtggatgagctgaagttcacctctgtgacagacagcagccagatggagcacgccaagaagagccaggagctgcagagcggcgtggcctacaaggctggaaatgagcagagcgtgcaccagtacaccatcagcaaggatgagcccctcttcctgcaggcccgggccaatgctgccaacctgtctgagaagctgtacaagagctcctgggagaaccagaaggccaagggctttgagctgcggctggacagcctgaccttcctggccgccaaggccaagagggacctggccagcgaggtgaagtacaaggaggactatgaaagaagccggggcaagctgattggagccaaggatgtgcagggcgacagccagatgagccacagcctgcagatgagcaagctgcagagcgagctggagtacaagaagggctttgaggacaccaagagccagtgccacgtgtccctggacatggtgcacctggtgcacgccaggaaggcccagcacctggccacagatgtgggctacaagacagctgagcaccacttcaccgccctgcccacagacatgaaggtggagtgggccaagaaggcctacggcctgcagagcgacaaccagtacagagcagatgtgaagtggatgaagggcatgggctgggtggccaccggcagcctgaatgtggagcaggccaagaaggccggggagctgatcagcgagaagaagtaccggcagcacccagatgccctgaagttcaccagcatcaaggacaccccagagatggtgcaggcccgcatctcctacacccaggccgtggaccggctgtaccgggagcagggcgagaacatcaagcaccactacacccccacagctgacctgcctgaggtgctgctggccaagctgaatgccatgaacatcagcgagacccgctacaaggagagctggagcaagctgagagatggcggctacaagctgcggctggatgccctgcccttccaggccgccaaggccagcggggagatcatcagtgactacaagtacaaggaggcctttgagaagatgaagggccagatgctgggcagccgcagcctggaggatgacatcagcctggcccacagcgtgtatgccaccagcctgcagagtgatgtgaactacaagaagggctttgagcacagcaaggcccagttccacctgcccctggacatggccgccctggtgcacgccaagaaggcccagaccctggccagcaaccaggactacaagcaccccctgccccagtacaccagcctggccgaggacctgcggctgagctgtgccaagaaggcccacaagctgcagagtgaaaatctctacagaagtgacctgaacttcatgagaggagtggcctgcgtcatccctggcaccctggagattgagggcaggaagaaggccagcgagctgatcagcgagagcaagtaccggcagcacccccacagcttcaagtacacagctgtgacagacacccccaacctgctgcacgccaagttcagcaaccagatcaccaatgaaagactctacaaggctgctggagaagatgcccggcatgagtacaccatgaccctgggcctgcctgagttcatccgggccaagaccaatgctgccaacctgagtgatgcccgctacaaggagagctggaggaacctgcgggcccagggctacaagctgaccatcgaggccctgcccttccaggccgcccgggccagcggggacatcgccagtgacttcctgtacagacatgactttgtgaaggagcggggcaagctgattggcccccagagcgtgagagatgacccccgcatccagcactgcaggaggatgggccagctgcagagcgagctgcagtaccgccgcggggccaccagcagccaggcccagttccacctgcccatggacatggtgcacctggtgcacgccaagaatgcccaggccctggccagtgaccatgactaccgcacccagtaccacaagttcaccgccctgcctgaggacctgaagatggcctgggccaagaaggcccacgccctgcagagcgagctgcgctacaagagtgacctgattggcatgaagggcatcggctggctggccctgcggagcccccagatggagagcgccaagaaggccggggagctgatcagcgagaccaagtacaggaagaagccagacagcatcaagttcaccaccgtggtggacagcccagacctggtgcacgccaagaacagctacatgcactgcaatgaaagaatgtacagaagtggagatgctgagagcctgcaccgctacaccctcatcccagaccacccagacttcacccgggcccggctgaatgccctgcacctgagtgacaaggtgtacagaaattcctgggagcagaccagggctggcagctatgacttccggctggatgccatccccttccagacagcccgggccagccgggagatcgccagtgacttccgctacaaggaggccttcctgcgggaccggggcctgcagatcggctacagatctgtggatgatgaccccaggatgaagcacttcctgaatgtgggccgcctgcagagcgacaatgagtacaagaaggactttgccaagagccgcagccagttccacagcagcacagaccagcccggcctgctgcaggccaagaggagccagcagctggccagtgatgtgcactaccggcagcccctgccccagcccacctgtgaccctgagcagctgggcctgcggcatgcccagaaggcccaccagctgcagagtgatgtgaagtacaagagtgacctgaacctgacccggggcgtgggctggaccccacctggcagctacaaggtggagatggcccggcgggctgctgagctggccaatgcccggggcctgggcctgcagggcgcctacagaggagctgaggccgtggaggccggggaccaccagagcggggaggtgaacccagatgccacagagatcctgcacgtgaagaagaagaaggccctgctgctgtag

SEQ ID NO: 161336 - DNA, 828 bp, synthetic construct
  misc_feature 1..828: note = Description of Artificial Sequence: Synthetic coding sequence
  source 1..828: mol_type = other DNA
atggccacagagctggagtatgaatctgtgctgtgtgtgaagccagatgtgtctgtgtaccgcatccccccccgggccagcaacagaggctaccgggccagtgactggaagctggaccagcctgactggacaggccgcctgcgcatcaccagcaagggcaagacagcctacatcaagctggaggacaaggtgtctggagagctgtttgcccaggcccctgtggagcagtacccaggcattgctgtggagaccgtgacagacagcagccgctacttcgtcatccgcatccaggacggcaccggccgcagcgccttcatcggcatcggcttcacagacagaggagatgcctttgacttcaacgtgtccctgcaggaccacttcaagtgggtgaagcaggagagcgagatcagcaaggagagccaggagatggatgcccggcccaagctggacctgggcttcaaggagggccagaccatcaagctgtgcatcggcaacatcaccaacaagaagggcggggccagcaagcccaggacagcccggggcggcggcctgagcctgctgcccccacctcctgggggcaaggtgaccatccccccacccagcagctctgtggccatcagcaaccacgtgaccccaccacccatccccaagagcaaccacggcggcagtgatgctgacatcctgctggacctggacagccctgcccctgtgaccaccccagcccccacccctgtgtctgtgtccaatgacctgtggggagacttcagcacagccagcagctctgtgcccaaccaggccccccagcccagcaactgggtgcagttctag

SEQ ID NO: 161337 - DNA, 402 bp, synthetic construct
  misc_feature 1..402: note = Description of Artificial Sequence: Synthetic coding sequence
  source 1..402: mol_type = other DNA
atggatgcccggcccaagctggacctgggcttcaaggagggccagaccatcaagctgtgcatcggcaacatcaccaacaagaagggcggggccagcaagcccaggacagcccggggcggcggcctgagcctgctgcccccacctcctgggggcaaggtgaccatccccccacccagcagctctgtggccatcagcaaccacgtgaccccaccacccatccccaagagcaaccacggcggcagtgatgctgacatcctgctggacctggacagccctgcccctgtgaccaccccagcccccacccctgtgtctgtgtccaatgacctgtggggagacttcagcacagccagcagctctgtgcccaaccaggccccccagcccagcaactgggtgcagttctag

SEQ ID NO: 161338 - DNA, 828 bp, synthetic construct; identical to SEQ ID NO: 161336
  misc_feature 1..828: note = Description of Artificial Sequence: Synthetic coding sequence
  source 1..828: mol_type = other DNA

SEQ ID NO: 161339 - DNA, 558 bp, synthetic construct
  misc_feature 1..558: note = Description of Artificial Sequence: Synthetic coding sequence
  source 1..558: mol_type = other DNA
atggaggagagcggctatgagagcgtgctgtgtgtgaagccagatgtgcacgtgtaccgcatccccccccgggccaccaacagaggctacagagctgctgagtggcagctggaccagcccagctggagcggccgcctgcgcatcacagccaagggccagatggcctacatcaagctggaggacaggaccagcggggagctgtttgcccaggcccctgtggaccagtttcctggaacagctgtggagagcgtgacagacagcagccgctactttgtgatcagaattgaagatggaaatggaagaagagccttcatcggcattggatttggagacagaggagatgcctttgacttcaacgtggccctgcaggaccacttcaagtgggtgaagcagcagtgtgaatttgccaagcaggcccagaacccagaccagggccccaagctggacctgggcttcaaggagggccagaccatcaagctgaacattgctgtgggcctgggcaacatcaacagacgctgcagctgcaccctggccacagcccagagctgccactgctag

SEQ ID NO: 161340 - DNA, 792 bp, synthetic construct
  misc_feature 1..792: note = Description of Artificial Sequence: Synthetic coding sequence
  source 1..792: mol_type = other DNA
atggaggagagcggctatgagagcgtgctgtgtgtgaagccagatgtgcacgtgtaccgcatccccccccgggccaccaacagaggctacagagctgctgagtggcagctggaccagcccagctggagcggccgcctgcgcatcacagccaagggccagatggcctacatcaagctggaggacaggaccagcggggagctgtttgcccaggcccctgtggaccagtttcctggaacagctgtggagagcgtgacagacagcagccgctactttgtgatcagaattgaagatggaaatggaagaagagccttcatcggcattggatttggagacagaggagatgcctttgacttcaacgtggccctgcaggaccacttcaagtgggtgaagcagcagtgtgaatttgccaagcaggcccagaacccagaccagggccccaagctggacctgggcttcaaggagggccagaccatcaagctgaacatcgccaacatgaagaagaaggagggcgccgccggcaacccccgggtgcggcctgccagcactggaggcctgagcctgctgcccccacctcctgggggcaagaccagcaccctcatccccccacctggagagcagctggccgtgggcggcagcctggtgcagcctgctgtggcccccagcagcggcggggcccctgtgccctggccccagcccaacccagccacagctgacatctggggagacttcaccaagagcacaggcagcaccagcagccagacccagcccggcaccggctgggtgcagttctag

SEQ ID NO: 161341 - DNA, 792 bp, synthetic construct; identical to SEQ ID NO: 161340
  misc_feature 1..792: note = Description of Artificial Sequence: Synthetic coding sequence
  source 1..792: mol_type = other DNA

SEQ ID NO: 161342 - DNA, 822 bp, synthetic construct
  misc_feature 1..822: note = Description of Artificial Sequence: Synthetic coding sequence
  source 1..822: mol_type = other DNA
atggaggagagcggctatgagagcgtgctgtgtgtgaagccagatgtgcacgtgtaccgcatccccccccgggccaccaacagaggctacagagctgctgagtggcagctggaccagcccagctggagcggccgcctgcgcatcacagccaagggccagatggcctacatcaagctggaggacaggaccagcggggagctgtttgcccaggcccctgtggaccagtttcctggaacagctgtggagagcgtgacagacagcagccgctactttgtgatcagaattgaagatggaaatggaagaagagccttcatcggcattggatttggagacagaggagatgcctttgacttcaacgtggccctgcaggaccacttcaagtgggtgaagcagcagtgtgaatttgccaagcaggcccagaacccagaccagggccccaagctggacctgggcttcaaggagggccagaccatcaagctgaacatcgccaacatgaagaagaaggagggcgccgccggcaacccccgggtgcggcctgccagcactggaggcctgagcctgctgcccccacctcctgggggcaagaccagcaccctcatccccccacctggagagcagctggccgtgggcggcagcctggtgcagcctgctgtggcccccagcagtgaccagctgcctgcccggcccagccaggcccaggccggcagcagcagtgacctgagcaccgtcttcccccacgtgaccagcggcaaggccctgccccacctgggccagaggaaagaagatgaggccctgctgtcctggcctgtgtttggagcctag

SEQ ID NO: 161343 - DNA, 714 bp, synthetic construct
  misc_feature 1..714: note = Description of Artificial Sequence: Synthetic coding sequence
  source 1..714: mol_type = other DNA
atggaggagagcggggctgctgagtggcagctggaccagcccagctggagcggccgcctgcgcatcacagccaagggccagatggcctacatcaagctggaggacaggaccagcggggagctgtttgcccaggcccctgtggaccagtttcctggaacagctgtggagagcgtgacagacagcagccgctactttgtgatcagaattgaagatggaaatggaagaagagccttcatcggcattggatttggagacagaggagatgcctttgacttcaacgtggccctgcaggaccacttcaagtgggtgaagcagcagtgtgaatttgccaagcaggcccagaacccagaccagggccccaagctggacctgggcttcaaggagggccagaccatcaagctgaacatcgccaacatgaagaagaaggagggcgccgccggcaacccccgggtgcggcctgccagcactggaggcctgagcctgctgcccccacctcctgggggcaagaccagcaccctcatccccccacctggagagcagctggccgtgggcggcagcctggtgcagcctgctgtggcccccagcagcggcggggcccctgtgccctggccccagcccaacccagccacagctgacatctggggagacttcaccaagagcacaggcagcaccagcagccagacccagcccggcaccggctgggtgcagttctag

SEQ ID NO: 161344 - DNA, 792 bp, synthetic construct; identical to SEQ ID NO: 161340
  misc_feature 1..792: note = Description of Artificial Sequence: Synthetic coding sequence
  source 1..792: mol_type = other DNA

SEQ ID NO: 161345 - DNA, 966 bp, synthetic construct
  misc_feature 1..966: note = Description of Artificial Sequence: Synthetic coding sequence
  source 1..966: mol_type = other DNA
atgtctgagcagagcaaggacctgagtgaccccaactttgctgctgaggcccccaacagcgaggtgcacagcagccctggggtgtctgaaggagtgcccccatctgccaccctggccgagccccagagcccccccctgggccccacagctgccccccaggccgcccccccaccccaggccccaaatgatgaaggagaccccaaggccctgcagcaggccgctgaggagggccgggcccaccaggcccccagcgctgcccagcccggccctgcccccccagccccagcccagctggtgcagaaggcccacgagctgatgtggtacgtgctggtgaaggaccagaagaagatgatcatctggttcccagacatggtgaaggatgtgattggcagctacaagaagtggtgccgcagcatcctgcggaggaccagcctcatcctggcccgggtgtttggcctgcacctgcggctgaccagcctgcacaccatggagtttgccctggtgaaggccctggagcctgaggagctggacagagtggccctgagcaacaggatgcccatgacaggcctgctgctgatgatcctgagcctcatctacgtgaagggccgcggggcccgggagagcgctgtgtggaatgtgctgcgcatcctgggcctgcggccctggaagaagcacagcacctttggagatgtgaggaagctgatcacagaggagtttgtgcagatgaactacctgaagtaccagagggtgccctacgtggagcccccagaatatgagttcttctggggcagccgggccagccgggagatcaccaagatgcagatcatggagttcctggcccgggtcttcaagaaggacccccaggcctggcccagccgctaccgggaggccctggaggaggcccgggccctgcgggaggccaaccccacagcccactaccccaggagctctgtgtctgaggactag

SEQ ID NO: 161346 - DNA, 915 bp, synthetic construct
  misc_feature 1..915: note = Description of Artificial Sequence: Synthetic coding sequence
  source 1..915: mol_type = other DNA
atgctgcagaagcccaggaacagaggccgcagcggcggccaggccgagcgggaccgggactggagccacagcggcaaccctggggccagccgggccggggaggatgcccgggtgctgagagatggctttgctgaggaggcccccagcaccagccggggccctgggggcagccagggcagccagggccccagcccccagggcgcccggcgggcccaggccgccccagctgtgggccccaggagccagaagcagctggagctgaaggtgtctgagctggtgcagttcctgctgatcaaggaccagaagaagatccccatcaagagagctgacatcctgaagcacgtgattggagactacaaggacatcttcccagacctcttcaagagagctgctgagcggctgcagtatgtgtttggctacaagctggtggagctggagcccaagagcaacacctacatcctgatcaacaccctggagcctgtggaggaggatgctgagatgagaggagaccagggcacccccaccaccggcctgctgatgattgtgctgggcctcatcttcatgaagggcaacaccatcaaggagacagaggcctgggacttcctgcggcggctgggcgtgtaccccaccaagaagcacctgatctttggagaccccaagaagctgatcacagaagattttgtgcggcagcgctacctggagtaccgccgcatcccccacacagatcctgtggactatgagttccagtggggccccaggaccaacctggagaccagcaagatgaaggtgctgaagtttgtggccaaggtgcacaaccaggaccccaaggactggccagcccagtactgtgaggccctggctgatgaggagaacagagcccggccccagcccagcggccctgcccccagcagctag

SEQ ID NO: 161347 - DNA, 666 bp, synthetic construct
  misc_feature 1..666: note = Description of Artificial Sequence: Synthetic coding sequence
  source 1..666: mol_type = other DNA
atggccctggccctggccgccctggccgctgtggagcccgcctgtggcagccgctaccagcagctgcagaatgaggaggagagcggggagcctgagcaggccgctggagatgcccccccaccctacagcagcatctctgctgagagcgctgcctactttgactacaaggatgaaagtggcttccccaagccacccagctacaacgtggccaccaccctgcccagctatgatgaagctgagaggaccaaggccgaggccaccatccccctggtgcccggcagagatgaggactttgtgggcagagatgactttgatgatgctgaccagctgagaattggaaatgatggcatcttcatgctgaccttcttcatggccttcctgttcaactggattggcttcttcctgtccttctgcctgaccaccagcgctgctggccgctatggagccatcagcggcttcggcctgagcctcatcaagtggatcctgattgtgcgcttcagcacctacttccctggctactttgatggccagtactggctgtggtgggtgttcctggtgctgggcttcctgctcttcctgcggggcttcatcaactatgccaaggtgaggaagatgcctgagaccttcagcaacctgcccaggaccagggtgctcttcatctactag

SEQ ID NO: 161348 - DNA, 462 bp, synthetic construct
  misc_feature 1..462: note = Description of Artificial Sequence: Synthetic coding sequence
  source 1..462: mol_type = other DNA
atggccctggccctggccgccctggccgctgtggagcccgcctgtggcagccgctaccagcagctgcagaatgaggaggagagcggggagcctgagcaggccgctggagatgcccccccaccctacagcagcatctctgctgagagcgctgcctactttgactacaaggatgaaagtggcttccccaagccacccagctacaacgtggccaccaccctgcccagctgcttctatgacatcagccacctgatcttcttcatcttctacctgaggaacatgaagaagaagtacaccaagatggtgaagctgctgcacaagagcgccccagcccagagcgacagctgcaagtgccccttcatctgctgcgtgtgcatcagccgcatcagcatcggcagccgcagcggctaccagtacatcatgcacaggtctgtgggctgcctgaaggccaagcaggagaactag

SEQ ID NO: 161349 - DNA, 3138 bp, synthetic construct
  misc_feature 1..3138: note = Description of Artificial Sequence: Synthetic coding sequence
  source 1..3138: mol_type = other DNA
atgcaccagaagaccccagagatctacagcgtggagctgagcggcaccaaggacatcgtgaagacagacaagggagatggcaaggagaagtaccggggcctgaagaacaactgcctggagctgaagaagaagaaccacaaggaggagttccagaaggagctgcacctggatgaccacaagctgagcaaccgggagctggaggagaagtatggaacagacatcatcatgggcctgagcagcaccagggctgctgagctgctggccagagatggccccaacagcctgaccccacccaagcagaccccagagatcgtgaagttcctgaagcagatggtgggcggcttcagcatcctgctgtgggtgggcgccttcctgtgctggatcgcctacggcatccagtacagcagtgacaagagcgccagcctgaacaacgtgtacctgggctgtgtgctgggcctggtggtgatcctgaccggcatctttgcctactaccaggaggccaagagcaccaacatcatgagcagcttcaacaagatgatcccccagcaggccctggtgatccgggacagcgagaagaagaccatccccagcgagcagctggtggtgggggacatcgtggaggtgaagggcggggaccagatcccagctgacatccgggtgctgagcagccagggctgccgggtggacaacagcagcctgaccggggagagcgagccccagcccaggagcagcgagttcacccatgagaaccccctggagaccaagaacatctgcttctacagcaccacctgcctggaggccagcaccagccctgtgggcaccgtgacaggcatggtgatcaacacaggagacaggaccatcatcggccacatcgccagcctggccagcggcgtgggcaatgagaagacccccatcgccattgaaattgagcactttgtgcacatcgtggccggcgtggccgtgtccatcggcatcctcttcttcatcatcgctgtgtccctgaagtaccaggtgctggacagcatcatcttcctgattggcatcatcgtggccaacgtgcctgagggcctgctggccaccgtgacagtgaccctgagcctgacagccaagaggatggccaagaagaactgcctggtgaagaacctggaggccgtggagaccctgggcagcaccagcatcatctgcagcgacaagacaggcaccctgacccagaacaggatgacagtggcccacctgtggtttgacaaccagatctttgtggccgacaccagcgaggaccacagcaaccaggtgtttgaccagagcagcaggacctgggccagcctgagcaagatcatcaccctgtgcaacagagctgagttcaagccaggccaggagaatgtgcccatcatgaagaaggctgtgattggagatgccagcgagacagccctgctgaagttcagcgaggtgatcctgggagatgtgatggagatcaggaagaggaacaggaaggtggccgagatccccttcaacagcaccaacaagttccagctgagcatccacgagatggatgacccccacggcaagcgcttcctgatggtgatgaagggggcccctgagcgcatcctggagaagtgcagcaccatcatgatcaatggagaggagcaccccctggacaagagcacagccaagaccttccacacagcctacatggagctgggcggcctgggggagcgggtgctgggcttctgccacctgtacctgcctgcagatgagttccctgagacctacagctttgatattgatgccatgaacttccccaccagcaacctgtgctttgtgggcctgctgtccatgattgatcctcccaggagcacagtgcctgatgctgtgaccaagtgccgctctgctggcatcaaggtgatcatggtgactggagaccaccccatcacagccaaggccatcgccaagtctgtgggcatcatcagcgccaacagcgagaccgtggaggacatcgcccaccggctgaacattgctgtggagcaggtgaacaagagagatgccaaggctgctgtggtgacaggcatggagctgaaggacatgagcagcgagcagctggatgagatcctggccaactaccaggagatcgtgtttgcccggaccagcccccagcagaagctgatcatcgtggagggctgccagaggcaggatgctgtggtggccgtgactggagatggagtgaatgacagccctgccctgaagaaggctgacattggaattgccatgggcattgctggcagtgatgctgccaagaatgctgctgacatggtgctgctggatgacaactttgccagcatcgtgactggagtggaggagggccgcctcatctttgacaacctgaagaagaccatcgcctacagcctgaccaagaacattgctgagctgtgccccttcctgatctacatcatcgtgggcctgcccctgcccatcggcaccatcaccatcctcttcatcgacctgggcacagacatcatccccagcatcgccctggcctatgagaaggccgagagtgacatcatgaacaggaagcccaggcacaagaacaaggaccggctggtgaaccagcccctggccgtgtacagctacctgcacatcggcctgatgcaggccctgggcgccttcctggtgtacttcaccgtgtatgcccaggagggcttcctgcccaggaccctcatcaacctgcgggtggagtgggagaaggactatgtgaatgacctgaaggacagctatggccaggagtggacccgctaccagcgggagtacctggagtggacaggctacacagccttctttgtgggcatcctggtgcagcagattgctgacctgatcatcaggaagaccaggaggaacagcatcttccagcagggcctcttcaggaacaaggtgatctgggtgggcatcaccagccagatcatcatcggcctcatcctgtcctatggcctgggctctgtgacagccctgtccttcaccatgctgcgggcccagtactggtttgtggccgtgccccacgccatcctgatctgggtgtatgatgaggtgaggaagctgttcatccggctgtacccaggctcctggtgggacaagaacatgtactactag

SEQ ID NO: 161350 - DNA, 1605 bp, synthetic construct
  misc_feature 1..1605: note = Description of Artificial Sequence: Synthetic coding sequence
  source 1..1605: mol_type = other DNA
atggcccagctgggcaagctgctgaaggagcagaagtatgaccggcagctgcggctgtggggagaccacggccaggaggccctggagagcgcccacgtgtgcctgatcaatgccacagccactggaacagagatcctgaagaacctggtgctgcccggcatcggcagcttcaccatcattgatggcaaccaggtgtctggagaagatgctggcaacaacttcttcctgcagaggagcagcatcggcaagaacagagctgaggccgccatggagttcctgcaggagctgaacagtgatgtgtctggcagctttgtggaggagagccctgagaacctgctggacaatgaccccagcttcttctgccgcttcaccgtggtggtggccacccagctgcctgagagcaccagcctgcggctggctgatgtgctgtggaacagccagatccccctgctgatctgcaggacctacggcctggtgggctacatgaggatcatcatcaaggagcaccctgtgattgagagccacccagacaatgccctggaggacctgcggctggacaagcccttccctgagctgcgggagcacttccagagctatgacctggaccacatggagaagaaggaccacagccacaccccctggatcgtcatcatcgccaagtacctggcccagtggtacagcgagaccaacggccgcatccccaagacctacaaggagaaggaggacttccgggacctgatccggcagggcatcctgaagaatgaaaatggagccccagaagatgaagaaaattttgaggaggccatcaagaatgtgaacacagccctgaacaccacccagatccccagcagcattgaggacatcttcaatgatgaccgctgcatcaacatcaccaagcagacccccagcttctggatcctggcccgggccctgaaggagtttgtggccaaggagggccagggcaacctgcctgtgcggggcaccatcccagacatgattgctgacagcggcaagtacatcaagctgcagaatgtgtaccgggagaaggccaagaaggatgctgctgctgtgggcaaccacgtggccaagctgctgcagagcatcggccaggcccctgagagcatcagcgagaaggagctgaagctgctgtgcagcaacagcgccttcctgcgggtggtgcgctgccgcagcctggccgaggagtatggcctggacaccatcaacaaggatgagatcatcagctccatggacaacccagacaatgaaattgtgctgtacctgatgctgcgggctgtggaccgcttccacaagcagcagggccgctacccaggagtgagcaactaccaggtggaggaggacatcggcaagctgaagagctgcctgaccggcttcctgcaggagtatggcctgtctgtgatggtgaaggatgattatgtgcatgagttctgccgctatggagctgctgagccccacaccatcgccgccttcctgggcggcgctgctgcccaggaggtgatcaagatcatcaccaagcagtttgtgatcttcaacaacacctacatctacagcggcatgagccagaccagcgccaccttccagctgtag

SEQ ID NO: 161351 - DNA, 1587 bp, synthetic construct
  misc_feature 1..1587: note = Description of Artificial Sequence: Synthetic coding sequence
  source 1..1587: mol_type = other DNA
atggatgcccagcagaccaagaccaatgaggcccggctgtggggagaccacggccaggaggccctggagagcgcccacgtgtgcctgatcaatgccacagccactggaacagagatcctgaagaacctggtgctgcccggcatcggcagcttcaccatcattgatggcaaccaggtgtctggagaagatgctggcaacaacttcttcctgcagaggagcagcatcggcaagaacagagctgaggccgccatggagttcctgcaggagctgaacagtgatgtgtctggcagctttgtggaggagagccctgagaacctgctggacaatgaccccagcttcttctgccgcttcaccgtggtggtggccacccagctgcctgagagcaccagcctgcggctggctgatgtgctgtggaacagccagatccccctgctgatctgcaggacctacggcctggtgggctacatgaggatcatcatcaaggagcaccctgtgattgagagccacccagacaatgccctggaggacctgcggctggacaagcccttccctgagctgcgggagcacttccagagctatgacctggaccacatggagaagaaggaccacagccacaccccctggatcgtcatcatcgccaagtacctggcccagtggtacagcgagaccaacggccgcatccccaagacctacaaggagaaggaggacttccgggacctgatccggcagggcatcctgaagaatgaaaatggagccccagaagatgaagaaaattttgaggaggccatcaagaatgtgaacacagccctgaacaccacccagatccccagcagcattgaggacatcttcaatgatgaccgctgcatcaacatcaccaagcagacccccagcttctggatcctggcccgggccctgaaggagtttgtggccaaggagggccagggcaacctgcctgtgcggggcaccatcccagacatgattgctgacagcggcaagtacatcaagctgcagaatgtgtaccgggagaaggccaagaaggatgctgctgctgtgggcaaccacgtggccaagctgctgcagagcatcggccaggcccctgagagcatcagcgagaaggagctgaagctgctgtgcagcaacagcgccttcctgcgggtggtgcgctgccgcagcctggccgaggagtatggcctggacaccatcaacaaggatgagatcatcagctccatggacaacccagacaatgaaattgtgctgtacctgatgctgcgggctgtggaccgcttccacaagcagcagggccgctacccaggagtgagcaactaccaggtggaggaggacatcggcaagctgaagagctgcctgaccggcttcctgcaggagtatggcctgtctgtgatggtgaaggatgattatgtgcatgagttctgccgctatggagctgctgagccccacaccatcgccgccttcctgggcggcgctgctgcccaggaggtgatcaagatcatcaccaagcagtttgtgatcttcaacaacacctacatctacagcggcatgagccagaccagcgccaccttccagctgtag

SEQ ID NO: 161352 - DNA, 1338 bp, synthetic construct
  misc_feature 1..1338: note = Description of Artificial Sequence: Synthetic coding sequence
  source 1..1338: mol_type = other DNA
atggagttcctgcaggagctgaacagtgatgtgtctggcagctttgtggaggagagccctgagaacctgctggacaatgaccccagcttcttctgccgcttcaccgtggtggtggccacccagctgcctgagagcaccagcctgcggctggctgatgtgctgtggaacagccagatccccctgctgatctgcaggacctacggcctggtgggctacatgaggatcatcatcaaggagcaccctgtgattgagagccacccagacaatgccctggaggacctgcggctggacaagcccttccctgagctgcgggagcacttccagagctatgacctggaccacatggagaagaaggaccacagccacaccccctggatcgtcatcatcgccaagtacctggcccagtggtacagcgagaccaacggccgcatccccaagacctacaaggagaaggaggacttccgggacctgatccggcagggcatcctgaagaatgaaaatggagccccagaagatgaggagaactttgaggaggccatcaagaatgtgaacacagccctgaacaccacccagatccccagcagcattgaggacatcttcaatgatgaccgctgcatcaacatcaccaagcagacccccagcttctggatcctggcccgggccctgaaggagtttgtggccaaggagggccagggcaacctgcctgtgcggggcaccatcccagacatgattgctgacagcggcaagtacatcaagctgcagaatgtgtaccgggagaaggccaagaaggatgctgctgctgtgggcaaccacgtggccaagctgctgcagagcatcggccaggcccctgagagcatcagcgagaaggagctgaagctgctgtgcagcaacagcgccttcctgcgggtggtgcgctgccgcagcctggccgaggagtatggcctggacaccatcaacaaggatgagatcatcagctccatggacaacccagacaatgagatcgtgctgtacctgatgctgcgggctgtggaccgcttccacaagcagcagggccgctacccaggagtgagcaactaccaggtggaggaggacatcggcaagctgaagagctgcctgaccggcttcctgcaggagtatggcctgtctgtgatggtgaaggatgattatgtgcatgagttctgccgctacggggctgctgagccccacaccatcgccgccttcctgggcggggccgccgcccaggaggtgatcaagatcatcaccaagcagtttgtgatcttcaacaacacctacatctacagcggcatgagccagaccagcgccaccttccagctgtag

SEQ ID NO: 161353 - DNA, 2901 bp, synthetic construct
  misc_feature 1..2901: note = Description of Artificial Sequence: Synthetic coding sequence
  source 1..2901: mol_type = other DNA
atggagccccaggtgaccctgaatgtgaccttcaagaatgagatccagagcttcctggtgtctgaccctgagaacaccacctgggccgacatcgaggccatggtgaaggtgtcctttgacctgaacaccatccagatcaagtacctggatgaggagaatgaggaggtgtccatcaacagccagggcgagtatgaggaggccctgaagatggctgtgaagcagggcaaccagctgcagatgcaggtgcatgagggccaccacgtggtggatgaggcccctcctcctgtggtgggcgccaagaggctggccgcccgggccggcaagaagcccctggcccactacagcagcctggtgcgggtgctgggcagtgacatgaagaccccagaagatcctgctgtgcagagcttccccctggtgccctgtgacacagaccagccccaggacaagcccccagactggttcaccagctacctggagaccttccgggagcaggtggtgaatgaaacagtggagaagctggagcagaagctgcacgagaagctggtgctgcagaaccccagcctgggcagctgccccagcgaggtgtccatgcccaccagcgaggagaccctcttcctgcctgagaaccagttctcctggcacatcgcctgcaacaactgccagaggcgcatcgtgggcgtgcgctaccagtgcagcctgtgccccagctacaacatctgtgaggactgtgaggccggcccctacggccatgacaccaaccacgtgctgctgaagctgcggcggcctgtggtgggcagcagcgagcccttctgccacagcaagtacagcaccccccggctgcctgctgccctggagcaggtgcggctgcagaagcaggtggacaagaacttcctgaaggccgagaagcagaggctgcgggcagagaagaagcagaggaaggccgaggtgaaggagctgaagaagcagctgaagctgcacaggaagatccacctgtggaacagcatccacggcctgcagagccccaagagccccctgggccggcctgagagcctgctgcagagcaacaccctgatgctgcccctgcagccctgcacctctgtgatgcccatgctgtctgctgcctttgtggatgagaacctgcctgatggcacccacctgcagcccggcaccaagttcatcaagcactggaggatgaagaacacaggaaatgtgaagtggagcgctgacaccaagctgaagttcatgtggggcaacctgaccctggccagcacagagaagaaggatgtgctggtgccctgcctgaaggccggccacgtgggcgtggtgtctgtggagttcatcgccccagccctggagggcacctacaccagccactggaggctgagccacaagggccagcagtttggcccccgggtgtggtgcagcatcatcgtggaccccttccccagcgaggagagcccagacaacatcgagaagggcatgatcagcagcagcaagacagatgacctgacctgccagcaggaggagaccttcctgctggccaaggaggagcggcagctgggggaggtgacagagcagacagagggcacagctgcctgcatcccccagaaggccaagaatgtggccagcgagcgggagctgtacatccccagcgtggacctgctgacagcccaggacctgctgagctttgagctgctggacatcaacatcgtgcaggagctggagcgggtgccccacaacacccctgtggatgtgaccccctgcatgagccccctgccccatgacagccccctgattgagaagccaggcctgggccagatcgaggaggagaatgaaggagctggcttcaaggccctgcctgacagcatggtgtctgtgaagaggaaggcagaaaatattgcctctgtggaggaggccgaggaggacctgagcggcacccagtttgtgtgtgagaccgtcatccgcagcctgaccctggatgctgccccagaccacaaccccccctgccggcagaagagcctgcagatgacctttgccctgcctgagggccccctgggcaatgagaaggaggagatcatccacatcgccgaggaggaggccgtgatggaggaggaggaggatgaagaagatgaggaggaggaggatgagctgaaggatgaggtgcagagccagagcagcgccagcagcgaggactacatcatcatcctgcctgagtgctttgacaccagccggcccctgggggacagcatgtacagcagcgccctgagccagcccggcctggagagaggagctgagggcaagccaggagtggaggccggccaggagcctgctgaggccggggagcggctgcctggaggagagaaccagccccaggagcacagcatcagtgacatcctgaccaccagccagaccctggagaccgtgcccctcatccctgaggtggtggagctgccccccagcctgcccaggagcagcccctgtgtgcaccaccacggcagccctggggtggacctgcctgtgaccatccctgaggtgtcctctgtgcctgaccagatccggggggagccccggggcagcagcggcctggtgaacagccggcagaagagctatgaccacagccgccaccaccacggcagcagcattgctgggggcctggtgaagggggccctgtctgtggccgccagcgcctacaaggccctgtttgctggcccccctgtgacagcccagcccatcatcagcgaggaccagacagctgccctgatggcccacctgtttgagatgggcttctgtgaccggcagctgaacctgcggctgctgaagaagcacaactacaacatcctgcaggtggtgacagagctgctgcagctgaacaacaatgactggtacagccagcgctactag

SEQ ID NO: 161354 - DNA, 2814 bp, synthetic construct
  misc_feature 1..2814: note = Description of Artificial Sequence: Synthetic coding sequence
  source 1..2814: mol_type = other DNA
atggagccccaggtgaccctgaatgtgaccttcaagaatgagatccagagcttcctggtgtctgaccctgagaacaccacctgggccgacatcgaggccatggtgaaggtgtcctttgacctgaacaccatccagatcaagtacctggatgaggagaatgaggaggtgaagatcgtgctgctgggggagtatgaggaggccctgaagatggctgtgaagcagggcaaccagctgcagatgcaggtgcatgagggccaccacgtggtggatgaggcccctcctcctgtggtgggcgccaagaggctggccgcccgggccggcaagaagcccctggcccactacagcagcctggtgcgggtgctgggcagtgacatgaagaccccagaagatcctgctgtgcagagcttccccctggtgccctgtgacacagaccagccccaggacaagcccccagactggttcaccagctacctggagaccttccgggagcaggtggtgaatgaaacagtggagaagctggagcagaagctgcacgagaagctggtgctgcagaaccccagcctgggcagctgccccagcgaggtgtccatgcccaccagcgaggagaccctcttcctgcctgagaaccagttctcctggcacatcgcctgcaacaactgccagaggcgcatcgtgggcgtgcgctaccagtgcagcctgtgccccagctacaacatctgtgaggactgtgaggccggcccctacggccatgacaccaaccacgtgctgctgaagctgcggcggcctgtggtgggcagcagcgagcccttctgccacagcaagtacagcaccccccggctgcctgctgccctggagcaggtgcggctgcagaagcaggtggacaagaacttcctgaaggccgagaagcagaggctgcgggcagagaagaagcagaggaaggccgaggtgaaggagctgaagaagcagctgaagctgcacaggaagatccacctgtggaacagcatccacggcctgcagagccccaagagccccctgggccggcctgagagcctgctgcagagcaacaccctgatgctgcccctgcagccctgcacctctgtgatgcccatgctgtctgctgcctttgtggatgagaacctgcctgatggcacccacctgcagcccggcaccaagttcatcaagcactggaggatgaagaacacaggaaatgtgaagtggagcgctgacaccaagctgaagttcatgtggggcaacctgaccctggccagcacagagaagaaggatgtgctggtgccctgcctgaaggccggccacgtgggcgtggtgtctgtggagttcatcgccccagccctggagggcacctacaccagccactggaggctgagccacaagggccagcagtttggcccccgggtgtggtgcagcatcatcgtggaccccttccccagcgaggagagcccagacaacatcgagaagggcatgatcagcagcagcaagacagatgacctgacctgccagcaggaggagaccttcctgctggccaaggaggagcggcagctgggggaggtgacagagcagacagagggcacagctgcctgcatcccccagaaggccaagaatgtggccagcgagcgggagctgtacatccccagcgtggacctgctgacagcccaggacctgctgagctttgagctgctggacatcaacatcgtgcaggagctggagcgggtgccccacaacacccctgtggatgtgaccccctgcatgagccccctgccccatgacagccccctgattgagaagccaggcctgggccagatcgaggaggagaatgaaggagctggcttcaaggccctgcctgacagcatggtgtctgtgaagaggaaggcagaaaatattgcctctgtggaggaggccgaggaggacctgagcggcacccagtttgtgtgtgagaccgtcatccgcagcctgaccctggatgctgccccagaccacaaccccccctgccggcagaagagcctgcagatgacctttgccctgcctgagggccccctgggcaatgagaaggaggagatcatccacatcgccgaggaggaggccgtgatggaggaggaggaggatgaagaagatgaggaggaggaggatgagctgaaggatgaggtgcagagccagagcagcgccagcagcgaggactacatcatcatcctgcctgagtgctttgacaccagccggcccctgggggacagcatgtacagcagcgccctgagccagcccggcctggagagaggagctgagggcaagccaggagtggaggccggccaggagcctgctgaggccggggagcggctgcctggaggagagaaccagccccaggagcacagcatcagtgacatcctgaccaccagccagaccctggagaccgtgcccctcatccctgaggtggtggagctgccccccagcctgcccaggagcagcccctgtgtgcaccaccacggcagccctggggtggacctgcctgtgaccatccctgaggtgtcctctgtgcctgaccagatccggggggagccccggggcagcagcggcctggtgaacagccggcagaagagctatgaccacagccgccaccaccacggcagcagcattgctgggggcctggtgaagggggccctgtctgtggccgccagcgcctacaaggccctgtttgctggcccccctgtgacagcccagggcctgtggggcctgctgtccttcctgcacctggccaagaagtgcttcttcctgaaggcccccagcgaggccttctcctggttctag

SEQ ID NO: 161355 - DNA, 2901 bp, synthetic construct
  misc_feature 1..2901: note = Description of Artificial Sequence: Synthetic coding sequence
  source 1..2901: mol_type = other DNA
atggagccccaggtgaccctgaatgtgaccttcaagaatgagatccagagcttcctggtgtctgaccctgagaacaccacctgggccgacatcgaggccatggtgaaggtgtcctttgacctgaacaccatccagatcaagtacctggatgaggagaatgaggaggtgaagatcgtgctgctgggggagtatgaggaggccctgaagatggctgtgaagcagggcaaccagctgcagatgcaggtgcatgagggccaccacgtggtggatgaggcccctcctcctgtggtgggcgccaagaggctggccgcccgggccggcaagaagcccctggcccactacagcagcctggtgcgggtgctgggcagtgacatgaagaccccagaagatcctgctgtgcagagcttccccctggtgccctgtgacacagaccagccccaggacaagcccccagactggttcaccagctacctggagaccttccgggagcaggtggtgaatgaaacagtggagaagctggagcagaagctgcacgagaagctggtgctgcagaaccccagcctgggcagctgccccagcgaggtgtccatgcccaccagcgaggagaccctcttcctgcctgagaaccagttctcctggcacatcgcctgcaacaactgccagaggcgcatcgtgggcgtgcgctaccagtgcagcctgtgccccagctacaacatctgtgaggactgtgaggccggcccctacggccatgacaccaaccacgtgctgctgaagctgcggcggcctgtggtgggcagcagcgagcccttctgccacagcaagtacagcaccccccggctgcctgctgccctggagcaggtgcggctgcagaagcaggtggacaagaacttcctgaaggccgagaagcagaggctgcgggcagagaagaagcagaggaaggccgaggtgaaggagctgaagaagcagctgaagctgcacaggaagatccacctgtggaacagcatccacggcctgcagagccccaagagccccctgggccggcctgagagcctgctgcagagcaacaccctgatgctgcccctgcagccctgcacctctgtgatgcccatgctgtctgctgcctttgtggatgagaacctgcctgatggcacccacctgcagcccggcaccaagttcatcaagcactggaggatgaagaacacaggaaatgtgaagtggagcgctgacaccaagctgaagttcatgtggggcaacctgaccctggccagcacagagaagaaggatgtgctggtgccctgcctgaaggccggccacgtgggcgtggtgtctgtggagttcatcgccccagccctggagggcacctacaccagccactggaggctgagccacaagggccagcagtttggcccccgggtgtggtgcagcatcatcgtggaccccttccccagcgaggagagcccagacaacatcgagaagggcatgatcagcagcagcaagacagatgacctgacctgccagcaggaggagaccttcctgctggccaaggaggagcggcagctgggggaggtgacagagcagacagagggcacagctgcctgcatcccccagaaggccaagaatgtggccagcgagcgggagctgtacatccccagcgtggacctgctgacagcccaggacctgctgagctttgagctgctggacatcaacatcgtgcaggagctggagcgggtgccccacaacacccctgtggatgtgaccccctgcatgagccccctgccccatgacagccccctgattgagaagccaggcctgggccagatcgaggaggagaatgaaggagctggcttcaaggccctgcctgacagcatggtgtctgtgaagaggaaggcagaaaatattgcctctgtggaggaggccgaggaggacctgagcggcacccagtttgtgtgtgagaccgtcatccgcagcctgaccctggatgctgccccagaccacaaccccccctgccggcagaagagcctgcagatgacctttgccctgcctgagggccccctgggcaatgagaaggaggagatcatccacatcgccgaggaggaggccgtgatggaggaggaggaggatgaagaagatgaggaggaggaggatgagctgaaggatgaggtgcagagccagagcagcgccagcagcgaggactacatcatcatcctgcctgagtgctttgacaccagccggcccctgggggacagcatgtacagcagcgccctgagccagcccggcctggagagaggagctgagggcaagccaggagtggaggccggccaggagcctgctgaggccggggagcggctgcctggaggagagaaccagccccaggagcacagcatcagtgacatcctgaccaccagccagaccctggagaccgtgcccctcatccctgaggtggtggagctgccccccagcctgcccaggagcagcccctgtgtgcaccaccacggcagccctggggtggacctgcctgtgaccatccctgaggtgtcctctgtgcctgaccagatccggggggagccccggggcagcagcggcctggtgaacagccggcagaagagctatgaccacagccgccaccaccacggcagcagcattgctgggggcctggtgaagggggccctgtctgtggccgccagcgcctacaaggccctgtttgctggcccccctgtgacagcccagcccatcatcagcgaggaccagacagctgccctgatggcccacctgtttgagatgggcttctgtgaccggcagctgaacctgcggctgctgaagaagcacaactacaacatcctgcaggtggtgacagagctgctgcagctgaacaacaatgactggtacagccagcgctactag

SEQ ID NO: 161356 - DNA, 2901 bp, synthetic construct; identical to SEQ ID NO: 161353
  misc_feature 1..2901: note = Description of Artificial Sequence: Synthetic coding sequence
  source 1..2901: mol_type = other DNA

SEQ ID NO: 161357 - DNA, 654 bp, synthetic construct
  misc_feature 1..654: note = Description of Artificial Sequence: Synthetic coding sequence
  source 1..654: mol_type = other DNA
atgtacagcagcgccctgagccagcccggcctggagagaggagctgagggcaagccaggagtggaggccggccaggagcctgctgaggccggggagcggctgcctggaggagagaaccagccccaggagcacagcatcagtgacatcctgaccaccagccagaccctggagaccgtgcccctcatccctgaggtggtggagctgccccccagcctgcccaggagcagcccctgtgtgcaccaccacggcagccctggggtggacctgcctgtgaccatccctgaggtgtcctctgtgcctgaccagatccggggggagccccggggcagcagcggcctggtgaacagccggcagaagagctatgaccacagccgccaccaccacggcagcagcattgctgggggcctggtgaagggggccctgtctgtggccgccagcgcctacaaggccctgtttgctggcccccctgtgacagcccagcccatcatcagcgaggaccagacagctgccctgatggcccacctgtttgagatgggcttctgtgaccggcagctgaacctgcggctgctgaagaagcacaactacaacatcctgcaggtggtgacagagctgctgcagctgaacaacaatgactggtacagccagcgctactag

SEQ ID NO: 161358 - DNA, 2514 bp, synthetic construct
  misc_feature 1..2514: note = Description of Artificial Sequence: Synthetic coding sequence
  source 1..2514: mol_type = other DNA
atggagccccaggtgaccctgaatgtgaccttcaagaatgagatccagagcttcctggtgtctgaccctgagaacaccacctgggccgacatcgaggccatggtgtccatcaacagccagggcgagtatgaggaggccctgaagatggctgtgaagcagggcaaccagctgcagatgcaggtgcatgagggccaccacgtggtggatgaggcccctcctcctgtggtgggcgccaagaggctggccgcccgggccggcaagaagcccctggcccactacagcagcctggtgcgggtgctgggcagtgacatgaagaccccagaggaccctgctgtgcagagcttccccctggtgccctgtgacacagaccagccccaggacaagcccccagactggttcaccagctacctggagaccttccgggagcaggtggtgaatgagaccgtggagaagctggagcagaagctgcacgagaagctggtgctgcagaaccccagcctgggcagctgccccagcgaggtgtccatgcccaccagcgaggagaccctcttcctgcctgagaaccagttctcctggcacatcgcctgcaacaactgccagaggagaattgtgggcgtgcgctaccagtgcagcctgtgccccagctacaacatctgtgaggactgtgaggccggcccctacggccatgacaccaaccacgtgctgctgaagctgcggcggcctgtggtgggcagcagcgagcccttctgccacagcaagtacagcaccccccggctgcctgctgccctggagcaggtgcggctgcagaagcaggtggacaagaacttcctgaaggccgagaagcagaggctgcgggcagagaagaagcagaggaaggccgaggtgaaggagctgaagaagcagctgaagctgcacaggaagatccacctgtggaacagcatccacggcctgcagagccccaagagccccctgggccggcctgagagcctgctgcagagcaacaccctgatgctgcccctgcagccctgcacctctgtgatgcccatgctgtctgctgcctttgtggatgagaacctgcctgatggcacccacctgcagcccggcaccaagttcatcaagcactggaggatgaagaacacaggaaatgtgaagtggagcgctgacaccaagctgaagttcatgtggggcaacctgaccctggccagcacagagaagaaggatgtgctggtgccctgcctgaaggccggccacgtgggcgtggtgtctgtggagttcatcgccccagccctggagggcacctacaccagccactggaggctgagccacaagggccagcagtttggcccccgggtgtggtgcagcatcatcgtggaccccttccccagcgaggagagcccagacaacatcgagaagggcatgatcagcagcagcaagacagatgacctgacctgccagcaggaggagaccttcctgctggccaaggaggagcggcagctgggggaggtgacagagcagacagagggcacagctgcctgcatcccccagaaggccaagaatgtggccagcgagcgggagctgtacatccccagcgtggacctgctgacagcccaggacctgctgagctttgagctgctggacatcaacatcgtgcaggagctggagcgggtgccccacaacacccctgtggatgtgaccccctgcatgagccccctgccccatgacagccccctcatcgagaagccaggcctgggccagatcgaggaggagaatgaaggagctggcttcaaggccctgcctgacagcatggtgtctgtgaagaggaaggccgagaacatcgcctctgtggaggaggccgaggaggacctgagcggcacccagtttgtgtgtgaaacagtcatccgcagcctgaccctggatgctgccccagaccacaaccccccctgccggcagaagagcctgcagatgacctttgccctgcctgagggccccctgggcaatgagaaggaggagatcatccacatcgccgaggaggaggccgtgatggaggaggaggaggatgaggaggatgaggaggaggaggatgagctgaaggatgaggtgcagagccagagcagcgccagcagcgaggactacatcatcatcctgcctgaatgttttgacaccagccggcccctgggggacagcatgtacagcagcgccctgagccagcccggcctggagagaggagctgagggcaagccaggagtggaggccggccaggagcctgctgaggccggggagcggctgcctggaggagagaaccagccccaggagcacagcatcagtgacatcctgaccaccagccagaccctggagaccgtgcccctcatccctgaggtggtggagctgccccccagcctgcccaggagcagcccctgtgtgcaccaccacggcagccctggggtggacctgcctgtgaccatccctgaggtgtcctctgtgcctgaccagatccggggggccaacaacttctag

SEQ ID NO: 161359 - DNA, 2262 bp, synthetic construct
  misc_feature 1..2262: note = Description of Artificial Sequence: Synthetic coding sequence
  source 1..2262: mol_type = other DNA
atgcccatggacctgatcctggtggtgtggttctgtgtgtgcacagccaggacagtggtgggcttcggcatggaccctgacctgcagatggacatcgtgacagagctggacctggtgaacaccaccctgggcgtggcccaggtgtctggcatgcacaatgccagcaaggccttcctgttccaggacatcgagcgggagatccatgctgccccccacgtgtctgagaagctgatccagctgttcaggaacaagtctgagttcaccatcctggccaccgtgcagcagaagcccagcaccagcggggtcatcctgagcatccgggagctggagcaccgcatctatgaaagagtcatcgaccccccagacaccaacctgcccccaggcatcaacctgtggctgggccagaggaaccagaagcacggcctcttcaagggcatcatccaggacggcaagatcatcttcatgcccaacggctacatcacccagtgccccaacctgaaccacacctgccccacctgcagcgacttcctgagcctggtgcagggcatcatggacctgcaggagctgctggccaagatgacagccaagctgaactatgcagagacccggctgagccagctggagaactgccactgtgagaagacctgccaggtgtctggcctgctgtacagagaccaggacagctgggtggatggagaccactgcaggaactgcacctgcaagagcggggctgtggagtgcaggaggatgagctgcccccccctgaactgcagcccagacagcctgcctgtgcacatcgccggccagtgctgcaaggtgtgccggcccaagtgcatctacggcggcaaggtgctggccgagggccagaggatcctgaccaagagctgccgggagtgccggggcggcgtgctggtgaagatcacagagatgtgcccccccctgaactgcagcgagaaggaccacatcctgcctgagaaccagtgctgccgggtgtgccggggccacaacttctgtgccgagggccccaagtgtggggagaacagcgagtgcaagaactggaacaccaaggccacctgtgagtgcaagagcggctacatctctgtgcagggcgacagcgcctactgtgaggacattgatgaatgtgccgccaagatgcactactgccacgccaacacagtgtgtgtgaacctgcccggcctgtaccgctgtgactgtgtgcccggctacatccgggtggatgacttcagctgcacagaacatgatgaatgtggcagcggccagcacaactgtgatgaaaatgccatctgcaccaacacagtgcagggccacagctgcacctgcaagccaggctacgtgggcaatggcaccatctgccgggccttctgtgaggagggctgccgctatggaggcacctgtgtggcccccaacaagtgtgtgtgccccagcggcttcaccggcagccactgtgagaaggacattgatgaatgttctgagggcatcatcgagtgccacaaccacagccgctgtgtgaacctgcccggctggtaccactgtgaatgtcgcagcggcttccatgatgatggcacctacagcctgtctggagagagctgcatcgacattgatgaatgtgccctgcggacccacacctgctggaatgacagcgcctgcatcaacctggccggcggctttgactgcctgtgccccagcggccccagctgcagcggggactgcccccatgaaggaggcctgaagcacaacggccaggtgtggaccctgaaggaggaccgctgcagcgtgtgcagctgcaaggatggcaagatcttctgcagaagaacagcctgtgactgccagaaccccagcgctgacctcttctgctgcccagaatgtgacaccagggtgaccagccagtgcctggaccagaatggccacaagctgtaccgcagcggggacaactggacccacagctgccagcagtgccgctgcctggagggggaggtggactgctggcccctgacctgccccaacctgagctgtgagtacacagccatcctggagggggagtgctgcccccgctgtgtgtctgacccctgcctggccgacaacatcacctatgacatcaggaagacctgcctggacagctatggagtgtcccggctgagcggctctgtgtggaccatggccggcagcccctgcaccacctgcaagtgcaagaatggccgggtgtgctgcagcgtggactttgagtgcctgcagaacaactag

SEQ ID NO: 161360 - DNA, 2433 bp, synthetic construct
  misc_feature 1..2433: note = Description of Artificial Sequence: Synthetic coding sequence
  source 1..2433: mol_type = other DNA
atgcccatggacctgatcctggtggtgtggttctgtgtgtgcacagccaggacagtggtgggcttcggcatggaccctgacctgcagatggacatcgtgacagagctggacctggtgaacaccaccctgggcgtggcccaggtgtctggcatgcacaatgccagcaaggccttcctgttccaggacatcgagcgggagatccatgctgccccccacgtgtctgagaagctgatccagctgttcaggaacaagtctgagttcaccatcctggccaccgtgcagcagaagcccagcaccagcggggtcatcctgagcatccgggagctggagcacagctactttgagctggagagcagcggcctgagagatgagatccgctaccactacatccacaacgggaagcccaggacagaggccctgccctacaggatggctgatggccagtggcacaaggtggccctgtctgtgtctgccagccacctgctgctgcacgtggactgcaaccgcatctatgagcgggtgattgatcctccagacaccaacctgcccccaggcatcaacctgtggctgggccagaggaaccagaagcacggcctcttcaagggcatcatccaggacggcaagatcatcttcatgcccaacggctacatcacccagtgccccaacctgaaccacacctgccccacctgcagcgacttcctgagcctggtgcagggcatcatggacctgcaggagctgctggccaagatgacagccaagctgaactatgcagagacccggctgagccagctggagaactgccactgtgagaagacctgccaggtgtctggcctgctgtacagagaccaggacagctgggtggatggagaccactgcaggaactgcacctgcaagtctggagctgtggagtgcaggaggatgagctgcccccccctgaactgcagcccagacagcctgcctgtgcacatcgccggccagtgctgcaaggtgtgccggcccaagtgcatctatggaggcaaggtgctggccgagggccagaggatcctgaccaagagctgcagagaatgtcggggcggcgtgctggtgaagatcacagagatgtgcccccccctgaactgcagcgagaaggaccacatcctgcctgagaaccagtgctgccgggtgtgccggggccacaacttctgtgccgagggccccaagtgtggagaaaattctgagtgcaagaactggaacaccaaggccacctgtgagtgcaagagcggctacatctctgtgcagggcgacagcgcctactgtgaagatattgatgaatgtgccgccaagatgcactactgccacgccaacacagtgtgtgtgaacctgcccggcctgtaccgctgtgactgtgtgcccggctacatccgggtggatgacttcagctgcacagaacatgatgaatgtggcagcggccagcacaactgtgatgaaaatgccatctgcaccaacacagtgcagggccacagctgcacctgcaagccaggctacgtgggcaatggcaccatctgccgggccttctgtgaggagggctgccgctatggaggcacctgtgtggcccccaacaagtgtgtgtgccccagcggcttcaccggcagccactgtgagaaggacattgatgagtgcagcgagggcatcatcgagtgccacaaccacagccgctgtgtgaacctgcccggctggtaccactgtgagtgccgcagcggcttccatgatgatggcacctacagcctgagcggggagagctgcattgatattgatgaatgtgccctgcggacccacacctgctggaatgattctgcctgcatcaacctggccggcggctttgactgcctgtgccccagcggccccagctgcagcggggactgcccccatgagggcggcctgaagcacaacggccaggtgtggaccctgaaggaggaccgctgcagcgtgtgcagctgcaaggatggcaagatcttctgcagaagaacagcctgtgactgccagaaccccagcgctgacctcttctgctgcccagaatgtgacaccagggtgaccagccagtgcctggaccagaatggccacaagctgtacagaagtggggacaactggacccacagctgccagcagtgccgctgcctggagggggaggtggactgctggcccctgacctgccccaacctgagctgtgagtacacagccatcctggagggggagtgctgcccccgctgtgtgtctgacccctgcctggccgacaacatcacctatgacatcaggaagacctgcctggacagctatggagtgtcccggctgagcggctctgtgtggaccatggccggcagcccctgcaccacctgcaagtgcaagaatggccgggtgtgctgcagcgtggactttgaatgtctgcagaacaactag

SEQ ID NO: 161361 - DNA, 2292 bp, synthetic construct
  misc_feature 1..2292: note = Description of Artificial Sequence: Synthetic coding sequence
  source 1..2292: mol_type = other DNA
atgcccatggacctgatcctggtggtgtggttctgtgtgtgcacagccaggacagtggtgggcttcggcatggaccctgacctgcagatggacatcgtgacagagctggacctggtgaacaccaccctgggcgtggcccaggtgtctggcatgcacaatgccagcaaggccttcctgttccaggacatcgagcgggagatccatgctgccccccacgtgtctgagaagctgatccagctgttcaggaacaagtctgagttcaccatcctggccaccgtgcagcagaagcccagcaccagcggggtcatcctgagcatccgggagctggagcacagctactttgagctggagagcagcggcctgagagatgagatccgctaccactacatccacaacgggaagcccaggacagaggccctgccctacaggatggctgatggccagtggcacaaggtggccctgtctgtgtctgccagccacctgctgctgcacgtggactgcaaccgcatctatgagcgggtgattgatcctccagacaccaacctgcccccaggcatcaacctgtggctgggccagaggaaccagaagcacggcctcttcaagggcatcatccaggacggcaagatcatcttcatgcccaacggctacatcacccagtgccccaacctgaaccacacctgccccacctgcagcgacttcctgagcctggtgcagggcatcatggacctgcaggagctgctggccaagatgacagccaagctgaactatgcagagacccggctgagccagctggagaactgccactgtgagaagacctgccaggtgtctggcctgctgtacagagaccaggacagctgggtggatggagaccactgcaggaactgcacctgcaagtctggagctgtggagtgcaggaggatgagctgcccccccctgaactgcagcccagacagcctgcctgtgcacatcgccggccagtgctgcaaggtgtgccggcccaagtgcatctatggaggcaaggtgctggccgagggccagaggatcctgaccaagagctgcagagaatgtcggggcggcgtgctggtgaagatcacagagatgtgcccccccctgaactgcagcgagaaggaccacatcctgcctgagaaccagtgctgccgggtgtgccggggccacaacttctgtgccgagggccccaagtgtggagaaaattctgagtgcaagaactggaacaccaaggccacctgtgagtgcaagagcggctacatctctgtgcagggcgacagcgcctactgtgaagatattgatgaatgtgccgccaagatgcactactgccacgccaacacagtgtgtgtgaacctgcccggcctgtaccgctgtgactgtgtgcccggctacatccgggtggatgacttcagctgcacagaacatgatgaatgtggcagcggccagcacaactgtgatgaaaatgccatctgcaccaacacagtgcagggccacagctgcacctgcaagccaggctacgtgggcaatggcaccatctgccgggccttctgtgaggagggctgccgctatggaggcacctgtgtggcccccaacaagtgtgtgtgccccagcggcttcaccggcagccactgtgagaaggacattgatgaatgtgccctgcggacccacacctgctggaatgacagcgcctgcatcaacctggccggcggctttgactgcctgtgccccagcggccccagctgcagcggggactgcccccatgaaggaggcctgaagcacaacggccaggtgtggaccctgaaggaggaccgctgcagcgtgtgcagctgcaaggatggcaagatcttctgcagaagaacagcctgtgactgccagaaccccagcgctgacctcttctgctgcccagaatgtgacaccagggtgaccagccagtgcctggaccagaatggccacaagctgtaccgcagcggggacaactggacccacagctgccagcagtgccgctgcctggagggggaggtggactgctggcccctgacctgccccaacctgagctgtgagtacacagccatcctggagggggagtgctgcccccgctgtgtgtctgacccctgcctggccgacaacatcacctatgacatcaggaagacctgcctggacagctatggagtgtcccggctgagcggctctgtgtggaccatggccggcagcccctgcaccacctgcaagtgcaagaatggccgggtgtgctgcagcgtggactttgagtgcctgcagaacaactag

SEQ ID NO: 161362 - DNA, 2520 bp, synthetic construct
  misc_feature 1..2520: note = Description of Artificial Sequence: Synthetic coding sequence
  source 1..2520: mol_type = other DNA
atgagcatccggcggctgctgatcctgatcctgaagattggaagacgctggacagagctgatccgcaccatggagagccgggtgctgctgcggaccttctgcctgatcttcggcctgggcgctgtgtggggcctgggcgtggaccccagcctgcagattgatgtgctgacagagctggagctgggggagagcaccaccggggtgcggcaggtgcccggcctgcacaacggcaccaaggccttcctgttccaggacacccccaggagcatcaaggccagcacagccacagctgagcagttcttccagaagctgaggaacaagcatgagttcaccatcctggtgaccctgaagcagacccacctgaacagcggggtcatcctgagcatccaccacctggaccaccgctacctggagctggagagcagcggccacagaaatgaggtgcggctgcactaccgcagcggcagccaccggccccacacagaggtgttcccctacatcctggctgatgacaagtggcacaagctgagcctggccatcagcgccagccacctgatcctgcacatcgactgcaacaagatctatgagcgggtggtggagaagcccagcacagacctgcccctgggcaccaccttctggctgggccagagaaataatgcccacggctacttcaagggcatcatgcaggatgtgcagctgctggtgatgccccagggcttcatcgcccagtgcccagacctgaacagaacctgccccacctgcaatgacttccacggcctggtgcagaagatcatggagctgcaggacatcctggccaagaccagcgccaagctgagcagagctgagcagaggatgaaccggctggaccagtgctactgtgagaggacctgcaccatgaagggcaccacctaccgggagtttgagagctggattgatggctgcaagaactgcacctgcctgaatggcaccatccagtgtgagaccctcatctgccccaacccagactgccccctgaagagcgccctggcctacgtggatggcaagtgctgcaaggagtgcaagagcatctgccagttccagggccgcacctactttgaaggagagaggaacacagtgtacagcagcagcggcgtgtgtgtgctgtatgagtgcaaggaccagaccatgaagctggtggagagcagcggctgcccagccctggactgcccagagagccaccagatcaccctgagccacagctgctgcaaggtgtgcaagggctatgacttctgcagcgagcggcacaactgcatggagaacagcatctgcaggaacctgaatgacagagctgtgtgcagctgcagagatggcttccgggccctgcgggaggacaatgcctactgtgaggacattgatgaatgtgccgagggccgccactactgccgggagaacaccatgtgtgtgaacaccccaggcagcttcatgtgcatctgcaagacaggctacatcagaattgatgactacagctgcacagaacatgatgagtgcatcaccaaccagcacaactgtgatgaaaatgccctgtgcttcaacacagtgggcggccacaactgtgtgtgcaagccaggctacacaggaaatggcaccacctgcaaggccttctgcaaggatggctgcagaaatggaggagcctgcatcgccgccaacgtgtgtgcctgcccccagggcttcaccggccccagctgtgaaacagacattgatgaatgttctgatggctttgtgcagtgtgacagccgggccaactgcatcaacctgcccggctggtaccactgtgaatgtagagatggctaccatgacaatggcatgttcagccccagcggggagagctgtgaggacattgatgaatgtggcaccggccgccacagctgtgccaatgacaccatctgcttcaacctggatggcggctatgactgccgctgcccccacggcaagaactgcaccggggactgcatccatgatggcaaggtgaagcacaacggccagatctgggtgctggagaatgaccgctgcagcgtgtgcagctgccagaatggatttgtgatgtgcaggaggatggtgtgtgactgtgagaaccccaccgtggacctcttctgctgcccagaatgtgacccccggctgagcagccagtgcctgcaccagaatggagagaccctgtacaacagcggggacacctgggtgcagaactgccagcagtgccgctgcctgcagggcgaggtggactgctggcccctgccctgcccagatgtggagtgtgagttcagcatcctgcctgaaaatgaatgctgcccccgctgtgtgacagacccctgccaggccgacaccatcagaaatgacatcaccaagacctgcctggatgagatgaatgtggtgcgcttcaccggcagctcctggatcaagcatggaacagagtgcaccctgtgccagtgcaagaatggccacatctgctgcagcgtggacccccagtgcctgcaggagctgtag

SEQ ID NO: 161363 - DNA, 2448 bp, synthetic construct
  misc_feature 1..2448: note = Description of Artificial Sequence: Synthetic coding sequence
  source 1..2448: mol_type = other DNA
atggagaccggcctgggcgcccccctcttcaaggcctggctgctgatctctgtgtggggcctgggcgtggaccccagcctgcagattgatgtgctgacagagctggagctgggggagagcaccaccggggtgcggcaggtgcccggcctgcacaacggcaccaaggccttcctgttccaggacacccccaggagcatcaaggccagcacagccacagctgagcagttcttccagaagctgaggaacaagcatgagttcaccatcctggtgaccctgaagcagacccacctgaacagcggggtcatcctgagcatccaccacctggaccaccgctacctggagctggagagcagcggccacagaaatgaggtgcggctgcactaccgcagcggcagccaccggccccacacagaggtgttcccctacatcctggctgatgacaagtggcacaagctgagcctggccatcagcgccagccacctgatcctgcacatcgactgcaacaagatctatgagcgggtggtggagaagcccagcacagacctgcccctgggcaccaccttctggctgggccagagaaataatgcccacggctacttcaagggcatcatgcaggatgtgcagctgctggtgatgccccagggcttcatcgcccagtgcccagacctgaacagaacctgccccacctgcaatgacttccacggcctggtgcagaagatcatggagctgcaggacatcctggccaagaccagcgccaagctgagcagagctgagcagaggatgaaccggctggaccagtgctactgtgagaggacctgcaccatgaagggcaccacctaccgggagtttgagagctggattgatggctgcaagaactgcacctgcctgaatggcaccatccagtgtgagaccctcatctgccccaacccagactgccccctgaagagcgccctggcctacgtggatggcaagtgctgcaaggagtgcaagagcatctgccagttccagggccgcacctactttgaaggagagaggaacacagtgtacagcagcagcggcgtgtgtgtgctgtatgagtgcaaggaccagaccatgaagctggtggagagcagcggctgcccagccctggactgcccagagagccaccagatcaccctgagccacagctgctgcaaggtgtgcaagggctatgacttctgcagcgagcggcacaactgcatggagaacagcatctgcaggaacctgaatgacagagctgtgtgcagctgcagagatggcttccgggccctgcgggaggacaatgcctactgtgaggacattgatgaatgtgccgagggccgccactactgccgggagaacaccatgtgtgtgaacaccccaggcagcttcatgtgcatctgcaagacaggctacatcagaattgatgactacagctgcacagaacatgatgagtgcatcaccaaccagcacaactgtgatgaaaatgccctgtgcttcaacacagtgggcggccacaactgtgtgtgcaagccaggctacacaggaaatggcaccacctgcaaggccttctgcaaggatggctgcagaaatggaggagcctgcatcgccgccaacgtgtgtgcctgcccccagggcttcaccggccccagctgtgaaacagacattgatgaatgttctgatggctttgtgcagtgtgacagccgggccaactgcatcaacctgcccggctggtaccactgtgaatgtagagatggctaccatgacaatggcatgttcagccccagcggggagagctgtgaggacattgatgaatgtggcaccggccgccacagctgtgccaatgacaccatctgcttcaacctggatggcggctatgactgccgctgcccccacggcaagaactgcaccggggactgcatccatgatggcaaggtgaagcacaacggccagatctgggtgctggagaatgaccgctgcagcgtgtgcagctgccagaatggatttgtgatgtgcaggaggatggtgtgtgactgtgagaaccccaccgtggacctcttctgctgcccagaatgtgacccccggctgagcagccagtgcctgcaccagaatggagagaccctgtacaacagcggggacacctgggtgcagaactgccagcagtgccgctgcctgcagggcgaggtggactgctggcccctgccctgcccagatgtggagtgtgagttcagcatcctgcctgaaaatgaatgctgcccccgctgtgtgacagacccctgccaggccgacaccatcagaaatgacatcaccaagacctgcctggatgagatgaatgtggtgcgcttcaccggcagctcctggatcaagcatggaacagagtgcaccctgtgccagtgcaagaatggccacatctgctgcagcgtggacccccagtgcctgcaggagctgtag

SEQ ID NO: 161364 - DNA, 2451 bp, synthetic construct
  misc_feature 1..2451: note = Description of Artificial Sequence: Synthetic coding sequence
  source 1..2451: mol_type = other DNA
atggagagccgggtgctgctgcggaccttctgcctgatcttcggcctgggcgctgtgtggggcctgggcgtggaccccagcctgcagattgatgtgctgacagagctggagctgggggagagcaccactggagtgcggcaggtgcccggcctgcacaacggcaccaaggccttcctgttccaggacacccccaggagcatcaaggccagcacagccacagctgagcagttcttccagaagctgaggaacaagcatgagttcaccatcctggtgaccctgaagcagacccacctgaacagcggggtcatcctgagcatccaccacctggaccaccgctacctggagctggagagcagcggccacagaaatgaggtgcggctgcactacagaagtggcagccaccggccccacacagaggtgttcccctacatcctggctgatgacaagtggcacaagctgagcctggccatcagcgccagccacctgatcctgcacatcgactgcaacaagatctatgaaagagtggtggagaagcccagcacagacctgcccctgggcaccaccttctggctgggccagaggaacaatgcccacggctacttcaagggcatcatgcaggatgtgcagctgctggtgatgccccagggcttcatcgcccagtgcccagacctgaacagaacctgccccacctgcaatgacttccacggcctggtgcagaagatcatggagctgcaggacatcctggccaagaccagcgccaagctgagcagagctgagcagaggatgaaccggctggaccagtgctactgtgagaggacctgcaccatgaagggcaccacctaccgggagtttgagagctggattgatggctgcaagaactgcacctgcctgaatggcaccatccagtgtgagaccctcatctgccccaacccagactgccccctgaagagcgccctggcctacgtggatggcaagtgctgcaaggagtgcaagagcatctgccagttccagggccgcacctactttgaaggagagaggaacacagtgtacagcagcagtggagtgtgtgtgctgtatgagtgcaaggaccagaccatgaagctggtggagagcagcggctgcccagccctggactgcccagagagccaccagatcaccctgagccacagctgctgcaaggtgtgcaagggctatgacttctgcagcgagcggcacaactgcatggagaacagcatctgcaggaacctgaatgacagagctgtgtgcagctgcagagatggcttccgggccctgagagaagataatgcctactgtgaagatattgatgaatgtgccgagggccgccactactgccgggagaacaccatgtgtgtgaacaccccaggcagcttcatgtgcatctgcaagacaggctacatcagaattgatgactacagctgcacagaacatgatgagtgcatcaccaaccagcacaactgtgatgaaaatgccctgtgcttcaacacagtgggcggccacaactgtgtgtgcaagccaggctacacaggaaatggcaccacctgcaaggccttctgcaaggatggctgcagaaatggaggagcctgcatcgccgccaacgtgtgtgcctgcccccagggcttcaccggccccagctgtgaaacagacattgatgagtgcagtgatggctttgtgcagtgtgacagccgggccaactgcatcaacctgcccggctggtaccactgtgagtgcagagatggctaccatgacaatggcatgttcagccccagcggggagagctgtgaagatattgatgaatgtggcaccggccgccacagctgtgccaatgacaccatctgcttcaacctggatggcggctatgactgccgctgcccccacggcaagaactgcacaggagactgcatccatgatggcaaggtgaagcacaacggccagatctgggtgctggagaatgaccgctgcagcgtgtgcagctgccagaatggatttgtgatgtgcaggaggatggtgtgtgactgtgagaaccccaccgtggacctcttctgctgcccagaatgtgacccccggctgagcagccagtgcctgcaccagaatggagagaccctgtacaacagcggggacacctgggtgcagaactgccagcagtgccgctgcctgcagggcgaggtggactgctggcccctgccctgcccagatgtggagtgtgagttcagcatcctgcctgaaaatgaatgctgcccccgctgtgtgacagacccctgccaggccgacaccatcagaaatgacatcaccaagacctgcctggatgagatgaatgtggtgcgcttcaccggcagctcctggatcaagcacggcacagaatgtaccctgtgccagtgcaagaatggccacatctgctgcagcgtggacccccagtgcctgcaggagctgtag

SEQ ID NO: 161365 - DNA, 2601 bp, synthetic construct
  misc_feature 1..2601: note = Description of Artificial Sequence: Synthetic coding sequence
  source 1..2601: mol_type = other DNA
atgggcttcccccccctgctgaagggccaggccagcgccaccaggagcagcctggccagctgctcctgggtggtgttcttcctgagctgcctgagcagacatgcccctgagattgagggcggccgccgctggacagagctgatccgcaccatggagagccgggtgctgctgcggaccttctgcctgatcttcggcctgggcgctgtgtggggcctgggcgtggaccccagcctgcagattgatgtgctgacagagctggagctgggggagagcaccactggagtgcggcaggtgcccggcctgcacaacggcaccaaggccttcctgttccaggacacccccaggagcatcaaggccagcacagccacagctgagcagttcttccagaagctgaggaacaagcatgagttcaccatcctggtgaccctgaagcagacccacctgaacagcggggtcatcctgagcatccaccacctggaccaccgctacctggagctggagagcagcggccacagaaatgaggtgcggctgcactacagaagtggcagccaccggccccacacagaggtgttcccctacatcctggctgatgacaagtggcacaagctgagcctggccatcagcgccagccacctgatcctgcacatcgactgcaacaagatctatgaaagagtggtggagaagcccagcacagacctgcccctgggcaccaccttctggctgggccagaggaacaatgcccacggctacttcaagggcatcatgcaggatgtgcagctgctggtgatgccccagggcttcatcgcccagtgcccagacctgaacagaacctgccccacctgcaatgacttccacggcctggtgcagaagatcatggagctgcaggacatcctggccaagaccagcgccaagctgagcagagctgagcagaggatgaaccggctggaccagtgctactgtgagaggacctgcaccatgaagggcaccacctaccgggagtttgagagctggattgatggctgcaagaactgcacctgcctgaatggcaccatccagtgtgagaccctcatctgccccaacccagactgccccctgaagagcgccctggcctacgtggatggcaagtgctgcaaggagtgcaagagcatctgccagttccagggccgcacctactttgaaggagagaggaacacagtgtacagcagcagtggagtgtgtgtgctgtatgagtgcaaggaccagaccatgaagctggtggagagcagcggctgcccagccctggactgcccagagagccaccagatcaccctgagccacagctgctgcaaggtgtgcaagggctatgacttctgcagcgagcggcacaactgcatggagaacagcatctgcaggaacctgaatgacagagctgtgtgcagctgcagagatggcttccgggccctgagagaagataatgcctactgtgaagatattgatgaatgtgccgagggccgccactactgccgggagaacaccatgtgtgtgaacaccccaggcagcttcatgtgcatctgcaagacaggctacatcagaattgatgactacagctgcacagaacatgatgagtgcatcaccaaccagcacaactgtgatgaaaatgccctgtgcttcaacacagtgggcggccacaactgtgtgtgcaagccaggctacacaggaaatggcaccacctgcaaggccttctgcaaggatggctgcagaaatggaggagcctgcatcgccgccaacgtgtgtgcctgcccccagggcttcaccggccccagctgtgaaacagacattgatgagtgcagtgatggctttgtgcagtgtgacagccgggccaactgcatcaacctgcccggctggtaccactgtgagtgcagagatggctaccatgacaatggcatgttcagccccagcggggagagctgtgaagatattgatgaatgtggcaccggccgccacagctgtgccaatgacaccatctgcttcaacctggatggcggctatgactgccgctgcccccacggcaagaactgcacaggagactgcatccatgatggcaaggtgaagcacaacggccagatctgggtgctggagaatgaccgctgcagcgtgtgcagctgccagaatggatttgtgatgtgcaggaggatggtgtgtgactgtgagaaccccaccgtggacctcttctgctgcccagaatgtgacccccggctgagcagccagtgcctgcaccagaatggagagaccctgtacaacagcggggacacctgggtgcagaactgccagcagtgccgctgcctgcagggcgaggtggactgctggcccctgccctgcccagatgtggagtgtgagttcagcatcctgcctgaaaatgaatgctgcccccgctgtgtgacagacccctgccaggccgacaccatcagaaatgacatcaccaagacctgcctggatgagatgaatgtggtgcgcttcaccggcagctcctggatcaagcacggcacagaatgtaccctgtgccagtgcaagaatggccacatctgctgcagcgtggacccccagtgcctgcaggagctgtag

SEQ ID NO: 161366 - DNA, 2451 bp, synthetic construct; identical to SEQ ID NO: 161364
  misc_feature 1..2451: note = Description of Artificial Sequence: Synthetic coding sequence
  source 1..2451: mol_type = other DNA

SEQ ID NO: 161367 - DNA, 1734 bp, synthetic construct
  misc_feature 1..1734: note = Description of Artificial Sequence: Synthetic coding sequence
  source 1..1734: mol_type = other DNA
atggagaccggcctgggcgcccccctcttcaaggcctggctgctgatctctgtgtggggcctgggcgtggaccccagcctgcagattgatgtgctgacagagctggagctgggggagagcaccaccggggtgcggcaggtgcccggcctgcacaacggcaccaaggccttcctgttccaggacacccccaggagcatcaaggccagcacagccacagctgagcagttcttccagaagctgaggaacaagcatgagttcaccatcctggtgaccctgaagcagacccacctgaacagcggggtcatcctgagcatccaccacctggaccaccgctacctggagctggagagcagcggccacagaaatgaggtgcggctgcactaccgcagcggcagccaccggccccacacagaggtgttcccctacatcctggctgatgacaagtggcacaagctgagcctggccatcagcgccagccacctgatcctgcacatcgactgcaacaagatctatgagcgggtggtggagaagcccagcacagacctgcccctgggcaccaccttctggctgggccagagaaataatgcccacggctacttcaagggcatcatgcaggatgtgcagctgctggtgatgccccagggcttcatcgcccagtgcccagacctgaacagaacctgccccacctgcaatgacttccacggcctggtgcagaagatcatggagctgcaggacatcctggccaagaccagcgccaagctgagcagagctgagcagaggatgaaccggctggaccagtgctactgtgagaggacctgcaccatgaagggcaccacctaccgggagtttgagagctggattgatggctgcaagaactgcacctgcctgaatggcaccatccagtgtgagaccctcatctgccccaacccagactgccccctgaagagcgccctggcctacgtggatggcaagtgctgcaaggagtgcaagagcatctgccagttccagggccgcacctactttgaaggagagaggaacacagtgtacagcagcagcggcgtgtgtgtgctgtatgagtgcaaggaccagaccatgaagctggtggagagcagcggctgcccagccctggactgcccagagagccaccagatcaccctgagccacagctgctgcaaggtgtgcaagggctatgacttctgcagcgagcggcacaactgcatggagaacagcatctgcaggaacctgaatgacagagctgtgtgcagctgcagagatggcttccgggccctgcgggaggacaatgcctactgtgaggacattgatgaatgtgccgagggccgccactactgccgggagaacaccatgtgtgtgaacaccccaggcagcttcatgtgcatctgcaagacaggctacatcagaattgatgactacagctgcacagaacatgatgagtgcatcaccaaccagcacaactgtgatgaaaatgccctgtgcttcaacacagtgggcggccacaactgtgtgtgcaagccaggctacacaggaaatggcaccacctgcaaggccttctgcaaggatggctgcagaaatggaggagcctgcatcgccgccaacgtgtgtgcctgcccccagggcttcaccggccccagctgtgaaacagacattgatgaatgttctgatggctttgtgcagtgtgacagccgggccaactgcatctgcctggtgcccctgtag

SEQ ID NO: 161368 - DNA, 333 bp, synthetic construct
  misc_feature 1..333: note = Description of Artificial Sequence: Synthetic coding sequence
  source 1..333: mol_type = other DNA
atggagaccggcctgggcgcccccctcttcaaggcctggctgctgatctctgtgtggggcctgggcgtggaccccagcctgcagattgatgtgctgacagagctggagctgggggagagcaccaccggggtgcggcaggtgcccggcctgcacaacggcaccaaggccttcctgttccaggacacccccaggagcatcaaggccagcacagccacagctgagcagttcttccagaagctgaggaacaagcatgagttcaccatcctggtgaccctgaagcagacccacctgaacagcggggtcatcctgagcatccaccacctggaccactag

SEQ ID NO: 161369 - DNA, 2448 bp, synthetic construct; identical to SEQ ID NO: 161363
  misc_feature 1..2448: note = Description of Artificial Sequence: Synthetic coding sequence
  source 1..2448: mol_type = other DNA

SEQ ID NO: 161370 - DNA, 69 bp, synthetic construct
  misc_feature 1..69: note = Description of Artificial Sequence: Synthetic coding sequence
  source 1..69: mol_type = other DNA
atggagagccgggtgctgctgcggaccttctgcctgatcttcggcctgggcgctgtgtggggcctgtag

SEQ ID NO: 161371 - DNA, 966 bp, synthetic construct
  misc_feature 1..966: note = Description of Artificial Sequence: Synthetic coding sequence
  source 1..966: mol_type = other DNA
atggagagccgggtgctgctgcggaccttctgcctgatcttcggcctgggcgctgtgtggggcctgggcgtggaccccagcctgcagattgatgtgctgacagagctggagctgggggagagcaccactggagtgcggcaggtgcccggcctgcacaacggcaccaaggccttcctgttccaggacacccccaggagcatcaaggccagcacagccacagctgagcagttcttccagaagctgaggaacaagcatgagttcaccatcctggtgaccctgaagcagacccacctgaacagcggggtcatcctgagcatccaccacctggaccaccgctacctggagctggagagcagcggccacagaaatgaggtgcggctgcactacagaagtggcagccaccggccccacacagaggtgttcccctacatcctggctgatgacaagtggcacaagctgagcctggccatcagcgccagccacctgatcctgcacatcgactgcaacaagatctatgaaagagtggtggagaagcccagcacagacctgcccctgggcaccaccttctggctgggccagaggaacaatgcccacggctacttcaagggcatcatgcaggatgtgcagctgctggtgatgccccagggcttcatcgcccagtgcccagacctgaacagaacctgccccacctgcaatgacttccacggcctggtgcagaagatcatggagctgcaggacatcctggccaagaccagcgccaagctgagcagagctgagcagaggatgaaccggctggaccagtgctactgtgagaggacctgcaccatgaagggcaccacctaccgggagtttgagagctggattgatggctgcaagaactgcacctgcctgaatggcaccatccagtgtgagaccctcatctgccccaacccagactgccccctgaagagcgccctggcctactag

SEQ ID NO: 161372 - DNA, 4386 bp, synthetic construct
  misc_feature 1..4386: note = Description of Artificial Sequence: Synthetic coding sequence
  source 1..4386: mol_type = other DNA
atggctgctgagcggggggcccggcggctgctgagcacccccagcttctggctgtactgcctgctgctgctgggccggcgggcccctggagctgctgctgcccggagcggcagcgccccccagagccctggggccagcatccgcaccttcacccccttctacttcctggtggagcctgtggacaccctgtctgtgcggggcagcagcgtcatcctgaactgcagcgcctacagcgagcccagccccaagattgagtggaagaaggatggcaccttcctgaacctggtgtctgatgaccggcggcagctgctgcctgatggcagcctcttcatcagcaatgtggtgcacagcaagcacaacaagccagatgagggctactaccagtgtgtggccaccgtggagagcctgggcaccatcatcagcaggacagccaagctgattgtggccggcctgccccgcttcaccagccagcctgagcccagctctgtgtatgccggcaacaatgccatcctgaactgtgaggtgaatgctgacctggtgccctttgtgcgctgggagcagaaccggcagcccctgctgctggatgacagagtcatcaagctgcccagcggcatgctggtgatcagcaatgccacagaaggagatggcggcctgtaccgctgtgtggtggagagcggcggcccccccaagtacagtgatgaggtggagctgaaggtgctgcctgaccctgaggtgatcagtgacctggtgttcctgaagcagcccagccccctggtgcgggtcatcggccaggatgtggtgctgccctgtgtggccagcggcctgcccacccccaccatcaagtggatgaagaatgaggaggccctggacacagagagcagcgagcggctggtgctgctggccggcggcagcctggagatcagtgatgtgacagaagatgatgctggcacctacttctgcatcgctgacaatggaaatgagaccatcgaggcccaggccgagctgactgtgcaggcccagcctgagttcctgaagcagcccaccaacatctatgcccacgagagcatggacatcgtgtttgaatgtgaggtgacaggcaagcccacccccaccgtgaagtgggtgaagaatggagacatggtgatccccagcgactacttcaagatcgtgaaggagcacaacctgcaggtgctgggcctggtgaagagtgatgagggcttctaccagtgcatcgcagaaaatgatgtgggcaatgcccaggccggggcccagctgatcatcctggagcacgccccagccaccaccggccccctgcccagcgcccccagagatgtggtggccagcctggtgtccacccgcttcatcaagctgacctggaggaccccagccagtgacccccatggagacaacctgacctacagcgtcttctacaccaaggagggcatcgcccgggagcgggtggagaacaccagccaccctggagagatgcaggtgaccatccagaacctgatgcctgccaccgtgtacatcttccgggtgatggcccagaacaagcacggcagcggggagagcagcgcccccctgcgggtggagacccagcctgaggtgcagctgcccggccctgcccccaacctgcgggcctatgctgccagccccaccagcatcaccgtgacctgggagacccctgtgtctggaaatggagagatccagaactacaagctgtactacatggagaagggcacagacaaggagcaggatgtggatgtgagcagccacagctacaccatcaatggcctgaagaagtacacagagtacagcttccgggtggtggcctacaacaagcacggccctggggtgtccaccccagatgtggccgtgaggaccctgagtgatgtgcccagcgctgccccccagaacctgagcctggaggtgaggaacagcaagagcatcatgatccactggcagcccccagccccagccacccagaatggccagatcaccggctacaagatccgctacaggaaggccagcaggaagagtgatgtgacagagaccctggtgtctggcacccagctgagccagctgattgagggcctggaccggggcacagagtacaacttccgggtggccgccctgaccatcaatggaactggacctgccacagactggctgtctgctgagacctttgaaagtgacctggatgagaccagggtgcctgaggtgcccagcagcctgcacgtgcggcccctggtgaccagcatcgtggtgtcctggaccccacctgagaaccagaacatcgtggtgcggggctacgccatcggctatggaattggcagcccccacgcccagaccatcaaggtggactacaagcagcgctactacaccatcgagaacctggaccccagcagccactacgtgatcaccctgaaggccttcaacaacgtgggggagggcatccccctgtatgagagcgctgtgacccggccccacacagacaccagcgaggtggacctgtttgtgatcaatgccccctacacccctgtgcctgaccccacccccatgatgcctcctgtgggcgtgcaggccagcatcctgagccatgacaccatccgcatcacctgggccgacaacagcctgcccaagcaccagaagatcacagacagccgctactacacagtgcgctggaagaccaacatcccagccaacaccaagtacaagaatgccaatgccaccaccctgagctacctggtgacaggcctgaagcccaacaccctgtatgagttctctgtgatggtgaccaagggccgccgcagcagcacctggagcatgacagcccacggcaccacctttgagctggtgcccaccagcccccccaaggatgtgacagtggtgtccaaggagggcaagcccaagaccatcatcgtgaactggcagcccccatctgaggccaacgggaagatcaccggctacatcatctactacagcacagatgtgaatgctgagatccatgactgggtgattgagcctgtggtgggcaaccggctgacccaccagatccaggagctgaccctggacaccccctactacttcaagatccaggccaggaacagcaagggcatgggccccatgtctgaggccgtgcagttccgcacccccaaggctgacagcagtgacaagatgcccaatgaccaggccagcggcagcggcggcaagggcagccggctgcctgacctgggcagtgactacaagccacccatgagcggcagcaacagcccccacggcagccccaccagccccctggacagcaacatgctgctggtgatcatcgtgtctgtgggcgtcatcaccatcgtggtggtggtgatcatcgctgtgttctgcaccaggaggaccaccagccaccagaagaagaagagagctgcctgcaagtctgtgaatggcagccacaagtacaagggcaacagcaaggatgtgaagcccccagacctgtggatccaccacgagcggctggagctgaagcccatcgacaagagcccagaccccaaccccatcatgacagacacccccatccccaggaacagccaggacatcacccctgtggacaacagcatggacagcaacatccaccagaggaggaacagctaccggggccacgagagtgaagattccatgagcaccctggccggccggcggggcatgaggcccaagatgatgatgccctttgacagccagcccccccagcccgtcatcagcgcccaccccatccacagcctggacaacccccaccaccacttccacagcagcagcctggccagccctgcccggagccacctgtaccaccctggcagcccctggcccatcggcacctccatgagcctgagtgaccgggccaacagcacagagagcgtgaggaacacccccagcacagacaccatgcctgccagcagcagccagacctgctgcacagaccaccaggaccctgagggcgccaccagcagcagctacctggccagcagccaggaggaggacagcggccagagcctgcccacagcccacgtgcggcccagccaccccctgaagagctttgctgtgcctgccatccccccacctggcccccccacctatgaccctgccctgcccagcacccccctgctgagccagcaggccctgaaccaccacatccacagcgtgaagacagccagcatcggcaccctgggccgcagccggccccccatgcctgtggtggtgcccagcgcccctgaggtgcaggagaccaccaggatgctggaggacagcgagagcagctatgagccagatgagctgaccaaggagatggcccacctggagggcctgatgaaggacctgaatgccatcaccacagcctag

SEQ ID NO: 161373 - DNA, 4386 bp, synthetic construct; identical to SEQ ID NO: 161372
  misc_feature 1..4386: note = Description of Artificial Sequence: Synthetic coding sequence
  source 1..4386: mol_type = other DNA

SEQ ID NO: 161374 - DNA, 3519 bp, synthetic construct
  misc_feature 1..3519: note = Description of Artificial Sequence: Synthetic coding sequence
  source 1..3519: mol_type = other DNA
atgaagaatgaggaggccctggacacagagagcagcgagcggctggtgctgctggccggcggcagcctggagatcagtgatgtgacagaagatgatgctggcacctacttctgcatcgctgacaatggaaatgagaccatcgaggcccaggccgagctgactgtgcaggcccagcctgagttcctgaagcagcccaccaacatctatgcccacgagagcatggacatcgtgtttgaatgtgaggtgacaggcaagcccacccccaccgtgaagtgggtgaagaatggagacatggtgatccccagcgactacttcaagatcgtgaaggagcacaacctgcaggtgctgggcctggtgaagagtgatgagggcttctaccagtgcatcgcagaaaatgatgtgggcaatgcccaggccggggcccagctgatcatcctggagcatgatgtggccatccccaccctgccccccaccagcctgaccagcgccaccacagaccacctggccccagccaccaccggccccctgcccagcgcccccagagatgtggtggccagcctggtgtccacccgcttcatcaagctgacctggaggaccccagccagtgacccccatggagacaacctgacctacagcgtcttctacaccaaggagggcatcgcccgggagcgggtggagaacaccagccaccctggagagatgcaggtgaccatccagaacctgatgcctgccaccgtgtacatcttccgggtgatggcccagaacaagcacggcagcggggagagcagcgcccccctgcgggtggagacccagcctgaggtgcagctgcccggccctgcccccaacctgcgggcctatgctgccagccccaccagcatcaccgtgacctgggagacccctgtgtctggaaatggagagatccagaactacaagctgtactacatggagaagggcacagacaaggagcaggatgtggatgtgagcagccacagctacaccatcaatggcctgaagaagtacacagagtacagcttccgggtggtggcctacaacaagcacggccctggggtgtccaccccagatgtggccgtgaggaccctgagtgatgtgcccagcgctgccccccagaacctgagcctggaggtgaggaacagcaagagcatcatgatccactggcagcccccagccccagccacccagaatggccagatcaccggctacaagatccgctacaggaaggccagcaggaagagtgatgtgacagagaccctggtgtctggcacccagctgagccagctgattgagggcctggaccggggcacagagtacaacttccgggtggccgccctgaccatcaatggaactggacctgccacagactggctgtctgctgagacctttgaaagtgacctggatgagaccagggtgcctgaggtgcccagcagcctgcacgtgcggcccctggtgaccagcatcgtggtgtcctggaccccacctgagaaccagaacatcgtggtgcggggctacgccatcggctatggaattggcagcccccacgcccagaccatcaaggtggactacaagcagcgctactacaccatcgagaacctggaccccagcagccactacgtgatcaccctgaaggccttcaacaacgtgggggagggcatccccctgtatgagagcgctgtgacccggccccacacagtgcctgaccccacccccatgatgcctcctgtgggcgtgcaggccagcatcctgagccatgacaccatccgcatcacctgggccgacaacagcctgcccaagcaccagaagatcacagacagccgctactacacagtgcgctggaagaccaacatcccagccaacaccaagtacaagaatgccaatgccaccaccctgagctacctggtgacaggcctgaagcccaacaccctgtatgagttctctgtgatggtgaccaagggccgccgcagcagcacctggagcatgacagcccacggcaccacctttgagctggtgcccaccagcccccccaaggatgtgacagtggtgtccaaggagggcaagcccaagaccatcatcgtgaactggcagcccccatctgaggccaacgggaagatcaccggctacatcatctactacagcacagatgtgaatgctgagatccatgactgggtgattgagcctgtggtgggcaaccggctgacccaccagatccaggagctgaccctggacaccccctactacttcaagatccaggccaggaacagcaagggcatgggccccatgtctgaggccgtgcagttccgcacccccaaggccagcggcagcggcggcaagggcagccggctgcctgacctgggcagtgactacaagccacccatgagcggcagcaacagcccccacggcagccccaccagccccctggacagcaacatgctgctggtgatcatcgtgtctgtgggcgtcatcaccatcgtggtggtggtgatcatcgctgtgttctgcaccaggaggaccaccagccaccagaagaagaagagagctgcctgcaagtctgtgaatggcagccacaagtacaagggcaacagcaaggatgtgaagcccccagacctgtggatccaccacgagcggctggagctgaagcccatcgacaagagcccagaccccaaccccatcatgacagacacccccatccccaggaacagccaggacatcacccctgtggacaacagcatggacagcaacatccaccagaggagaaattcctaccggggccatgaaagtgaggacagcatgagcaccctggccggcagaagaggcatgaggcccaagatgatgatgccctttgacagccagcccccccagcctgtgatcagcgcccaccccatccacagcctggacaacccccaccaccacttccacagcagcagcctggccagccctgcccggagccacctgtaccaccctggcagcccctggcccatcggcacctccatgagcctgagtgaccgggccaacagcacagaatctgtgaggaacacccccagcacagacaccatgcctgccagcagcagccagacctgctgcacagaccaccaggaccctgagggcgccaccagcagcagctacctggccagcagccaggaggaggacagcggccagagcctgcccacagcccacgtgcggcccagccaccccctgaagagctttgctgtgcctgccatccccccacctggcccccccacctatgaccctgccctgcccagcacccccctgctgagccagcaggccctgaaccaccacatccacagcgtgaagacagccagcatcggcaccctgggccgcagcaggcctcccatgcctgtggtggtgcccagcgcccctgaggtgcaggagaccaccaggatgctggaggacagcgagagcagctatgagccagatgagctgaccaaggagatggcccacctggagggcctgatgaaggacctgaatgccatcaccacagcctag

SEQ ID NO: 161375 - DNA, 4353 bp, synthetic construct
  misc_feature 1..4353: note = Description of Artificial Sequence: Synthetic coding sequence
  source 1..4353: mol_type = other DNA
atggctgctgagcggggggcccggcggctgctgagcacccccagcttctggctgtactgcctgctgctgctgggccggcgggcccctggagctgctgctgcccggagcggcagcgccccccagagccctggggccagcatccgcaccttcacccccttctacttcctggtggagcctgtggacaccctgtctgtgcggggcagcagcgtcatcctgaactgcagcgcctacagcgagcccagccccaagattgagtggaagaaggatggcaccttcctgaacctggtgtctgatgaccggcggcagctgctgcctgatggcagcctcttcatcagcaatgtggtgcacagcaagcacaacaagccagatgagggctactaccagtgtgtggccaccgtggagagcctgggcaccatcatcagcaggacagccaagctgattgtggccggcctgccccgcttcaccagccagcctgagcccagctctgtgtatgccggcaacaatgccatcctgaactgtgaggtgaatgctgacctggtgccctttgtgcgctgggagcagaaccggcagcccctgctgctggatgacagagtcatcaagctgcccagcggcatgctggtgatcagcaatgccacagaaggagatggcggcctgtaccgctgtgtggtggagagcggcggcccccccaagtacagtgatgaggtggagctgaaggtgctgcctgaccctgaggtgatcagtgacctggtgttcctgaagcagcccagccccctggtgcgggtcatcggccaggatgtggtgctgccctgtgtggccagcggcctgcccacccccaccatcaagtggatgaagaatgaggaggccctggacacagagagcagcgagcggctggtgctgctggccggcggcagcctggagatcagtgatgtgacagaagatgatgctggcacctacttctgcatcgctgacaatggaaatgagaccatcgaggcccaggccgagctgactgtgcaggcccagcctgagttcctgaagcagcccaccaacatctatgcccacgagagcatggacatcgtgtttgaatgtgaggtgacaggcaagcccacccccaccgtgaagtgggtgaagaatggagacatggtgatccccagcgactacttcaagatcgtgaaggagcacaacctgcaggtgctgggcctggtgaagagtgatgagggcttctaccagtgcatcgcagaaaatgatgtgggcaatgcccaggccggggcccagctgatcatcctggagcacgccccagccaccaccggccccctgcccagcgcccccagagatgtggtggccagcctggtgtccacccgcttcatcaagctgacctggaggaccccagccagtgacccccatggagacaacctgacctacagcgtcttctacaccaaggagggcatcgcccgggagcgggtggagaacaccagccaccctggagagatgcaggtgaccatccagaacctgatgcctgccaccgtgtacatcttccgggtgatggcccagaacaagcacggcagcggggagagcagcgcccccctgcgggtggagacccagcctgaggtgcagctgcccggccctgcccccaacctgcgggcctatgctgccagccccaccagcatcaccgtgacctgggagacccctgtgtctggaaatggagagatccagaactacaagctgtactacatggagaagggcacagacaaggagcaggatgtggatgtgagcagccacagctacaccatcaatggcctgaagaagtacacagagtacagcttccgggtggtggcctacaacaagcacggccctggggtgtccaccccagatgtggccgtgaggaccctgagtgatgtgcccagcgctgccccccagaacctgagcctggaggtgaggaacagcaagagcatcatgatccactggcagcccccagccccagccacccagaatggccagatcaccggctacaagatccgctacaggaaggccagcaggaagagtgatgtgacagagaccctggtgtctggcacccagctgagccagctgattgagggcctggaccggggcacagagtacaacttccgggtggccgccctgaccatcaatggaactggacctgccacagactggctgtctgctgagacctttgaaagtgacctggatgagaccagggtgcctgaggtgcccagcagcctgcacgtgcggcccctggtgaccagcatcgtggtgtcctggaccccacctgagaaccagaacatcgtggtgcggggctacgccatcggctatggaattggcagcccccacgcccagaccatcaaggtggactacaagcagcgctactacaccatcgagaacctggaccccagcagccactacgtgatcaccctgaaggccttcaacaacgtgggggagggcatccccctgtatgagagcgctgtgacccggccccacacagacaccagcgaggtggacctgtttgtgatcaatgccccctacacccctgtgcctgaccccacccccatgatgcctcctgtgggcgtgcaggccagcatcctgagccatgacaccatccgcatcacctgggccgacaacagcctgcccaagcaccagaagatcacagacagccgctactacacagtgcgctggaagaccaacatcccagccaacaccaagtacaagaatgccaatgccaccaccctgagctacctggtgacaggcctgaagcccaacaccctgtatgagttctctgtgatggtgaccaagggccgccgcagcagcacctggagcatgacagcccacggcaccacctttgagctggtgcccaccagcccccccaaggatgtgacagtggtgtccaaggagggcaagcccaagaccatcatcgtgaactggcagcccccatctgaggccaacgggaagatcaccggctacatcatctactacagcacagatgtgaatgctgagatccatgactgggtgattgagcctgtggtgggcaaccggctgacccaccagatccaggagctgaccctggacaccccctactacttcaagatccaggccaggaacagcaagggcatgggccccatgtctgaggccgtgcagttccgcacccccaaggccagcggcagcggcggcaagggcagccggctgcctgacctgggcagtgactacaagccacccatgagcggcagcaacagcccccacggcagccccaccagccccctggacagcaacatgctgctggtgatcatcgtgtctgtgggcgtcatcaccatcgtggtggtggtgatcatcgctgtgttctgcaccaggaggaccaccagccaccagaagaagaagagagctgcctgcaagtctgtgaatggcagccacaagtacaagggcaacagcaaggatgtgaagcccccagacctgtggatccaccacgagcggctggagctgaagcccatcgacaagagcccagaccccaaccccatcatgacagacacccccatccccaggaacagccaggacatcacccctgtggacaacagcatggacagcaacatccaccagaggagaaattcctaccggggccatgaaagtgaggacagcatgagcaccctggccggcagaagaggcatgaggcccaagatgatgatgccctttgacagccagcccccccagcctgtgatcagcgcccaccccatccacagcctggacaacccccaccaccacttccacagcagcagcctggccagccctgcccggagccacctgtaccaccctggcagcccctggcccatcggcacctccatgagcctgagtgaccgggccaacagcacagaatctgtgaggaacacccccagcacagacaccatgcctgccagcagcagccagacctgctgcacagaccaccaggaccctgagggcgccaccagcagcagctacctggccagcagccaggaggaggacagcggccagagcctgcccacagcccacgtgcggcccagccaccccctgaagagctttgctgtgcctgccatccccccacctggcccccccacctatgaccctgccctgcccagcacccccctgctgagccagcaggccctgaaccaccacatccacagcgtgaagacagccagcatcggcaccctgggccgcagcaggcctcccatgcctgtggtggtgcccagcgcccctgaggtgcaggagaccaccaggatgctggaggacagcgagagcagctatgagccagatgagctgaccaaggagatggcccacctggagggcctgatgaaggacctgaatgccatcaccacagcctag

SEQ ID NO: 161376 - DNA, 4227 bp, synthetic construct
  misc_feature 1..4227: note = Description of Artificial Sequence: Synthetic coding sequence
  source 1..4227: mol_type = other DNA
atggctgctgagcggggggcccggcggctgctgagcacccccagcttctggctgtactgcctgctgctgctgggccggcgggcccctggagctgctgctgcccggagcggcagcgccccccagagccctggggccagcatccgcaccttcacccccttctacttcctggtggagcctgtggacaccctgtctgtgcggggcagcagcgtcatcctgaactgcagcgcctacagcgagcccagccccaagattgagtggaagaaggatggcaccttcctgaacctggtgtctgatgaccggcggcagctgctgcctgatggcagcctcttcatcagcaatgtggtgcacagcaagcacaacaagccagatgagggctactaccagtgtgtggccaccgtggagagcctgggcaccatcatcagcaggacagccaagctgattgtggccggcctgccccgcttcaccagccagcctgagcccagctctgtgtatgccggcaacaatgccatcctgaactgtgaggtgaatgctgacctggtgccctttgtgcgctgggagcagaaccggcagcccctgctgctggatgacagagtcatcaagctgcccagcggcatgctggtgatcagcaatgccacagaaggagatggcggcctgtaccgctgtgtggtggagagcggcggcccccccaagtacagtgatgaggtggagctgaaggtgctgcctgaccctgaggtgatcagtgacctggtgttcctgaagcagcccagccccctggtgcgggtcatcggccaggatgtggtgctgccctgtgtggccagcggcctgcccacccccaccatcaagtggatgaagaatgaggaggccctggacacagagagcagcgagcggctggtgctgctggccggcggcagcctggagatcagtgatgtgacagaagatgatgctggcacctacttctgcatcgctgacaatggaaatgagaccatcgaggcccaggccgagctgactgtgcaggcccagcctgagttcctgaagcagcccaccaacatctatgcccacgagagcatggacatcgtgtttgaatgtgaggtgacaggcaagcccacccccaccgtgaagtgggtgaagaatggagacatggtgatccccagcgactacttcaagatcgtgaaggagcacaacctgcaggtgctgggcctggtgaagagtgatgagggcttctaccagtgcatcgcagaaaatgatgtgggcaatgcccaggccggggcccagctgatcatcctggagcacgccccagccaccaccggccccctgcccagcgcccccagagatgtggtggccagcctggtgtccacccgcttcatcaagctgacctggaggaccccagccagtgacccccatggagacaacctgacctacagcgtcttctacaccaaggagggcatcgcccgggagcgggtggagaacaccagccaccctggagagatgcaggtgaccatccagaacctgatgcctgccaccgtgtacatcttccgggtgatggcccagaacaagcacggcagcggggagagcagcgcccccctgcgggtggagacccagcctgaggtgcagctgcccggccctgcccccaacctgcgggcctatgctgccagccccaccagcatcaccgtgacctgggagacccctgtgtctggaaatggagagatccagaactacaagctgtactacatggagaagggcacagacaaggagcaggatgtggatgtgagcagccacagctacaccatcaatggcctgaagaagtacacagagtacagcttccgggtggtggcctacaacaagcacggccctggggtgtccaccccagatgtggccgtgaggaccctgagtgatgtgcccagcgctgccccccagaacctgagcctggaggtgaggaacagcaagagcatcatgatccactggcagcccccagccccagccacccagaatggccagatcaccggctacaagatccgctacaggaaggccagcaggaagagtgatgtgacagagaccctggtgtctggcacccagctgagccagctgattgagggcctggaccggggcacagagtacaacttccgggtggccgccctgaccatcaatggaactggacctgccacagactggctgtctgctgagacctttgaaagtgacctggatgagaccagggtgcctgaggtgcccagcagcctgcacgtgcggcccctggtgaccagcatcgtggtgtcctggaccccacctgagaaccagaacatcgtggtgcggggctacgccatcggctatggaattggcagcccccacgcccagaccatcaaggtggactacaagcagcgctactacaccatcgagaacctggaccccagcagccactacgtgatcaccctgaaggccttcaacaacgtgggggagggcatccccctgtatgagagcgctgtgacccggccccacacagacaccagcgaggtggacctgtttgtgatcaatgccccctacacccctgtgcctgaccccacccccatgatgcctcctgtgggcgtgcaggccagcatcctgagccatgacaccatccgcatcacctgggccgacaacagcctgcccaagcaccagaagatcacagacagccgctactacacagtgcgctggaagaccaacatcccagccaacaccaagtacaagaatgccaatgccaccaccctgagctacctggtgacaggcctgaagcccaacaccctgtatgagttctctgtgatggtgaccaagggccgccgcagcagcacctggagcatgacagcccacggcaccacctttgagctggtgcccaccagcccccccaaggatgtgacagtggtgtccaaggagggcaagcccaagaccatcatcgtgaactggcagcccccatctgaggccaacgggaagatcaccggctacatcatctactacagcacagatgtgaatgctgagatccatgactgggtgattgagcctgtggtgggcaaccggctgacccaccagatccaggagctgaccctggacaccccctactacttcaagatccaggccaggaacagcaagggcatgggccccatgtctgaggccgtgcagttccgcacccccaaggctgacagcagtgacaagatgcccaatgaccaggccagcggcagcggcggcaagggcagccggctgcctgacctgggcagtgactacaagccacccatgagcggcagcaacagcccccacggcagccccaccagccccctggacagcaacatgctgctggtgatcatcgtgtctgtgggcgtcatcaccatcgtggtggtggtgatcatcgctgtgttctgcaccaggaggaccaccagccaccagaagaagaagagagctgcctgcaagtctgtgaatggcagccacaagtacaagggcaacagcaaggatgtgaagcccccagacctgtggatccaccacgagcggctggagctgaagcccatcgacaagagcccagaccccaaccccatcatgacagacacccccatccccaggaacagccaggacatcacccctgtggacaacagcatggacagcaacatccaccagaggaggaacagctaccggggccacgagagtgaagattccatgagcaccctggccggccggcggggcatgaggcccaagatgatgatgccctttgacagccagcccccccagcagagcgtgaggaacacccccagcacagacaccatgcctgccagcagcagccagacctgctgcacagaccaccaggaccctgagggcgccaccagcagcagctacctggccagcagccaggaggaggacagcggccagagcctgcccacagcccacgtgcggcccagccaccccctgaagagctttgctgtgcctgccatccccccacctggcccccccacctatgaccctgccctgcccagcacccccctgctgagccagcaggccctgaaccaccacatccacagcgtgaagacagccagcatcggcaccctgggccgcagcaggcctcccatgcctgtggtggtgcccagcgcccctgaggtgcaggagaccaccaggatgctggaggacagcgagagcagctatgagccagatgagctgaccaaggagatggcccacctggagggcctgatgaaggacctgaatgccatcaccacagcctag

SEQ ID NO: 161377 - DNA, 1074 bp, synthetic construct
  misc_feature 1..1074: note = Description of Artificial Sequence: Synthetic coding sequence
  source 1..1074: mol_type = other DNA
atgcagagcgtgcagagcaccagcttctgcctgaggaagcagtgcctgtgcctgaccttcctgctgctgcacctgctgggccaggtggccgccacccagcgctgccccccccagtgccccggccgctgcccagccaccccacccacctgtgcccctggggtgcgggctgtgctggatggctgcagctgctgcctggtgtgtgcccggcagagaggagagagctgcagcgacctggagccctgtgatgagagcagcggcctgtactgtgacagatctgctgaccccagcaaccagacaggcatctgcacagctgtggagggggacaactgtgtgtttgatggagtcatctacagaagtggagagaagttccagcccagctgcaagttccagtgcacctgcagagatggccagatcggctgtgtgccccgctgccagctggatgtgctgctgcctgagcccaactgcccagcccccaggaaggtggaggtgcctggagagtgctgtgagaagtggatctgtggcccagatgaggaggacagcctgggcggcctgaccctggccgcctacagacctgaggccaccctgggcgtggaggtgtctgacagctctgtgaactgcatcgagcagaccacagagtggacagcctgcagcaagagctgtggcatgggcttcagcaccagggtgaccaacagaaaccggcagtgtgagatgctgaagcagacccggctgtgcatggtgcggccctgtgagcaggagcctgagcagcccacagacaagaagggcaagaagtgcctgcggaccaagaagagcctgaaggccatccacctgcagttcaagaactgcaccagcctgcacacctacaagccccgcttctgtggggtgtgcagtgatggccgctgctgcaccccccacaacaccaagaccatccaggccgagttccagtgcagccctggccagatcgtgaagaagcctgtgatggtgattggcacctgcacctgccacaccaactgccccaagaacaatgaggccttcctgcaggagctggagctgaagaccacccggggcaagatgtag

SEQ ID NO: 161378 - DNA, 2202 bp, synthetic construct
  misc_feature 1..2202: note = Description of Artificial Sequence: Synthetic coding sequence
  source 1..2202: mol_type = other DNA
atgctggcccggcggcagagggaccccctgcaggccctgcggcggaggaaccaggagctgaagcagcaggtggacagcctgctgtctgagagccagctgaaggaggccctggagcccaacaagaggcagcacatctaccagcgctgcatccagctgaagcaggccattgatgagaacaagaatgccctgcagaagctgagcaaggcagatgagagcgcccctgtggccaactacaaccagaggaaggaggaggagcacaccctgctggacaagctgacccagcagctgcagggcctggccgtgaccatcagccgggagaacatcacagaggtgggcgcccccacagaggaggaggaggagagcgagagcgaggacagtgaagattctggaggagaggaggaggatgctgaggaggaggaggaggagaaggaggagaatgaaagccacaagtggagcactggagaggagtacatcgctgtgggggacttcaccgcccagcaggtgggggacctgaccttcaagaagggggagatcctgctggtgattgagaagaagccagatggctggtggatcgccaaggatgccaagggaaatgaaggcctggtgcccaggacctacctggagccctacagcgaggaggaggagggccaggagagcagcgaggagggcagcgaggaggatgtggaggccgtggatgaaacagcagatggagctgaggtgaagcagaggacagacccccactggagcgctgtgcagaaggccatcagcgaggccggcatcttctgcctggtgaaccacgtgtccttctgctacctgattgtgctgatgaggaacaggatggagaccgtggaggacaccaatggaagtgaaacaggcttccgggcctggaatgtgcagagccggggccgcatcttcctggtgtccaagcctgtgctgcagcagatcaacacagtggatgtgctgaccaccatgggcgccatcccagctggcttccggcccagcaccctgagccagctgctggaggagggcaaccagttccgggccaactacttcctgcagcctgagctgatgcccagccagctggccttccgggacctgatgtgggatgccacagagggcaccatccgcagccggcccagccgcatcagcctcatcctgaccctgtggagctgcaagatgatccccctgcccggcatgagcatccaggtgctgagcagacatgtgcggctgtgcctgtttgatggcaacaaggtgctgagcaacatccacacagtgcgggccacctggcagcccaagaagcccaagacctggaccttcagcccccaggtgacccgcatcctgccctgcctgctggatggagactgcttcatccgcagcaacagcgccagcccagacctgggcatcctgtttgagctgggcatctcctacatccggaacagcactggagagcggggggagctgagctgtggctgggtgttcctgaagctgtttgatgccagcggcgtgcccatcccagccaagacctatgagctgttcctgaatggaggcaccccctatgaaaaaggaattgaggtggaccccagcatcagcagaagagcccacggcagcgtcttctaccagatcatgaccatgaggcggcagccccagctgctggtgaagctgcggagcctgaacagaagaagcagaaatgtgctgagcctgctgcctgagaccctgattggcaacatgtgcagcatccacctgctgatcttctaccggcagatcctgggagatgtgctgctgaaggacaggatgagcctgcagagcacagacctgatcagccaccccatgctggccaccttccccatgctgctggagcagccagatgtgatggatgccctgcggagctcctgggccggcaaggagagcaccctgaagaggtctgagaagagggacaaggagttcctgaagagcaccttcctgctggtgtaccatgactgtgtgctgcccctgctgcacagcacccggctgccccccttccgctgggccgaggaggagacagaaacagcccgctggaaggtgatcacagacttcctgaagcagaaccaggagaaccagggcgccctgcaggccctgctgagcccagatggagtgcatgagccctttgacctgtctgagcagacctatgacttcctgggggagatgaggaagaatgctgtgtag

SEQ ID NO: 161379 - DNA, 1845 bp, synthetic construct
  misc_feature 1..1845: note = Description of Artificial Sequence: Synthetic coding sequence
  source 1..1845: mol_type = other DNA
atgctggcccggcggcagagggaccccctgcaggccctgcggcggaggaaccaggagctgaagcagcaggtggacagcctgctgtctgagagccagctgaaggaggccctggagcccaacaagaggcagcacatctaccagagggtgggcgcccccacagaggaggaggaggagagcgagagcgaggacagtgaagattctggaggagaggaggaggatgctgaggaggaggaggaggagaaggaggagaatgaaagccacaagtggagcactggagaggagtacatcgctgtgggggacttcaccgcccagcaggtgggggacctgaccttcaagaagggggagatcctgctggtgattgagaagaagccagatggctggtggatcgccaaggatgccaagggaaatgaaggcctggtgcccaggacctacctggagccctacagcgaggaggaggagggccaggagagcagcgaggagggcagcgaggaggatgtggaggccgtggatgaaacagcagatggagctgaggtgaagcagaggacagacccccactggagcgctgtgcagaaggccatcagcgagatcaacacagtggatgtgctgaccaccatgggcgccatcccagctggcttccggcccagcaccctgagccagctgctggaggagggcaaccagttccgggccaactacttcctgcagcctgagctgatgcccagccagctggccttccgggacctgatgtgggatgccacagagggcaccatccgcagccggcccagccgcatcagcctcatcctgaccctgtggagctgcaagatgatccccctgcccggcatgagcatccaggtgctgagccgccacgtgcggctgtgcctgtttgatggcaacaaggtgctgagcaacatccacacagtgcgggccacctggcagcccaagaagcccaagacctggaccttcagcccccaggtgacccgcatcctgccctgcctgctggatggagactgcttcatccgcagcaacagcgccagcccagacctgggcatcctgtttgagctgggcatctcctacatccggaacagcactggagagcggggggagctgagctgtggctgggtgttcctgaagctgtttgatgccagcggcgtgcccatcccagccaagacctatgagctgttcctgaatggaggcaccccctatgagaagggcatcgaggtggaccccagcatcagccggcgggcccacggctctgtgttctaccagatcatgaccatgaggcggcagccccagctgctggtgaagctgcggagcctgaacagaagaagcagaaatgtgctgagcctgctgcctgagaccctcatcggcaacatgtgcagcatccacctgctgatcttctaccggcagatcctgggagatgtgctgctgaaggacaggatgagcctgcagagcacagacctgatcagccaccccatgctggccaccttccccatgctgctggagcagccagatgtgatggatgccctgcggagctcctgggccggcaaggagagcaccctgaagaggtctgagaagagggacaaggagttcctgaagagcaccttcctgctggtgtaccatgactgtgtgctgcccctgctgcacagcacccggctgccccccttccgctgggccgaggaggagacagaaacagcccgctggaaggtgatcacagacttcctgaagcagaaccaggagaaccagggcgccctgcaggccctgctgagcccagatggagtgcatgagccctttgacctgtctgagcagacctatgacttcctgggggagatgaggaagaatgctgtgtag

SEQ ID NO: 161380 - DNA, 2199 bp, synthetic construct
  misc_feature 1..2199: note = Description of Artificial Sequence: Synthetic coding sequence
  source 1..2199: mol_type = other DNA
atgctggcccggcggcagagggaccccctgcaggccctgcggcggaggaaccaggagctgaagcagcaggtggacagcctgctgtctgagagccagctgaaggaggccctggagcccaacaagaggcagcacatctaccagcgctgcatccagctgaagcaggccattgatgagaacaagaatgccctgcagaagctgagcaaggcagatgagagcgcccctgtggccaactacaaccagaggaaggaggaggagcacaccctgctggacaagctgacccagcagctgcagggcctggccgtgaccatcagccgggagaacatcacagaggtgggcgcccccacagaggaggaggaggagagcgagagcgaggacagtgaagattctggaggagaggaggaggatgctgaggaggaggaggaggagaaggaggagaatgaaagccacaagtggagcactggagaggagtacatcgctgtgggggacttcaccgcccagcaggtgggggacctgaccttcaagaagggggagatcctgctggtgattgagaagaagccagatggctggtggatcgccaaggatgccaagggaaatgaaggcctggtgcccaggacctacctggagccctacagcgaggaggaggagggccaggagagcagcgaggagggcagcgaggaggatgtggaggccgtggatgaaacagcagatggagctgaggtgaagcagaggacagacccccactggagcgctgtgcagaaggccatcagcgaggccggcatcttctgcctggtgaaccacgtgtccttctgctacctgattgtgctgatgaggaacaggatggagaccgtggaggacaccaatggaagtgaaacaggcttccgggcctggaatgtgcagagccggggccgcatcttcctggtgtccaagcctgtgctgcagatcaacacagtggatgtgctgaccaccatgggcgccatcccagctggcttccggcccagcaccctgagccagctgctggaggagggcaaccagttccgggccaactacttcctgcagcctgagctgatgcccagccagctggccttccgggacctgatgtgggatgccacagagggcaccatccgcagccggcccagccgcatcagcctcatcctgaccctgtggagctgcaagatgatccccctgcccggcatgagcatccaggtgctgagccgccacgtgcggctgtgcctgtttgatggcaacaaggtgctgagcaacatccacacagtgcgggccacctggcagcccaagaagcccaagacctggaccttcagcccccaggtgacccgcatcctgccctgcctgctggatggagactgcttcatccgcagcaacagcgccagcccagacctgggcatcctgtttgagctgggcatctcctacatccggaacagcactggagagcggggggagctgagctgtggctgggtgttcctgaagctgtttgatgccagcggcgtgcccatcccagccaagacctatgagctgttcctgaatggaggcaccccctatgagaagggcatcgaggtggaccccagcatcagccggcgggcccacggctctgtgttctaccagatcatgaccatgaggcggcagccccagctgctggtgaagctgcggagcctgaacagaagaagcagaaatgtgctgagcctgctgcctgagaccctcatcggcaacatgtgcagcatccacctgctgatcttctaccggcagatcctgggagatgtgctgctgaaggacaggatgagcctgcagagcacagacctgatcagccaccccatgctggccaccttccccatgctgctggagcagccagatgtgatggatgccctgcggagctcctgggccggcaaggagagcaccctgaagaggtctgagaagagggacaaggagttcctgaagagcaccttcctgctggtgtaccatgactgtgtgctgcccctgctgcacagcacccggctgccccccttccgctgggccgaggaggagacagaaacagcccgctggaaggtgatcacagacttcctgaagcagaaccaggagaaccagggcgccctgcaggccctgctgagcccagatggagtgcatgagccctttgacctgtctgagcagacctatgacttcctgggggagatgaggaagaatgctgtgtag

SEQ ID NO: 161381 - DNA, 2034 bp, synthetic construct
  misc_feature 1..2034: note = Description of Artificial Sequence: Synthetic coding sequence
  source 1..2034: mol_type = other DNA
atgctggcccggcggcagagggaccccctgcaggccctgcggcggaggaaccaggagctgaagcagcaggtggacagcctgctgtctgagagccagctgaaggaggccctggagcccaacaagaggcagcacatctaccagcgctgcatccagctgaagcaggccattgatgagaacaagaatgccctgcagaagctgagcaaggcagatgagagcgcccctgtggccaactacaaccagaggaaggaggaggagcacaccctgctggacaagctgacccagcagctgcagggcctggccgtgaccatcagccgggagaacatcacagaggtgggcgcccccacagaggaggaggaggagagcgagagcgaggacagtgaagattctggaggagaggaggaggatgctgaggaggaggaggaggagaaggaggagaatgaaagccacaagtggagcactggagaggagtacatcgctgtgggggacttcaccgcccagcaggtgggggacctgaccttcaagaagggggagatcctgctggtgattgagaagaagccagatggctggtggatcgccaaggatgccaagggaaatgaaggcctggtgcccaggacctacctggagccctacagcgaggaggaggagggccaggagagcagcgaggagggcagcgaggaggatgtggaggccgtggatgaaacagcagatggagctgaggtgaagcagaggacagacccccactggagcgctgtgcagaaggccatcagcgagcagatcaacacagtggatgtgctgaccaccatgggcgccatcccagctggcttccggcccagcaccctgagccagctgctggaggagggcaaccagttccgggccaactacttcctgcagcctgagctgatgcccagccagctggccttccgggacctgatgtgggatgccacagagggcaccatccgcagccggcccagccgcatcagcctcatcctgaccctgtggagctgcaagatgatccccctgcccggcatgagcatccaggtgctgagcagacatgtgcggctgtgcctgtttgatggcaacaaggtgctgagcaacatccacacagtgcgggccacctggcagcccaagaagcccaagacctggaccttcagcccccaggtgacccgcatcctgccctgcctgctggatggagactgcttcatccgcagcaacagcgccagcccagacctgggcatcctgtttgagctgggcatctcctacatccggaacagcactggagagcggggggagctgagctgtggctgggtgttcctgaagctgtttgatgccagcggcgtgcccatcccagccaagacctatgagctgttcctgaatggaggcaccccctatgaaaaaggaattgaggtggaccccagcatcagcagaagagcccacggcagcgtcttctaccagatcatgaccatgaggcggcagccccagctgctggtgaagctgcggagcctgaacagaagaagcagaaatgtgctgagcctgctgcctgagaccctgattggcaacatgtgcagcatccacctgctgatcttctaccggcagatcctgggagatgtgctgctgaaggacaggatgagcctgcagagcacagacctgatcagccaccccatgctggccaccttccccatgctgctggagcagccagatgtgatggatgccctgcggagctcctgggccggcaaggagagcaccctgaagaggtctgagaagagggacaaggagttcctgaagagcaccttcctgctggtgtaccatgactgtgtgctgcccctgctgcacagcacccggctgccccccttccgctgggccgaggaggagacagaaacagcccgctggaaggtgatcacagacttcctgaagcagaaccaggagaaccagggcgccctgcaggccctgctgagcccagatggagtgcatgagccctttgacctgtctgagcagacctatgacttcctgggggagatgaggaagaatgctgtgtag

SEQ ID NO: 161382 - DNA, 2115 bp, synthetic construct
  misc_feature 1..2115: note = Description of Artificial Sequence: Synthetic coding sequence
  source 1..2115: mol_type = other DNA
atgggcacagccagcagcctggtgtccccagctggaggagaggtgattgaggacacctacggggccggcggcggggaggcctgtgagatccctgtggaggtgaagcccaaggcccggctgctgaggaacagcttcagaagaggagctggagctgctgctggagctggccctggcagcctgccccggggcgtgggcgctgggggcctgctgggcgccagcttcaagagcacaggcagctctgtgcctgagctggagtatgctgctgctgaatatgagcggctgaggaaggagtatgagatcttccgggtgtccaagaaccaggagctgctgtccatgggccggcgggaggccaagctggacacagagaacaagaggctgcgggcagagctgcaggccctgcagaagacctaccagaagatcctgcgggagaaggagagcgccctggaggccaagtaccaggccatggagcgggccgccacctttgaacatgaccgggacaaggtgaagaggcagttcaagatcttccgggagaccaaggaaaatgagatccaggacctgctgcgggccaagcgggagctggagagcaagctgcagaggctgcaggcccagggcatccaggtgtttgaccccggggagagtgacagtgatgacaactgcacagatgtgacagctgctggcacccagtgtgagtactggacaggaggagccctgggcagcgagcccagcatcggctccatgatccagctgcagcagagcttccggggccctgagtttgcccacagcagcattgatgtggagggcccctttgccaacgtgaacagagatgactgggacattgctgtggccagcctgctgcaggtgacccccctcttcagccacagcctgtggagcaacacagtgcgctgctacctgatctacacagatgagacccagcctgagatggacctcttcctgaaggactacagccccaagctgaagaggatgtgtgagaccatgggctacttcttccacgctgtgtacttccccattgatgtggagaaccagtacctgactgtgaggaagtgggagattgagaagagcagcctggtgatcctcttcatccacctgaccctgcccagcctgctgctggaggactgtgaggaggccttcctgaagaaccctgagggcaagcccaggctcatcttccaccggctggaggatggcaaggtgtccagtgacagcgtgcagcagctgattgaccaggtgagcaacctgaacaagaccagcaaggccaagatcatcgaccacagcggggaccctgctgagggcgtgtacaagacctacatctgtgtggagaagatcatcaagcaggacatcctgggctttgagaacacagacctggagaccaaggacctgggcagcgaggacagcatccctgaggaggatgactttggagatgtgctgtgggacatccatgatgagcaggagcagatggagaccttccagcaggccagcaacagcgcccacgagctgggctttgagaagtactaccagaggctgaatgacctggtggccgccccagcccccatcccccccctgctggtgtctgggggccctggcagcggcaagagcctgctgctgagcaagtggatccagctgcagcagaagaacagccccaacaccctcatcctgagccactttgtgggccggcccatgagcaccagcagcgagagcagcctcatcatcaagaggctgaccctgaagctgatgcagcacagctggagcgtgtctgccctgaccctggaccctgccaagctgctggaggagttcccccgctggctggagaagctgagcgcccggcaccagggcagcatcatcatcgtcatcgacagcattgaccaggtgcagcaggtggagaagcacatgaagtggctgattgaccccctgcctgtgaatgtgcgggtgattgtgtctgtgaatgtggagacctgccccccagcctggaggctgtggcccaccctgcacctggaccccctgagccccaaggatgccaagagcatcatcatcgccgagtgccacagcgtggacatcaagctgagcaaggagcagtgctgggagagccggcagttcagatag

SEQ ID NO: 161383 - DNA, 3993 bp, synthetic construct
  misc_feature 1..3993: note = Description of Artificial Sequence: Synthetic coding sequence
  source 1..3993: mol_type = other DNA
atgggcacagccagcagcctggtgtccccagctggaggagaggtgattgaggacacctacggggccggcggcggggaggcctgtgagatccctgtggaggtgaagcccaaggcccggctgctgaggaacagcttcagaagaggagctggagctgctgctggagctggccctggcagcctgccccggggcgtgggcgctgggggcctgctgggcgccagcttcaagagcacaggcagctctgtgcctgagctggagtatgctgctgctgaatatgagcggctgaggaaggagtatgagatcttccgggtgtccaagaaccaggagctgctgtccatgggccggcgggaggccaagctggacacagagaacaagaggctgcgggcagagctgcaggccctgcagaagacctaccagaagatcctgcgggagaaggagagcgccctggaggccaagtaccaggccatggagcgggccgccacctttgaacatgaccgggacaaggtgaagaggcagttcaagatcttccgggagaccaaggaaaatgagatccaggacctgctgcgggccaagcgggagctggagagcaagctgcagaggctgcaggcccagggcatccaggtgtttgaccccggggagagtgacagtgatgacaactgcacagatgtgacagctgctggcacccagtgtgagtactggacaggaggagccctgggcagcgagcccagcatcggctccatgatccagctgcagcagagcttccggggccctgagtttgcccacagcagcattgatgtggagggcccctttgccaacgtgaacagagatgactgggacattgctgtggccagcctgctgcaggtgacccccctcttcagccacagcctgtggagcaacacagtgcgctgctacctgatctacacagatgagacccagcctgagatggacctcttcctgaaggactacagccccaagctgaagaggatgtgtgagaccatgggctacttcttccacgctgtgtacttccccattgatgtggagaaccagtacctgactgtgaggaagtgggagattgagaagagcagcctggtgatcctcttcatccacctgaccctgcccagcctgctgctggaggactgtgaggaggccttcctgaagaaccctgagggcaagcccaggctcatcttccaccggctggaggatggcaaggtgtccagtgacagcgtgcagcagctgattgaccaggtgagcaacctgaacaagaccagcaaggccaagatcatcgaccacagcggggaccctgctgagggcgtgtacaagacctacatctgtgtggagaagatcatcaagcaggacatcctgggctttgagaacacagacctggagaccaaggacctgggcagcgaggacagcatccctgaggaggatgactttggagatgtgctgtgggacatccatgatgagcaggagcagatggagaccttccagcaggccagcaacagcgcccacgagctgggctttgagaagtactaccagaggctgaatgacctggtggccgccccagcccccatcccccccctgctggtgtctgggggccctggcagcggcaagagcctgctgctgagcaagtggatccagctgcagcagaagaacagccccaacaccctcatcctgagccactttgtgggccggcccatgagcaccagcagcgagagcagcctcatcatcaagaggctgaccctgaagctgatgcagcacagctggagcgtgtctgccctgaccctggaccctgccaagctgctggaggagttcccccgctggctggagaagctgagcgcccggcaccagggcagcatcatcatcgtcatcgacagcattgaccaggtgcagcaggtggagaagcacatgaagtggctgattgaccccctgcctgtgaatgtgcgggtgattgtgtctgtgaatgtggagacctgccccccagcctggaggctgtggcccaccctgcacctggaccccctgagccccaaggatgccaagagcatcatcatcgccgagtgccacagcgtggacatcaagctgagcaaggagcaggagaagaagctggagcggcactgccgcagcgccaccacctgcaatgccctgtatgtgaccctgtttgggaagatgattgcccgggccggccgggccggcaacctggacaagatcctgcaccagtgcttccagtgccaggacaccctgagcctgtaccgcctggtgctgcacagcatccgggagagcatggccaatgatgtggacaaggagctgatgaagcagatcctgtgcctggtgaatgtgagccacaacggggtgtctgagagcgagctgatggagctgtacccagagatgtcctggaccttcctgaccagcctcatccacagcctgtacaagatgtgcctgctgacctacggctgcggcctgctgcgcttccagcacctgcaggcctgggagaccgtgcggctggagtacctggagggccccaccgtgaccagcagctaccggcagaagctgatcaactacttcaccctgcagctgagccaggacagagtgacctggaggtctgcagatgagctgccctggctgttccagcagcagggcagcaagcagaagctgcatgactgcctgctgaacctgtttgtgtcccagaacctgtacaagaggggccactttgctgagctgctgagctactggcagtttgtgggcaaggacaagagcgccatggccacagagtactttgacagcctgaagcagtatgagaagaactgtgagggggaggacaacatgagctgcctggccgacctgtatgagaccctgggccgcttcctgaaggacctgggcctgctgagccaggccatcgtgcccctgcagaggagcctggagatccgggagacagccctggaccctgaccacccccgggtggcccagagcctgcaccagctggcctctgtgtatgtgcagtggaagaagtttggaaatgctgagcagctgtacaagcaggccctggagatcagtgaaaatgcctatggagctgaccacccctacacagcccgggagctggaggccctggccaccctgtaccagaagcagaacaagtatgagcaggccgagcacttcaggaagaagagcttcaagatccaccagaaggccatcaagaagaagggcaacctgtatggctttgccctgctgcggcggcgggccctgcagctggaggagctgaccctgggcaaggacaccccagacaatgcccggaccctgaatgagctgggcgtgctgtactacctgcagaacaacctggagacagctgaccagttcctgaagaggagcctggagatgagggagcgggtgctgggccctgaccacccagactgtgcccagagcctgaacaacctggccgccctgtgcaatgagaagaagcagtatgacaaggccgaggagctgtatgaaagagccctggacatcagaagaagagccctggccccagaccaccccagcctggcctacacagtgaagcacctggccatcctgtacaagaagatgggcaagctggacaaggctgtgcccctgtatgagctggccgtggagatccggcagaagagctttggccccaagcaccccagcgtggccacagccctggtgaacctggccgtgctgtacagccagatgaagaagcacgtggaggccctgcccctgtatgaaagagccctgaagatctatgaggacagcctgggccgcatgcacccccgggtgggggagaccctgaagaacctggccgtgctgtcctatgagggcggggactttgagaaggctgctgagctgtacaagagggccatggagatcaaggaggccgagaccagcctgctgggcggcaaggcccccagccgccacagcagcagcggggacaccttcagcctgaagacagcccacagccccaacgtgttcctgcagcagggccagaggtag

SEQ ID NO: 161384 - DNA, 720 bp, synthetic construct
  misc_feature 1..720: note = Description of Artificial Sequence: Synthetic coding sequence
  source 1..720: mol_type = other DNA
atgggcacagccagcagcctggtgtccccagctggaggagaggtgattgaggacacctacggggccggcggcggggaggcctgtgagatccctgtggaggtgaagcccaaggcccggctgctgaggaacagcttcagaagaggagctggagctgctgctggagctggccctggcagcctgccccggggcgtgggcgctgggggcctgctgggcgccagcttcaagagcacaggcagctctgtgcctgagctggagtatgctgctgctgaatatgagcggctgaggaaggagtatgagatcttccgggtgtccaagaaccaggagctgctgtccatgggccggcgggaggccaagctggacacagagaacaagaggctgcgggcagagctgcaggccctgcagaagacctaccagaagatcctgcgggagaaggagagcgccctggaggccaagtaccaggccatggagcgggccgccacctttgaacatgaccgggacaaggtgaagaggcagttcaagatcttccgggagaccaaggaaaatgagatccaggacctgctgcgggccaagcgggagctggagagcaagctgcagaggctgcaggcccagggcatccaggtgtttgaccccggggagagtgacagtgatgacaactgcacagatgtgacagtgtccctggagagtgaccagcaccctggcatcttcatcgccaacttctag

SEQ ID NO: 161385 - DNA, 453 bp, synthetic construct
  misc_feature 1..453: note = Description of Artificial Sequence: Synthetic coding sequence
  source 1..453: mol_type = other DNA
atgggcacagccagcagcctggtgtccccagctggaggagaggtgattgaggacacctacggggccggcggcggggaggcctgtgagatccctgtggaggtgaagcccaaggcccggctgctgaggaacagcttcagaagaggagctggagctgctgctggagctggccctggcagcctgccccggggcgtgggcgctgggggcctgctgggcgccagcttcaagagcacaggcagctctgtgcctgagctggagtatgctgctgctgaatatgagcggctgaggaaggagtatgagatcttccgggtgtccaagaaccaggagctgctgtccatgggccggcgggaggccaagctggacacagagaacaagaggctgcgggcagagctgcagggcctggccgctgtggcccggagccggctgacagccacctggaacagctgggcccagtag

SEQ ID NO: 161386 - DNA, 1914 bp, synthetic construct
  misc_feature 1..1914: note = Description of Artificial Sequence: Synthetic coding sequence
  source 1..1914: mol_type = other DNA
atcatcgccaatgccggccgggccggcaacctggacaagatcctgcaccagtgcttccagtgccaggacaccctgagcctgtaccgcctggtgctgcacagcatccgggagagcatggccaatgatgtggacaaggagctgatgaagcagatcctgtgcctggtgaatgtgagccacaacggggtgtctgagagcgagctgatggagctgtacccagagatgtcctggaccttcctgaccagcctcatccacagcctgtacaagatgtgcctgctgacctacggctgcggcctgctgcgcttccagcacctgcaggcctgggagaccgtgcggctggagtacctggagggccccaccgtgaccagcagctaccggcagaagctgatcaactacttcaccctgcagctgagccaggacagagtgacctggaggtctgcagatgagctgccctggctgttccagcagcagggcagcaagcagaagctgcatgactgcctgctgaacctgtttgtgtcccagaacctgtacaagaggggccactttgctgagctgctgagctactggcagtttgtgggcaaggacaagagcgccatggccacagagtactttgacagcctgaagcagtatgagaagaactgtgagggggaggacaacatgagctgcctggccgacctgtatgagaccctgggccgcttcctgaaggacctgggcctgctgagccaggccatcgtgcccctgcagaggagcctggagatccgggagacagccctggaccctgaccacccccgggtggcccagagcctgcaccagctggcctctgtgtatgtgcagtggaagaagtttggaaatgctgagcagctgtacaagcaggccctggagatcagtgaaaatgcctatggagctgaccacccctacacagcccgggagctggaggccctggccaccctgtaccagaagcagaacaagtatgagcaggccgagcacttcaggaagaagagcttcaagatccaccagaaggccatcaagaagaagggcaacctgtatggctttgccctgctgcggcggcgggccctgcagctggaggagctgaccctgggcaaggacaccccagacaatgcccggaccctgaatgagctgggcgtgctgtactacctgcagaacaacctggagacagctgaccagttcctgaagaggagcctggagatgagggagcgggtgctgggccctgaccacccagactgtgcccagagcctgaacaacctggccgccctgtgcaatgagaagaagcagtatgacaaggccgaggagctgtatgaaagagccctggacatcagaagaagagccctggccccagaccaccccagcctggcctacacagtgaagcacctggccatcctgtacaagaagatgggcaagctggacaaggctgtgcccctgtatgagctggccgtggagatccggcagaagagctttggccccaagcaccccagcgtggccacagccctggtgaacctggccgtgctgtacagccagatgaagaagcacgtggaggccctgcccctgtatgaaagagccctgaagatctatgaggacagcctgggccgcatgcacccccgggtgggggagaccctgaagaacctggccgtgctgtcctatgagggcggggactttgagaaggctgctgagctgtacaagagggccatggagatcaaggaggccgagaccagcctgctgggcggcaaggcccccagccgccacagcagcagcggggacaccttcagcctgaagacagcccacagccccaacgtgttcctgcagcagggccagaggaaggtgcagagcaacctgctgagccctgagggcctgagcaacatctgtgcccaggagaagaccacccgcttcaccagcagctag

SEQ ID NO: 161387 - DNA, 1236 bp, synthetic construct
  misc_feature 1..1236: note = Description of Artificial Sequence: Synthetic coding sequence
  source 1..1236: mol_type = other DNA
atgagctgcctggccgacctgtatgagaccctgggccgcttcctgaaggacctgggcctgctgagccaggccatcgtgcccctgcagaggagcctggagatccgggagacagccctggaccctgaccacccccgggtggcccagagcctgcaccagctggcctctgtgtatgtgcagtggaagaagtttggaaatgctgagcagctgtacaagcaggccctggagatcagtgaaaatgcctatggagctgaccacccctacacagcccgggagctggaggccctggccaccctgtaccagaagcagaacaagtatgagcaggccgagcacttcaggaagaagagcttcaagatccaccagaaggccatcaagaagaagggcaacctgtatggctttgccctgctgcggcggcgggccctgcagctggaggagctgaccctgggcaaggacaccccagacaatgcccggaccctgaatgagctgggcgtgctgtactacctgcagaacaacctggagacagctgaccagttcctgaagaggagcctggagatgagggagcgggtgctgggccctgaccacccagactgtgcccagagcctgaacaacctggccgccctgtgcaatgagaagaagcagtatgacaaggccgaggagctgtatgaaagagccctggacatcagaagaagagccctggccccagaccaccccagcctggcctacacagtgaagcacctggccatcctgtacaagaagatgggcaagctggacaaggctgtgcccctgtatgagctggccgtggagatccggcagaagagctttggccccaagcaccccagcgtggccacagccctggtgaacctggccgtgctgtacagccagatgaagaagcacgtggaggccctgcccctgtatgaaagagccctgaagatctatgaggacagcctgggccgcatgcacccccgggtgggggagaccctgaagaacctggccgtgctgtcctatgagggcggggactttgagaaggctgctgagctgtacaagagggccatggagatcaaggaggccgagaccagcctgctgggcggcaaggcccccagccgccacagcagcagcggggacaccttcagcctgaagacagcccacagccccaacgtgttcctgcagcagggccagagagctgggaagagcaaccccaccttctacctgcagaagggcttccagacctacgtgctgtag

SEQ ID NO: 161388 - DNA, 4281 bp, synthetic construct
  misc_feature 1..4281: note = Description of Artificial Sequence: Synthetic coding sequence
  source 1..4281: mol_type = other DNA
atgaatgactggcaccgcatcttcacccagaatgtgctggtgcccccccacccccagagggcccggcagccctggaaggagagcacagccttccagtgtgtgctgaagtggctggatggccctgtgatccggcagggcgtgctggaggtgctgtctgaggtggagtgccacctgcgggtgtccttctttgatgtgacctaccgccacttctttggaagaacctggaagaccaccgtgaagcccaccaagaggcctcccagcagaattgtgttcaatgagcccctgtacttccacaccagcctgaaccacccccacatcgtggccgtggtggaggtggtggccgagggcaagaagagagatggcagcctgcagaccctgagctgtggcttcggcatcctgcgcatcttcagcaaccagcctgacagccccatcagcgccagccaggacaagaggctgcggctgtaccacggcaccccccgggccctgctgcaccccctgctgcaggaccctgctgagcagaacagacacatgaccctgattgagaactgcagcctgcagtacaccctgaagccccacccagccctggagcccgccttccacctgctgcctgagaacctgctggtgtctggcctgcagcagatccctggcctgctgcctgcccatggagagagcggagatgccctgaggaagccccggctgcagaagcccatcaccggccacctggatgacctcttcttcaccctgtaccccagcctggagaagtttgaggaggagctgctggagctgcacgtgcaggaccacttccaggagggctgcggccccctggatggaggagccctggagatcctggagcggcggctgcgggtgggcgtgcacaacggcctgggctttgtgcagaggccccaggtggtggtgctggtgcctgagatggatgtggccctgaccaggtctgccagcttcagcaggaaggtggtgagcagcagcaagaccagcagcggcagccaggccctggtgctgcggagccggctgcggctgcctgagatggtgggccacccagcctttgctgtgatcttccagctggagtatgtgttcagcagccctgctggggtggatggaaatgctgcctctgtgaccagcctgagcaacctggcctgcatgcacatggtgcgctgggccgtgtggaaccccctgctggaggccgacagcggccgggtgaccctgcccctgcagggcggcatccagcccaaccccagccactgcctggtgtacaaggtgcccagcgcctccatgagcagcgaggaggtgaagcaggtggagagcggcaccctgcgcttccagttcagcctgggcagcgaggagcacctggatgcccccacagagcctgtgtctggccccaaggtggagcggcggcccagcaggaagccacccaccagccccagcagccccccagcccctgtgccccgggtgctggccgccccccagaacagccctgtgggccctggcctgagcatcagccagctggccgccagccccaggagccccacccagcactgcctggcccggcccaccagccagctgccccacggcagccaggccagccctgcccaggcccaggagttccccctggaggccggcatcagccacctggaggccgacctgagccagaccagcctggtgctggagaccagcattgctgagcagctgcaggagctgcccttcacccccctgcacgcccccatcgtggtgggcacccagaccaggagcagcgctggccagcccagccgggcctccatggtgctgctgcagagcagcggcttccctgagatcctggatgccaacaagcagcctgctgaggccgtgtctgccacagagcctgtgaccttcaacccccagaaggaggagagtgactgcctgcagagcaatgagatggtgctgcagttcctggccttcagccgggtggcccaggactgccggggcacctcctggcccaagacagtgtacttcaccttccagttctaccgcttccccccagccaccaccccccggctgcagctggtgcagctggatgaagctggccagcccagcagcggggccctgacccacatcctggtgcctgtgtccagagatggcacctttgatgctggcagccctggcttccagctgcgctacatggtgggccctggcttcctgaagccaggagagcggcgctgctttgcccgctacctggccgtgcagaccctgcagattgatgtgtgggatggagacagcctgctgctgattggcagcgctgctgtgcagatgaagcacctgctgcggcagggccggcctgctgtgcaggccagccatgagctggaggtggtggccacagaatatgagcaggacaacatggtggtgtctggggacatgctgggcttcggccgggtgaagcccatcggcgtgcacagcgtggtgaagggccgcctgcacctgaccctggccaacgtgggccacccctgtgagcagaaggtgcggggctgcagcaccctgccccccagccgcagcagggtcatcagcaatgatggagccagccgcttcagcggcggcagcctgctgaccaccggcagcagcaggaggaagcacgtggtgcaggcccagaagctggctgatgtggacagcgagctggccgccatgctgctgacccacgcccggcagggcaagggcccccaggatgtgtcccgggagagtgatgccaccaggaggaggaagctggagaggatgaggtctgtgcggctgcaggaggccggcggggacctgggcagaagaggcacctctgtgctggcccagcagagcgtgaggacccagcacctgcgggacctgcaggtgattgctgcctaccgggagaggaccaaggccgagagcatcgccagcctgctgagcctggccatcaccacagagcacaccctgcacgccaccctgggcgtggccgagttctttgaatttgtgctgaagaacccccacaacacccagcacacagtgacagtggagattgacaaccctgagctgtctgtgattgtggacagccaggagtggagggacttcaagggagctgctggcctgcacacccctgtggaggaggacatgttccacctgcggggcagcctggccccccagctgtacctgcggccccatgaaacagcccacgtgcccttcaagttccagagcttctctgctggccagctggccatggtgcaggccagccctggcctgagcaatgagaagggcatggatgctgtgagcccctggaagagcagcgctgtgcccaccaagcacgccaaggtgctcttccgggccagcggcggcaagcccatcgctgtgctgtgcctgactgtggagctgcagccccacgtggtggaccaggtgttccgcttctaccaccctgagctgtccttcctgaagaaggccatccggctgcccccctggcacaccttccctggggcccctgtgggcatgctgggggaggacccccctgtgcacgtgcgctgcagcgaccccaacgtcatctgtgagacccagaatgtgggccctggagagccccgggacatcttcctgaaggtggccagcggccccagccctgagatcaaggacttcttcgtcatcatctacagcgaccgctggctggccacccccacccagacctggcaggtgtacctgcacagcctgcagagggtggatgtgtcctgtgtggccggccagctgacccggctgagcctggtgctgcggggcacccagacagtgaggaaggtgcgggccttcaccagccacccccaggagctgaagacagaccccaagggcgtgtttgtgctgcccccccggggcgtgcaggacctgcacgtgggcgtgcggcccctgcgggccggcagcagatttgtgcacctgaacctggtggatgtggactgccaccagctggtggcctcctggctggtgtgcctgtgctgccggcagcccctcatcagcaaggcctttgagatcatgctggccgccggggagggcaagggcgtgaacaagaggatcacctacaccaacccctaccccagcaggaggaccttccacctgcacagcgaccaccctgagctgctgcgcttccgggaggacagcttccaggtgggcggcggggagacctacaccatcggcctgcagtttgcccccagccagagggtgggggaggaggagatcctgatctacatcaatgaccacgaggacaagaatgaggaggccttctgtgtgaaggtgatctaccagtag

SEQ ID NO: 161389 - DNA, 546 bp, synthetic construct
  misc_feature 1..546: note = Description of Artificial Sequence: Synthetic coding sequence
  source 1..546: mol_type = other DNA
atggtgctgctgcagagcagcggcttccctgagatcctggatgccaacaagcagcctgctgaggccgtgtctgccacagagcctgtgaccttcaacccccagaaggaggagagtgactgcctgcagagcaatgagatggtgctgcagttcctggccttcagccgggtggcccaggactgccggggcacctcctggcccaagacagtgtacttcaccttccagttctaccgcttccccccagccaccaccccccggctgcagctggtgcagctggatgaggccggccagcccagcagcggggccctgacccacatcctggtgcctgtgtccagagatggcacctttgatgctggcagccctggcttccagctgcgctacatggtgggccctggcttcctgaagccaggagagcggcgctgctttgcccgctacctggccgtgcagaccctgcagattgatgtgtgggatggagacagcctgctgctgattggcagcgctgctgtgcagatgaaggagaccagccacatcttctctgtgtcccagtag

SEQ ID NO: 161390 - DNA, 3606 bp, synthetic construct
  misc_feature 1..3606: note = Description of Artificial Sequence: Synthetic coding sequence
  source 1..3606: mol_type = other DNA
atggccctgggcaccaccctgcgggccagcctgctgctgctgggcctgctgacagagggcctggcccagctggccatcccagcctctgtgccccggggcttctgggccctgcctgagaacctgactgtggtggagggcgcctctgtggagctgcgctgtggggtgtccaccccaggcagcgctgtgcagtgggccaaggatggcctgctgctgggccctgacccccgcatccctggcttcccccgctaccgcctggagggggaccctgcccggggggagttccacctgcacatcgaggcctgtgacctgagtgatgatgctgaatatgagtgccaggtgggccgctctgagatgggccctgagctggtgagccccagggtcatcctgagcatcctggtgccccccaagctgctgctgctgaccccagaggccggcaccatggtgacctgggtggccggccaggagtatgtggtgaactgtgtgtctggagatgccaagccagccccagacatcaccatcctgctgagcggccagaccatcagtgacatcagcgccaacgtgaatgaaggcagccagcagaagctgttcaccgtggaggccacagcccgggtgacccccaggagcagtgacaaccggcagctgctggtgtgtgaggccagcagccctgccctggaggcccccatcaaggccagcttcaccgtgaatgtgctcttccccccaggcccccctgtgattgagtggccaggcctggatgagggccacgtgcgggccggccagagcctggagctgccctgtgtggcccggggcggcaaccccctggccaccctgcagtggctgaagaatggccagcctgtgtccacagcctggggcacagagcacacccaggccgtggcccggtctgtgctggtgatgacagtgcggccagaagatcatggagcccagctgagctgtgaggcccacaacagcgtgtctgctggcacccaggagcacggcatcaccctgcaggtgaccttccccccatctgccatcatcatcctgggcagcgccagccagacagagaacaagaatgtgaccctgagctgtgtgtccaagagcagccggccccgggtgctgctgcgctggtggctgggctggaggcagctgctgcccatggaggagaccgtgatggatggcctgcatggaggccacatctccatgagcaacctgaccttcctggccaggagagaagataatggcctgaccctgacctgtgaggccttcagcgaggccttcaccaaggagaccttcaagaagagcctcatcctgaatgtgaagtacccagcccagaagctgtggattgagggccccccagagggccagaagctgcgggccggcaccagggtgcggctggtgtgcctggccatcggcggcaaccctgagcccagcctgatgtggtacaaggacagcaggacagtgacagagagccggctgccccaggagagcagaagagtgcacctgggctctgtggagaagagcggcagcaccttcagccgggagctggtgctggtgacaggccccagcgacaaccaggccaagttcacctgcaaggccggccagctgagcgccagcacccagctggccgtgcagttcccccccaccaacgtgaccatcctggccaatgccagcgccctgcggcctggagatgccctgaacctgacctgtgtgtctgtgagcagcaacccccctgtgaacctgtcctgggacaaggagggggagcggctggagggcgtggccgcccccccaagaagagcccccttcaagggcagcgctgctgcccggtctgtgctgctgcaggtgagcagccgggaccacggccagagggtgacctgccgggcccacagcgctgagctgcgggagaccgtgagcagcttctaccgcctgaatgtgctgtacagacctgagttcctgggggagcaggtgctggtggtgacagctgtggagcagggcgaggccctgctgcctgtgtctgtgtctgccaacccagcccctgaggccttcaactggaccttccggggctaccgcctgagccctgctgggggccccaggcaccgcatcctgagcagcggggccctgcacctgtggaatgtgaccagggcagatgatggcctgtaccagctgcactgccagaacagcgagggcacagctgaggcccggctgcggctggatgtgcactacgcccccaccatccgggccctgcaggaccccacagaggtgaatgtgggcggctctgtggacatcgtgtgcaccgtggatgccaaccccatcctgcccggcatgttcaactgggagcggctgggggaggatgaggaggaccagagcctggatgacatggagaagatcagccggggccccaccggccgcctgcgcatccaccacgccaagctggcccaggccggggcctaccagtgcatcgtggacaacggggtggcccccccagcccggcggctgctgcggctggtggtgcgctttgccccccaggtggagcaccccacccccctgaccaaggtggccgccgccggggacagcaccagcagcgccaccctgcactgccgggcccggggcgtgcccaacatcgtgttcacctggaccaagaatggagtgcccctggacctgcaggacccccgctacacagagcacacctaccaccagggcggcgtgcacagcagcctgctgaccatcgccaacgtgtctgctgcccaggactatgccctcttcacctgcacagccaccaatgccctgggcagtgaccagaccaacatccagctggtgtccatcagcaggccagaccccccatctggcctgaaggtggtgtccctgaccccccacagcgtgggcctggagtggaagccaggctttgatggcggcctgccccagcgcttctgcatccgctatgaggccctgggcaccccaggcttccactacgtggatgtggtgcccccccaggccaccaccttcaccctgaccggcctgcagcccagcacccgctacagagtgtggctgctggccagcaatgccctgggggacagcggcctggccgacaagggcacccagctgcccatcaccaccccaggcctgcaccagcccagcggggagcctgaggaccagctgcccacagagcccccatctggcatcagcgagaagacagaagctggctctgaagaagatagagtgagaaatgaatatgaggagagccagtggacaggagagcgggacacccagagcagcacagtgtccaccacagaagctgagccctactaccgcagcctgcgggacttcagcccccagctgccccccacccaggaggaggtgtcctacagccggggcttcaccggagaagatgaggacatggccttccctggccacctgtatgatgaggtggagaggacctacccacccagcggggcctggggccccctgtatgatgaggtgcagatgggcccctgggacctgcactggccagaggacacctaccaggacccccggggcatctatgaccaggtggccggggacctggacaccctggagccagacagcctgccctttgagctgcggggccacctggtgtag

SEQ ID NO: 161391 - DNA, 3726 bp, synthetic construct
  misc_feature 1..3726: note = Description of Artificial Sequence: Synthetic coding sequence
  source 1..3726: mol_type = other DNA
atggccctgggcaccaccctgcgggccagcctgctgctgctgggcctgctgacagagggcctggcccagctggccatcccagcctctgtgccccggggcttctgggccctgcctgagaacctgactgtggtggagggcgcctctgtggagctgcgctgtggggtgtccaccccaggcagcgctgtgcagtgggccaaggatggcctgctgctgggccctgacccccgcatccctggcttcccccgctaccgcctggagggggaccctgcccggggggagttccacctgcacatcgaggcctgtgacctgagtgatgatgctgaatatgagtgccaggtgggccgctctgagatgggccctgagctggtgagccccagggtcatcctgagcatcctggtgccccccaagctgctgctgctgaccccagaggccggcaccatggtgacctgggtggccggccaggagtatgtggtgaactgtgtgtctggagatgccaagccagccccagacatcaccatcctgctgagcggccagaccatcagtgacatcagcgccaacgtgaatgaaggcagccagcagaagctgttcaccgtggaggccacagcccgggtgacccccaggagcagtgacaaccggcagctgctggtgtgtgaggccagcagccctgccctggaggcccccatcaaggccagcttcaccgtgaatgtgctcttccccccaggcccccctgtgattgagtggccaggcctggatgagggccacgtgcgggccggccagagcctggagctgccctgtgtggcccggggcggcaaccccctggccaccctgcagtggctgaagaatggccagcctgtgtccacagcctggggcacagagcacacccaggccgtggcccggtctgtgctggtgatgacagtgcggccagaagatcatggagcccagctgagctgtgaggcccacaacagcgtgtctgctggcacccaggagcacggcatcaccctgcaggtgaccttccccccatctgccatcatcatcctgggcagcgccagccagacagagaacaagaatgtgaccctgagctgtgtgtccaagagcagccggccccgggtgctgctgcgctggtggctgggctggaggcagctgctgcccatggaggagaccgtgatggatggcctgcatggaggccacatctccatgagcaacctgaccttcctggccaggagagaagataatggcctgaccctgacctgtgaggccttcagcgaggccttcaccaaggagaccttcaagaagagcctcatcctgaatgtgaagtacccagcccagaagctgtggattgagggccccccagagggccagaagctgcgggccggcaccagggtgcggctggtgtgcctggccatcggcggcaaccctgagcccagcctgatgtggtacaaggacagcaggacagtgacagagagccggctgccccaggagagcagaagagtgcacctgggctctgtggagaagagcggcagcaccttcagccgggagctggtgctggtgacaggccccagcgacaaccaggccaagttcacctgcaaggccggccagctgagcgccagcacccagctggccgtgcagttcccccccaccaacgtgaccatcctggccaatgccagcgccctgcggcctggagatgccctgaacctgacctgtgtgtctgtgagcagcaacccccctgtgaacctgtcctgggacaaggagggggagcggctggagggcgtggccgcccccccaagaagagcccccttcaagggcagcgctgctgcccggtctgtgctgctgcaggtgagcagccgggaccacggccagagggtgacctgccgggcccacagcgctgagctgcgggagaccgtgagcagcttctaccgcctgaatgtgctgtacagacctgagttcctgggggagcaggtgctggtggtgacagctgtggagcagggcgaggccctgctgcctgtgtctgtgtctgccaacccagcccctgaggccttcaactggaccttccggggctaccgcctgagccctgctgggggccccaggcaccgcatcctgagcagcggggccctgcacctgtggaatgtgaccagggcagatgatggcctgtaccagctgcactgccagaacagcgagggcacagctgaggcccggctgcggctggatgtgcactacgcccccaccatccgggccctgcaggaccccacagaggtgaatgtgggcggctctgtggacatcgtgtgcaccgtggatgccaaccccatcctgcccggcatgttcaactgggagcggctgggggaggatgaggaggaccagagcctggatgacatggagaagatcagccggggccccaccggccgcctgcgcatccaccacgccaagctggcccaggccggggcctaccagtgcatcgtggacaacggggtggcccccccagcccggcggctgctgcggctggtggtgcgctttgccccccaggtggagcaccccacccccctgaccaaggtggccgccgccggggacagcaccagcagcgccaccctgcactgccgggcccggggcgtgcccaacatcgtgttcacctggaccaagaatggagtgcccctggacctgcaggacccccgctacacagagcacacctaccaccagggcggcgtgcacagcagcctgctgaccatcgccaacgtgtctgctgcccaggactatgccctcttcacctgcacagccaccaatgccctgggcagtgaccagaccaacatccagctggtgtccatcagcaggccagaccccccatctggcctgaaggtggtgtccctgaccccccacagcgtgggcctggagtggaagccaggctttgatggcggcctgccccagcgcttctgcatccgctatgaggccctgggcaccccaggcttccactacgtggatgtggtgcccccccaggccaccaccttcaccctgaccggcctgcagcccagcacccgctacagagtgtggctgctggccagcaatgccctgggggacagcggcctggccgacaagggcacccagctgcccatcaccaccccaggcctgcaccagcccagcggggagcctgaggaccagctgcccacagagcccccatctggccccagcggcctgcccctgctgcctgtgctgtttgccctgggcggcctgctgctgctgagcaatgccagctgtgtgggcggcgtgctgtggcagaggcggctgcggcggctggccgagggcatcagcgagaagacagaagctggctctgaagaagatagagtgagaaatgaatatgaggagagccagtggacaggagagcgggacacccagagcagcacagtgtccaccacagaagctgagccctactaccgcagcctgcgggacttcagcccccagctgccccccacccaggaggaggtgtcctacagccggggcttcaccggagaagatgaggacatggccttccctggccacctgtatgatgaggtggagaggacctacccacccagcggggcctggggccccctgtatgatgaggtgcagatgggcccctgggacctgcactggccagaggacacctaccaggacccccggggcatctatgaccaggtggccggggacctggacaccctggagccagacagcctgccctttgagctgcggggccacctggtgtag

SEQ ID NO: 161392 - DNA, 1152 bp, synthetic construct
  misc_feature 1..1152: note = Description of Artificial Sequence: Synthetic coding sequence
  source 1..1152: mol_type = other DNA
atggagcggcgggcccggagcagcagccgggagagccggggccggggcggccgcaccccccacaaggagaacaagagggccaaggccgagaggtctgggggcggccggggccggcaggaggccggccctgagcccagcggcagcggccgggccggcaccccaggagagccccgggccccagctgccaccgtggtggatgtggatgaggtgcggggcagcggggaggagggcacagaggtggtggccctgctggagagcgagaggcctgaggagggcaccaagagcagcggcctgggcgcctgtgagtggctgctggtgctgatcagcctgctcttcatcatcatgaccttccccttcagcatctggttctgtgtgaaggtggtgcaggagtatgaaagagtcatcatcttccggctgggccacctgctgcccggccgggccaagggccctggcctcttcttcttcctgccctgcctggacacctaccacaaggtggacctgcggctgcagaccctggagatccccttccatgaaattgtgaccaaggacatgttcatcatggagattgatgccatctgctactacaggatggagaatgccagcctgctgctgagcagcctggcccacgtgtccaaggctgtgcagttcctggtgcagaccaccatgaagaggctgctggcccacaggagcctgacagagatcctgctggagaggaagagcatcgcccaggatgccaaggtggccctggacagcgtgacctgcatctggggcatcaaggtggagagaattgagatcaaggatgtgcggctgcctgctggcctgcagcacagcctggccgtggaggccgaggcccagaggcaggccaaggtgaggatgattgctgctgaggccgagaaggccgccagcgagagcctgaggatggctgctgagatcctgagcggcaccccagctgctgtgcagctgcgctacctgcacaccctgcagagcctgagcacagagaagcccagcacagtggtgctgcccctgccctttgacctgctgaactgcctgagcagccccagcaacagaacccagggcagcctgcccttccccagccccagcaagcctgtggagcccctgaaccccaagaagaaggacagccccatgctgtag

SEQ ID NO: 161393 - DNA, 948 bp, synthetic construct
  misc_feature 1..948: note = Description of Artificial Sequence: Synthetic coding sequence
  source 1..948: mol_type = other DNA
atggagcggcgggcccggagcagcagccgggagagccggggccggggcggccgcaccccccacaaggagaacaagagggccaaggccgagaggtctgggggcggccggggccggcaggaggccggccctgagcccagcggcagcggccgggccggcaccccaggagagccccgggccccagctgccaccgtggtggatgtggatgaggtgcggggcagcggggaggagggcacagaggtggtggccctgctggagagcgagaggcctgaggagggcaccaagagcagcggcctgggcgcctgtgagtggctgctggtgctgatcagcctgctcttcatcatcatgaccttccccttcagcatctggttctgtgtgaaggtggtgcaggagtatgaaagagtcatcatcttccggctgggccacctgctgcccggccgggccaagggccctggcctcttcttcttcctgccctgcctggacacctaccacaaggtggacctgcggctgcagaccctggagatccccttccacgaggtggccctggacagcgtgacctgcatctggggcatcaaggtggagagaattgagatcaaggatgtgcggctgcctgctggcctgcagcacagcctggccgtggaggccgaggcccagaggcaggccaaggtgaggatgattgctgctgaggccgagaaggccgccagcgagagcctgaggatggctgctgagatcctgagcggcaccccagctgctgtgcagctgcgctacctgcacaccctgcagagcctgagcacagagaagcccagcacagtggtgctgcccctgccctttgacctgctgaactgcctgagcagccccagcaacagaacccagggcagcctgcccttccccagccccagcaagcctgtggagcccctgaaccccaagaagaaggacagccccatgctgtag

SEQ ID NO: 161394 - DNA, 1284 bp, synthetic construct
  misc_feature 1..1284: note = Description of Artificial Sequence: Synthetic coding sequence
  source 1..1284: mol_type = other DNA
atgggcgctggggccaccggccgggccatggatggcccccggctgctgctgctgctgctgctgggcgtgtccctgggcggggccaaggaggcctgccccaccggcctgtacacccacagcggggagtgctgcaaggcctgcaacctgggggagggcgtggcccagccctgtggggccaaccagacagtgtgtgagccctgcctggacagcgtgaccttcagtgatgtggtgtctgccacagagccctgcaagccctgcacagaatgtgtgggcctgcagagcatgtctgccccctgtgtggaggctgatgatgctgtgtgccgctgtgcctacggctactaccaggatgagaccaccggccgctgtgaggcctgccgggtgtgtgaggccggcagcggcctggtgttcagctgccaggacaagcagaacacagtgtgtgaggagtgcccagatggcacctacagtgatgaggccaaccacgtggacccctgcctgccctgcaccgtgtgtgaggacacagagcggcagctgagagaatgtacccgctgggcagatgctgaatgtgaggagatccctggccgctggatcaccaggagcaccccacctgagggcagtgacagcacagcccccagcacccaggagcctgaggcccctcctgagcaggacctgattgccagcacagtggccggcgtggtgaccaccgtgatgggcagcagccagcctgtggtgacccggggcaccacagacaacctgatccctgtgtactgcagcatcctggccgctgtggtggtgggcctggtggcctacatcgccttcaagcgctggaacagctgcaagcagaacaagcagggcgccaacagcaggcctgtgaaccagaccccacctcctgagggggagaagctgcacagcgacagcggcatctctgtggacagccagagcctgcatgaccagcagccccacacccagacagccagcggccaggccctgaagggagatggcggcctgtacagcagcctgcccccagccaagcgggaggaggtggagaagctgctgaatggcagcgctggggacacctggaggcacctggccggggagctgggctaccagcctgagcacatcgacagcttcacccatgaggcctgccctgtgcgggccctgctggcctcctgggccacccaggacagcgccaccctggatgccctgctggccgccctgcggcgcatccagagagctgacctggtggagagcctgtgcagcgagagcacagccaccagccctgtgtag

SEQ ID NO: 161395 - DNA, 1002 bp, synthetic construct
  misc_feature 1..1002: note = Description of Artificial Sequence: Synthetic coding sequence
  source 1..1002: mol_type = other DNA
atgtctgccccctgtgtggaggctgatgatgctgtgtgccgctgtgcctacggctactaccaggatgagaccaccggccgctgtgaggcctgccgggtgtgtgaggccggcagcggcctggtgttcagctgccaggacaagcagaacacagtgtgtgaggagtgcccagatggcacctacagtgatgaggccaaccacgtggacccctgcctgccctgcaccgtgtgtgaggacacagagcggcagctgagagaatgtacccgctgggcagatgctgaatgtgaggagatccctggccgctggatcaccaggagcaccccacctgagggcagtgacagcacagcccccagcacccaggagcctgaggcccctcctgagcaggacctgattgccagcacagtggccggcgtggtgaccaccgtgatgggcagcagccagcctgtggtgacccggggcaccacagacaacctgatccctgtgtactgcagcatcctggccgctgtggtggtgggcctggtggcctacatcgccttcaagcgctggaacagctgcaagcagaacaagcagggcgccaacagcaggcctgtgaaccagaccccacctcctgagggggagaagctgcacagcgacagcggcatctctgtggacagccagagcctgcatgaccagcagccccacacccagacagccagcggccaggccctgaagggagatggcggcctgtacagcagcctgcccccagccaagcgggaggaggtggagaagctgctgaatggcagcgctggggacacctggaggcacctggccggggagctgggctaccagcctgagcacatcgacagcttcacccatgaggcctgccctgtgcgggccctgctggcctcctgggccacccaggacagcgccaccctggatgccctgctggccgccctgcggcgcatccagagagctgacctggtggagagcctgtgcagcgagagcacagccaccagccctgtgtag

SEQ ID NO: 161396 - DNA, 336 bp, synthetic construct
  misc_feature 1..336: note = Description of Artificial Sequence: Synthetic coding sequence
  source 1..336: mol_type = other DNA
atggccaacatccaccaggagaatgaggagatggagcagcccatgcagaatggagaggaggaccggcccctgggcggcggggagggccaccagcctgctggcaacagaagaggccaggcccggcggctggcccccaacttccgctgggccatccccaaccggcagatcaatgatggcatgggaggagatggagatgacatggagatcttcatggaggagatgagggagatccggaggaagctgcgggagctgcagctgaggaactgcctgcgcatcctgatgggagagctgagcaaccaccacgaccaccatgatgagttctgcctgatgccctag

SEQ ID NO: 161397 - DNA, 306 bp, synthetic construct
  misc_feature 1..306: note = Description of Artificial Sequence: Synthetic coding sequence
  source 1..306: mol_type = other DNA
atggagcagcccatgcagaatggagaggaggaccggcccctgggcggcggggagggccaccagcctgctggcaacagaagaggccaggcccggcggctggcccccaacttccgctgggccatccccaaccggcagatcaatgatggcatgggaggagatggagatgacatggagatcttcatggaggagatgagggagatccggaggaagctgcgggagctgcagctgaggaactgcctgcgcatcctgatgggagagctgagcaaccaccacgaccaccatgatgagttctgcctgatgccctag

SEQ ID NO: 161398 - DNA, 306 bp, synthetic construct; identical to SEQ ID NO: 161397
  misc_feature 1..306: note = Description of Artificial Sequence: Synthetic coding sequence
  source 1..306: mol_type = other DNA

SEQ ID NO: 161399 - DNA, 336 bp, synthetic construct; identical to SEQ ID NO: 161396
  misc_feature 1..336: note = Description of Artificial Sequence: Synthetic coding sequence
  source 1..336: mol_type = other DNA

SEQ ID NO: 161400 - DNA, 336 bp, synthetic construct; identical to SEQ ID NO: 161396
  misc_feature 1..336: note = Description of Artificial Sequence: Synthetic coding sequence
  source 1..336: mol_type = other DNA

SEQ ID NO: 161401 - DNA, 402 bp, synthetic construct
  misc_feature 1..402: note = Description of Artificial Sequence: Synthetic coding sequence
  source 1..402: mol_type = other DNA
atgatgctgaacagcgacaccatggagctggacctgccccccacccacagcgagacagaaagtggcttcagtgactgtggcggcggggccggcccagatggagctggccctgggggccctgggggcggccaggcccggggccctgagcccggggagcccggcaggaaggacctgcagcacctgagccgggaggagaggagaagaagaagaagagccacagccaagtacagaacagcccacgccacccgggagcgcatccgggtggaggccttcaacctggcctttgctgagctgaggaagctgctgcccaccctgcccccagacaagaagctgagcaagattgagatcctgcggctggccatctgctacatctcctacctgaaccacgtgctggatgtgtag

SEQ ID NO: 161402 - DNA, 408 bp, synthetic construct
  misc_feature 1..408: note = Description of Artificial Sequence: Synthetic coding sequence
  source 1..408: mol_type = other DNA
atgatgctgagcccagaccaggccgctgacagcgaccaccccagcagcgcccacagcgaccctgagagcctgggcggcacagacaccaaggtgctgggctctgtgtctgacctggagcctgtggaggaggccgagggagatggaaaaggaggcagccgggccgccctgtacccccacccccagcagctgagccgggaggagaagagaagaagaagaagagccacagccaagtaccgcagcgcccacgccacccgggagcgcatccgggtggaggccttcaacctggcctttgctgagctgaggaagctgctgcccaccctgcccccagacaagaagctgagcaagattgagatcctgcggctggccatctgctacatctcctacctgaaccacgtgctggatgtgtag

SEQ ID NO: 161403 - DNA, 408 bp, synthetic construct; identical to SEQ ID NO: 161402
  misc_feature 1..408: note = Description of Artificial Sequence: Synthetic coding sequence
  source 1..408: mol_type = other DNA

SEQ ID NO: 161404 - DNA, 324 bp, synthetic construct
  misc_feature 1..324: note = Description of Artificial Sequence: Synthetic coding sequence
  source 1..324: mol_type = other DNA
atgatgctgagcccagaccaggccgctgacagcgaccaccccagcagcgcccacagcgaccctgagagcctgggcggcacagacaccaaggtgctgggctctgtgtctgacctggagcctgtggaggaggccgagggagatggaaaaggaggcagccgggccgccctgtacccccacccccagcagctgagccgggaggagaagagaagaagaagaagagccacagccaagtaccgcagcgcccacgccacccgggagcgcatccgggtggaggccttcaacctggcctttgctgagctgaggaagctgctgcccaccctgtag

SEQ ID NO: 161405 - DNA, 1125 bp, synthetic construct
  misc_feature 1..1125: note = Description of Artificial Sequence: Synthetic coding sequence
  source 1..1125: mol_type = other DNA
atgggcctgccccggggcagcttcttctggctgctgctgctgctgacagctgcctgcagcggcctgctgtttgccctgtacttctctgctgtgcagcgctacccaggccctgctgctggggcccgggacaccaccagctttgaggccttcttccagagcaaggccagcaacagctggacaggcaagggccaggcctgccgccacctgctgcacctggccatccagaggcacccccacttccggggcctcttcaacctgagcatccctgtgctgctgtggggagacctcttcaccccagccctgtgggaccggctgagccagcacaaggccccctacggctggaggggcctgagccaccaggtgattgccagcaccctgagcctgctgaatggcagcgagagcgccaagctgtttgccccaccccgggacaccccacccaagtgcatccgctgtgctgtggtgggcaatggaggcatcctgaatggcagccggcagggccccaacattgatgcccatgactatgtgttccggctgaatggagctgtgatcaagggctttgaaagagatgtgggcaccaagaccagcttctacggcttcaccgtgaacaccatgaagaacagcctggtgtcctactggaacctgggcttcacctctgtgccccagggccaggacctgcagtacatcttcatccccagcgacatccgggactatgtgatgctgcggagcgccatcctgggcgtgcctgtgcctgagggcctggacaagggggaccggccccacgcctactttggacctgaggccagcgccagcaagttcaagctgctgcacccagacttcatctcctacctgacagagcgcttcctgaagagcaagctgatcaacacccactttggagacctgtacatgcccagcactggagccctgatgctgctgacagccctgcacacctgtgaccaggtgtctgcctacggcttcatcaccagcaactactggaagttcagtgaccactactttgagaggaagatgaagcccctcatcttctacgccaaccacgacctgagcctggaggccgccctgtggagggacctgcacaaggccggcatcctgcagctgtaccagaggtag

SEQ ID NO: 161406 - DNA, 2235 bp, synthetic construct
  misc_feature 1..2235: note = Description of Artificial Sequence: Synthetic coding sequence
  source 1..2235: mol_type = other DNA
atggccggccgctccatgcaggccgcccgctgccccacagatgagctgagcctgaccaactgtgctgtggtgaatgagaaggacttccagagcggccagcacgtgattgtgaggaccagccccaaccaccgctacaccttcaccctgaagacccaccccagcgtggtgcccggcagcatcgccttcagcctgccccagaggaagtgggccggcctgagcatcggccaggagattgaggtgtccctgtacacctttgacaaggccaagcagtgcatcggcaccatgaccattgaaattgacttcctgcagaagaagagcattgacagcaacccctatgacacagacaagatggctgctgagttcatccagcagttcaacaaccaggccttctctgtgggccagcagctggtgttctccttcaatgagaagctgtttggcctgctggtgaaggacatcgaggccatggaccccagcatcctgaagggggagcccgccaccgggaagaggcagaagattgaggtgggcctggtggtgggcaacagccaggtggcctttgagaaggccgagaacagcagcctgaacctgattggcaaggccaagaccaaggaaaatcggcagagcatcatcaacccagactggaactttgagaagatgggcatcggcggcctggacaaggagttcagtgacatcttccggcgggcctttgccagcagggtcttccccccagagatcgtggagcagatgggctgcaagcacgtgaagggcatcctgctgtatggccccccaggctgtgggaagaccctgctggcccggcagatcggcaagatgctgaatgcccgggagcccaaggtggtgaatggacctgagatcctgaacaagtatgtgggggagagcgaggccaacatcaggaagctgtttgctgatgctgaggaggagcagaggcggctgggcgccaacagcggcctgcacatcatcatctttgatgaaattgatgccatctgcaagcagaggggctccatggccggcagcactggagtgcatgacacagtggtgaaccagctgctgagcaagattgatggagtggagcagctgaacaacatcctggtgattggcatgaccaacagaccagacctgattgatgaggccctgctgcggcccggccgcctggaggtgaagatggagatcggcctgcctgatgagaagggccgcctgcagatcctgcacatccacacagccaggatgaggggccaccagctgctgtctgcagatgtggacatcaaggagctggccgtggagaccaagaacttctctggagctgagctggagggcctggtgcgggccgcccagagcacagccatgaacagacacatcaaggccagcaccaaggtggaggtggacatggagaaggccgagagcctgcaggtgaccaggggggacttcctggccagcctggagaatgacatcaagccagccttcggcaccaaccaggaggactatgccagctacatcatgaatggcatcatcaagtggggagaccctgtgaccagggtgctggatgatggagagctgctggtgcagcagaccaagaacagcgacaggacccccctggtgtctgtgctgctggagggccccccccacagcggcaagacagccctggccgccaagattgctgaggagagcaacttccccttcatcaagatctgcagcccagacaagatgattggcttcagcgagacagccaagtgccaggccatgaagaagatctttgatgatgcctacaagagccagctgagctgtgtggtggtggatgacatcgagcggctgctggactatgtgcccatcggcccccgcttcagcaacctggtgctgcaggccctgctggtgctgctgaagaaggccccaccccagggcaggaagctgctgatcatcggcaccaccagcaggaaggatgtgctgcaggagatggagatgctgaatgccttcagcaccaccatccacgtgcccaacatcgccaccggggagcagctgctggaggccctggagctgctgggcaacttcaaggacaaggagaggaccaccatcgcccagcaggtgaagggcaagaaggtgtggattggcatcaagaagctgctgatgctgattgagatgagcctgcagatggaccctgagtacagagtgaggaagttcctggccctgctgcgggaggagggcgccagccccctggactttgattag

SEQ ID NO: 161407 - DNA, 888 bp, synthetic construct
  misc_feature 1..888: note = Description of Artificial Sequence: Synthetic coding sequence
  source 1..888: mol_type = other DNA
atggacaacagcggcaaggaggccgaggccatggccctgctggccgaggccgagaggaaggtgaagaacagccagagcttcttcagcggcctgtttggaggcagcagcaagattgaggaggcctgtgagatctatgcccgggccgccaacatgttcaagatggccaagaactggagcgctgctggaaatgccttctgccaggccgcccagctgcacctgcagctgcagagcaagcatgatgctgccacctgctttgtggatgctggaaatgccttcaagaaggctgacccccaggaggccatcaactgcctgatgagggccatcgagatctacacagacatgggccgcttcaccatcgccgccaagcaccacatcagcattgctgagatctatgaaacagagctggtggacatcgagaaggccatcgcccactatgagcagagcgctgactactacaagggggaggagagcaacagcagcgccaacaagtgcctgctgaaggtggccggctacgccgccctgctggagcagtaccagaaggccatcgacatctatgagcaggtgggcaccaatgccatggacagccccctgctgaagtacagcgccaaggactacttcttcaaggccgccctgtgccacttctgcatcgacatgctgaatgccaagctggccgtgcagaagtatgaggagctgtttcctgccttcagtgacagccgggagtgcaagctgatgaagaagctgctggaggcccacgaggagcagaatgtggacagctacacagagagcgtgaaggagtatgacagcatcagccggctggaccagtggctgaccaccatgctgctgcgcatcaagaagaccatccagggagatgaggaggacctgaggtag

SEQ ID NO: 161408 - DNA, 897 bp, synthetic construct
  misc_feature 1..897: note = Description of Artificial Sequence: Synthetic coding sequence
  source 1..897: mol_type = other DNA
atggacaatgctgggaaggagcgggaggccgtgcagctgatggccgaggccgagaagagggtgaaggccagccacagcttcctgcggggcctgtttggaggcaacacccgcatcgaggaggcctgtgagatgtacacccgggccgccaacatgttcaagatggccaagaactggagcgctgctggaaatgccttctgccaggccgccaagctgcacatgcagctgcagagcaagcatgattctgccaccagctttgtggatgctggaaatgcctacaagaaggctgacccccaggaggccatcaactgcctgaatgctgccatcgacatctacacagacatgggccgcttcaccatcgccgccaagcaccacatcaccatcgccgagatctatgaaacagagctggtggacatcgagaaggccatcgcccactatgagcagagcgctgactactacaagggggaggagagcaacagcagcgccaacaagtgcctgctgaaggtggccgcctatgctgcccagctggagcagtaccagaaggccatcgagatctatgagcaggtgggcgccaacaccatggacaaccccctgctgaagtacagcgccaaggactacttcttcaaggccgccctgtgccacttcatcgtggatgagctgaatgccaagctggccctggagaagtatgaggagatgtttcctgccttcacagacagccgggagtgcaagctgctgaagaagctgctggaggcccacgaggagcagaacagcgaggcctacacagaggccgtgaaggagtttgacagcatcagccggctggaccagtggctgaccaccatgctgctgcgcatcaagaagagcatccagggagatggagaaggagatggagacctgaagtag

SEQ ID NO: 161409 - DNA, 615 bp, synthetic construct
  misc_feature 1..615: note = Description of Artificial Sequence: Synthetic coding sequence
  source 1..615: mol_type = other DNA
atgaccctgctgcctgccctgtggatgctggagatgctgaccaagaggcagatccccaagggccgcttcaccatcgccgccaagcaccacatcaccatcgccgagatctatgaaacagagctggtggacatcgagaaggccatcgcccactatgagcagagcgctgactactacaagggggaggagagcaacagcagcgccaacaagtgcctgctgaaggtggccgcctatgctgcccagctggagcagtaccagaaggccatcgagatctatgagcaggtgggcgccaacaccatggacaaccccctgctgaagtacagcgccaaggactacttcttcaaggccgccctgtgccacttcatcgtggatgagctgaatgccaagctggccctggagaagtatgaggagatgtttcctgccttcacagacagccgggagtgcaagctgctgaagaagctgctggaggcccacgaggagcagaacagcgaggcctacacagaggccgtgaaggagtttgacagcatcagccggctggaccagtggctgaccaccatgctgctgcgcatcaagaagagcatccagggagatggagaaggagatggagacctgaagtag

SEQ ID NO: 161410 - DNA, 768 bp, synthetic construct
  misc_feature 1..768: note = Description of Artificial Sequence: Synthetic coding sequence
  source 1..768: mol_type = other DNA
atgtacaccagggctgccaacatgttcaagatggccaagaactggagcgctgctggaaatgccttctgccaggccgccaagctgcacatgcagctgcagagcaagcatgacagcgccaccagctttgtggatgctggaaatgcctacaagaaggctgacccccaggaggccatcaactgcctgaatgctgccatcgacatctacacagacatgggccgcttcaccatcgccgccaagcaccacatcaccatcgccgagatctatgaaacagagctggtggacatcgagaaggccatcgcccactatgagcagagcgctgactactacaagggggaggagagcaacagcagcgccaacaagtgcctgctgaaggtggccgcctatgctgcccagctggagcagtaccagaaggccatcgagatctatgagcaggtgggcgccaacaccatggacaaccccctgctgaagtacagcgccaaggactacttcttcaaggccgccctgtgccacttcatcgtggatgagctgaatgccaagctggccctggagaagtatgaggagatgtttcctgccttcacagacagccgggagtgcaagctgctgaagaagctgctggaggcccacgaggagcagaacagcgaggcctacacagaagctgtgaaggagtttgacagcatcagccggctggaccagtggctgaccaccatgctgctgcgcatcaagaagagcatccagggagatggagaaggagatggagacctgaagtag

SEQ ID NO: 161411 - DNA, 780 bp, synthetic construct
  misc_feature 1..780: note = Description of Artificial Sequence: Synthetic coding sequence
  source 1..780: mol_type = other DNA
atggacaatgctgggaaggagcgggaggccgtgcagctgatggccgaggccgagaagagggtgaaggccagccacagcttcctgcggggcctgtttggaggcaacacccgcatcgaggaggcctgtgagatgtacacccgggccgccaacatgttcaagatggccaagaactggagcgaggccatcaactgcctgaatgctgccatcgacatctacacagacatgggccgcttcaccatcgccgccaagcaccacatcaccatcgccgagatctatgaaacagagctggtggacatcgagaaggccatcgcccactatgagcagagcgctgactactacaagggggaggagagcaacagcagcgccaacaagtgcctgctgaaggtggccgcctatgctgcccagctggagcagtaccagaaggccatcgagatctatgagcaggtgggcgccaacaccatggacaaccccctgctgaagtacagcgccaaggactacttcttcaaggccgccctgtgccacttcatcgtggatgagctgaatgccaagctggccctggagaagtatgaggagatgtttcctgccttcacagacagccgggagtgcaagctgctgaagaagctgctggaggcccacgaggagcagaacagcgaggcctacacagaagctgtgaaggagtttgacagcatcagccggctggaccagtggctgaccaccatgctgctgcgcatcaagaagagcatccagggagatggagaaggagatggagacctgaagtag

SEQ ID NO: 161412 - DNA, 1887 bp, synthetic construct
  misc_feature 1..1887: note = Description of Artificial Sequence: Synthetic coding sequence
  source 1..1887: mol_type = other DNA
atgggcagctgtgcccggctgctgctgctgtggggctgcaccgtggtggccgccggcctgtctggagtggccggcgtgagcagccgctgtgagaaggcctgcaaccccaggatgggcaacctggccctgggcaggaagctgtgggccgacaccacctgtggccagaatgccacagagctgtactgcttctacagcgagaacacagacctgacctgccggcagcccaagtgtgacaagtgcaatgctgcctacccccacctggcccacctgcccagcgccatggctgacagcagcttccgcttccccaggacctggtggcagagcgcagaagatgtgcaccgggagaagatccagctggacctggaggccgagttctacttcacccacctgattgtgatgttcaagagccccaggcctgctgccatggtgctggacaggagccaggactttgggaagacctggaagccctacaagtactttgccaccaactgcagcgccaccttcggcctggaggatgatgtggtgaagaagggggccatctgcaccagcaagtacagcagccccttcccctgcaccggcggggaggtgatcttcaaggccctgagccccccctatgacacagagaacccctacagcgccaaggtgcaggagcagctgaagatcaccaacctgcgggtgcagctgctgaagaggcagagctgcccctgccagagaaatgacctgaatgaggagccccagcacttcacccactacgccatctatgacttcatcgtgaagggcagctgcttctgcaatggacatgctgaccagtgcatccctgtgcacggcttccggcctgtgaaggcccctggcaccttccacatggtgcacggcaagtgcatgtgcaagcacaacacagctggcagccactgccagcactgtgcccccctgtacaatgaccggccctgggaggccgcagatggcaagacaggagccccaaatgaatgtaggacctgcaagtgcaatggacatgctgacacctgccactttgatgtgaatgtgtgggaggccagcggcaacagaagtggaggagtgtgtgatgactgccagcacaacacagagggccagtactgccagcgctgcaagccaggcttctacagagacctgcggcggcccttcagcgccccagatgcctgcaagccctgcagctgccaccctgtgggcagcgctgtgctgcctgccaacagcgtgaccttctgtgaccccagcaatggagactgcccctgcaagccaggagtggccggcagaagatgtgaccgctgcatggtgggctactggggctttggagactatggctgccggccctgtgactgtgccggcagctgtgaccccatcactggagactgcatcagcagccacacagacatcgactggtaccacgaggtgcctgacttccggcctgtgcacaacaagtctgagcccgcctgggagtgggaggatgcccagggcttcagcgccctgctgcacagcgggaaatgtgagtgcaaggagcagaccctgggcaatgccaaggccttctgtggcatgaagtacagctatgtgctgaagatcaagatcctgagcgcccatgacaagggcacccacgtggaggtgaatgtgaagatcaagaaggtgctgaagagcaccaagctgaagatcttccggggcaagaggaccctgtacccagagagctggacagaccggggctgcacctgccccatcctgaaccctggcctggagtacctggtggccggccacgaggacatcagaacaggcaagctgattgtgaacatgaagagctttgtgcagcactggaagcccagcctgggcaggaaggtgatggacatcctgaagcgggagtgcaagtag

SEQ ID NO: 161413 - DNA, 1776 bp, synthetic construct
  misc_feature 1..1776: note = Description of Artificial Sequence: Synthetic coding sequence
  source 1..1776: mol_type = other DNA
atgggcaacctggccctgggcaggaagctgtgggccgacaccacctgtggccagaatgccacagagctgtactgcttctacagtgaaaatacagacctgacctgccggcagcccaagtgtgacaagtgcaatgctgcctacccccacctggcccacctgcccagcgccatggctgacagcagcttccgcttccccaggacctggtggcagagcgcagaagatgtgcaccgggagaagatccagctggacctggaggccgagttctacttcacccacctgattgtgatgttcaagagccccaggcctgctgccatggtgctggacaggagccaggactttgggaagacctggaagccctacaagtactttgccaccaactgcagcgccaccttcggcctggaggatgatgtggtgaagaagggggccatctgcaccagcaagtacagcagccccttcccctgcacaggaggagaggtgatcttcaaggccctgagccccccctatgacacagagaacccctacagcgccaaggtgcaggagcagctgaagatcaccaacctgcgggtgcagctgctgaagaggcagagctgcccctgccagagaaatgacctgaatgaggagccccagcacttcacccactacgccatctatgacttcatcgtgaagggcagctgcttctgcaatggacatgctgaccagtgcatccctgtgcacggcttccggcctgtgaaggcccctggcaccttccacatggtgcacggcaagtgcatgtgcaagcacaacacagctggcagccactgccagcactgtgcccccctgtacaatgaccggccctgggaggccgcagatggcaagacaggagccccaaatgaatgtaggacctgcaagtgcaatggacatgctgacacctgccactttgatgtgaatgtgtgggaggccagcggcaacagaagtggcggcgtgtgtgatgactgccagcacaacacagagggccagtactgccagcgctgcaagccaggcttctacagagacctgcggcggcccttcagcgccccagatgcctgcaagccctgcagctgccaccctgtgggcagcgctgtgctgcctgccaacagcgtgaccttctgtgaccccagcaatggagactgcccctgcaagccaggagtggccggccgccgctgtgaccgctgcatggtgggctactggggctttggagactatggctgccggccctgtgactgtgccggcagctgtgaccccatcaccggggactgcatcagcagccacacagacatcgactggtaccacgaggtgcctgacttccggcctgtgcacaacaagtctgagcccgcctgggagtgggaggatgcccagggcttcagcgccctgctgcacagcgggaaatgtgagtgcaaggagcagaccctgggcaatgccaaggccttctgtggcatgaagtacagctatgtgctgaagatcaagatcctgagcgcccatgacaagggcacccacgtggaggtgaatgtgaagatcaagaaggtgctgaagagcaccaagctgaagatcttccggggcaagaggaccctgtacccagagagctggacagaccggggctgcacctgccccatcctgaaccctggcctggagtacctggtggccggccacgaggacatcagaacaggcaagctgattgtgaacatgaagagctttgtgcagcactggaagcccagcctgggcaggaaggtgatggacatcctgaagcgggagtgcaagtag

SEQ ID NO: 161414 - DNA, 1818 bp, synthetic construct
  misc_feature 1..1818: note = Description of Artificial Sequence: Synthetic coding sequence
  source 1..1818: mol_type = other DNA
atgggcagctgtgcccggctgctgctgctgtggggctgcaccgtggtggccgccggcctgtctggagtggccggcgtgagcagccgctgtgagaaggcctgcaaccccaggatgggcaacctggccctgggcaggaagctgtgggccgacaccacctgtggccagaatgccacagagctgtactgcttctacagcgagaacacagacctgacctgccggcagcccaagtgtgacaagtgcaatgctgcctacccccacctggcccacctgcccagcgccatggctgacagcagcttccgcttccccaggacctggtggcagagcgcagaagatgtgcaccgggagaagatccagctggacctggaggccgagttctacttcacccacctgattgtgatgttcaagagccccaggcctgctgccatggtgctggacaggagccaggactttgggaagacctggaagccctacaagtactttgccaccaactgcagcgccaccttcggcctggaggatgatgtggtgaagaagggggccatctgcaccagcaagtacagcagccccttcccctgcaccggcggggaggtgatcttcaaggccctgagccccccctatgacacagagaacccctacagcgccaaggtgcaggagcagctgaagatcaccaacctgcgggtgcagctgctgaagaggcagagctgcccctgccagagaaatgacctgaatgaggagccccagcacttcacccactacgccatctatgacttcatcgtgaagggcagctgcttctgcaatggacatgctgaccagtgcatccctgtgcacggcttccggcctgtgaaggcccctggcaccttccacatggtgcacggcaagtgcatgtgcaagcacaacacagctggcagccactgccagcactgtgcccccctgtacaatgaccggccctgggaggccgcagatggcaagacaggagccccaaatgaatgtaggacctgcaagtgcaatggacatgctgacacctgccactttgatgtgaatgtgtgggaggccagcggcaacagaagtggaggagtgtgtgatgactgccagcacaacacagagggccagtactgccagcgctgcaagccaggcttctacagagacctgcggcggcccttcagcgccccagatgcctgcaagccctgcagctgccaccctgtgggcagcgctgtgctgcctgccaacagcgtgaccttctgtgaccccagcaatggagactgcccctgcaagccaggagtggccggcagaagatgtgaccgctgcatggtgggctactggggctttggagactatggctgccggccctgtgactgtgccggcagctgtgaccccatcactggagactgcatcagcagccacacagacatcgactggtaccacgaggtgcctgacttccggcctgtgcacaacaagtctgagcccgcctgggagtgggaggatgcccagggcttcagcgccctgctgcacagcgtgctgaagatcaagatcctgagcgcccatgacaagggcacccacgtggaggtgaatgtgaagatcaagaaggtgctgaagagcaccaagctgaagatcttccggggcaagaggaccctgtacccagagagctggacagaccggggctgcacctgccccatcctgaaccctggcctggagtacctggtggccggccacgaggacatcagaacaggcaagctgattgtgaacatgaagagctttgtgcagcactggaagcccagcctgggcaggaaggtgatggacatcctgaagcgggagtgcaagtag

SEQ ID NO: 161415 - DNA, 1095 bp, synthetic construct
  misc_feature 1..1095: note = Description of Artificial Sequence: Synthetic coding sequence
  source 1..1095: mol_type = other DNA
atgtacctgagccgcttcctgagcatccacgccctgtgggtgacagtgtcctctgtgatgcagccctaccccctggtgtggggccactatgacctgtgcaagacccagatctacacagaggagggcaaggtgtgggactacatggcctgccagcctgagagcacagacatgaccaagtacctgaaggtgaagctggaccccccagacatcacctgtggggaccccccagagaccttctgtgccatgggcaacccctacatgtgcaacaatgaatgtgatgccagcaccccagagctggcccaccccccagagctgatgtttgattttgagggccgccaccccagcaccttctggcagagcgccacctggaaggagtaccccaagcccctgcaggtgaacatcaccctgtcctggagcaagaccatcgagctgacagacaacatcgtcatcacctttgagagcggccgcccagaccagatgatcctggagaagagcctggactatggccgcacctggcagccctaccagtactatgccacagactgcctggatgccttccacatggaccccaagtctgtgaaggacctgagccagcacacagtgctggagatcatctgcacagaggagtacagcacaggctacaccaccaacagcaagatcatccactttgagatcaaggacagatttgccttctttgctggcccccggctgaggaacatggccagcctgtatggccagctggacaccaccaagaagctgcgggacttcttcaccgtgacagacctgcgcatccggctgctgcggcctgctgtgggggagatctttgtggatgagctgcacctggcccgctacttctacgccatcagtgacatcaaggtgcggggccgctgcaagtgcaacctgcacgccaccgtgtgtgtgtatgacaacagcaagctgacctgtgaatgtgagcacaacaccaccggccctgactgtgggaagtgcaagaagaactaccagggccggccctggagccctggcagctacctgcccatccccaagggcacagccaacacctgcatccccagcatcagcagcatcggcagcaagtag

SEQ ID NO: 161416 - DNA, 1518 bp, synthetic construct
  misc_feature 1..1518: note = Description of Artificial Sequence: Synthetic coding sequence
  source 1..1518: mol_type = other DNA
atgtacctgagccgcttcctgagcatccacgccctgtgggtgacagtgtcctctgtgatgcagccctaccccctggtgtggggccactatgacctgtgcaagacccagatctacacagaggagggcaaggtgtgggactacatggcctgccagcctgagagcacagacatgaccaagtacctgaaggtgaagctggaccccccagacatcacctgtggggaccccccagagaccttctgtgccatgggcaacccctacatgtgcaacaatgaatgtgatgccagcaccccagagctggcccaccccccagagctgatgtttgattttgagggccgccaccccagcaccttctggcagagcgccacctggaaggagtaccccaagcccctgcaggtgaacatcaccctgtcctggagcaagaccatcgagctgacagacaacatcgtcatcacctttgagagcggccgcccagaccagatgatcctggagaagagcctggactatggccgcacctggcagccctaccagtactatgccacagactgcctggatgccttccacatggaccccaagtctgtgaaggacctgagccagcacacagtgctggagatcatctgcacagaggagtacagcacaggctacaccaccaacagcaagatcatccactttgagatcaaggacagatttgccttctttgctggcccccggctgaggaacatggccagcctgtatggccagctggacaccaccaagaagctgcgggacttcttcaccgtgacagacctgcgcatccggctgctgcggcctgctgtgggggagatctttgtggatgagctgcacctggcccgctacttctacgccatcagtgacatcaaggtgcggggccgctgcaagtgcaacctgcacgccaccgtgtgtgtgtatgacaacagcaagctgacctgtgaatgtgagcacaacaccaccggccctgactgtgggaagtgcaagaagaactaccagggccggccctggagccctggcagctacctgcccatccccaagggcacagccaacacctgcatccccagcatcagcagcatcggcaacccccccaagttcaaccgcatctggcccaacatcagcagcctggaggtgagcaaccccaagcaggagtgctactgcaaccccctgggcagcatccatgaccgctgcaatggaagtggcttctgtgagtgcaagacaggcaccaccggccccaagtgtgatgaatgtctgcccggcaacagctggcactacggctgccagcccaacgtgtgtgacaatgagctgctgcactgccagaatggaggcacctgccacaacaacgtgcgctgcctgtgcccagctgcctacacaggcatcctgtgtgagaagctgcgctgtgaggaggccggcagctgtggcagtgacagcggccagggcgcccctcctcatggcagccctgccctgctgctgctgaccaccctgctgggcacagccagccccctggtgttctag

SEQ ID NO: 161417 - DNA, 861 bp, synthetic construct
  misc_feature 1..861: note = Description of Artificial Sequence: Synthetic coding sequence
  source 1..861: mol_type = other DNA
atggccagcctgtatggccagctggacaccaccaagaagctgcgggacttcttcaccgtgacagacctgcgcatccggctgctgcggcctgctgtgggggagatctttgtggatgagctgcacctggcccgctacttctacgccatcagtgacatcaaggtgcggggccgctgcaagtgcaacctgcacgccaccgtgtgtgtgtatgacaacagcaagctgacctgtgaatgtgagcacaacaccactggaccagactgtgggaagtgcaagaagaactaccagggccggccctggagccctggcagctacctgcccatccccaagggcacagccaacacctgcatccccagcatcagcagcatcggcaacccccccaagttcaaccgcatctggcccaacatcagcagcctggaggtgagcaaccccaagcaggtggcccccaagctggccctgagcacagtgtcctctgtgcaggtggccaaccacaagcgggagtgctactgcaaccccctgggcagcatccatgaccgctgcaatggcagcggcttctgtgagtgcaagacaggcaccaccggccccaagtgtgatgagtgcctgcccggcaacagctggcactacggctgccagcccaacgtgtgtgacaatgagctgctgcactgccagaatggaggcacctgccacaacaacgtgcgctgcctgtgcccagctgcctacacaggcatcctgtgtgagaagctgcgctgtgaggaggccggcagctgtggcagtgacagcggccagggcgccccaccccacggcagccctgccctgctgctgctgaccaccctgctgggcacagccagccccctggtgttctag

SEQ ID NO: 161418 - DNA, 1029 bp, synthetic construct
  misc_feature 1..1029: note = Description of Artificial Sequence: Synthetic coding sequence
  source 1..1029: mol_type = other DNA
atggccagcctgtatggccagctggacaccaccaagaagctgcgggacttcttcaccgtgacagacctgcgcatccggctgctgcggcctgctgtgggggagatctttgtggatgagctgcacctggcccgctacttctacgccatcagtgacatcaaggtgcggggccgctgcaagtgcaacctgcacgccaccgtgtgtgtgtatgacaacagcaagctgacctgtgaatgtgagcacaacaccactggaccagactgtgggaagtgcaagaagaactaccagggccggccctggagccctggcagctacctgcccatccccaagggcacagccaacacctgcatccccagcatcagcagcatcggcaacccccccaagttcaaccgcatctggcccaacatcagcagcctggaggtgagcaaccccaagcaggtggcccccaagctggccctgagcacagtgtcctctgtgcaggtggccaaccacaagagggactgtgagtgcttcggccacagcaaccgctgcagctacatcgacctgctgaacacagtcatctgtgtgtcctgcaagcacaacacccggggccagcactgtgagctgtgccgcctgggctacttcagaaatgccagcgcccagctggatgatgaaaatgtgtgcatcgagtgctactgcaaccccctgggcagcatccatgaccgctgcaatggcagcggcttctgtgagtgcaagacaggcaccaccggccccaagtgtgatgagtgcctgcccggcaacagctggcactacggctgccagcccaacgtgtgtgacaatgagctgctgcactgccagaatggaggcacctgccacaacaacgtgcgctgcctgtgcccagctgcctacacaggcatcctgtgtgagaagctgcgctgtgaggaggccggcagctgtggcagtgacagcggccagggcgccccaccccacggcagccctgccctgctgctgctgaccaccctgctgggcacagccagccccctggtgttctag

SEQ ID NO: 161419 - DNA, 1485 bp, synthetic construct
  misc_feature 1..1485: note = Description of Artificial Sequence: Synthetic coding sequence
  source 1..1485: mol_type = other DNA
atgtacctgagccgcttcctgagcatccacgccctgtgggtgacagtgtcctctgtgatgcagccctaccccctggtgtggggccactatgacctgtgcaagacccagatctacacagaggagggcaaggtgtgggactacatggcctgccagcctgagagcacagacatgaccaagtacctgaaggtgaagctggaccccccagacatcacctgtggggaccccccagagaccttctgtgccatgggcaacccctacatgtgcaacaatgaatgtgatgccagcaccccagagctggcccaccccccagagctgatgtttgattttgagggccgccaccccagcaccttctggcagagcgccacctggaaggagtaccccaagcccctgcaggtgaacatcaccctgtcctggagcaagaccatcgagctgacagacaacatcgtcatcacctttgagagcggccgcccagaccagatgatcctggagaagagcctggactatggccgcacctggcagccctaccagtactatgccacagactgcctggatgccttccacatggaccccaagtctgtgaaggacctgagccagcacacagtgctggagatcatctgcacagaggagtacagcacaggctacaccaccaacagcaagatcatccactttgagatcaaggacagatttgccttctttgctggcccccggctgaggaacatggccagcctgtatggccagctggacaccaccaagaagctgcgggacttcttcaccgtgacagacctgcgcatccggctgctgcggcctgctgtgggggagatctttgtggatgagctgcacctggcccgctacttctacgccatcagtgacatcaaggtgcggggccgctgcaagtgcaacctgcacgccaccgtgtgtgtgtatgacaacagcaagctgacctgtgaatgtgagcacaacaccaccggccctgactgtgggaagtgcaagaagaactaccagggccggccctggagccctggcagctacctgcccatccccaagggcacagccaacacctgcatccccagcatcagcagcatcggcaactgtgaatgttttggccacagcaaccgctgcagctacatcgacctgctgaacacagtcatctgtgtgtcctgcaagcacaacacccggggccagcactgtgagctgtgccgcctgggctacttcagaaatgccagcgcccagctggatgatgaaaatgtgtgcatcgccaacgtgtgtgacaatgagctgctgcactgccagaatggaggcacctgccacaacaacgtgcgctgcctgtgcccagctgcctacacaggcatcctgtgtgagaagctgcgctgtgaggaggccggcagctgtggcagtgacagcggccagggcgccccaccccacggcagccctgccctgctgctgctgaccaccctgctgggcacagccagccccctggtgttctag

SEQ ID NO: 161420 - DNA, 1443 bp, synthetic construct
  misc_feature 1..1443: note = Description of Artificial Sequence: Synthetic coding sequence
  source 1..1443: mol_type = other DNA
atgtacctgagccgcttcctgagcatccacgccctgtgggtgacagtgtcctctgtgatgcagccctaccccctggtgtggggccactatgacctgtgcaagacccagatctacacagaggagggcaaggtgtgggactacatggcctgccagcctgagagcacagacatgaccaagtacctgaaggtgaagctggaccccccagacatcacctgtggggaccccccagagaccttctgtgccatgggcaacccctacatgtgcaacaatgaatgtgatgccagcaccccagagctggcccaccccccagagctgatgtttgattttgagggccgccaccccagcaccttctggcagagcgccacctggaaggagtaccccaagcccctgcaggtgaacatcaccctgtcctggagcaagaccatcgagctgacagacaacatcgtcatcacctttgagagcggccgcccagaccagatgatcctggagaagagcctggactatggccgcacctggcagccctaccagtactatgccacagactgcctggatgccttccacatggaccccaagtctgtgaaggacctgagccagcacacagtgctggagatcatctgcacagaggagtacagcacaggctacaccaccaacagcaagatcatccactttgagatcaaggacagatttgccttctttgctggcccccggctgaggaacatggccagcctgtatggccagctggacaccaccaagaagctgcgggacttcttcaccgtgacagacctgcgcatccggctgctgcggcctgctgtgggggagatctttgtggatgagctgcacctggcccgctacttctacgccatcagtgacatcaaggtgcggggccgctgcaagtgcaacctgcacgccaccgtgtgtgtgtatgacaacagcaagctgacctgtgaatgtgagcacaacaccaccggccctgactgtgggaagtgcaagaagaactaccagggccggccctggagccctggcagctacctgcccatccccaagggcacagccaacacctgcatccccagcatcagcagcatcggcaacccccccaagttcaaccgcatctggcccaacatcagcagcctggaggtgagcaaccccaagcaggtggcccccaagctggccctgagcacagtgtcctctgtgcaggtggccaaccacaagagggccaacgtgtgtgacaatgagctgctgcactgccagaatggaggcacctgccacaacaacgtgcgctgcctgtgcccagctgcctacacaggcatcctgtgtgagaagctgcgctgtgaggaggccggcagctgtggcagtgacagcggccagggcgccccaccccacggcagccctgccctgctgctgctgaccaccctgctgggcacagccagccccctggtgttctag

SEQ ID NO: 161421 - DNA, 1383 bp, synthetic construct
  misc_feature 1..1383: note = Description of Artificial Sequence: Synthetic coding sequence
  source 1..1383: mol_type = other DNA
atgtacctgagccgcttcctgagcatccacgccctgtgggtgacagtgtcctctgtgatgcagccctaccccctggtgtggggccactatgacctgtgcaagacccagatctacacagaggagggcaaggtgtgggactacatggcctgccagcctgagagcacagacatgaccaagtacctgaaggtgaagctggaccccccagacatcacctgtggggaccccccagagaccttctgtgccatgggcaacccctacatgtgcaacaatgaatgtgatgccagcaccccagagctggcccaccccccagagctgatgtttgattttgagggccgccaccccagcaccttctggcagagcgccacctggaaggagtaccccaagcccctgcaggtgaacatcaccctgtcctggagcaagaccatcgagctgacagacaacatcgtcatcacctttgagagcggccgcccagaccagatgatcctggagaagagcctggactatggccgcacctggcagccctaccagtactatgccacagactgcctggatgccttccacatggaccccaagtctgtgaaggacctgagccagcacacagtgctggagatcatctgcacagaggagtacagcacaggctacaccaccaacagcaagatcatccactttgagatcaaggacagatttgccttctttgctggcccccggctgaggaacatggccagcctgtatggccagctggacaccaccaagaagctgcgggacttcttcaccgtgacagacctgcgcatccggctgctgcggcctgctgtgggggagatctttgtggatgagctgcacctggcccgctacttctacgccatcagtgacatcaaggtgcggggccgctgcaagtgcaacctgcacgccaccgtgtgtgtgtatgacaacagcaagctgacctgtgaatgtgagcacaacaccaccggccctgactgtgggaagtgcaagaagaactaccagggccggccctggagccctggcagctacctgcccatccccaagggcacagccaacacctgcatccccagcatcagcagcatcggcaacccccccaagttcaaccgcatctggcccaacatcagcagcctggaggtgagcaaccccaagcaggccaacgtgtgtgacaatgagctgctgcactgccagaatggaggcacctgccacaacaacgtgcgctgcctgtgcccagctgcctacacaggcatcctgtgtgagaagctgcgctgtgaggaggccggcagctgtggcagtgacagcggccagggcgccccaccccacggcagccctgccctgctgctgctgaccaccctgctgggcacagccagccccctggtgttctag

SEQ ID NO: 161422 - DNA, 1620 bp, synthetic construct
  misc_feature 1..1620: note = Description of Artificial Sequence: Synthetic coding sequence
  source 1..1620: mol_type = other DNA
atgtacctgagccgcttcctgagcatccacgccctgtgggtgacagtgtcctctgtgatgcagccctaccccctggtgtggggccactatgacctgtgcaagacccagatctacacagaggagggcaaggtgtgggactacatggcctgccagcctgagagcacagacatgaccaagtacctgaaggtgaagctggaccccccagacatcacctgtggggaccccccagagaccttctgtgccatgggcaacccctacatgtgcaacaatgaatgtgatgccagcaccccagagctggcccaccccccagagctgatgtttgattttgagggccgccaccccagcaccttctggcagagcgccacctggaaggagtaccccaagcccctgcaggtgaacatcaccctgtcctggagcaagaccatcgagctgacagacaacatcgtcatcacctttgagagcggccgcccagaccagatgatcctggagaagagcctggactatggccgcacctggcagccctaccagtactatgccacagactgcctggatgccttccacatggaccccaagtctgtgaaggacctgagccagcacacagtgctggagatcatctgcacagaggagtacagcacaggctacaccaccaacagcaagatcatccactttgagatcaaggacagatttgccttctttgctggcccccggctgaggaacatggccagcctgtatggccagctggacaccaccaagaagctgcgggacttcttcaccgtgacagacctgcgcatccggctgctgcggcctgctgtgggggagatctttgtggatgagctgcacctggcccgctacttctacgccatcagtgacatcaaggtgcggggccgctgcaagtgcaacctgcacgccaccgtgtgtgtgtatgacaacagcaagctgacctgtgaatgtgagcacaacaccaccggccctgactgtgggaagtgcaagaagaactaccagggccggccctggagccctggcagctacctgcccatccccaagggcacagccaacacctgcatccccagcatcagcagcatcggcaactgtgaatgttttggccacagcaaccgctgcagctacatcgacctgctgaacacagtcatctgtgtgtcctgcaagcacaacacccggggccagcactgtgagctgtgccgcctgggctacttcagaaatgccagcgcccagctggatgatgaaaatgtgtgcatcgagtgctactgcaaccccctgggcagcatccatgaccgctgcaatggaagtggcttctgtgagtgcaagacaggcaccaccggccccaagtgtgatgaatgtctgcccggcaacagctggcactacggctgccagcccaacgtgtgtgacaatgagctgctgcactgccagaatggaggcacctgccacaacaacgtgcgctgcctgtgcccagctgcctacacaggcatcctgtgtgagaagctgcgctgtgaggaggccggcagctgtggcagtgacagcggccagggcgcccctcctcatggcagccctgccctgctgctgctgaccaccctgctgggcacagccagccccctggtgttctag

SEQ ID NO: 161423 - DNA, 1383 bp, synthetic construct
  misc_feature 1..1383: note = Description of Artificial Sequence: Synthetic coding sequence
  source 1..1383: mol_type = other DNA
atgtacctgagccgcttcctgagcatccacgccctgtgggtgacagtgtcctctgtgatgcagccctaccccctggtgtggggccactatgacctgtgcaagacccagatctacacagaggagggcaaggtgtgggactacatggcctgccagcctgagagcacagacatgaccaagtacctgaaggtgaagctggaccccccagacatcacctgtggggaccccccagagaccttctgtgccatgggcaacccctacatgtgcaacaatgaatgtgatgccagcaccccagagctggcccaccccccagagctgatgtttgattttgagggccgccaccccagcaccttctggcagagcgccacctggaaggagtaccccaagcccctgcaggtgaacatcaccctgtcctggagcaagaccatcgagctgacagacaacatcgtcatcacctttgagagcggccgcccagaccagatgatcctggagaagagcctggactatggccgcacctggcagccctaccagtactatgccacagactgcctggatgccttccacatggaccccaagtctgtgaaggacctgagccagcacacagtgctggagatcatctgcacagaggagtacagcacaggctacaccaccaacagcaagatcatccactttgagatcaaggacagatttgccttctttgctggcccccggctgaggaacatggccagcctgtatggccagctggacaccaccaagaagctgcgggacttcttcaccgtgacagacctgcgcatccggctgctgcggcctgctgtgggggagatctttgtggatgagctgcacctggcccgctacttctacgccatcagtgacatcaaggtgcggggccgctgcaagtgcaacctgcacgccaccgtgtgtgtgtatgacaacagcaagctgacctgtgaatgtgagcacaacaccaccggccctgactgtgggaagtgcaagaagaactaccagggccggccctggagccctggcagctacctgcccatccccaagggcacagccaacacctgtgacccctacctgaccagctgtggggacccccccaagttcaaccgcatctggcccaacatcagcagcctggaggtgagcaaccccaagcaggccaacgtgtgtgacaatgagctgctgcactgccagaatggaggcacctgccacaacaacgtgcgctgcctgtgcccagctgcctacacaggcatcctgtgtgagaagctgcgctgtgaggaggccggcagctgtggcagtgacagcggccagggcgccccaccccacggcagccctgccctgctgctgctgaccaccctgctgggcacagccagccccctggtgttctag

SEQ ID NO: 161424 - DNA, 1443 bp, synthetic construct; identical to SEQ ID NO: 161420
  misc_feature 1..1443: note = Description of Artificial Sequence: Synthetic coding sequence
  source 1..1443: mol_type = other DNA

SEQ ID NO: 161425 - DNA, 1485 bp, synthetic construct
  misc_feature 1..1485: note = Description of Artificial Sequence: Synthetic coding sequence
  source 1..1485: mol_type = other DNA
atgtacctgagccgcttcctgagcatccacgccctgtgggtgacagtgtcctctgtgatgcagccctaccccctggtgtggggccactatgacctgtgcaagacccagatctacacagaggagggcaaggtgtgggactacatggcctgccagcctgagagcacagacatgaccaagtacctgaaggtgaagctggaccccccagacatcacctgtggggaccccccagagaccttctgtgccatgggcaacccctacatgtgcaacaatgaatgtgatgccagcaccccagagctggcccaccccccagagctgatgtttgattttgagggccgccaccccagcaccttctggcagagcgccacctggaaggagtaccccaagcccctgcaggtgaacatcaccctgtcctggagcaagaccatcgagctgacagacaacatcgtcatcacctttgagagcggccgcccagaccagatgatcctggagaagagcctggactatggccgcacctggcagccctaccagtactatgccacagactgcctggatgccttccacatggaccccaagtctgtgaaggacctgagccagcacacagtgctggagatcatctgcacagaggagtacagcacaggctacaccaccaacagcaagatcatccactttgagatcaaggacagatttgccttctttgctggcccccggctgaggaacatggccagcctgtatggccagctggacaccaccaagaagctgcgggacttcttcaccgtgacagacctgcgcatccggctgctgcggcctgctgtgggggagatctttgtggatgagctgcacctggcccgctacttctacgccatcagtgacatcaaggtgcggggccgctgcaagtgcaacctgcacgccaccgtgtgtgtgtatgacaacagcaagctgacctgtgaatgtgagcacaacaccaccggccctgactgtgggaagtgcaagaagaactaccagggccggccctggagccctggcagctacctgcccatccccaagggcacagccaacacctgtgacccctacctgaccagctgtggggactgtgaatgttttggccacagcaaccgctgcagctacatcgacctgctgaacacagtcatctgtgtgtcctgcaagcacaacacccggggccagcactgtgagctgtgccgcctgggctacttcagaaatgccagcgcccagctggatgatgaaaatgtgtgcatcgccaacgtgtgtgacaatgagctgctgcactgccagaatggaggcacctgccacaacaacgtgcgctgcctgtgcccagctgcctacacaggcatcctgtgtgagaagctgcgctgtgaggaggccggcagctgtggcagtgacagcggccagggcgccccaccccacggcagccctgccctgctgctgctgaccaccctgctgggcacagccagccccctggtgttctag

SEQ ID NO: 161426 - DNA, 1620 bp, synthetic construct; identical to SEQ ID NO: 161422
  misc_feature 1..1620: note = Description of Artificial Sequence: Synthetic coding sequence
  source 1..1620: mol_type = other DNA

SEQ ID NO: 161427 - DNA, 1317 bp, synthetic construct
  misc_feature 1..1317: note = Description of Artificial Sequence: Synthetic coding sequence
  source 1..1317: mol_type = other DNA
atgtacctgagccgcttcctgagcatccacgccctgtgggtgacagtgtcctctgtgatgcagccctaccccctggtgtggggccactatgacctgtgcaagacccagatctacacagaggagggcaaggtgtgggactacatggcctgccagcctgagagcacagacatgaccaagtacctgaaggtgaagctggaccccccagacatcacctgtggggaccccccagagaccttctgtgccatgggcaacccctacatgtgcaacaatgaatgtgatgccagcaccccagagctggcccaccccccagagctgatgtttgattttgagggccgccaccccagcaccttctggcagagcgccacctggaaggagtaccccaagcccctgcaggtgaacatcaccctgtcctggagcaagaccatcgagctgacagacaacatcgtcatcacctttgagagcggccgcccagaccagatgatcctggagaagagcctggactatggccgcacctggcagccctaccagtactatgccacagactgcctggatgccttccacatggaccccaagtctgtgaaggacctgagccagcacacagtgctggagatcatctgcacagaggagtacagcacaggctacaccaccaacagcaagatcatccactttgagatcaaggacagatttgccttctttgctggcccccggctgaggaacatggccagcctgtatggccagctggacaccaccaagaagctgcgggacttcttcaccgtgacagacctgcgcatccggctgctgcggcctgctgtgggggagatctttgtggatgagctgcacctggcccgctacttctacgccatcagtgacatcaaggtgcggggccgctgcaagtgcaacctgcacgccaccgtgtgtgtgtatgacaacagcaagctgacctgtgaatgtgagcacaacaccaccggccctgactgtgggaagtgcaagaagaactaccagggccggccctggagccctggcagctacctgcccatccccaagggcacagccaacacctgcatccccagcatcagcagcatcggcaccaacgtgtgtgacaatgagctgctgcactgccagaatggaggcacctgccacaacaacgtgcgctgcctgtgcccagctgcctacacaggcatcctgtgtgagaagctgcgctgtgaggaggccggcagctgtggcagtgacagcggccagggcgccccaccccacggcagccctgccctgctgctgctgaccaccctgctgggcacagccagccccctggtgttctag

SEQ ID NO: 161428 - DNA, 1095 bp, synthetic construct; identical to SEQ ID NO: 161415
  misc_feature 1..1095: note = Description of Artificial Sequence: Synthetic coding sequence
  source 1..1095: mol_type = other DNA

SEQ ID NO: 161429 - DNA, 1317 bp, synthetic construct
  misc_feature 1..1317: note = Description of Artificial Sequence: Synthetic coding sequence
  source 1..1317: mol_type = other DNA
atgtacctgagccgcttcctgagcatccacgccctgtgggtgacagtgtcctctgtgatgcagccctaccccctggtgtggggccactatgacctgtgcaagacccagatctacacagaggagggcaaggtgtgggactacatggcctgccagcctgagagcacagacatgaccaagtacctgaaggtgaagctggaccccccagacatcacctgtggggaccccccagagaccttctgtgccatgggcaacccctacatgtgcaacaatgaatgtgatgccagcaccccagagctggcccaccccccagagctgatgtttgattttgagggccgccaccccagcaccttctggcagagcgccacctggaaggagtaccccaagcccctgcaggtgaacatcaccctgtcctggagcaagaccatcgagctgacagacaacatcgtcatcacctttgagagcggccgcccagaccagatgatcctggagaagagcctggactatggccgcacctggcagccctaccagtactatgccacagactgcctggatgccttccacatggaccccaagtctgtgaaggacctgagccagcacacagtgctggagatcatctgcacagaggagtacagcacaggctacaccaccaacagcaagatcatccactttgagatcaaggacagatttgccttctttgctggcccccggctgaggaacatggccagcctgtatggccagctggacaccaccaagaagctgcgggacttcttcaccgtgacagacctgcgcatccggctgctgcggcctgctgtgggggagatctttgtggatgagctgcacctggcccgctacttctacgccatcagtgacatcaaggtgcggggccgctgcaagtgcaacctgcacgccaccgtgtgtgtgtatgacaacagcaagctgacctgtgaatgtgagcacaacaccaccggccctgactgtgggaagtgcaagaagaactaccagggccggccctggagccctggcagctacctgcccatccccaagggcacagccaacacctacctgcccagcatgtacagcgtggccgccaacgtgtgtgacaatgagctgctgcactgccagaatggaggcacctgccacaacaacgtgcgctgcctgtgcccagctgcctacacaggcatcctgtgtgagaagctgcgctgtgaggaggccggcagctgtggcagtgacagcggccagggcgccccaccccacggcagccctgccctgctgctgctgaccaccctgctgggcacagccagccccctggtgttctag

SEQ ID NO: 161430 - DNA, 1620 bp, synthetic construct
  misc_feature 1..1620: note = Description of Artificial Sequence: Synthetic coding sequence
  source 1..1620: mol_type = other DNA
atgtacctgagccgcttcctgagcatccacgccctgtgggtgacagtgtcctctgtgatgcagccctaccccctggtgtggggccactatgacctgtgcaagacccagatctacacagaggagggcaaggtgtgggactacatggcctgccagcctgagagcacagacatgaccaagtacctgaaggtgaagctggaccccccagacatcacctgtggggaccccccagagaccttctgtgccatgggcaacccctacatgtgcaacaatgaatgtgatgccagcaccccagagctggcccaccccccagagctgatgtttgattttgagggccgccaccccagcaccttctggcagagcgccacctggaaggagtaccccaagcccctgcaggtgaacatcaccctgtcctggagcaagaccatcgagctgacagacaacatcgtcatcacctttgagagcggccgcccagaccagatgatcctggagaagagcctggactatggccgcacctggcagccctaccagtactatgccacagactgcctggatgccttccacatggaccccaagtctgtgaaggacctgagccagcacacagtgctggagatcatctgcacagaggagtacagcacaggctacaccaccaacagcaagatcatccactttgagatcaaggacagatttgccttctttgctggcccccggctgaggaacatggccagcctgtatggccagctggacaccaccaagaagctgcgggacttcttcaccgtgacagacctgcgcatccggctgctgcggcctgctgtgggggagatctttgtggatgagctgcacctggcccgctacttctacgccatcagtgacatcaaggtgcggggccgctgcaagtgcaacctgcacgccaccgtgtgtgtgtatgacaacagcaagctgacctgtgaatgtgagcacaacaccaccggccctgactgtgggaagtgcaagaagaactaccagggccggccctggagccctggcagctacctgcccatccccaagggcacagccaacacctgtgacccctacctgaccagctgtggggactgtgaatgttttggccacagcaaccgctgcagctacatcgacctgctgaacacagtcatctgtgtgtcctgcaagcacaacacccggggccagcactgtgagctgtgccgcctgggctacttcagaaatgccagcgcccagctggatgatgaaaatgtgtgcatcgagtgctactgcaaccccctgggcagcatccatgaccgctgcaatggaagtggcttctgtgagtgcaagacaggcaccaccggccccaagtgtgatgaatgtctgcccggcaacagctggcactacggctgccagcccaacgtgtgtgacaatgagctgctgcactgccagaatggaggcacctgccacaacaacgtgcgctgcctgtgcccagctgcctacacaggcatcctgtgtgagaagctgcgctgtgaggaggccggcagctgtggcagtgacagcggccagggcgcccctcctcatggcagccctgccctgctgctgctgaccaccctgctgggcacagccagccccctggtgttctag

SEQ ID NO: 161431 - DNA, 519 bp, synthetic construct
  misc_feature 1..519: note = Description of Artificial Sequence: Synthetic coding sequence
  source 1..519: mol_type = other DNA
atggtgggccctgccccccggcggcggctgcggcccctggccgccctggccctggtgctggccctggcccctggcctgcccacagcccgggccggccagacccccaggcctgctgagcggggcccccctgtgcggctcttcacagaggaggagctggcccgctatggaggagaggaggaggaccagcccatctacctggccgtgaagggcgtggtgtttgatgtgaccagcggcaaggagttctacggccgcggggccccctacaatgccctgaccgggaaggacagcacccggggcgtggccaagatgagcctggaccctgctgacctgacccatgacaccaccggcctgacagccaaggagctggaggccctggatgaggtgttcaccaaggtgtacaaggccaagtaccccatcgtgggctacacagcccggcgcatcctgaatgaagatggcagccccaacctggacttcaagccagaggaccagccccactttgacatcaaggatgagttctag

SEQ ID NO: 161432 - DNA, 2088 bp, synthetic construct
  misc_feature 1..2088: note = Description of Artificial Sequence: Synthetic coding sequence
  source 1..2088: mol_type = other DNA
atgagcctgctgctgtccttctacctgctgggcctgctggtgagcagcggccaggacagatttgccatgctggccaacaacaacctgcagatcctgaacatcaacaagagtgatgagggcatctaccgctgtgagggccgggtggaggcccggggggagattgacttccgggacatcatcgtcatcgtgaatgtgcccccagccatctccatgccccagaagagcttcaatgccacagctgagcggggggaggagatgaccttcagctgccgggccagcggcagccctgagcccgccatctcctggttcagaaatggcaagctgattgaagaaaatgagaagtacatcctgaagggcagcaacacagagctgactgtgaggaacatcatcaacagtgatggcggcccctacgtgtgccgggccaccaacaaggctggagaagatgagaagcaggccttcctgcaggtgtttgtgcagccccacatcatccagctgaagaatgagaccacctatgaaaatggccaggtgaccctggtgtgtgatgctgagggggagcccatccctgagatcacctggaagagagctgtggatggcttcaccttcacagaaggagacaagagcctggatggccgcatcgaggtgaagggccagcacggcagcagcagcctgcacatcaaggatgtgaagctgagtgacagcggccgctatgactgtgaggccgccagccgcatcggcggccaccagaagtccatgtacctggacattgaatatgcccccaagttcatcagcaaccagaccatctactacagctgggagggcaaccccatcaacatcagctgtgatgtgaagagcaaccccccagccagcatccactggaggcgggacaagctggtgctgcctgccaagaacaccaccaacctgaagacctacagcacaggcaggaagatgatcctggagatcgcccccaccagtgacaatgactttggccgctacaactgcacagccaccaaccacatcggcacccgcttccaggagtacatcctggccctggctgatgtgcccagcagcccctacggcgtgaagatcatcgagctgagccagaccacagccaaggtgtccttcaacaagccagacagccacggcggcgtgcccatccaccactaccaggtggatgtgaaggaggtggccagcgagatctggaagatcgtgcgcagccacggcgtgcagaccatggtggtgctgaacaacctggagcccaacaccacctatgagatccgggtggccgctgtgaatggcaagggccagggcgactacagcaagattgagatcttccagaccctgcctgtgcgggagcccagcccccccagcatccacggccagcccagcagcggcaagagcttcaagctgagcatcaccaagcaggatgatggaggagcccccatcctggagtacatcgtgaagtaccgcagcaaggacaaggaggaccagtggctggagaagaaggtgcagggcaacaaggaccacatcatcctggagcacctgcagtggaccatgggctatgaggtgcagatcacagctgccaaccggctgggctacagcgagcccaccgtgtatgagttctccatgccacccaagcccaacatcatcaaggacaccctcttcaacggcctgggcctgggcgctgtgattggcctgggcgtggccgccctgctgctgatcctggtggtgacagatgtgtcctgcttcttcatccggcagtgtggcctgctgatgtgcatcaccaggaggatgtgtgggaagaagagcggcagcagcggcaagagcaaggagctggaggagggcaaggccgcctacctgaaggatggcagcaaggagcccatcgtggagatgaggacagaagatgagcgggtgaccaaccatgaagatggcagccctgtgaatgagcccaatgagaccacccccctgacagagcctgagaagctgcccctgaaggaggaggatggcaaggaggccctgaaccctgagaccatcgagatcaaggtgtccaatgacatcatccagagcaaggaggatgacagcaaggcctag

SEQ ID NO: 161433 - DNA, 2514 bp, synthetic construct
  misc_feature 1..2514: note = Description of Artificial Sequence: Synthetic coding sequence
  source 1..2514: mol_type = other DNA
atgagcctgctgctgtccttctacctgctgggcctgctggtgagcagcggccaggccctgctgcaggtgaccatcagcctgagcaaggtggagctgtctgtgggggagagcaagttcttcacctgcacagccatcggggagcctgagagcattgactggtacaacccccagggcgagaagatcatcagcacccagagggtggtggtgcagaaggagggcgtgcgcagccggctgaccatctacaatgccaacattgaagatgctggcatctaccgctgccaggccacagatgccaagggccagacccaggaggccaccgtggtgctggagatctaccagaagctgaccttccgggaggtggtgagcccccaggagttcaagcagggagaagatgctgaggtggtgtgccgggtgagcagcagccctgccccagctgtgtcctggctgtaccacaatgaggaggtgaccaccatcagtgacaacagatttgccatgctggccaacaacaacctgcagatcctgaacatcaacaagagtgatgagggcatctaccgctgtgagggccgggtggaggcccggggggagattgacttccgggacatcatcgtcatcgtgaatgtgcccccagccatctccatgccccagaagagcttcaatgccacagctgagcggggggaggagatgaccttcagctgccgggccagcggcagccctgagcccgccatctcctggttcagaaatggcaagctgattgaagaaaatgagaagtacatcctgaagggcagcaacacagagctgactgtgaggaacatcatcaacagtgatggcggcccctacgtgtgccgggccaccaacaaggctggagaagatgagaagcaggccttcctgcaggtgtttgtgcagccccacatcatccagctgaagaatgagaccacctatgaaaatggccaggtgaccctggtgtgtgatgctgagggggagcccatccctgagatcacctggaagagagctgtggatggcttcaccttcacagaaggagacaagagcctggatggccgcatcgaggtgaagggccagcacggcagcagcagcctgcacatcaaggatgtgaagctgagtgacagcggccgctatgactgtgaggccgccagccgcatcggcggccaccagaagtccatgtacctggacattgaatatgcccccaagttcatcagcaaccagaccatctactacagctgggagggcaaccccatcaacatcagctgtgatgtgaagagcaaccccccagccagcatccactggaggcgggacaagctggtgctgcctgccaagaacaccaccaacctgaagacctacagcacaggcaggaagatgatcctggagatcgcccccaccagtgacaatgactttggccgctacaactgcacagccaccaaccacatcggcacccgcttccaggagtacatcctggccctggctgatgtgcccagcagcccctacggcgtgaagatcatcgagctgagccagaccacagccaaggtgtccttcaacaagccagacagccacggcggcgtgcccatccaccactaccaggtggatgtgaaggaggtggccagcgagatctggaagatcgtgcgcagccacggcgtgcagaccatggtggtgctgaacaacctggagcccaacaccacctatgagatccgggtggccgctgtgaatggcaagggccagggcgactacagcaagattgagatcttccagaccctgcctgtgcgggagcccagcccccccagcatccacggccagcccagcagcggcaagagcttcaagctgagcatcaccaagcaggatgatggaggagcccccatcctggagtacatcgtgaagtaccgcagcaaggacaaggaggaccagtggctggagaagaaggtgcagggcaacaaggaccacatcatcctggagcacctgcagtggaccatgggctatgaggtgcagatcacagctgccaaccggctgggctacagcgagcccaccgtgtatgagttctccatgccacccaagcccaacatcatcaaggacaccctcttcaacggcctgggcctgggcgctgtgattggcctgggcgtggccgccctgctgctgatcctggtggtgacagatgtgtcctgcttcttcatccggcagtgtggcctgctgatgtgcatcaccaggaggatgtgtgggaagaagagcggcagcagcggcaagagcaaggagctggaggagggcaaggccgcctacctgaaggatggcagcaaggagcccatcgtggagatgaggacagaagatgagcgggtgaccaaccatgaagatggcagccctgtgaatgagcccaatgagaccacccccctgacagagcctgagaagctgcccctgaaggaggaggatggcaaggaggccctgaaccctgagaccatcgagatcaaggtgtccaatgacatcatccagagcaaggaggatgacagcaaggcctag

SEQ ID NO: 161434 - DNA, 1275 bp, synthetic construct
  misc_feature 1..1275: note = Description of Artificial Sequence: Synthetic coding sequence
  source 1..1275: mol_type = other DNA
atggtgcggagtgacagcggcggccaggtgtacctggactaccacaaccggcagggcctgtttgtggactggaagtacaatgaggccctgtacctggaggagggccagcctgagacctactacagaacagccctgctgcaggtgaccatcagcctgagcaaggtggagctgtctgtgggggagagcaagttcttcacctgcacagccatcggggagcctgagagcattgactggtacaacccccagggcgagaagatcatcagcacccagagggtggtggtgcagaaggagggcgtgcgcagccggctgaccatctacaatgccaacattgaagatgctggcatctaccgctgccaggccacagatgccaagggccagacccaggaggccaccgtggtgctggagatctaccagaagctgaccttccgggaggtggtgagcccccaggagttcaagcagggagaagatgctgaggtggtgtgccgggtgagcagcagccctgccccagctgtgtcctggctgtaccacaatgaggaggtgaccaccatcagtgacaacagatttgccatgctggccaacaacaacctgcagatcctgaacatcaacaagagtgatgagggcatctaccgctgtgagggccgggtggaggcccggggggagattgacttccgggacatcatcgtgattgtgaatgtgcccccagccatctccatgccccagaagagcttcaatgccacagctgagcggggggaggagatgaccttcagctgccgggccagcggcagccctgagcccgccatctcctggttcagaaatggcaagctgattgaggagaatgagaagtacatcctgaagggcagcaacacagagctgactgtgaggaacatcatcaacagtgatggcggcccctacgtgtgccgggccaccaacaaggccggggaggatgagaagcaggccttcctgcaggtgtttgtgcagccccacatcatccagctgaagaatgagaccacctatgaaaatggccaggtgaccctggtgtgtgatgctgagggggagcccatccctgagatcacctggaagagagctgtggatggcttcaccttcacagaaggagacaagagcctggatggaagaattgaggtgaagggccagcacggcagcagcagcctgcacatcaaggatgtgaagctgagtgacagcggccgctatgactgtgaggccgccagcagaattggaggccaccagaagtccatgtacctggacatcgagagctag

SEQ ID NO: 161435 - DNA, 1983 bp, synthetic construct
  misc_feature 1..1983: note = Description of Artificial Sequence: Synthetic coding sequence
  source 1..1983: mol_type = other DNA
atgcaggagaacctgcgctttgccagcagtggagatgacatcaagatctgggatgccagctccatgaccctggtggacaagttcaacccccacaccagcccccacggcatcagcagcatctgctggagcagcaacaacaacttcctggtgacagccagcagcagcggggacaagatcgtggtgagcagctgcaagtgcaagcctgtgcccctgctggagctggccgagggccagaagcagacctgtgtgaacctgaacagcacctccatgtacctggtgtctgggggcctgaacaacacagtgaacatctgggacctgaagagcaagagggtgcacaggagcctgaaggaccacaaggaccaggtgacctgtgtgacctacaactggaatgactgctacatcgccagcggcagcctgagcggggagatcatcctgcacagcgtgaccaccaacctgagcagcaccccatttggacatggcagcaaccagagcgtgcgccacctgaagtacagcctcttcaagaagagcctgctgggctctgtgtctgacaatggcatcgtgaccctgtgggatgtgaacagccagagcccctaccacaactttgattctgtgcacaaggccccagccagcggcatctgcttcagccctgtgaatgagctgctgtttgtgaccatcggcctggacaagaggatcatcctgtatgacaccagcagcaagaagctggtgaagaccctggtggccgacacccccctgacagctgtggacttcatgccagatggagccaccctggccatcggcagcagccggggcaagatctaccagtatgacctgaggatgctgaagagccctgtgaagaccatcagcgcccacaagacctctgtgcagtgcatcgccttccagtacagcacagtgctgaccaagagcagcctgaacaagggctgcagcaacaagcccaccaccgtgaacaagaggtctgtgaatgtgaatgctgccagcggcggcgtgcagaacagcggcatcgtgcgggaggccccagccaccagcatcgccaccgtgctgccccagcccatgaccagcgccatgggcaaaggaacagtggccgtgcaggagaaggccggcctgcccaggagcatcaacacagacaccctgagcaaggagacagattctgggaagaaccaggacttcagcagctttgatgacaccgggaagagcagcctgggggacatgttcagccccatcagagatgatgctgtggtgaacaagggcagtgatgagagcattggaaaaggagatggctttgacttcctgccccagctgaacagcgtcttcccccccaggaagaaccctgtgaccagcagcacctctgtgctgcacagcagccccctgaatgtgttcatgggcagccctgggaaggaggagaatgaaaatagagacctgacagctgagagcaagaagatctacatgggcaagcaggagagcaaggacagcttcaagcagctggccaagctggtgaccagcggggctgagagcggcaacctgaacaccagccccagcagcaaccagaccagaaattctgagaagtttgagaagccagaaaatgaaattgaggcccagctgatctgtgagccccccatcaatggcagcagcacccccaaccccaagatcgccagctctgtgacagctggggtggccagcagcctgtctgagaagattgctgacagcatcggcaacaaccggcagaatgcccccctgaccagcatccagatccgcttcatccagaacatgatccaggagaccctggatgacttccgggaggcctgccaccgggacatcgtgaacctgcaggtggagatgatcaagcagttccacatgcagctgaatgagatgcacagcctgctggagcgctacagcgtgaatgaaggcctggtggccgagattgaaaggctgcgggaggagaacaagaggctgcgggcccacttctag

SEQ ID NO: 161436 - DNA, 1716 bp, synthetic construct
  misc_feature 1..1716: note = Description of Artificial Sequence: Synthetic coding sequence
  source 1..1716: mol_type = other DNA
atgtacctggtgtctgggggcctgaacaacacagtgaacatctgggacctgaagagcaagagggtgcacaggagcctgaaggaccacaaggaccaggtgacctgtgtgacctacaactggaatgactgctacatcgccagcggcagcctgtctggagagatcatcctgcacagcgtgaccaccaacctgagcagcacccccttcggccacggcagcaaccagagcgtgcgccacctgaagtacagcctcttcaagaagagcctgctgggctctgtgtctgacaatggaattgtgaccctgtgggatgtgaacagccagagcccctaccacaactttgacagcgtgcacaaggccccagccagcggcatctgcttcagccctgtgaatgagctgctgtttgtgaccatcggcctggacaagaggatcatcctgtatgacaccagcagcaagaagctggtgaagaccctggtggccgacacccccctgacagctgtggacttcatgccagatggagccaccctggccatcggcagcagccggggcaagatctaccagtatgacctgaggatgctgaagagccctgtgaagaccatcagcgcccacaagacctctgtgcagtgcatcgccttccagtacagcacagtgctgaccaagagcagcctgaacaagggctgcagcaacaagcccaccaccgtgaacaagaggtctgtgaatgtgaatgctgccagcggaggagtgcagaacagcggcatcgtgcgggaggccccagccaccagcatcgccaccgtgctgccccagcccatgaccagcgccatgggcaagggcaccgtggccgtgcaggagaaggccggcctgcccaggagcatcaacacagacaccctgagcaaggagacagacagcggcaagaaccaggacttcagcagctttgatgacaccgggaagagcagcctgggggacatgttcagccccatcagagatgatgctgtggtgaacaagggcagtgatgagagcatcggcaaaggagatggctttgacttcctgccccagctgaacagcgtcttcccccccaggaagaaccctgtgaccagcagcacctctgtgctgcacagcagccccctgaatgtgttcatgggcagccctgggaaggaggagaatgaaaatagagacctgacagctgagagcaagaagatctacatgggcaagcaggagagcaaggacagcttcaagcagctggccaagctggtgaccagcggggctgagagcggcaacctgaacaccagccccagcagcaaccagaccaggaacagcgagaagtttgagaagccagaaaatgaaattgaggcccagctgatctgtgagccccccatcaatggcagcagcacccccaaccccaagatcgccagctctgtgacagctggggtggccagcagcctgtctgagaagattgctgacagcatcggcaacaaccggcagaatgcccccctgaccagcatccagatccgcttcatccagaacatgatccaggagaccctggatgacttccgggaggcctgccaccgggacatcgtgaacctgcaggtggagatgatcaagcagttccacatgcagctgaatgagatgcacagcctgctggagcgctacagcgtgaatgaaggcctggtggccgagattgagcggctgcgggaggagaacaagaggctgcgggcccacttctag

SEQ ID NO: 161437 - DNA, 1983 bp, synthetic construct; identical to SEQ ID NO: 161435
  misc_feature 1..1983: note = Description of Artificial Sequence: Synthetic coding sequence
  source 1..1983: mol_type = other DNA

SEQ ID NO: 161438 - DNA, 1716 bp, synthetic construct; identical to SEQ ID NO: 161436
  misc_feature 1..1716: note = Description of Artificial Sequence: Synthetic coding sequence
  source 1..1716: mol_type = other DNA

SEQ ID NO: 161439 - DNA, 483 bp, synthetic construct
  misc_feature 1..483: note = Description of Artificial Sequence: Synthetic coding sequence
  source 1..483: mol_type = other DNA
atgtacctggtgtctgggggcctgaacaacacagtgaacatctgggacctgaagagcaagagggtgcacaggagcctgaaggaccacaaggaccaggtgacctgtgtgacctacaactggaatgactgctacatcgccagcggcagcctgtctggagagatcatcctgcacagcgtgaccaccaacctgagcagcacccccttcggccacggcagcaaccagagcgtgcgccacctgaagtacagcctcttcaagaagagcctgctgggctctgtgtctgacaatggaattgtgaccctgtgggatgtgaacagccagagcccctaccacaactttgacagcgtgcacaaggccccagccagcggcatctgcttcagccctgtgaatgagctgctgtttgtgaccatcggcctggacaagaggatcatcctgtatgacaccagcagcaagaagctggtgaagaccctggtggccgacacctag

SEQ ID NO: 161440 - DNA, 504 bp, synthetic construct
  misc_feature 1..504: note = Description of Artificial Sequence: Synthetic coding sequence
  source 1..504: mol_type = other DNA
atgcacttcaccggggctgtgatgcaggagaacctgcgctttgccagcagtggagatgacatcaagatctgggatgccagctccatgaccctggtggacaagttcaacccccacaccagcccccacggcatcagcagcatctgctggagcagcaacaacaacttcctggtgacagccagcagcagcggggacaagatcgtggtgagcagctgcaagtgcaagcctgtgcccctgctggagctggccgagggccagaagcagacctgtgtgaacctgaacagcacctccatgtacctggtgtctgggggcctgaacaacacagtgaacatctgggacctgaagagcaagagggtgcacaggagcctgaaggaccacaaggaccaggtgacctgtgtgacctacaactggaatgactgctacatcgccagcggcagcctgtctggagagatcatcctgcacagcgtgaccaccaacctgagcagcacccccttcggccacggctag

SEQ ID NO: 161441 - DNA, 306 bp, synthetic construct
  misc_feature 1..306: note = Description of Artificial Sequence: Synthetic coding sequence
  source 1..306: mol_type = other DNA
atgcaggagaacctgcgctttgccagcagtggagatgacatcaagatctgggatgccagctccatgaccctggtggacaagttcaacccccacaccagcccccacggcatcagcagcatctgctggagcagcaacaacaacttcctggtgacagccagcagcagcggggacaagatcgtggtgagcagctgcaagtgcaagcctgtgcccctgctggagctggccgagggccagaagcagacctgtgtgaacctgaacagcacctccatgtacctggtgtctgggggcctgaacaacacagtgtag

SEQ ID NO: 161442 - DNA, 498 bp, synthetic construct
  misc_feature 1..498: note = Description of Artificial Sequence: Synthetic coding sequence
  source 1..498: mol_type = other DNA
atgcaggagaacctgcgctttgccagcagtggagatgacatcaagatctgggatgccagctccatgaccctggtggacaagttcaacccccacaccagcccccacggcatcagcagcatctgctggagcagcaacaacaacttcctggtgacagccagcagcagcggggacaagatcgtggtgagcagctgcaagtgcaagcctgtgcccctgctggagctggccgagggccagaagcagacctgtgtgaacctgaacagcacctccatgtacctggtgtctgggggcctgaacaacacagtgaacatctgggacctgaagagcaagagggtgcacaggagcctgaaggaccacaaggaccaggtgacctgtgtgacctacaactggaatgactgctacatcgccagcggcagcctgagcggggagatcatcctgcacagcgtgaccaccaacctgagcagcaccccatttggacatggcagcaaccagagcgtgtag

SEQ ID NO: 161443 - DNA, 2004 bp, synthetic construct
  misc_feature 1..2004: note = Description of Artificial Sequence: Synthetic coding sequence
  source 1..2004: mol_type = other DNA
atgcacttcaccggggctgtgatgcaggagaacctgcgctttgccagcagtggagatgacatcaagatctgggatgccagctccatgaccctggtggacaagttcaacccccacaccagcccccacggcatcagcagcatctgctggagcagcaacaacaacttcctggtgacagccagcagcagcggggacaagatcgtggtgagcagctgcaagtgcaagcctgtgcccctgctggagctggccgagggccagaagcagacctgtgtgaacctgaacagcacctccatgtacctggtgtctgggggcctgaacaacacagtgaacatctgggacctgaagagcaagagggtgcacaggagcctgaaggaccacaaggaccaggtgacctgtgtgacctacaactggaatgactgctacatcgccagcggcagcctgtctggagagatcatcctgcacagcgtgaccaccaacctgagcagcacccccttcggccacggcagcaaccagagcgtgcgccacctgaagtacagcctcttcaagaagagcctgctgggctctgtgtctgacaatggaattgtgaccctgtgggatgtgaacagccagagcccctaccacaactttgacagcgtgcacaaggccccagccagcggcatctgcttcagccctgtgaatgagctgctgtttgtgaccatcggcctggacaagaggatcatcctgtatgacaccagcagcaagaagctggtgaagaccctggtggccgacacccccctgacagctgtggacttcatgccagatggagccaccctggccatcggcagcagccggggcaagatctaccagtatgacctgaggatgctgaagagccctgtgaagaccatcagcgcccacaagacctctgtgcagtgcatcgccttccagtacagcacagtgctgaccaagagcagcctgaacaagggctgcagcaacaagcccaccaccgtgaacaagaggtctgtgaatgtgaatgctgccagcggaggagtgcagaacagcggcatcgtgcgggaggccccagccaccagcatcgccaccgtgctgccccagcccatgaccagcgccatgggcaagggcaccgtggccgtgcaggagaaggccggcctgcccaggagcatcaacacagacaccctgagcaaggagacagacagcggcaagaaccaggacttcagcagctttgatgacaccgggaagagcagcctgggggacatgttcagccccatcagagatgatgctgtggtgaacaagggcagtgatgagagcatcggcaaaggagatggctttgacttcctgccccagctgaacagcgtcttcccccccaggaagaaccctgtgaccagcagcacctctgtgctgcacagcagccccctgaatgtgttcatgggcagccctgggaaggaggagaatgaaaatagagacctgacagctgagagcaagaagatctacatgggcaagcaggagagcaaggacagcttcaagcagctggccaagctggtgaccagcggggctgagagcggcaacctgaacaccagccccagcagcaaccagaccaggaacagcgagaagtttgagaagccagaaaatgaaattgaggcccagctgatctgtgagccccccatcaatggcagcagcacccccaaccccaagatcgccagctctgtgacagctggggtggccagcagcctgtctgagaagattgctgacagcatcggcaacaaccggcagaatgcccccctgaccagcatccagatccgcttcatccagaacatgatccaggagaccctggatgacttccgggaggcctgccaccgggacatcgtgaacctgcaggtggagatgatcaagcagttccacatgcagctgaatgagatgcacagcctgctggagcgctacagcgtgaatgaaggcctggtggccgagattgagcggctgcgggaggagaacaagaggctgcgggcccacttctag

SEQ ID NO: 161444 - DNA, 3744 bp, synthetic construct
  misc_feature 1..3744: note = Description of Artificial Sequence: Synthetic coding sequence
  source 1..3744: mol_type = other DNA
atggcccagagcctgcggctgcactttgctgcccggcgcagcaacacctaccccctgtctgagaccagcggagatgacctggacagccacgtgcacatgtgcttcaagaggcccacccgcatcagcaccagcaatgtggtgcagatgaagctgaccccccggcagacagccctggcccccctcatcaaggaaaatgtgcagagccaggagaggagctctgtgcccagcagtgaaaatgtgaacaagaagagcagctgcctgcagatcagcctgcagcccacccgctacagcggctacctgcagagcagcaatgtgctggccgacagtgatgatgccagcttcacctgcatcctgaaggatggcatctacagcagcgctgtggtggacaatgagctgaatgctgtgaatgatggccacctggtgagcagccctgccatctgcagcggcagcctgagcaacttcagcaccagtgacaatggcagctacagcagcaatggaagtgactttggcagctgtgccagcatcaccagcggcggcagctacaccaacagcgtcatcagtgacagcagcagctacaccttccccccatctgatgacaccttcctgggcggcaacctgcccagcgacagcaccagcaacagatctgtgcccaacagaaacaccaccccctgtgagatcttcagccgcagcaccagcacagacccctttgtgcaggatgacctggagcacggcctggagatcatgaagctgcctgtgtccaggaacaccaagatccccctgaagcgctacagcagcctggtgatcttccccaggagccccagcaccacccggcccaccagccccaccagcctgtgcaccctgctgagcaagggcagctaccagaccagccaccagttcatcatcagccccagcgagatcgcccacaatgaagatggcaccagcgccaagggcttcctgagcacagctgtgaatggcctgcggctgagcaagaccatctgcaccccaggagaggtgcgggacatccggcccctgcacaggaagggcagcctgcagaagaagatcgtgctgagcaacaacaccccccggcagacagtgtgtgagaagagcagcgagggctacagctgtgtgtctgtgcacttcacccagaggaaggccgccaccctggactgtgagaccaccaacggggactgcaagccagagatgtctgagatcaagctgaacagcgacagcgagtacatcaagctgatgcacaggaccagcgcctgcctgcccagcagccagaatgtggactgccagatcaacatcaacggggagctggagcggccccacagccagatgaacaagaaccacggcatcctgcggcgcagcatcagcctgggcggggcctaccccaacatcagctgcctgagcagcctgaagcacaactgcagcaagggcggccccagccagctgctgatcaagtttgccagcggaaatgaaggcaaggtggacaacctgagccgggacagcaacagagactgcaccaatgagctgagcaacagctgcaagccaggctgggtggtgctggaccagccagatgctgcctgccacctgcagcagcagcaggagcccagccccctgcccccaggctgggaggagcggcaggacatcctgggccgcacctactacgtgaaccacgagagcaggaggacccagtggaagaggcccaccccccaggacaacctgacagatgctgaaaatggaaacatccagctgcaggcccagagggccttcaccacccggcggcagatcagcgaggagacagaatctgtggacaaccgggagagcagcgagaactgggagatcatccgggaggatgaggccaccatgtacagcaaccaggccttccccagccccccacccagcagcaacctggatgtgcccacccacctggccgaggagctgaatgcccggctgaccatctttggaaacagcgctgtgtcccagcctgccagcagcagcaaccacagcagccggcggggcagcctgcaggcctacacctttgaggagcagcccaccctgcctgtgctgctgcccaccagcagcggcctgcccccaggctgggaggagaagcaggatgagcggggccgcagctactacgtggaccacaacagcaggaccaccacctggaccaagcccaccgtgcaggccaccgtggagaccagccagctgaccagcagccagagcagcgctggcccccagagccaggccagcaccagtgacagcggccagcaggtgacccagcccagcgagattgagcagggcttcctgcccaagggctgggaggtgagacatgccccaaatggccggcccttcttcatcgaccacaacaccaagaccaccacctgggaggacccccggctgaagatcccagcccacctgcggggcaagaccagcctggacaccagcaatgacctgggccccctgcccccaggctgggaggagaggacccacacagatggccgcatcttctacatcaaccacaacatcaagaggacccagtgggaggacccccggctggagaatgtggccatcactggacctgctgtgccctacagccgggactacaagaggaaatatgagttcttccggaggaagctgaagaagcagaatgacatccccaacaagtttgagatgaagctgcggcgggccaccgtgctggaggacagctaccgccgcatcatgggcgtgaagagagctgacttcctgaaggcccggctgtggattgaatttgatggagagaagggcctggactatggaggagtggcccgggagtggttcttcctgatcagcaaggagatgttcaacccctactacggcctgtttgagtacagcgccacagacaactacaccctgcagatcaaccccaacagcggcctgtgcaatgaagaccacctgagctacttcaagttcatcggccgggtggccggcatggctgtgtaccacggcaagctgctggatggcttcttcatccggcccttctacaagatgatgctgcacaagcccatcaccctgcatgacatggagagcgtggacagcgagtactacaacagcctgcgctggatcctggagaatgaccccacagagctggacctgcgcttcatcattgatgaggagctgtttggccagacccaccagcacgagctgaagaatggaggcagcgagatcgtggtgaccaacaagaacaagaaggagtacatctacctggtgatccagtggaggtttgtgaaccgcatccagaagcagatggccgccttcaaggagggcttctttgagctgatcccccaggacctgatcaagatctttgatgaaaatgagctggagctgctgatgtgtggcctgggagatgtggatgtgaatgactggagggagcacaccaagtacaagaatggctacagcgccaaccaccaggtgatccagtggttctggaaggctgtgctgatgatggacagcgagaagaggatccggctgctgcagtttgtgacaggcaccagccgggtgcccatgaatggatttgctgagctgtatggcagcaatggcccccagagcttcaccgtggagcagtggggcaccccagagaagctgccccgggcccacacctgcttcaaccggctggacctgcccccctatgagagctttgaggagctgtgggacaagctgcagatggccatcgagaacacccagggctttgatggagtggactag

SEQ ID NO: 161445 - DNA, 2703 bp, synthetic construct
  misc_feature 1..2703: note = Description of Artificial Sequence: Synthetic coding sequence
  source 1..2703: mol_type = other DNA
atggccacctgtgctgtggaggtgtttggcctgctggaggatgaggagaacagccgcatcgtgcgggtgcgggtgattgctggcatcggcctggccaagaaggacatcctgggcgccagtgacccctacgtgcgggtgaccctgtatgaccccatgaatggagtgctgacctctgtgcagaccaagaccatcaagaagagcctgaaccccaagtggaatgaggagatcctcttccgggtgcacccccagcagcaccggctgctgtttgaggtgtttgatgagaaccggctgaccagagatgacttcctgggccaggtggatgtgcccctgtaccccctgcccacagagaacccccggctggagcggccctacaccttcaaggactttgtgctgcaccccaggagccacaagagccgggtgaagggctacctgcggctgaagatgacctacctgcccaagaccagcggctctgaagatgacaatgctgagcaggccgaggagctggagcccggctgggtggtgctggaccagccagatgctgcctgccacctgcagcagcagcaggagcccagccccctgcccccaggctgggaggagcggcaggacatcctgggccgcacctactacgtgaaccacgagagcaggaggacccagtggaagaggcccaccccccaggacaacctgacagatgctgaaaatggaaacatccagctgcaggcccagagggccttcaccacccggcggcagatcagcgaggagacagagagcgtggacaaccgggagagcagcgagaactgggagatcatcagagaagatgaggccaccatgtacagcaaccaggccttccccagccccccacccagcagcaacctggatgtgcccacccacctggccgaggagctgaatgcccggctgaccatcttcggcaacagcgctgtgtcccagcctgccagcagcagcaaccacagcagcagaagaggcagcctgcaggcctacacctttgaggagcagcccaccctgcctgtgctgctgcccaccagcagcggcctgcccccaggctgggaggagaagcaggatgagcggggccgcagctactacgtggaccacaacagcaggaccaccacctggaccaagcccaccgtgcaggccaccgtggagaccagccagctgaccagcagccagagcagcgctggcccccagagccaggccagcaccagtgacagcggccagcaggtgacccagcccagcgagattgagcagggcttcctgcccaagggctgggaggtgagacatgcccccaacggccggcccttcttcatcgaccacaacaccaagaccaccacctgggaggacccccggctgaagatcccagcccacctgcggggcaagaccagcctggacaccagcaatgacctgggccccctgcccccaggctgggaggagaggacccacacagatggccgcatcttctacatcaaccacaacatcaagaggacccagtgggaggacccccggctggagaatgtggccatcaccggccctgctgtgccctacagccgggactacaagaggaaatatgagttcttccggaggaagctgaagaagcagaatgacatccccaacaagtttgagatgaagctgcggcgggccaccgtgctggaggacagctaccgccgcatcatgggcgtgaagagagctgacttcctgaaggcccggctgtggattgaatttgatggagagaagggcctggactatggaggagtggcccgggagtggttcttcctgatcagcaaggagatgttcaacccctactacggcctgtttgagtacagcgccacagacaactacaccctgcagatcaaccccaacagcggcctgtgcaatgaagaccacctgagctacttcaagttcatcggccgggtggccggcatggctgtgtaccacggcaagctgctggatggcttcttcatccggcccttctacaagatgatgctgcacaagcccatcaccctgcatgacatggagagcgtggacagcgagtactacaacagcctgcgctggatcctggagaatgaccccacagagctggacctgcgcttcatcattgatgaggagctgtttggccagacccaccagcacgagctgaagaatggaggcagcgagatcgtggtgaccaacaagaacaagaaggagtacatctacctggtgatccagtggaggtttgtgaaccgcatccagaagcagatggccgccttcaaggagggcttctttgagctgatcccccaggacctgatcaagatctttgatgaaaatgagctggagctgctgatgtgtggcctgggagatgtggatgtgaatgactggagggagcacaccaagtacaagaatggctacagcgccaaccaccaggtgatccagtggttctggaaggctgtgctgatgatggattctgagaagaggatccggctgctgcagtttgtgacaggcaccagccgggtgcccatgaatggatttgctgagctgtatggcagcaatggcccccagagcttcaccgtggagcagtggggcaccccagagaagctgccccgggcccacacctgcttcaaccggctggacctgcccccctatgagagctttgaggagctgtgggacaagctgcagatggccatcgagaacacccagggctttgatggagtggactag

SEQ ID NO: 161446 - DNA, 3912 bp, synthetic construct
  misc_feature 1..3912: note = Description of Artificial Sequence: Synthetic coding sequence
  source 1..3912: mol_type = other DNA
atggcccagagcctgcggctgcactttgctgcccggcgcagcaacacctaccccctgtctgagaccagcggagatgacctggacagccacgtgcacatgtgcttcaagaggcccacccgcatcagcaccagcaatgtggtgcagatgaagctgaccccccggcagacagccctggcccccctcatcaaggaaaatgtgcagagccaggagaggagctctgtgcccagcagtgaaaatgtgaacaagaagagcagctgcctgcagatcagcctgcagcccacccgctacagcggctacctgcagagcagcaatgtgctggccgacagtgatgatgccagcttcacctgcatcctgaaggatggcatctacagcagcgctgtggtggacaatgagctgaatgctgtgaatgatggccacctggtgagcagccctgccatctgcagcggcagcctgagcaacttcagcaccagtgacaatggcagctacagcagcaatggaagtgactttggcagctgtgccagcatcaccagcggcggcagctacaccaacagcgtcatcagtgacagcagcagctacaccttccccccatctgatgacaccttcctgggcggcaacctgcccagcgacagcaccagcaacagatctgtgcccaacagaaacaccaccccctgtgagatcttcagccgcagcaccagcacagacccctttgtgcaggatgacctggagcacggcctggagatcatgaagctgcctgtgtccaggaacaccaagatccccctgaagcgctacagcagcctggtgatcttccccaggagccccagcaccacccggcccaccagccccaccagcctgtgcaccctgctgagcaagggcagctaccagaccagccaccagttcatcatcagccccagcgagatcgcccacaatgaagatggcaccagcgccaagggcttcctgagcacagctgtgaatggcctgcggctgagcaagaccatctgcaccccaggagaggtgcgggacatccggcccctgcacaggaagggcagcctgcagaagaagatcgtgctgagcaacaacaccccccggcagacagtgtgtgagaagagcagcgagggctacagctgtgtgtctgtgcacttcacccagaggaaggccgccaccctggactgtgagaccaccaacggggactgcaagccagagatgtctgagatcaagctgaacagcgacagcgagtacatcaagctgatgcacaggaccagcgcctgcctgcccagcagccagaatgtggactgccagatcaacatcaacggggagctggagcggccccacagccagatgaacaagaaccacggcatcctgcggcgcagcatcagcctgggcggggcctaccccaacatcagctgcctgagcagcctgaagcacaactgcagcaagggcggccccagccagctgctgatcaagtttgccagcggaaatgaaggcaaggtggacaacctgagccgggacagcaacagagactgcaccaatgagctgagcaacagctgcaagaccagagatgacttcctgggccaggtggatgtgcccctgtaccccctgcccacagagaacccccggctggagcggccctacaccttcaaggactttgtgctgcaccccaggagccacaagagccgggtgaagggctacctgcggctgaagatgacctacctgcccaagaccagcggctctgaagatgacaatgctgagcaggccgaggagctggagcagcagcaggagcccagccccctgcccccaggctgggaggagcggcaggacatcctgggccgcacctactacgtgaaccacgagagcaggaggacccagtggaagaggcccaccccccaggacaacctgacagatgctgaaaatggaaacatccagctgcaggcccagagggccttcaccacccggcggcagatcagcgaggagacagaatctgtggacaaccgggagagcagcgagaactgggagatcatccgggaggatgaggccaccatgtacagcaaccaggccttccccagccccccacccagcagcaacctggatgtgcccacccacctggccgaggagctgaatgcccggctgaccatctttggaaacagcgctgtgtcccagcctgccagcagcagcaaccacagcagccggcggggcagcctgcaggcctacacctttgaggagcagcccaccctgcctgtgctgctgcccaccagcagcggcctgcccccaggctgggaggagaagcaggatgagcggggccgcagctactacgtggaccacaacagcaggaccaccacctggaccaagcccaccgtgcaggccaccgtggagaccagccagctgaccagcagccagagcagcgctggcccccagagccaggccagcaccagtgacagcggccagcaggtgacccagcccagcgagattgagcagggcttcctgcccaagggctgggaggtgagacatgccccaaatggccggcccttcttcatcgaccacaacaccaagaccaccacctgggaggacccccggctgaagatcccagcccacctgcggggcaagaccagcctggacaccagcaatgacctgggccccctgcccccaggctgggaggagaggacccacacagatggccgcatcttctacatcaaccacaacatcaagaggacccagtgggaggacccccggctggagaatgtggccatcactggacctgctgtgccctacagccgggactacaagaggaaatatgagttcttccggaggaagctgaagaagcagaatgacatccccaacaagtttgagatgaagctgcggcgggccaccgtgctggaggacagctaccgccgcatcatgggcgtgaagagagctgacttcctgaaggcccggctgtggattgaatttgatggagagaagggcctggactatggaggagtggcccgggagtggttcttcctgatcagcaaggagatgttcaacccctactacggcctgtttgagtacagcgccacagacaactacaccctgcagatcaaccccaacagcggcctgtgcaatgaagaccacctgagctacttcaagttcatcggccgggtggccggcatggctgtgtaccacggcaagctgctggatggcttcttcatccggcccttctacaagatgatgctgcacaagcccatcaccctgcatgacatggagagcgtggacagcgagtactacaacagcctgcgctggatcctggagaatgaccccacagagctggacctgcgcttcatcattgatgaggagctgtttggccagacccaccagcacgagctgaagaatggaggcagcgagatcgtggtgaccaacaagaacaagaaggagtacatctacctggtgatccagtggaggtttgtgaaccgcatccagaagcagatggccgccttcaaggagggcttctttgagctgatcccccaggacctgatcaagatctttgatgaaaatgagctggagctgctgatgtgtggcctgggagatgtggatgtgaatgactggagggagcacaccaagtacaagaatggctacagcgccaaccaccaggtgatccagtggttctggaaggctgtgctgatgatggacagcgagaagaggatccggctgctgcagtttgtgacaggcaccagccgggtgcccatgaatggatttgctgagctgtatggcagcaatggcccccagagcttcaccgtggagcagtggggcaccccagagaagctgccccgggcccacacctgcttcaaccggctggacctgcccccctatgagagctttgaggagctgtgggacaagctgcagatggccatcgagaacacccagggctttgatggagtggactag

SEQ ID NO: 161447 - DNA, 3960 bp, synthetic construct
  misc_feature 1..3960: note = Description of Artificial Sequence: Synthetic coding sequence
  source 1..3960: mol_type = other DNA
atggcccagagcctgcggctgcactttgctgcccggcgcagcaacacctaccccctgtctgagaccagcggagatgacctggacagccacgtgcacatgtgcttcaagaggcccacccgcatcagcaccagcaatgtggtgcagatgaagctgaccccccggcagacagccctggcccccctcatcaaggaaaatgtgcagagccaggagaggagctctgtgcccagcagtgaaaatgtgaacaagaagagcagctgcctgcagatcagcctgcagcccacccgctacagcggctacctgcagagcagcaatgtgctggccgacagtgatgatgccagcttcacctgcatcctgaaggatggcatctacagcagcgctgtggtggacaatgagctgaatgctgtgaatgatggccacctggtgagcagccctgccatctgcagcggcagcctgagcaacttcagcaccagtgacaatggcagctacagcagcaatggaagtgactttggcagctgtgccagcatcaccagcggcggcagctacaccaacagcgtcatcagtgacagcagcagctacaccttccccccatctgatgacaccttcctgggcggcaacctgcccagcgacagcaccagcaacagatctgtgcccaacagaaacaccaccccctgtgagatcttcagccgcagcaccagcacagacccctttgtgcaggatgacctggagcacggcctggagatcatgaagctgcctgtgtccaggaacaccaagatccccctgaagcgctacagcagcctggtgatcttccccaggagccccagcaccacccggcccaccagccccaccagcctgtgcaccctgctgagcaagggcagctaccagaccagccaccagttcatcatcagccccagcgagatcgcccacaatgaagatggcaccagcgccaagggcttcctgagcacagctgtgaatggcctgcggctgagcaagaccatctgcaccccaggagaggtgcgggacatccggcccctgcacaggaagggcagcctgcagaagaagatcgtgctgagcaacaacaccccccggcagacagtgtgtgagaagagcagcgagggctacagctgtgtgtctgtgcacttcacccagaggaaggccgccaccctggactgtgagaccaccaacggggactgcaagccagagatgtctgagatcaagctgaacagcgacagcgagtacatcaagctgatgcacaggaccagcgcctgcctgcccagcagccagaatgtggactgccagatcaacatcaacggggagctggagcggccccacagccagatgaacaagaaccacggcatcctgcggcgcagcatcagcctgggcggggcctaccccaacatcagctgcctgagcagcctgaagcacaactgcagcaagggcggccccagccagctgctgatcaagtttgccagcggaaatgaaggcaaggtggacaacctgagccgggacagcaacagagactgcaccaatgagctgagcaacagctgcaagaccagagatgacttcctgggccaggtggatgtgcccctgtaccccctgcccacagagaacccccggctggagcggccctacaccttcaaggactttgtgctgcaccccaggagccacaagagccgggtgaagggctacctgcggctgaagatgacctacctgcccaagaccagcggctctgaagatgacaatgctgagcaggccgaggagctggagcccggctgggtggtgctggaccagccagatgctgcctgccacctgcagcagcagcaggagcccagccccctgcccccaggctgggaggagcggcaggacatcctgggccgcacctactacgtgaaccacgagagcaggaggacccagtggaagaggcccaccccccaggacaacctgacagatgctgaaaatggaaacatccagctgcaggcccagagggccttcaccacccggcggcagatcagcgaggagacagaatctgtggacaaccgggagagcagcgagaactgggagatcatccgggaggatgaggccaccatgtacagcaaccaggccttccccagccccccacccagcagcaacctggatgtgcccacccacctggccgaggagctgaatgcccggctgaccatctttggaaacagcgctgtgtcccagcctgccagcagcagcaaccacagcagccggcggggcagcctgcaggcctacacctttgaggagcagcccaccctgcctgtgctgctgcccaccagcagcggcctgcccccaggctgggaggagaagcaggatgagcggggccgcagctactacgtggaccacaacagcaggaccaccacctggaccaagcccaccgtgcaggccaccgtggagaccagccagctgaccagcagccagagcagcgctggcccccagagccaggccagcaccagtgacagcggccagcaggtgacccagcccagcgagattgagcagggcttcctgcccaagggctgggaggtgagacatgccccaaatggccggcccttcttcatcgaccacaacaccaagaccaccacctgggaggacccccggctgaagatcccagcccacctgcggggcaagaccagcctggacaccagcaatgacctgggccccctgcccccaggctgggaggagaggacccacacagatggccgcatcttctacatcaaccacaacatcaagaggacccagtgggaggacccccggctggagaatgtggccatcactggacctgctgtgccctacagccgggactacaagaggaaatatgagttcttccggaggaagctgaagaagcagaatgacatccccaacaagtttgagatgaagctgcggcgggccaccgtgctggaggacagctaccgccgcatcatgggcgtgaagagagctgacttcctgaaggcccggctgtggattgaatttgatggagagaagggcctggactatggaggagtggcccgggagtggttcttcctgatcagcaaggagatgttcaacccctactacggcctgtttgagtacagcgccacagacaactacaccctgcagatcaaccccaacagcggcctgtgcaatgaagaccacctgagctacttcaagttcatcggccgggtggccggcatggctgtgtaccacggcaagctgctggatggcttcttcatccggcccttctacaagatgatgctgcacaagcccatcaccctgcatgacatggagagcgtggacagcgagtactacaacagcctgcgctggatcctggagaatgaccccacagagctggacctgcgcttcatcattgatgaggagctgtttggccagacccaccagcacgagctgaagaatggaggcagcgagatcgtggtgaccaacaagaacaagaaggagtacatctacctggtgatccagtggaggtttgtgaaccgcatccagaagcagatggccgccttcaaggagggcttctttgagctgatcccccaggacctgatcaagatctttgatgaaaatgagctggagctgctgatgtgtggcctgggagatgtggatgtgaatgactggagggagcacaccaagtacaagaatggctacagcgccaaccaccaggtgatccagtggttctggaaggctgtgctgatgatggacagcgagaagaggatccggctgctgcagtttgtgacaggcaccagccgggtgcccatgaatggatttgctgagctgtatggcagcaatggcccccagagcttcaccgtggagcagtggggcaccccagagaagctgccccgggcccacacctgcttcaaccggctggacctgcccccctatgagagctttgaggagctgtgggacaagctgcagatggccatcgagaacacccagggctttgatggagtggactag

SEQ ID NO: 161448 - DNA, 2616 bp, synthetic construct
  misc_feature 1..2616: note = Description of Artificial Sequence: Synthetic coding sequence
  source 1..2616: mol_type = other DNA
atggccaccggcctgggggagcctgtgtatggcctgtctgaagatgaaggagagagccgcatcctgcgggtgaaggtggtgtctggcatcgacctggccaagaaggacatctttggagccagtgacccctacgtgaagctgagcctgtatgtggctgatgagaaccgggagctggccctggtgcagaccaagaccatcaagaagaccctgaaccccaagtggaatgaggagttctacttccgggtgaaccccagcaaccaccggctgctgtttgaggtgtttgatgagaaccggctgaccagagatgacttcctgggccaggtggatgtgcccctgagccacctgcccacagaggaccccaccatggagcggccctacaccttcaaggacttcctgctgcggcccaggagccacaagagccgggtgaagggcttcctgcggctgaagatggcctacatgcccaagaatggaggccaggatgaggagaacagcgaccagagagatgacatggagcacggctgggaggtggtggacagcaatgacagcgccagccagcaccaggaggagctgcccccaccacccctgcccccaggctgggaggagaaggtggacaacctgggccgcacctactacgtgaaccacaacaacagaaccacccagtggcaccggcccagcctgatggatgtgtcctctgagagtgacaacaacatccggcagatcaaccaggaggccgcccaccggcgcttccgcagccgccgccacatcagcgaggacctggagcctgagcccagcgagggcggagatgtgcctgagccctgggagaccatcagcgaggaggtgaacattgctggggacagcctgggcctggccctgcccccacctccagccagccctggcagcaggaccagcccccaggagctgtctgaggagctgagccggcggctgcagatcaccccagacagcaatggagagcagttcagcagcctcatccagcgggagcccagcagccggctgcggagctgcagcgtgacagatgctgtggccgagcagggccacctgcccccaggggccaaggacagccctgtgagaagagctgtgaaggacaccctgagcaacccccagagcccccagcccagcccctacaacagccccaagccccagcacaaggtgacccagagcttcctgcccccaggctgggagatgagaattgcccccaacggccggcccttcttcatcgaccacaacaccaagaccaccacctgggaggacccccggctgaagtttcctgtgcacatgaggagcaagaccagcctgaaccccaatgacctgggccccctgcccccaggctgggaggagcgcatccacctggatggccgcaccttctacatcgaccacaacagcaagatcacccagtgggaggacccccggctgcagaacccagccatcactggacctgctgtgccctacagccgggagttcaagcagaagtatgactacttcaggaagaagctgaagaagccagctgacatccccaacagatttgagatgaagctgcacaggaacaacatctttgaggagagctaccgccgcatcatgtctgtgaagaggccagatgtgctgaaggcccggctgtggattgaatttgagagcgagaagggcctggactatggaggagtggcccgggagtggttcttcctgctgagcaaggagatgttcaacccctactacggcctgtttgagtacagcgccacagacaactacaccctgcagatcaaccccaacagcggcctgtgcaatgaagaccacctgagctacttcaccttcatcggccgggtggccggcctggccgtgttccacggcaagctgctggatggcttcttcatccggcccttctacaagatgatgctgggcaagcagatcaccctgaatgacatggagagcgtggacagcgagtactacaacagcctgaagtggatcctggagaatgaccccacagagctggacctgatgttctgcattgatgaggagaactttggccagacctaccaggtggacctgaagcccaatggaagtgagatcatggtgaccaatgaaaacaagcgggagtacatcgacctggtgatccagtggaggtttgtgaacagagtgcagaagcagatgaatgccttcctggagggcttcacagagctgctgcccatcgacctgatcaagatctttgatgaaaatgagctggagctgctgatgtgtggcctgggagatgtggatgtgaatgactggaggcagcacagcatctacaagaatggctactgccccaaccaccctgtgatccagtggttctggaaggctgtgctgctgatggatgctgagaagaggatccggctgctgcagtttgtgacaggcaccagccgggtgcccatgaatggatttgctgagctgtatggcagcaatggcccccagctgttcaccatcgagcagtggggcagccctgagaagctgccccgggcccacacctgcttcaaccggctggacctgcccccctatgagacctttgaggacctgcgggagaagctgctgatggctgtggagaatgcccagggctttgaaggagtggactag

SEQ ID NO: 161449 - DNA, 2508 bp, synthetic construct
  misc_feature 1..2508: note = Description of Artificial Sequence: Synthetic coding sequence
  source 1..2508: mol_type = other DNA
atggagcggccctacaccttcaaggacttcctgctgcggcccaggagccacaagagccgggtgaagggcttcctgcggctgaagatggcctacatgcccaagaatggaggccaggatgaagaaaattctgaccagagagatgacatggagcacggctgggaggtggtggacagcaatgattctgccagccagcaccaggaggagctgcccccaccacccctgcccccaggctgggaggagaaggtggacaacctgggccgcacctactacgtgaaccacaacaacagaaccacccagtggcaccggcccagcctgatggatgtgagcagcgagagtgacaacaacatccggcagatcaaccaggaggccgcccaccggcgcttccgcagcagaagacacatcagcgaggacctggagcctgagcccagcgagggcggagatgtgcctgagccctgggagaccatcagcgaggaggtgaacattgctggggacagcctgggcctggccctgcccccacctccagccagccctggcagcaggaccagcccccaggagctgtctgaggagctgagccggcggctgcagatcaccccagacagcaatggagagcagttcagcagcctcatccagcgggagcccagcagccggctgcggagctgcagcgtgacagatgctgtggccgagcagggccacctgcccccacccagcgtggcctacgtgcacaccaccccaggcctgcccagcggctgggaggagaggaaggatgccaagggccgcacctactacgtgaaccacaacaacagaaccaccacctggacccggcccatcatgcagctggctgaagatggagccagcggcagcgccaccaacagcaacaaccacctgattgagccccagatcagaagacccaggagcctgagcagccccaccgtgaccctgagcgcccccctggagggcgccaaggacagccctgtgcggcgggctgtgaaggacaccctgagcaacccccagagcccccagcccagcccctacaacagccccaagccccagcacaaggtgacccagagcttcctgcccccaggctgggagatgagaattgccccaaatggccggcccttcttcatcgaccacaacaccaagaccaccacctgggaggacccccggctgaagtttcctgtgcacatgaggagcaagaccagcctgaaccccaatgacctgggccccctgcccccaggctgggaggagcgcatccacctggatggccgcaccttctacatcgaccacaacagcaagatcacccagtgggaggacccccggctgcagaacccagccatcaccggccccaaggctgtgccctacagccgggagttcaagcagaagtatgactacttcaggaagaagctgaagaagccagctgacatccccaacagatttgagatgaagctgcacaggaacaacatctttgaggagagctaccgccgcatcatgtctgtgaagaggccagatgtgctgaaggcccggctgtggattgaatttgagagcgagaagggcctggactatggaggagtggcccgggagtggttcttcctgctgagcaaggagatgttcaacccctactacggcctgtttgagtacagcgccacagacaactacaccctgcagatcaaccccaacagcggcctgtgcaatgaagaccacctgagctacttcaccttcatcggccgggtggccggcctggccgtgttccacggcaagctgctggatggcttcttcatccggcccttctacaagatgatgctgggcaagcagatcaccctgaatgacatggagagcgtggacagcgagtactacaacagcctgaagtggatcctggagaatgaccccacagagctggacctgatgttctgcattgatgaggagaactttggccagacctaccaggtggacctgaagcccaatggaagtgagatcatggtgaccaatgaaaacaagcgggagtacatcgacctggtgatccagtggaggtttgtgaacagagtgcagaagcagatgaatgccttcctggagggcttcacagagctgctgcccatcgacctgatcaagatctttgatgaaaatgagctggagctgctgatgtgtggcctgggagatgtggatgtgaatgactggaggcagcacagcatctacaagaatggctactgccccaaccaccctgtgatccagtggttctggaaggctgtgctgctgatggatgctgagaagaggatccggctgctgcagtttgtgacaggcaccagccgggtgcccatgaatggatttgctgagctgtatggcagcaatggcccccagctgttcaccatcgagcagtggggcagccctgagaagctgccccgggcccacacctgcttcaaccggctggacctgcccccctatgagacctttgaggacctgcgggagaagctgctgatggctgtggagaatgcccagggctttgaaggagtggactag

SEQ ID NO: 161450 - DNA, 2736 bp, synthetic construct
  misc_feature 1..2736: note = Description of Artificial Sequence: Synthetic coding sequence
  source 1..2736: mol_type = other DNA
atggccaccggcctgggggagcctgtgtatggcctgtctgaagatgaaggagagagccgcatcctgcgggtgaaggtggtgtctggcatcgacctggccaagaaggacatctttggagccagtgacccctacgtgaagctgagcctgtatgtggctgatgagaaccgggagctggccctggtgcagaccaagaccatcaagaagaccctgaaccccaagtggaatgaggagttctacttccgggtgaaccccagcaaccaccggctgctgtttgaggtgtttgatgagaaccggctgaccagagatgacttcctgggccaggtggatgtgcccctgagccacctgcccacagaggaccccaccatggagcggccctacaccttcaaggacttcctgctgcggcccaggagccacaagagccgggtgaagggcttcctgcggctgaagatggcctacatgcccaagaatggaggccaggatgaggagaacagcgaccagagagatgacatggagcacggctgggaggtggtggacagcaatgacagcgccagccagcaccaggaggagctgcccccaccacccctgcccccaggctgggaggagaaggtggacaacctgggccgcacctactacgtgaaccacaacaacagaaccacccagtggcaccggcccagcctgatggatgtgtcctctgagagtgacaacaacatccggcagatcaaccaggaggccgcccaccggcgcttccgcagccgccgccacatcagcgaggacctggagcctgagcccagcgagggcggagatgtgcctgagccctgggagaccatcagcgaggaggtgaacattgctggggacagcctgggcctggccctgcccccacctccagccagccctggcagcaggaccagcccccaggagctgtctgaggagctgagccggcggctgcagatcaccccagacagcaatggagagcagttcagcagcctcatccagcgggagcccagcagccggctgcggagctgcagcgtgacagatgctgtggccgagcagggccacctgccccccctggccgaggatggagccagcggcagcgccaccaacagcaacaaccacctgattgagccccagatccggcggcccaggagcctgagcagccccaccgtgaccctgagcgcccccctggagggcgccaaggacagccctgtgagaagagctgtgaaggacaccctgagcaacccccagagcccccagcccagcccctacaacagccccaagccccagcacaaggtgacccagagcttcctgcccccaggctgggagatgagaattgcccccaacggccggcccttcttcatcgaccacaacaccaagaccaccacctgggaggacccccggctgaagtttcctgtgcacatgaggagcaagaccagcctgaaccccaatgacctgggccccctgcccccaggctgggaggagcgcatccacctggatggccgcaccttctacatcgaccacaacagcaagatcacccagtgggaggacccccggctgcagaacccagccatcactggacctgctgtgccctacagccgggagttcaagcagaagtatgactacttcaggaagaagctgaagaagccagctgacatccccaacagatttgagatgaagctgcacaggaacaacatctttgaggagagctaccgccgcatcatgtctgtgaagaggccagatgtgctgaaggcccggctgtggattgaatttgagagcgagaagggcctggactatggaggagtggcccgggagtggttcttcctgctgagcaaggagatgttcaacccctactacggcctgtttgagtacagcgccacagacaactacaccctgcagatcaaccccaacagcggcctgtgcaatgaagaccacctgagctacttcaccttcatcggccgggtggccggcctggccgtgttccacggcaagctgctggatggcttcttcatccggcccttctacaagatgatgctgggcaagcagatcaccctgaatgacatggagagcgtggacagcgagtactacaacagcctgaagtggatcctggagaatgaccccacagagctggacctgatgttctgcattgatgaggagaactttggccagacctaccaggtggacctgaagcccaatggaagtgagatcatggtgaccaatgaaaacaagcgggagtacatcgacctggtgatccagtggaggtttgtgaacagagtgcagaagcagatgaatgccttcctggagggcttcacagagctgctgcccatcgacctgatcaagatctttgatgaaaatgagctggagctgctgatgtgtggcctgggagatgtggatgtgaatgactggaggcagcacagcatctacaagaatggctactgccccaaccaccctgtgatccagtggttctggaaggctgtgctgctgatggatgctgagaagaggatccggctgctgcagtttgtgacaggcaccagccgggtgcccatgaatggatttgctgagctgtatggcagcaatggcccccagctgttcaccatcgagcagtggggcagccctgagaagctgccccgggcccacacctgcttcaaccggctggacctgcccccctatgagacctttgaggacctgcgggagaagctgctgatggctgtggagaatgcccagggctttgaaggagtggactag

SEQ ID NO: 161451 - DNA, 2904 bp, synthetic construct
  misc_feature 1..2904: note = Description of Artificial Sequence: Synthetic coding sequence
  source 1..2904: mol_type = other DNA
atgaggcggctggcctttgagcagggcgagagccgcatcctgcgggtgaaggtggtgtctggcatcgacctggccaagaaggacatctttggagccagtgacccctacgtgaagctgagcctgtatgtggctgatgagaaccgggagctggccctggtgcagaccaagaccatcaagaagaccctgaaccccaagtggaatgaggagttctacttccgggtgaaccccagcaaccaccggctgctgtttgaggtgtttgatgagaaccggctgaccagagatgacttcctgggccaggtggatgtgcccctgagccacctgcccacagaggaccccaccatggagcggccctacaccttcaaggacttcctgctgcggcccaggagccacaagagccgggtgaagggcttcctgcggctgaagatggcctacatgcccaagaatggaggccaggatgaggagaacagcgaccagagagatgacatggagcacggctgggaggtggtggacagcaatgacagcgccagccagcaccaggaggagctgcccccaccacccctgcccccaggctgggaggagaaggtggacaacctgggccgcacctactacgtgaaccacaacaacagaaccacccagtggcaccggcccagcctgatggatgtgtcctctgagagtgacaacaacatccggcagatcaaccaggaggccgcccaccggcgcttccgcagccgccgccacatcagcgaggacctggagcctgagcccagcgagggcggagatgtgcctgagccctgggagaccatcagcgaggaggtgaacattgctggggacagcctgggcctggccctgcccccacctccagccagccctggcagcaggaccagcccccaggagctgtctgaggagctgagccggcggctgcagatcaccccagacagcaatggagagcagttcagcagcctcatccagcgggagcccagcagccggctgcggagctgcagcgtgacagatgctgtggccgagcagggccacctgcccccaccttctgccccagctggccgggcccggagcagcacagtgactggaggagaggagcccaccccatctgtggcctacgtgcacaccaccccaggcctgcccagcggctgggaggagaggaaggatgccaagggccgcacctactacgtgaaccacaacaacagaaccaccacctggacccggcccatcatgcagctggccgaggatggagccagcggcagcgccaccaacagcaacaaccacctgattgagccccagatccggcggcccaggagcctgagcagccccaccgtgaccctgagcgcccccctggagggcgccaaggacagccctgtgagaagagctgtgaaggacaccctgagcaacccccagagcccccagcccagcccctacaacagccccaagccccagcacaaggtgacccagagcttcctgcccccaggctgggagatgagaattgcccccaacggccggcccttcttcatcgaccacaacaccaagaccaccacctgggaggacccccggctgaagtttcctgtgcacatgaggagcaagaccagcctgaaccccaatgacctgggccccctgcccccaggctgggaggagcgcatccacctggatggccgcaccttctacatcgaccacaacagcaagatcacccagtgggaggacccccggctgcagaacccagccatcactggacctgctgtgccctacagccgggagttcaagcagaagtatgactacttcaggaagaagctgaagaagccagctgacatccccaacagatttgagatgaagctgcacaggaacaacatctttgaggagagctaccgccgcatcatgtctgtgaagaggccagatgtgctgaaggcccggctgtggattgaatttgagagcgagaagggcctggactatggaggagtggcccgggagtggttcttcctgctgagcaaggagatgttcaacccctactacggcctgtttgagtacagcgccacagacaactacaccctgcagatcaaccccaacagcggcctgtgcaatgaagaccacctgagctacttcaccttcatcggccgggtggccggcctggccgtgttccacggcaagctgctggatggcttcttcatccggcccttctacaagatgatgctgggcaagcagatcaccctgaatgacatggagagcgtggacagcgagtactacaacagcctgaagtggatcctggagaatgaccccacagagctggacctgatgttctgcattgatgaggagaactttggccagacctaccaggtggacctgaagcccaatggaagtgagatcatggtgaccaatgaaaacaagcgggagtacatcgacctggtgatccagtggaggtttgtgaacagagtgcagaagcagatgaatgccttcctggagggcttcacagagctgctgcccatcgacctgatcaagatctttgatgaaaatgagctggagctgctgatgtgtggcctgggagatgtggatgtgaatgactggaggcagcacagcatctacaagaatggctactgccccaaccaccctgtgatccagtggttctggaaggctgtgctgctgatggatgctgagaagaggatccggctgctgcagtttgtgacaggcaccagccgggtgcccatgaatggatttgctgagctgtatggcagcaatggcccccagctgttcaccatcgagcagtggggcagccctgagaagctgccccgggcccacacctgcttcaaccggctggacctgcccccctatgagacctttgaggacctgcgggagaagctgctgatggctgtggagaatgcccagggctttgaaggagtggactag

SEQ ID NO: 161452 - DNA, 2868 bp, synthetic construct
  misc_feature 1..2868: note = Description of Artificial Sequence: Synthetic coding sequence
  source 1..2868: mol_type = other DNA
atggccaccggcctgggggagcctgtgtatggcctgtctgaagatgaaggagagagccgcatcctgcgggtgaaggtggtgtctggcatcgacctggccaagaaggacatctttggagccagtgacccctacgtgaagctgagcctgtatgtggctgatgagaaccgggagctggccctggtgcagaccaagaccatcaagaagaccctgaaccccaagtggaatgaggagttctacttccgggtgaaccccagcaaccaccggctgctgtttgaggtgtttgatgagaaccggctgaccagagatgacttcctgggccaggtggatgtgcccctgagccacctgcccacagaggaccccaccatggagcggccctacaccttcaaggacttcctgctgcggcccaggagccacaagagccgggtgaagggcttcctgcggctgaagatggcctacatgcccaagaatggaggccaggatgaggagaacagcgaccagagagatgacatggagcacggctgggaggtggtggacagcaatgacagcgccagccagcaccaggaggagctgcccccaccacccctgcccccaggctgggaggagaaggtggacaacctgggccgcacctactacgtgaaccacaacaacagaaccacccagtggcaccggcccagcctgatggatgtgtcctctgagagtgacaacaacatccggcagatcaaccaggaggccgcccaccggcgcttccgcagccgccgccacatcagcgaggacctggagcctgagcccagcgagggcggagatgtgcctgagccctgggagaccatcagcgaggaggtgaacattgctggggacagcctgggcctggccctgcccccacctccagccagccctggcagcaggaccagcccccaggagctgtctgaggagctgagccggcggctgcagatcaccccagacagcaatggagagcagttcagcagcctcatccagcgggagcccagcagccggctgcggagctgcagcgtgacagatgctgtggccgagcagggccacctgcccccaccttctgtggcctacgtgcacaccaccccaggcctgcccagcggctgggaggagaggaaggatgccaagggccgcacctactacgtgaaccacaacaacagaaccaccacctggacccggcccatcatgcagctggccgaggatggagccagcggcagcgccaccaacagcaacaaccacctgattgagccccagatccggcggcccaggagcctgagcagccccaccgtgaccctgagcgcccccctggagggcgccaaggacagccctgtgagaagagctgtgaaggacaccctgagcaacccccagagcccccagcccagcccctacaacagccccaagccccagcacaaggtgacccagagcttcctgcccccaggctgggagatgagaattgcccccaacggccggcccttcttcatcgaccacaacaccaagaccaccacctgggaggacccccggctgaagtttcctgtgcacatgaggagcaagaccagcctgaaccccaatgacctgggccccctgcccccaggctgggaggagcgcatccacctggatggccgcaccttctacatcgaccacaacagcaagatcacccagtgggaggacccccggctgcagaacccagccatcactggacctgctgtgccctacagccgggagttcaagcagaagtatgactacttcaggaagaagctgaagaagccagctgacatccccaacagatttgagatgaagctgcacaggaacaacatctttgaggagagctaccgccgcatcatgtctgtgaagaggccagatgtgctgaaggcccggctgtggattgaatttgagagcgagaagggcctggactatggaggagtggcccgggagtggttcttcctgctgagcaaggagatgttcaacccctactacggcctgtttgagtacagcgccacagacaactacaccctgcagatcaaccccaacagcggcctgtgcaatgaagaccacctgagctacttcaccttcatcggccgggtggccggcctggccgtgttccacggcaagctgctggatggcttcttcatccggcccttctacaagatgatgctgggcaagcagatcaccctgaatgacatggagagcgtggacagcgagtactacaacagcctgaagtggatcctggagaatgaccccacagagctggacctgatgttctgcattgatgaggagaactttggccagacctaccaggtggacctgaagcccaatggaagtgagatcatggtgaccaatgaaaacaagcgggagtacatcgacctggtgatccagtggaggtttgtgaacagagtgcagaagcagatgaatgccttcctggagggcttcacagagctgctgcccatcgacctgatcaagatctttgatgaaaatgagctggagctgctgatgtgtggcctgggagatgtggatgtgaatgactggaggcagcacagcatctacaagaatggctactgccccaaccaccctgtgatccagtggttctggaaggctgtgctgctgatggatgctgagaagaggatccggctgctgcagtttgtgacaggcaccagccgggtgcccatgaatggatttgctgagctgtatggcagcaatggcccccagctgttcaccatcgagcagtggggcagccctgagaagctgccccgggcccacacctgcttcaaccggctggacctgcccccctatgagacctttgaggacctgcgggagaagctgctgatggctgtggagaatgcccagggctttgaaggagtggactag

SEQ ID NO: 161453 - DNA, 2928 bp, synthetic construct
  misc_feature 1..2928: note = Description of Artificial Sequence: Synthetic coding sequence
  source 1..2928: mol_type = other DNA
atggccaccggcctgggggagcctgtgtatggcctgtctgaagatgaaggagagagccgcatcctgcgggtgaaggtggtgtctggcatcgacctggccaagaaggacatctttggagccagtgacccctacgtgaagctgagcctgtatgtggctgatgagaaccgggagctggccctggtgcagaccaagaccatcaagaagaccctgaaccccaagtggaatgaggagttctacttccgggtgaaccccagcaaccaccggctgctgtttgaggtgtttgatgagaaccggctgaccagagatgacttcctgggccaggtggatgtgcccctgagccacctgcccacagaggaccccaccatggagcggccctacaccttcaaggacttcctgctgcggcccaggagccacaagagccgggtgaagggcttcctgcggctgaagatggcctacatgcccaagaatggaggccaggatgaggagaacagcgaccagagagatgacatggagcacggctgggaggtggtggacagcaatgacagcgccagccagcaccaggaggagctgcccccaccacccctgcccccaggctgggaggagaaggtggacaacctgggccgcacctactacgtgaaccacaacaacagaaccacccagtggcaccggcccagcctgatggatgtgtcctctgagagtgacaacaacatccggcagatcaaccaggaggccgcccaccggcgcttccgcagccgccgccacatcagcgaggacctggagcctgagcccagcgagggcggagatgtgcctgagccctgggagaccatcagcgaggaggtgaacattgctggggacagcctgggcctggccctgcccccacctccagccagccctggcagcaggaccagcccccaggagctgtctgaggagctgagccggcggctgcagatcaccccagacagcaatggagagcagttcagcagcctcatccagcgggagcccagcagccggctgcggagctgcagcgtgacagatgctgtggccgagcagggccacctgcccccaccttctgccccagctggccgggcccggagcagcacagtgactggaggagaggagcccaccccatctgtggcctacgtgcacaccaccccaggcctgcccagcggctgggaggagaggaaggatgccaagggccgcacctactacgtgaaccacaacaacagaaccaccacctggacccggcccatcatgcagctggccgaggatggagccagcggcagcgccaccaacagcaacaaccacctgattgagccccagatccggcggcccaggagcctgagcagccccaccgtgaccctgagcgcccccctggagggcgccaaggacagccctgtgagaagagctgtgaaggacaccctgagcaacccccagagcccccagcccagcccctacaacagccccaagccccagcacaaggtgacccagagcttcctgcccccaggctgggagatgagaattgcccccaacggccggcccttcttcatcgaccacaacaccaagaccaccacctgggaggacccccggctgaagtttcctgtgcacatgaggagcaagaccagcctgaaccccaatgacctgggccccctgcccccaggctgggaggagcgcatccacctggatggccgcaccttctacatcgaccacaacagcaagatcacccagtgggaggacccccggctgcagaacccagccatcactggacctgctgtgccctacagccgggagttcaagcagaagtatgactacttcaggaagaagctgaagaagccagctgacatccccaacagatttgagatgaagctgcacaggaacaacatctttgaggagagctaccgccgcatcatgtctgtgaagaggccagatgtgctgaaggcccggctgtggattgaatttgagagcgagaagggcctggactatggaggagtggcccgggagtggttcttcctgctgagcaaggagatgttcaacccctactacggcctgtttgagtacagcgccacagacaactacaccctgcagatcaaccccaacagcggcctgtgcaatgaagaccacctgagctacttcaccttcatcggccgggtggccggcctggccgtgttccacggcaagctgctggatggcttcttcatccggcccttctacaagatgatgctgggcaagcagatcaccctgaatgacatggagagcgtggacagcgagtactacaacagcctgaagtggatcctggagaatgaccccacagagctggacctgatgttctgcattgatgaggagaactttggccagacctaccaggtggacctgaagcccaatggaagtgagatcatggtgaccaatgaaaacaagcgggagtacatcgacctggtgatccagtggaggtttgtgaacagagtgcagaagcagatgaatgccttcctggagggcttcacagagctgctgcccatcgacctgatcaagatctttgatgaaaatgagctggagctgctgatgtgtggcctgggagatgtggatgtgaatgactggaggcagcacagcatctacaagaatggctactgccccaaccaccctgtgatccagtggttctggaaggctgtgctgctgatggatgctgagaagaggatccggctgctgcagtttgtgacaggcaccagccgggtgcccatgaatggatttgctgagctgtatggcagcaatggcccccagctgttcaccatcgagcagtggggcagccctgagaagctgccccgggcccacacctgcttcaaccggctggacctgcccccctatgagacctttgaggacctgcgggagaagctgctgatggctgtggagaatgcccagggctttgaaggagtggactag

SEQ ID NO: 161454 - DNA, 2565 bp, synthetic construct
  misc_feature 1..2565: note = Description of Artificial Sequence: Synthetic coding sequence
  source 1..2565: mol_type = other DNA
atggagcggccctacaccttcaaggacttcctgctgcggcccaggagccacaagagccgggtgaagggcttcctgcggctgaagatggcctacatgcccaagaatggaggccaggatgaagaaaattctgaccagagagatgacatggagcacggctgggaggtggtggacagcaatgattctgccagccagcaccaggaggagctgcccccaccacccctgcccccaggctgggaggagaaggtggacaacctgggccgcacctactacgtgaaccacaacaacagaaccacccagtggcaccggcccagcctgatggatgtgagcagcgagagtgacaacaacatccggcagatcaaccaggaggccgcccaccggcgcttccgcagcagaagacacatcagcgaggacctggagcctgagcccagcgagggcggagatgtgcctgagccctgggagaccatcagcgaggaggtgaacattgctggggacagcctgggcctggccctgcccccacctccagccagccctggcagcaggaccagcccccaggagctgtctgaggagctgagccggcggctgcagatcaccccagacagcaatggagagcagttcagcagcctcatccagcgggagcccagcagccggctgcggagctgcagcgtgacagatgctgtggccgagcagggccacctgcccccacccagcgccccagctggccgggcccggagcagcacagtgactggaggagaggagcccacccccagcgtggcctacgtgcacaccaccccaggcctgcccagcggctgggaggagaggaaggatgccaagggccgcacctactacgtgaaccacaacaacagaaccaccacctggacccggcccatcatgcagctggctgaagatggagccagcggcagcgccaccaacagcaacaaccacctgattgagccccagatcagaagacccaggagcctgagcagccccaccgtgaccctgagcgcccccctggagggcgccaaggacagccctgtgcggcgggctgtgaaggacaccctgagcaacccccagagcccccagcccagcccctacaacagccccaagccccagcacaaggtgacccagagcttcctgcccccaggctgggagatgagaattgccccaaatggccggcccttcttcatcgaccacaacaccaagaccaccacctgggaggacccccggctgaagtttcctgtgcacatgaggagcaagaccagcctgaaccccaatgacctgggccccctgcccccaggctgggaggagcgcatccacctggatggccgcaccttctacatcgaccacaacagcaagatcacccagtgggaggacccccggctgcagaacccagccatcaccggccctgctgtgccctacagccgggagttcaagcagaagtatgactacttcaggaagaagctgaagaagccagctgacatccccaacagatttgagatgaagctgcacaggaacaacatctttgaggagagctaccgccgcatcatgtctgtgaagaggccagatgtgctgaaggcccggctgtggattgaatttgaaagtgagaagggcctggactatggaggagtggcccgggagtggttcttcctgctgagcaaggagatgttcaacccctactacggcctgtttgagtacagcgccacagacaactacaccctgcagatcaaccccaacagcggcctgtgcaatgaagaccacctgagctacttcaccttcatcggccgggtggccggcctggccgtgttccacggcaagctgctggatggcttcttcatccggcccttctacaagatgatgctgggcaagcagatcaccctgaatgacatggagagcgtggacagcgagtactacaacagcctgaagtggatcctggagaatgaccccacagagctggacctgatgttctgcattgatgaagaaaattttggccagacctaccaggtggacctgaagcccaacggcagcgagatcatggtgaccaatgaaaacaagcgggagtacatcgacctggtgatccagtggaggtttgtgaacagagtgcagaagcagatgaatgccttcctggagggcttcacagagctgctgcccatcgacctgatcaagatctttgatgaaaatgagctggagctgctgatgtgtggcctgggagatgtggatgtgaatgactggaggcagcacagcatctacaagaatggctactgccccaaccaccctgtgatccagtggttctggaaggctgtgctgctgatggatgctgagaagaggatccggctgctgcagtttgtgacaggcaccagccgggtgcccatgaatggatttgctgagctgtatggcagcaatggcccccagctgttcaccatcgagcagtggggcagccctgagaagctgccccgggcccacacctgcttcaaccggctggacctgcccccctatgagacctttgaggacctgcgggagaagctgctgatggctgtggagaatgcccagggctttgagggcgtggactag

SEQ ID NO: 161455 - DNA, 2505 bp, synthetic construct
  misc_feature 1..2505: note = Description of Artificial Sequence: Synthetic coding sequence
  source 1..2505: mol_type = other DNA
atggagcggccctacaccttcaaggacttcctgctgcggcccaggagccacaagagccgggtgaagggcttcctgcggctgaagatggcctacatgcccaagaatggaggccaggatgaagaaaattctgaccagagagatgacatggagcacggctgggaggtggtggacagcaatgattctgccagccagcaccaggaggagctgcccccaccacccctgcccccaggctgggaggagaaggtggacaacctgggccgcacctactacgtgaaccacaacaacagaaccacccagtggcaccggcccagcctgatggatgtgagcagcgagagtgacaacaacatccggcagatcaaccaggaggccgcccaccggcgcttccgcagcagaagacacatcagcgaggacctggagcctgagcccagcgagggcggagatgtgcctgagccctgggagaccatcagcgaggaggtgaacattgctggggacagcctgggcctggccctgcccccacctccagccagccctggcagcaggaccagcccccaggagctgtctgaggagctgagccggcggctgcagatcaccccagacagcaatggagagcagttcagcagcctcatccagcgggagcccagcagccggctgcggagctgcagcgtgacagatgctgtggccgagcagggccacctgcccccacccagcgtggcctacgtgcacaccaccccaggcctgcccagcggctgggaggagaggaaggatgccaagggccgcacctactacgtgaaccacaacaacagaaccaccacctggacccggcccatcatgcagctggctgaagatggagccagcggcagcgccaccaacagcaacaaccacctgattgagccccagatcagaagacccaggagcctgagcagccccaccgtgaccctgagcgcccccctggagggcgccaaggacagccctgtgcggcgggctgtgaaggacaccctgagcaacccccagagcccccagcccagcccctacaacagccccaagccccagcacaaggtgacccagagcttcctgcccccaggctgggagatgagaattgccccaaatggccggcccttcttcatcgaccacaacaccaagaccaccacctgggaggacccccggctgaagtttcctgtgcacatgaggagcaagaccagcctgaaccccaatgacctgggccccctgcccccaggctgggaggagcgcatccacctggatggccgcaccttctacatcgaccacaacagcaagatcacccagtgggaggacccccggctgcagaacccagccatcaccggccctgctgtgccctacagccgggagttcaagcagaagtatgactacttcaggaagaagctgaagaagccagctgacatccccaacagatttgagatgaagctgcacaggaacaacatctttgaggagagctaccgccgcatcatgtctgtgaagaggccagatgtgctgaaggcccggctgtggattgaatttgaaagtgagaagggcctggactatggaggagtggcccgggagtggttcttcctgctgagcaaggagatgttcaacccctactacggcctgtttgagtacagcgccacagacaactacaccctgcagatcaaccccaacagcggcctgtgcaatgaagaccacctgagctacttcaccttcatcggccgggtggccggcctggccgtgttccacggcaagctgctggatggcttcttcatccggcccttctacaagatgatgctgggcaagcagatcaccctgaatgacatggagagcgtggacagcgagtactacaacagcctgaagtggatcctggagaatgaccccacagagctggacctgatgttctgcattgatgaagaaaattttggccagacctaccaggtggacctgaagcccaacggcagcgagatcatggtgaccaatgaaaacaagcgggagtacatcgacctggtgatccagtggaggtttgtgaacagagtgcagaagcagatgaatgccttcctggagggcttcacagagctgctgcccatcgacctgatcaagatctttgatgaaaatgagctggagctgctgatgtgtggcctgggagatgtggatgtgaatgactggaggcagcacagcatctacaagaatggctactgccccaaccaccctgtgatccagtggttctggaaggctgtgctgctgatggatgctgagaagaggatccggctgctgcagtttgtgacaggcaccagccgggtgcccatgaatggatttgctgagctgtatggcagcaatggcccccagctgttcaccatcgagcagtggggcagccctgagaagctgccccgggcccacacctgcttcaaccggctggacctgcccccctatgagacctttgaggacctgcgggagaagctgctgatggctgtggagaatgcccagggctttgagggcgtggactag

SEQ ID NO: 161456 - DNA, 2505 bp, synthetic construct; identical to SEQ ID NO: 161455
  misc_feature 1..2505: note = Description of Artificial Sequence: Synthetic coding sequence
  source 1..2505: mol_type = other DNA

SEQ ID NO: 161457 - DNA, 2565 bp, synthetic construct; identical to SEQ ID NO: 161454
  misc_feature 1..2565: note = Description of Artificial Sequence: Synthetic coding sequence
  source 1..2565: mol_type = other DNA

SEQ ID NO: 161458 - DNA, 525 bp, synthetic construct
  misc_feature 1..525: note = Description of Artificial Sequence: Synthetic coding sequence
  source 1..525: mol_type = other DNA
atgaagtacaagaacctgatggcccgggccctgtatgacaacgtgcctgaatgtgccgaggagctggccttcaggaagggggacatcctgactgtgattgagcagaacacaggaggcctggagggctggtggctgtgcagcctgcacggccggcagggcatcgtgcccggcaacagagtgaagctgctgattggccccatgcaggagacagccagcagccatgagcagcctgccagcggcctgatgcagcagaccttcggccagcagaagctgtaccaggtgcccaacccccaggccgccccccgggacaccatctaccaggtgcccccatcctaccagaaccagggcatctaccaggtgcccaccggccacggcacccaggagcaggaggtgtaccaggtgcccccatctgtgcagaggagcatcggcggcaccagcggcccccacgtgggcaagaaggtgttccagagagatggccaggtgtcctacttcctggtgcgggccagcaagcagaccagcctgtag

SEQ ID NO: 161459 - DNA, 2505 bp, synthetic construct
  misc_feature 1..2505: note = Description of Artificial Sequence: Synthetic coding sequence
  source 1..2505: mol_type = other DNA
atgaagtacaagaacctgatggcccgggccctgtatgacaacgtgcctgaatgtgccgaggagctggccttcaggaagggggacatcctgactgtgattgagcagaacacaggaggcctggagggctggtggctgtgcagcctgcacggccggcagggcatcgtgcccggcaacagagtgaagctgctgattggccccatgcaggagacagccagcagccatgagcagcctgccagcggcctgatgcagcagaccttcggccagcagaagctgtaccaggtgcccaacccccaggccgccccccgggacaccatctaccaggtgcccccatcctaccagaaccagggcatctaccaggtgcccaccggccacggcacccaggagcaggaggtgtaccaggtgcccccatctgtgcagaggagcatcggcggcaccagcggcccccacgtgggcaagaaggtgatcacccctgtgaggacaggccacggctacgtgtatgagtaccccagccgctaccagaaggatgtgtatgacatcccccccagccacaccacccagggcgtgtatgacatcccccccagcagcgccaagggccctgtgttttctgtgcctgtgggggagatcaagccccagggcgtgtatgacatcccccccaccaagggcgtgtatgccatcccccccagcgcctgcagagatgaggccggcctgcgggagaaggactatgacttccccccacccatgaggcaggccggccgcccagacctgcggcctgagggcgtgtatgacatcccccccacctgcaccaagccagctgggaaggacctgcacgtgaagtacaactgtgacatccctggagctgctgagcctgtggcccggcggcaccagagcctgagccccaaccaccccccaccccagctgggccagagcgtgggcagccagaatgatgcctatgatgtgccccggggcgtgcagttcctggagcccccagctgagaccagcgagaaggccaacccccaggagagagatggagtgtatgatgtgcccctgcacaaccccccagatgccaagggcagccgggacctggtggatggcatcaaccggctgtccttcagcagcacaggcagcaccaggagcaacatgagcaccagcagcaccagcagcaaggagagcagcctgagcgccagccctgcccaggacaagaggctcttcctggaccctgacacagccatcgagcggctgcagaggctgcagcaggccctggagatgggcgtgagcagcctgatggccctggtgaccacagactggcgctgctacggctacatggagcggcacatcaatgagatcagaacagctgtggacaaggtggagctgttcctgaaggagtacctgcactttgtgaagggagctgtggccaatgctgcctgcctgcctgagctgatcctgcacaacaagatgaagcgggagctgcagagggtggaggacagccaccagatcctgagccagaccagccatgacctgaatgaatgttcctggagcctgaacatcctggccatcaacaagccccagaacaagtgtgatgacctggacagatttgtgatggtggccaagacagtgcctgatgatgccaagcagctgaccaccaccatcaacaccaatgctgaggccctcttccggcccggccctggcagcctgcacctgaagaatggacctgagagcatcatgaacagcacagagtacccccatggaggcagccagggccagctgctgcaccctggggaccacaaggcccaggcccacaacaaggccctgcccccaggcctgagcaaggagcaggccccagactgcagcagcagtgatggcagcgagaggtcctggatggatgattatgactatgtgcacctgcagggcaaggaggagtttgagcggcagcagaaggagctgctggagaaggagaacatcatgaagcagaacaagatgcagctggagcaccaccagctgagccagttccagctgctggagcaggagatcaccaagcctgtggagaatgacatcagcaagtggaagcccagccagagcctgcccaccaccaacagcggcgtgtctgcccaggaccggcagctgctgtgcttctactatgaccagtgtgagacccacttcatcagcctgctgaatgccattgatgccctcttcagctgtgtgtcctctgcccagcccccacgcatctttgtggcccacagcaagtttgtgatcctgagcgcccacaagctggtgttcatcggggacaccctgacccggcaggtgacagcccaggacatccggaacaaggtgatgaacagcagcaaccagctgtgtgagcagctgaagaccatcgtgatggccaccaagatggccgccctgcactaccccagcaccacagccctgcaggagatggtgcaccaggtgacagacctgagcagaaatgcccagctgttcaagaggagcctgctggagatggccaccttctag

SEQ ID NO: 161460 - DNA, 99 bp, synthetic construct
  misc_feature 1..99: note = Description of Artificial Sequence: Synthetic coding sequence
  source 1..99: mol_type = other DNA
atgtggaccaggaacctgatggcccgggccctgtatgacaacgtgcctgaatgtgccgaggagctggccttcaggaagggggacatcctgactgtgtag

SEQ ID NO: 161461 - DNA, 2505 bp, synthetic construct
  misc_feature 1..2505: note = Description of Artificial Sequence: Synthetic coding sequence
  source 1..2505: mol_type = other DNA
atgtggaccaggaacctgatggcccgggccctgtatgacaacgtgcctgaatgtgccgaggagctggccttcaggaagggggacatcctgactgtgattgagcagaacacaggaggcctggagggctggtggctgtgcagcctgcacggccggcagggcatcgtgcccggcaacagagtgaagctgctgattggccccatgcaggagacagccagcagccatgagcagcctgccagcggcctgatgcagcagaccttcggccagcagaagctgtaccaggtgcccaacccccaggccgccccccgggacaccatctaccaggtgcccccatcctaccagaaccagggcatctaccaggtgcccaccggccacggcacccaggagcaggaggtgtaccaggtgcccccatctgtgcagaggagcatcggcggcaccagcggcccccacgtgggcaagaaggtgatcacccctgtgaggacaggccacggctacgtgtatgagtaccccagccgctaccagaaggatgtgtatgacatcccccccagccacaccacccagggcgtgtatgacatcccccccagcagcgccaagggccctgtgttttctgtgcctgtgggggagatcaagccccagggcgtgtatgacatcccccccaccaagggcgtgtatgccatcccccccagcgcctgcagagatgaggccggcctgcgggagaaggactatgacttccccccacccatgaggcaggccggccgcccagacctgcggcctgagggcgtgtatgacatcccccccacctgcaccaagccagctgggaaggacctgcacgtgaagtacaactgtgacatccctggagctgctgagcctgtggcccggcggcaccagagcctgagccccaaccaccccccaccccagctgggccagagcgtgggcagccagaatgatgcctatgatgtgccccggggcgtgcagttcctggagcccccagctgagaccagcgagaaggccaacccccaggagagagatggagtgtatgatgtgcccctgcacaaccccccagatgccaagggcagccgggacctggtggatggcatcaaccggctgtccttcagcagcacaggcagcaccaggagcaacatgagcaccagcagcaccagcagcaaggagagcagcctgagcgccagccctgcccaggacaagaggctcttcctggaccctgacacagccatcgagcggctgcagaggctgcagcaggccctggagatgggcgtgagcagcctgatggccctggtgaccacagactggcgctgctacggctacatggagcggcacatcaatgagatcagaacagctgtggacaaggtggagctgttcctgaaggagtacctgcactttgtgaagggagctgtggccaatgctgcctgcctgcctgagctgatcctgcacaacaagatgaagcgggagctgcagagggtggaggacagccaccagatcctgagccagaccagccatgacctgaatgaatgttcctggagcctgaacatcctggccatcaacaagccccagaacaagtgtgatgacctggacagatttgtgatggtggccaagacagtgcctgatgatgccaagcagctgaccaccaccatcaacaccaatgctgaggccctcttccggcccggccctggcagcctgcacctgaagaatggacctgagagcatcatgaacagcacagagtacccccatggaggcagccagggccagctgctgcaccctggggaccacaaggcccaggcccacaacaaggccctgcccccaggcctgagcaaggagcaggccccagactgcagcagcagtgatggcagcgagaggtcctggatggatgattatgactatgtgcacctgcagggcaaggaggagtttgagcggcagcagaaggagctgctggagaaggagaacatcatgaagcagaacaagatgcagctggagcaccaccagctgagccagttccagctgctggagcaggagatcaccaagcctgtggagaatgacatcagcaagtggaagcccagccagagcctgcccaccaccaacagcggcgtgtctgcccaggaccggcagctgctgtgcttctactatgaccagtgtgagacccacttcatcagcctgctgaatgccattgatgccctcttcagctgtgtgtcctctgcccagcccccacgcatctttgtggcccacagcaagtttgtgatcctgagcgcccacaagctggtgttcatcggggacaccctgacccggcaggtgacagcccaggacatccggaacaaggtgatgaacagcagcaaccagctgtgtgagcagctgaagaccatcgtgatggccaccaagatggccgccctgcactaccccagcaccacagccctgcaggagatggtgcaccaggtgacagacctgagcagaaatgcccagctgttcaagaggagcctgctggagatggccaccttctag

SEQ ID NO: 161462 - DNA, 1212 bp, synthetic construct
  misc_feature 1..1212: note = Description of Artificial Sequence: Synthetic coding sequence
  source 1..1212: mol_type = other DNA
atgctgcggcctgaggccggcctggtgggcctgcacggccctgcccaggagaacagcgccctgcccggccggcgggacagcgccagcgagctgcgggccctgagcggcctggaggtggaccctggagagggctggggccgggtggtgctgatcagccccaggacagtgcgcttccgggtgctgagccctggggtgcgggaggagggccacgtgcagaacaacggccagaaccaggcccggcctgcccggggcgtgactggagctgggggctggggcagcgctgctgtgtgccggggccgggccctgcggggccgggagcccgccctgcccagcgccagcttcccagatgtggccgcctgccccggcagcctggactgtgccctgaagaggcgggcccgctgccccccaggggcccacgcctgtggcccctgcctgcagcccttccaggaggaccagcagggcctgtgtgtgcccaggatgagaagacctcctgggggcggccggccccagccccggctggaggatgaaattgacttcctggcccaggagctggccaggaaggagagcggccacagcaccccacccctgcccaaggaccggcagaggctgcctgagcccgccaccctgggcttcagcgcccggggccagggcctggagctgggcctgcccagcaccccaggcacccccacccccaccccccacaccagcctgggcagccctgtgtccagtgaccctgtgcacatgagccccctggagccccggggcggccagggagatggcctggccctggtgctgatcctggccttctgtgtggccggggctgctgccctgtctgtggccagcctgtgctggtgccgcctgcagcgggagatccggctgacccagaaggctgactatgccacagccaaggcccctggcagccctgctgccccccgcatcagccctggggaccagaggctggcccagagcgctgagatgtaccactaccagcaccagaggcagcagatgctgtgcctggagcggcacaaggagccccccaaggagctggacacagccagcagtgatgaagaaaatgaagatggagacttcaccgtgtatgaatgtcctggcctggcccccaccggggagatggaggtgaggaaccccctgtttgaccatgctgccctgagcgcccccctgcctgcccccagcagccccccagccctgccctag

SEQ ID NO: 161463 - DNA, 978 bp, synthetic construct
  misc_feature 1..978: note = Description of Artificial Sequence: Synthetic coding sequence
  source 1..978: mol_type = other DNA
atggccacccccctgcccccacccagccccaggcacctgcggctgctgcggctgctgctgagcggcctggtgctgggcgccgccctgcggggagctgctgctggccacccagatgtggccgcctgccccggcagcctggactgtgccctgaagaggcgggcccgctgccccccaggggcccacgcctgtggcccctgcctgcagcccttccaggaggaccagcagggcctgtgtgtgcccaggatgagaagacctcctgggggcggccggccccagccccggctggaggatgaaattgacttcctggcccaggagctggccaggaaggagagcggccacagcaccccacccctgcccaaggaccggcagaggctgcctgagcccgccaccctgggcttcagcgcccggggccagggcctggagctgggcctgcccagcaccccaggcacccccacccccaccccccacaccagcctgggcagccctgtgtccagtgaccctgtgcacatgagccccctggagccccggggcggccagggagatggcctggccctggtgctgatcctggccttctgtgtggccggggctgctgccctgtctgtggccagcctgtgctggtgccgcctgcagcgggagatccggctgacccagaaggctgactatgccacagccaaggcccctggcagccctgctgccccccgcatcagccctggggaccagaggctggcccagagcgctgagatgtaccactaccagcaccagaggcagcagatgctgtgcctggagcggcacaaggagccccccaaggagctggacacagccagcagtgatgaagaaaatgaagatggagacttcaccgtgtatgaatgtcctggcctggcccccaccggggagatggaggtgaggaaccccctgtttgaccatgctgccctgagcgcccccctgcctgcccccagcagccccccagccctgccctag

SEQ ID NO: 161464 - DNA, 297 bp, synthetic construct
  misc_feature 1..297: note = Description of Artificial Sequence: Synthetic coding sequence
  source 1..297: mol_type = other DNA
atgtctgtgcgggagctgaaccggcagctgcggggctgcggcagagatgaggccctgcggctgaagcagaggaggaggaccctgaagaacagaggctacgcccaggcctgccgcagcaagaggctgcagcagaggcggggcctggaggccgagcgggcccggctggccgcccagctggatgccctgcgggcagaggtggcccggctggcccgggagcgggacctgtacaaggcccgctgtgaccggctgaccagcagcggccctggcagcggggaccccagccacctgttcctgtag

SEQ ID NO: 161465 - DNA, 714 bp, synthetic construct
  misc_feature 1..714: note = Description of Artificial Sequence: Synthetic coding sequence
  source 1..714: mol_type = other DNA
atggccctgccccccagccccctggccatggagtatgtgaatgactttgacctgatgaagtttgaggtgaagcgggagcccagcgagggccggcccggccccccaacagccagcctgggcagcaccccctacagctctgtgccccccagccccaccttcagcgagcccggcatggtgggcgccacagagggcaccaggcctggcctggaggagctgtactggctggccaccctgcagcagcagctgggcgctggggaggccctgggcctgagccctgaggaggccatggagctgctgcagggccagggccctgtgcctgtggatggcccccacggctactacccaggcagccctgaggagactggagcccagcacgtgcagctggccgagcgcttcagtgatgctgccctggtgtccatgtctgtgcgggagctgaaccggcagctgcggggctgcggcagagatgaggccctgcggctgaagcagaggaggaggaccctgaagaacagaggctacgcccaggcctgccgcagcaagaggctgcagcagaggcggggcctggaggccgagcgggcccggctggccgcccagctggatgccctgcgggcagaggtggcccggctggcccgggagcgggacctgtacaaggcccgctgtgaccggctgaccagcagcggccctggcagcggggaccccagccacctgttcctgtag

SEQ ID NO: 161466 - DNA, 714 bp, synthetic construct; identical to SEQ ID NO: 161465
  misc_feature 1..714: note = Description of Artificial Sequence: Synthetic coding sequence
  source 1..714: mol_type = other DNA

SEQ ID NO: 161467 - DNA, 198 bp, synthetic construct
  misc_feature 1..198: note = Description of Artificial Sequence: Synthetic coding sequence
  source 1..198: mol_type = other DNA
atggccctgccccccagccccctggccatggagtatgtgaatgactttgacctgatgaagtttgaggtgaagcgggagcccagcgagggccggcccggccccccaacagccagcctgggcagcaccccctacagctctgtgccccccagccccaccttcagcgagcccggcatggtgggcgccacagagggcacctag

SEQ ID NO: 161468 - DNA, 297 bp, synthetic construct; identical to SEQ ID NO: 161464
  misc_feature 1..297: note = Description of Artificial Sequence: Synthetic coding sequence
  source 1..297: mol_type = other DNA

SEQ ID NO: 161469 - DNA, 714 bp, synthetic construct; identical to SEQ ID NO: 161465
  misc_feature 1..714: note = Description of Artificial Sequence: Synthetic coding sequence
  source 1..714: mol_type = other DNA

SEQ ID NO: 161470 - DNA, 1674 bp, synthetic construct
  misc_feature 1..1674: note = Description of Artificial Sequence: Synthetic coding sequence
  source 1..1674: mol_type = other DNA
atgggcggccagatcaccaggagcaccctgcatgacagcatcggcggccccttccctgtgaccagccaccgctgccaccacaagcagaagcactgcccagctgtgctgcccagcggcggcctgcctgccacccccctgctcttccacccccacaccaagggcagccagatcctgatggacctgagccacaaggctgtgaagaggcaggccagcttctgcaatgccatcaccttcagcaacagacctgtgctgatctatgagcaggtgcggctgaagatcaccaagaagcagtgctgctggagcggggccctgcggctgggcttcaccagcaaggaccccagccgcatccacccagacagcctgcccaagtatgcctgcccagacctggtgtcccagagcggcttctgggccaaggccctgcctgaggagtttgccaatgaaggcaacatcatcgccttctgggtggacaagaagggccgggtcttccaccgcatcaatgacagcgctgtgatgctgttcttctctggagtgaggacagctgaccccctgtgggccctggtggatgtgtatggcctgacccggggcgtgcagctgctggacagcgagctggtgctgcctgactgcctgcggcccaggagcttcaccgccctgcggcggcccagcctgcggcgggaggctgatgatgcccggctgtctgtgtccctgtgtgacctgaatgtgcctggagcagatggagatgaggccgccccagctgctggctgccccatcccccagaacagcctgaacagccagcacagccgggccctgcctgcccagctggatggagacctgcgcttccacgccctgcgggccggggcccacgtgcgcatcctggatgagcagacagtggcccgggtggagcacggcagagatgagcgggccctggtgttcaccagcaggcctgtgcgggtggccgagaccatctttgtgaaggtgaccaggtctgggggcgcccggcctggggccctgagctttggagtgaccacctgtgaccccggcaccctgcggcctgctgacctgcccttcagccctgaggccctggtggacaggaaggagttctgggccgtgtgccgggtgcccggccccctgcacagcggggacatcctgggcctggtggtgaatgctgatggagagctgcacctgagccacaatggagctgctgctggcatgcagctgtgtgtggatgccagccagcccctgtggatgctgtttggcctgcacggcaccatcacccagatccgcatcctgggcagcaccatcctggccgagcggggcatccccagcctgccctgcagccctgccagcacccccaccagccccagcgccctgggcagccggctgagtgaccccctgctgagcacctgcagcagcggccccctgggcagcagcgctgggggcacagcccccaacagccctgtgtccctgcctgagagccctgtgaccccaggcctgggccagtggagcgatgaatgtaccatctgctatgagcacgctgtggacaccgtcatctacacctgtggccacatgtgcctgtgctacgcctgtggcctgcggctgaagaaggccctgcacgcctgctgccccatctgccggcggcccatcaaggacatcatcaagacctaccgcagcagctag

SEQ ID NO: 161471 - DNA, 1725 bp, synthetic construct
  misc_feature 1..1725: note = Description of Artificial Sequence: Synthetic coding sequence
  source 1..1725: mol_type = other DNA
atgggcaacaacttcagcagcatccccagcctgccccggggcaaccccagccgggccccccggggccacccccagaacctgaaggacagcattggaggccccttccctgtgaccagccaccgctgccaccacaagcagaagcactgcccagctgtgctgcccagcggcggcctgcctgccacccccctgctcttccacccccacaccaagggcagccagatcctgatggacctgagccacaaggctgtgaagaggcaggccagcttctgcaatgccatcaccttcagcaacagacctgtgctgatctatgagcaggtgcggctgaagatcaccaagaagcagtgctgctggagcggggccctgcggctgggcttcaccagcaaggaccccagccgcatccacccagacagcctgcccaagtatgcctgcccagacctggtgtcccagagcggcttctgggccaaggccctgcctgaggagtttgccaatgaaggcaacatcatcgccttctgggtggacaagaagggccgggtcttccaccgcatcaatgattctgctgtgatgctgttcttcagcggcgtgaggacagctgaccccctgtgggccctggtggatgtgtatggcctgacccggggcgtgcagctgctggacagcgagctggtgctgcctgactgcctgcggcccaggagcttcaccgccctgcggcggcccagcctgcggcgggaggctgatgatgcccggctgtctgtgtccctgtgtgacctgaatgtgcctggagcagatggagatgaagctgccccagctgctggctgccccatcccccagaacagcctgaacagccagcacagccgggccctgcctgcccagctggatggagacctgcgcttccacgccctgcgggccggggcccacgtgcgcatcctggatgagcagacagtggcccgggtggagcacggcagagatgagcgggccctggtgttcaccagcaggcctgtgcgggtggccgagaccatctttgtgaaggtgaccaggtctggaggagcccggcctggggccctgagctttggagtgaccacctgtgaccccggcaccctgcggcctgctgacctgcccttcagccctgaggccctggtggacaggaaggagttctgggccgtgtgccgggtgcccggccccctgcacagcggggacatcctgggcctggtggtgaatgctgatggagagctgcacctgagccacaacggggctgctgctggcatgcagctgtgtgtggatgccagccagcccctgtggatgctgtttggcctgcacggcaccatcacccagatccgcatcctgggcagcaccatcctggccgagcggggcatccccagcctgccctgcagccctgccagcacccccaccagccccagcgccctgggcagccggctgagtgaccccctgctgagcacctgcagcagcggccccctgggcagcagcgctgggggcacagcccccaacagccctgtgtccctgcctgagagccctgtgaccccaggcctgggccagtggagcgatgagtgcaccatctgctatgaacatgctgtggacaccgtcatctacacctgtggccacatgtgcctgtgctacgcctgtggcctgcggctgaagaaggccctgcacgcctgctgccccatctgcagaagacccatcaaggacatcatcaagacctaccgcagcagctag

SEQ ID NO: 161472 - DNA, 600 bp, synthetic construct
  misc_feature 1..600: note = Description of Artificial Sequence: Synthetic coding sequence
  source 1..600: mol_type = other DNA
atgggcggccagatcaccaggagcaccctgcatgacagcatcggcggccccttccctgtgaccagccaccgctgccaccacaagcagaagcactgcccagctgtgctgcccagcggcggcctgcctgccacccccctgctcttccacccccacaccaagggcagccagatcctgatggacctgagccacaaggctgtgaagaggcaggccagcttctgcaatgccatcaccttcagcaacagacctgtgctgatctatgagcaggtgcggctgaagatcaccaagaagcagtgctgctggagcggggccctgcggctgggcttcaccagcaaggaccccagccgcatccacccagacagcctgcccaagtatgcctgcccagacctggtgtcccagagcggcttctgggccaaggccctgcctgaggagtttgccaatgaaggcaacatcatcgccttctgggtggacaagaagggccgggtcttccaccgcatcaatgacagcgctgtgatgctgttcttctctggagtgaggacagctgaccccctgtgggccctggtggatgtgtatggcctgacccggggcgtgcagctgctgtag

SEQ ID NO: 161473 - DNA, 327 bp, synthetic construct
  misc_feature 1..327: note = Description of Artificial Sequence: Synthetic coding sequence
  source 1..327: mol_type = other DNA
atggacctgagccacaaggctgtgaagaggcaggccagcttctgcaatgccatcaccttcagcaacagacctgtgctgatctatgagcaggtgcggctgaagatcaccaagaagcagtgctgctggagcggggccctgcggctgggcttcaccagcaaggaccccagccgcatccacccagacagcctgcccaagtatgcctgcccagacctggtgtcccagagcggcttctgggccaaggccctgcctgaggagtttgccaatgaaggcaacatcatcgccttctgggtggacaagaagggccgggtcttccaccgcatcaactag

SEQ ID NO: 161474 - DNA, 2553 bp, synthetic construct
  misc_feature 1..2553: note = Description of Artificial Sequence: Synthetic coding sequence
  source 1..2553: mol_type = other DNA
atgaggcaggtgtgctgcagcgccctgcccccaccacccctggagaagggccgctgcagcagctacagcgacagcagcagcagcagcagcgagaggagcagcagcagcagcagcagcagcagcgagagcggcagcagcagccgcagcagcagcaacaacagcagcatcagcaggcctgctgcccctcctgagccccggccccagcagcagccccagcccaggagccctgctgccaggagagctgctgcccggagcagagctgctgctgctgggggcatgaggcgggaccctgcccctggcttctccatgctgctgtttggagtgtccctggcctgctacagccccagcctgaagtctgtgcaggaccaggcctacaaggcccctgtggtggtggagggcaaggtgcagggcctggtgcctgctgggggcagcagcagcaacagcacccgggagcccccagccagcggccgggtggccctggtgaaggtgctggacaagtggcccctgcggagcggcggcctgcagcgggagcaggtgatctctgtgggcagctgtgtgcccctggagaggaaccagcgctacatcttcttcctggagcccacagagcagcccctggtgttcaagacagcctttgcccccctggacaccaacgggaagaacctgaagaaggaggtgggcaagatcctgtgcacagactgtgccacccggcccaagctgaagaagatgaagagccagacaggccaggtgggggagaagcagagcctgaagtgtgaggccgctgctggcaacccccagcccagctaccgctggttcaaggatggcaaggagctgaacagaagccgggacatccgcatcaagtatggaaatggaaggaagaacagccggctgcagttcaacaaggtgaaggtggaggatgctggggagtatgtgtgtgaggccgagaacatcctgggcaaggacacagtgcggggccgcctgtatgtgaacagcgtgtccaccaccctgagctcctggagcggccacgccaggaagtgcaatgaaacagccaagagctactgtgtgaatggaggagtgtgctactacatcgagggcatcaaccagctgagctgcaagtgccccaacggcttcttcggccagcgctgcctggagaagctgcccctgcggctgtacatgccagaccccaagcagaaggccgaggagctgtaccagaagagggtgctgaccatcaccggcatctgtgtggccctgctggtggtgggcatcgtgtgtgtggtggcctactgcaagaccaagaagcagaggaagcagatgcacaaccacctgcggcagaacatgtgcccagcccaccagaacagaagcctggccaacggccccagccacccccggctggaccctgaggagatccagatggctgactacatcagcaagaatgtgcctgccacagaccacgtgatccggcgggagacagagaccaccttcagcggcagccacagctgcagccccagccaccactgcagcacagccacccccaccagcagccacagacatgagagccacacctggagcctggagaggtctgagagcctgaccagtgacagccagagcggcatcatgctgagctctgtgggcaccagcaagtgcaacagccctgcctgtgtggaggcccgggcccggcgggctgctgcctacaacctggaggagaggagaagagccacagccccaccctaccatgattctgtggacagcctgcgggacagcccccacagcgagcgctacgtgtctgccctgaccaccccagcccggctgagccctgtggacttccactacagcctggccacccaggtgcccacctttgagatcaccagccccaacagcgcccatgctgtgtccctgcccccagctgcccccatctcctaccgcctggccgagcagcagcccctgctgcggcacccagcccctcctggccctggccctggccctggccctggccctggccctggagctgacatgcagaggagctatgacagctactactacccagctgctggccctggcccccggcggggcacctgtgccctgggcggcagcctgggcagcctgcctgccagccccttccgcatcccagaagatgatgaatatgagaccacccaggagtgtgcccctcctcctccaccccggccccgggcccggggggccagcaggaggaccagcgctggcccccggcgctggaggaggagccggctgaatggcctggccgcccagagggcccgggccgcccgggacagcctgagcctgagcagcggcagcggcggcggcagcgccagcgccagtgatgatgatgctgatgatgctgatggagccctggccgctgagagcacccccttcctgggcctgcggggggcccatgatgccctgcggagtgacagcccccccctgtgcccagctgctgacagcaggacctactacagcctggacagccacagcacccgggccagcagccgccacagccggggccccccaccccgggccaagcaggacagcgcccccctgtag

SEQ ID NO: 161475 - DNA, 1281 bp, synthetic construct
  misc_feature 1..1281: note = Description of Artificial Sequence: Synthetic coding sequence
  source 1..1281: mol_type = other DNA
atgaggcaggtgtgctgcagcgccctgcccccaccacccctggagaagggccgctgcagcagctacagcgacagcagcagcagcagcagcgagaggagcagcagcagcagcagcagcagcagcgagagcggcagcagcagccgcagcagcagcaacaacagcagcatcagcaggcctgctgcccctcctgagccccggccccagcagcagccccagcccaggagccctgctgccaggagagctgctgcccggagcagagctgctgctgctgggggcatgaggcgggaccctgcccctggcttctccatgctgctgtttggagtgtccctggcctgctacagccccagcctgaagtctgtgcaggaccaggcctacaaggcccctgtggtggtggagggcaaggtgcagggcctggtgcctgctgggggcagcagcagcaacagcacccgggagcccccagccagcggccgggtggccctggtgaaggtgctggacaagtggcccctgcggagcggcggcctgcagcgggagcaggtgatctctgtgggcagctgtgtgcccctggagaggaaccagcgctacatcttcttcctggagcccacagagcagcccctggtgttcaagacagcctttgcccccctggacaccaacgggaagaacctgaagaaggaggtgggcaagatcctgtgcacagactgtgccacccggcccaagctgaagaagatgaagagccagacaggccaggtgggggagaagcagagcctgaagtgtgaggccgctgctggcaacccccagcccagctaccgctggttcaaggatggcaaggagctgaacagaagccgggacatccgcatcaagtatggaaatggaaggaagaacagccggctgcagttcaacaaggtgaaggtggaggatgctggggagtatgtgtgtgaggccgagaacatcctgggcaaggacacagtgcggggccgcctgtatgtgaacagcgtgtccaccaccctgagctcctggagcggccacgccaggaagtgcaatgaaacagccaagagctactgtgtgaatggaggagtgtgctactacatcgagggcatcaaccagctgagctgcaagtgccccaacggcttcttcggccagcgctgcctggagaagctgcccctgcggctgtacatgccagaccccaagcagagcgtgctgtgggacaccccaggcactggagtgagcagcagccagtggagcaccagccccaagcccaggagctgcacccggcggggcagctag

SEQ ID NO: 161476 - DNA, 2577 bp, synthetic construct
  misc_feature 1..2577: note = Description of Artificial Sequence: Synthetic coding sequence
  source 1..2577: mol_type = other DNA
atgaggcaggtgtgctgcagcgccctgcccccaccacccctggagaagggccgctgcagcagctacagcgacagcagcagcagcagcagcgagaggagcagcagcagcagcagcagcagcagcgagagcggcagcagcagccgcagcagcagcaacaacagcagcatcagcaggcctgctgcccctcctgagccccggccccagcagcagccccagcccaggagccctgctgccaggagagctgctgcccggagcagagctgctgctgctgggggcatgaggcgggaccctgcccctggcttctccatgctgctgtttggagtgtccctggcctgctacagccccagcctgaagtctgtgcaggaccaggcctacaaggcccctgtggtggtggagggcaaggtgcagggcctggtgcctgctgggggcagcagcagcaacagcacccgggagcccccagccagcggccgggtggccctggtgaaggtgctggacaagtggcccctgcggagcggcggcctgcagcgggagcaggtgatctctgtgggcagctgtgtgcccctggagaggaaccagcgctacatcttcttcctggagcccacagagcagcccctggtgttcaagacagcctttgcccccctggacaccaacgggaagaacctgaagaaggaggtgggcaagatcctgtgcacagactgtgccacccggcccaagctgaagaagatgaagagccagacaggccaggtgggggagaagcagagcctgaagtgtgaggccgctgctggcaacccccagcccagctaccgctggttcaaggatggcaaggagctgaacagaagccgggacatccgcatcaagtatggaaatggaaggaagaacagccggctgcagttcaacaaggtgaaggtggaggatgctggggagtatgtgtgtgaggccgagaacatcctgggcaaggacacagtgcggggccgcctgtatgtgaacagcgtgtccaccaccctgagctcctggagcggccacgccaggaagtgcaatgaaacagccaagagctactgtgtgaatggaggagtgtgctactacatcgagggcatcaaccagctgagctgcaagtgccccaacggcttcttcggccagcgctgcctggagaagctgcccctgcggctgtacatgccagaccccaagcagagcttcctgagctttgagctgagcaaggccgaggagctgtaccagaagagggtgctgaccatcaccggcatctgtgtggccctgctggtggtgggcatcgtgtgtgtggtggcctactgcaagaccaagaagcagaggaagcagatgcacaaccacctgcggcagaacatgtgcccagcccaccagaacagaagcctggccaacggccccagccacccccggctggaccctgaggagatccagatggctgactacatcagcaagaatgtgcctgccacagaccacgtgatccggcgggagacagagaccaccttcagcggcagccacagctgcagccccagccaccactgcagcacagccacccccaccagcagccacagacatgagagccacacctggagcctggagaggtctgagagcctgaccagtgacagccagagcggcatcatgctgagctctgtgggcaccagcaagtgcaacagccctgcctgtgtggaggcccgggcccggcgggctgctgcctacaacctggaggagaggagaagagccacagccccaccctaccatgattctgtggacagcctgcgggacagcccccacagcgagcgctacgtgtctgccctgaccaccccagcccggctgagccctgtggacttccactacagcctggccacccaggtgcccacctttgagatcaccagccccaacagcgcccatgctgtgtccctgcccccagctgcccccatctcctaccgcctggccgagcagcagcccctgctgcggcacccagcccctcctggccctggccctggccctggccctggccctggccctggagctgacatgcagaggagctatgacagctactactacccagctgctggccctggcccccggcggggcacctgtgccctgggcggcagcctgggcagcctgcctgccagccccttccgcatcccagaagatgatgaatatgagaccacccaggagtgtgcccctcctcctccaccccggccccgggcccggggggccagcaggaggaccagcgctggcccccggcgctggaggaggagccggctgaatggcctggccgcccagagggcccgggccgcccgggacagcctgagcctgagcagcggcagcggcggcggcagcgccagcgccagtgatgatgatgctgatgatgctgatggagccctggccgctgagagcacccccttcctgggcctgcggggggcccatgatgccctgcggagtgacagcccccccctgtgcccagctgctgacagcaggacctactacagcctggacagccacagcacccgggccagcagccgccacagccggggccccccaccccgggccaagcaggacagcgcccccctgtag

SEQ ID NO: 161477 - DNA, 2355 bp, synthetic construct
  misc_feature 1..2355: note = Description of Artificial Sequence: Synthetic coding sequence
  source 1..2355: mol_type = other DNA
atgaggcaggtgtgctgcagcgccctgcccccaccacccctggagaagggccgctgcagcagctacagcgacagcagcagcagcagcagcgagaggagcagcagcagcagcagcagcagcagcgagagcggcagcagcagccgcagcagcagcaacaacagcagcatcagcaggcctgctgcccctcctgagccccggccccagcagcagccccagcccaggagccctgctgccaggagagctgctgcccggagcagagctgctgctgctgggggcatgaggcgggaccctgcccctggcttctccatgctgctgtttggagtgtccctggcctgctacagccccagcctgaagtctgtgcaggaccaggcctacaaggcccctgtggtggtggagggcaaggtgcagggcctggtgcctgctgggggcagcagcagcaacagcacccgggagcccccagccagcggccgggtggccctggtgaaggtgctggacaagtggcccctgcggagcggcggcctgcagcgggagcaggtgatctctgtgggcagctgtgtgcccctggagaggaaccagcgctacatcttcttcctggagcccacagagcagcccctggtgttcaagacagcctttgcccccctggacaccaacgggaagaacctgaagaaggaggtgggcaagatcctgtgcacagactgtgccacccggcccaagctgaagaagatgaagagccagacaggccaggtgggggagaagcagagcctgaagtgtgaggccgctgctggcaacccccagcccagctaccgctggttcaaggatggcaaggagctgaacagaagccgggacatccgcatcaagtatggaaatggaaggaagaacagccggctgcagttcaacaaggtgaaggtggaggatgctggggagtatgtgtgtgaggccgagaacatcctgggcaaggacacagtgcggggccgcctgtatgtgaacagcgaggccgaggagctgtaccagaagagggtgctgaccatcaccggcatctgtgtggccctgctggtggtgggcatcgtgtgtgtggtggcctactgcaagaccaagaagcagaggaagcagatgcacaaccacctgcggcagaacatgtgcccagcccaccagaacagaagcctggccaacggccccagccacccccggctggaccctgaggagatccagatggctgactacatcagcaagaatgtgcctgccacagaccacgtgatccggcgggagacagagaccaccttcagcggcagccacagctgcagccccagccaccactgcagcacagccacccccaccagcagccacagacatgagagccacacctggagcctggagaggtctgagagcctgaccagtgacagccagagcggcatcatgctgagctctgtgggcaccagcaagtgcaacagccctgcctgtgtggaggcccgggcccggcgggctgctgcctacaacctggaggagaggagaagagccacagccccaccctaccatgattctgtggacagcctgcgggacagcccccacagcgagcgctacgtgtctgccctgaccaccccagcccggctgagccctgtggacttccactacagcctggccacccaggtgcccacctttgagatcaccagccccaacagcgcccatgctgtgtccctgcccccagctgcccccatctcctaccgcctggccgagcagcagcccctgctgcggcacccagcccctcctggccctggccctggccctggccctggccctggccctggagctgacatgcagaggagctatgacagctactactacccagctgctggccctggcccccggcggggcacctgtgccctgggcggcagcctgggcagcctgcctgccagccccttccgcatcccagaagatgatgaatatgagaccacccaggagtgtgcccctcctcctccaccccggccccgggcccggggggccagcaggaggaccagcgctggcccccggcgctggaggaggagccggctgaatggcctggccgcccagagggcccgggccgcccgggacagcctgagcctgagcagcggcagcggcggcggcagcgccagcgccagtgatgatgatgctgatgatgctgatggagccctggccgctgagagcacccccttcctgggcctgcggggggcccatgatgccctgcggagtgacagcccccccctgtgcccagctgctgacagcaggacctactacagcctggacagccacagcacccgggccagcagccgccacagccggggccccccaccccgggccaagcaggacagcgcccccctgtag

SEQ ID NO: 161478 - DNA, 993 bp, synthetic construct
  misc_feature 1..993: note = Description of Artificial Sequence: Synthetic coding sequence
  source 1..993: mol_type = other DNA
atgaggcgggaccctgcccctggcttctccatgctgctgtttggagtgtccctggcctgctacagccccagcctgaagtctgtgcaggaccaggcctacaaggcccctgtggtggtggagggcaaggtgcagggcctggtgcctgctgggggcagcagcagcaacagcacccgggagcccccagccagcggccgggtggccctggtgaaggtgctggacaagtggcccctgcggagcggcggcctgcagcgggagcaggtgatctctgtgggcagctgtgtgcccctggagaggaaccagcgctacatcttcttcctggagcccacagagcagcccctggtgttcaagacagcctttgcccccctggacaccaacgggaagaacctgaagaaggaggtgggcaagatcctgtgcacagactgtgccacccggcccaagctgaagaagatgaagagccagacaggccaggtgggggagaagcagagcctgaagtgtgaggccgctgctggcaacccccagcccagctaccgctggttcaaggatggcaaggagctgaacagaagccgggacatccgcatcaagtatggaaatggaaggaagaacagccggctgcagttcaacaaggtgaaggtggaggatgctggggagtatgtgtgtgaggccgagaacatcctgggcaaggacacagtgcggggccgcctgtatgtgaacagcgtgtccaccaccctgagctcctggagcggccacgccaggaagtgcaatgaaacagccaagagctactgtgtgaatggaggagtgtgctactacatcgagggcatcaaccagctgagctgcaagtgccccaacggcttcttcggccagcgctgcctggagaagctgcccctgcggctgtacatgccagaccccaagcagagcgtgctgtgggacaccccaggcactggagtgagcagcagccagtggagcaccagccccagcaccctggacctgaactag

SEQ ID NO: 161479 - DNA, 2559 bp, synthetic construct
  misc_feature 1..2559: note = Description of Artificial Sequence: Synthetic coding sequence
  source 1..2559: mol_type = other DNA
atgaggcaggtgtgctgcagcgccctgcccccaccacccctggagaagggccgctgcagcagctacagcgacagcagcagcagcagcagcgagaggagcagcagcagcagcagcagcagcagcgagagcggcagcagcagccgcagcagcagcaacaacagcagcatcagcaggcctgctgcccctcctgagccccggccccagcagcagccccagcccaggagccctgctgccaggagagctgctgcccggagcagagctgctgctgctgggggcatgaggcgggaccctgcccctggcttctccatgctgctgtttggagtgtccctggcctgctacagccccagcctgaagtctgtgcaggaccaggcctacaaggcccctgtggtggtggagggcaaggtgcagggcctggtgcctgctgggggcagcagcagcaacagcacccgggagcccccagccagcggccgggtggccctggtgaaggtgctggacaagtggcccctgcggagcggcggcctgcagcgggagcaggtgatctctgtgggcagctgtgtgcccctggagaggaaccagcgctacatcttcttcctggagcccacagagcagcccctggtgttcaagacagcctttgcccccctggacaccaacgggaagaacctgaagaaggaggtgggcaagatcctgtgcacagactgtgccacccggcccaagctgaagaagatgaagagccagacaggccaggtgggggagaagcagagcctgaagtgtgaggccgctgctggcaacccccagcccagctaccgctggttcaaggatggcaaggagctgaacagaagccgggacatccgcatcaagtatggaaatggaaggaagaacagccggctgcagttcaacaaggtgaaggtggaggatgctggggagtatgtgtgtgaggccgagaacatcctgggcaaggacacagtgcggggccgcctgtatgtgaacagcgtgtccaccaccctgagctcctggagcggccacgccaggaagtgcaatgaaacagccaagagctactgtgtgaatggaggagtgtgctactacatcgagggcatcaaccagctgagctgcaagtgccctgtgggctacacaggagaccgctgccagcagtttgccatggtgaacttcagcacccggctgggcggagatgtggaggaggccgaggagctgtaccagaagagggtgctgaccatcaccggcatctgtgtggccctgctggtggtgggcatcgtgtgtgtggtggcctactgcaagaccaagaagcagaggaagcagatgcacaaccacctgcggcagaacatgtgcccagcccaccagaacagaagcctggccaacggccccagccacccccggctggaccctgaggagatccagatggctgactacatcagcaagaatgtgcctgccacagaccacgtgatccggcgggagacagagaccaccttcagcggcagccacagctgcagccccagccaccactgcagcacagccacccccaccagcagccacagacatgagagccacacctggagcctggagaggtctgagagcctgaccagtgacagccagagcggcatcatgctgagctctgtgggcaccagcaagtgcaacagccctgcctgtgtggaggcccgggcccggcgggctgctgcctacaacctggaggagaggagaagagccacagccccaccctaccatgattctgtggacagcctgcgggacagcccccacagcgagcgctacgtgtctgccctgaccaccccagcccggctgagccctgtggacttccactacagcctggccacccaggtgcccacctttgagatcaccagccccaacagcgcccatgctgtgtccctgcccccagctgcccccatctcctaccgcctggccgagcagcagcccctgctgcggcacccagcccctcctggccctggccctggccctggccctggccctggccctggagctgacatgcagaggagctatgacagctactactacccagctgctggccctggcccccggcggggcacctgtgccctgggcggcagcctgggcagcctgcctgccagccccttccgcatcccagaagatgatgaatatgagaccacccaggagtgtgcccctcctcctccaccccggccccgggcccggggggccagcaggaggaccagcgctggcccccggcgctggaggaggagccggctgaatggcctggccgcccagagggcccgggccgcccgggacagcctgagcctgagcagcggcagcggcggcggcagcgccagcgccagtgatgatgatgctgatgatgctgatggagccctggccgctgagagcacccccttcctgggcctgcggggggcccatgatgccctgcggagtgacagcccccccctgtgcccagctgctgacagcaggacctactacagcctggacagccacagcacccgggccagcagccgccacagccggggccccccaccccgggccaagcaggacagcgcccccctgtag

SEQ ID NO: 161480 - DNA, 2535 bp, synthetic construct
  misc_feature 1..2535: note = Description of Artificial Sequence: Synthetic coding sequence
  source 1..2535: mol_type = other DNA
atgaggcaggtgtgctgcagcgccctgcccccaccacccctggagaagggccgctgcagcagctacagcgacagcagcagcagcagcagcgagaggagcagcagcagcagcagcagcagcagcgagagcggcagcagcagccgcagcagcagcaacaacagcagcatcagcaggcctgctgcccctcctgagccccggccccagcagcagccccagcccaggagccctgctgccaggagagctgctgcccggagcagagctgctgctgctgggggcatgaggcgggaccctgcccctggcttctccatgctgctgtttggagtgtccctggcctgctacagccccagcctgaagtctgtgcaggaccaggcctacaaggcccctgtggtggtggagggcaaggtgcagggcctggtgcctgctgggggcagcagcagcaacagcacccgggagcccccagccagcggccgggtggccctggtgaaggtgctggacaagtggcccctgcggagcggcggcctgcagcgggagcaggtgatctctgtgggcagctgtgtgcccctggagaggaaccagcgctacatcttcttcctggagcccacagagcagcccctggtgttcaagacagcctttgcccccctggacaccaacgggaagaacctgaagaaggaggtgggcaagatcctgtgcacagactgtgccacccggcccaagctgaagaagatgaagagccagacaggccaggtgggggagaagcagagcctgaagtgtgaggccgctgctggcaacccccagcccagctaccgctggttcaaggatggcaaggagctgaacagaagccgggacatccgcatcaagtatggaaatggaaggaagaacagccggctgcagttcaacaaggtgaaggtggaggatgctggggagtatgtgtgtgaggccgagaacatcctgggcaaggacacagtgcggggccgcctgtatgtgaacagcgtgtccaccaccctgagctcctggagcggccacgccaggaagtgcaatgaaacagccaagagctactgtgtgaatggaggagtgtgctactacatcgagggcatcaaccagctgagctgcaagtgccctgtgggctacacaggagaccgctgccagcagtttgccatggtgaacttcagcaaggccgaggagctgtaccagaagagggtgctgaccatcaccggcatctgtgtggccctgctggtggtgggcatcgtgtgtgtggtggcctactgcaagaccaagaagcagaggaagcagatgcacaaccacctgcggcagaacatgtgcccagcccaccagaacagaagcctggccaacggccccagccacccccggctggaccctgaggagatccagatggctgactacatcagcaagaatgtgcctgccacagaccacgtgatccggcgggagacagagaccaccttcagcggcagccacagctgcagccccagccaccactgcagcacagccacccccaccagcagccacagacatgagagccacacctggagcctggagaggtctgagagcctgaccagtgacagccagagcggcatcatgctgagctctgtgggcaccagcaagtgcaacagccctgcctgtgtggaggcccgggcccggcgggctgctgcctacaacctggaggagaggagaagagccacagccccaccctaccatgattctgtggacagcctgcgggacagcccccacagcgagcgctacgtgtctgccctgaccaccccagcccggctgagccctgtggacttccactacagcctggccacccaggtgcccacctttgagatcaccagccccaacagcgcccatgctgtgtccctgcccccagctgcccccatctcctaccgcctggccgagcagcagcccctgctgcggcacccagcccctcctggccctggccctggccctggccctggccctggccctggagctgacatgcagaggagctatgacagctactactacccagctgctggccctggcccccggcggggcacctgtgccctgggcggcagcctgggcagcctgcctgccagccccttccgcatcccagaagatgatgaatatgagaccacccaggagtgtgcccctcctcctccaccccggccccgggcccggggggccagcaggaggaccagcgctggcccccggcgctggaggaggagccggctgaatggcctggccgcccagagggcccgggccgcccgggacagcctgagcctgagcagcggcagcggcggcggcagcgccagcgccagtgatgatgatgctgatgatgctgatggagccctggccgctgagagcacccccttcctgggcctgcggggggcccatgatgccctgcggagtgacagcccccccctgtgcccagctgctgacagcaggacctactacagcctggacagccacagcacccgggccagcagccgccacagccggggccccccaccccgggccaagcaggacagcgcccccctgtag

SEQ ID NO: 161481 - DNA, 2577 bp, synthetic construct
  misc_feature 1..2577: note = Description of Artificial Sequence: Synthetic coding sequence
  source 1..2577: mol_type = other DNA
atgaggcaggtgtgctgcagcgccctgcccccaccacccctggagaagggccgctgcagcagctacagcgacagcagcagcagcagcagcgagaggagcagcagcagcagcagcagcagcagcgagagcggcagcagcagccgcagcagcagcaacaacagcagcatcagcaggcctgctgcccctcctgagccccggccccagcagcagccccagcccaggagccctgctgccaggagagctgctgcccggagcagagctgctgctgctgggggcatgaggcgggaccctgcccctggcttctccatgctgctgtttggagtgtccctggcctgctacagccccagcctgaagtctgtgcaggaccaggcctacaaggcccctgtggtggtggagggcaaggtgcagggcctggtgcctgctgggggcagcagcagcaacagcacccgggagcccccagccagcggccgggtggccctggtgaaggtgctggacaagtggcccctgcggagcggcggcctgcagcgggagcaggtgatctctgtgggcagctgtgtgcccctggagaggaaccagcgctacatcttcttcctggagcccacagagcagcccctggtgttcaagacagcctttgcccccctggacaccaacgggaagaacctgaagaaggaggtgggcaagatcctgtgcacagactgtgccacccggcccaagctgaagaagatgaagagccagacaggccaggtgggggagaagcagagcctgaagtgtgaggccgctgctggcaacccccagcccagctaccgctggttcaaggatggcaaggagctgaacagaagccgggacatccgcatcaagtatggaaatggaaggaagaacagccggctgcagttcaacaaggtgaaggtggaggatgctggggagtatgtgtgtgaggccgagaacatcctgggcaaggacacagtgcggggccgcctgtatgtgaacagcgtgtccaccaccctgagctcctggagcggccacgccaggaagtgcaatgaaacagccaagagctactgtgtgaatggaggagtgtgctactacatcgagggcatcaaccagctgagctgcaagtgccccaacggcttcttcggccagcgctgcctggagaagctgcccctgcggctgtacatgccagaccccaagcagaagcacctgggctttgagctgaaggaggccgaggagctgtaccagaagagggtgctgaccatcaccggcatctgtgtggccctgctggtggtgggcatcgtgtgtgtggtggcctactgcaagaccaagaagcagaggaagcagatgcacaaccacctgcggcagaacatgtgcccagcccaccagaacagaagcctggccaacggccccagccacccccggctggaccctgaggagatccagatggctgactacatcagcaagaatgtgcctgccacagaccacgtgatccggcgggagacagagaccaccttcagcggcagccacagctgcagccccagccaccactgcagcacagccacccccaccagcagccacagacatgagagccacacctggagcctggagaggtctgagagcctgaccagtgacagccagagcggcatcatgctgagctctgtgggcaccagcaagtgcaacagccctgcctgtgtggaggcccgggcccggcgggctgctgcctacaacctggaggagaggagaagagccacagccccaccctaccatgattctgtggacagcctgcgggacagcccccacagcgagcgctacgtgtctgccctgaccaccccagcccggctgagccctgtggacttccactacagcctggccacccaggtgcccacctttgagatcaccagccccaacagcgcccatgctgtgtccctgcccccagctgcccccatctcctaccgcctggccgagcagcagcccctgctgcggcacccagcccctcctggccctggccctggccctggccctggccctggccctggagctgacatgcagaggagctatgacagctactactacccagctgctggccctggcccccggcggggcacctgtgccctgggcggcagcctgggcagcctgcctgccagccccttccgcatcccagaagatgatgaatatgagaccacccaggagtgtgcccctcctcctccaccccggccccgggcccggggggccagcaggaggaccagcgctggcccccggcgctggaggaggagccggctgaatggcctggccgcccagagggcccgggccgcccgggacagcctgagcctgagcagcggcagcggcggcggcagcgccagcgccagtgatgatgatgctgatgatgctgatggagccctggccgctgagagcacccccttcctgggcctgcggggggcccatgatgccctgcggagtgacagcccccccctgtgcccagctgctgacagcaggacctactacagcctggacagccacagcacccgggccagcagccgccacagccggggccccccaccccgggccaagcaggacagcgcccccctgtag

SEQ ID NO: 161482 - DNA, 2091 bp, synthetic construct
  misc_feature 1..2091: note = Description of Artificial Sequence: Synthetic coding sequence
  source 1..2091: mol_type = other DNA
atgtctgagggcgctgctgctgccagccccccaggagctgccagcgctgctgctgccagcgctgaggagggcacagctgctgctgctgctgctgctgctgctgggggcggcccagatggcggcggggagggcgctgctgagcccccccgggagctgcgctgcagcgactgcatcgtgtggaaccggcagcagacctggctgtgtgtggtgcccctcttcatcggcttcatcggcctgggcctgagcctgatgctgctgaagtggatcgtggtgggctctgtgaaggagtatgtgcccacagacctggtggacagcaagggcatgggccaggaccccttcttcctgagcaagcccagcagcttccccaaggccatggagaccaccaccaccaccaccagcaccaccagccctgccaccccatctgctgggggcgccgccagcagcaggacccccaaccgcatcagcacccggctgaccaccatcacccgggcccccacccgcttccctggccaccgggtgcccatccgggccagccccaggagcaccacagccaggaacacagctgccccagccaccgtgcccagcaccacagcccccttcttcagcagcagcaccctgggcagccggccccctgtgcccggcacccccagcacccaggccatgcccagctggcccacagctgcctatgccaccagcagctacctgcatgacagcacccccagctggaccctgagccccttccaggatgctgccagcagcagcagcagcagcagcagcagcgccaccaccaccaccccagagaccagcaccagccccaagttccacaccaccacctacagcacagagaggtctgagcacttcaagccctgccgggacaaggacctggcctactgcctgaatgatggagaatgttttgtgattgagaccctgaccggcagccacaagcactgccgctgcaaggagggctaccagggcgtgcgctgtgaccagttcctgcccaagacagacagcatcctgagtgaccccacagaccacctgggcatcgagttcatggagagcgaggaggtgtaccagaggcaggtgctgagcatcagctgcatcatctttggaattgtgattgtgggcatgttctgtgccgccttctacttcaagagcaagaagcaggccaagcagatccaggagcagctgaaggtgccccagaatggcaagagctacagcctgaaggccagcagcaccatggccaagtctgagaacctggtgaagagccacgtgcagctgcagaactacagcaaggtggagcggcaccctgtgacagccctggagaagatgatggagagcagctttgtgggcccccagagcttccctgaggtgcccagcccagaccggggcagccagagcgtgaagcaccacaggagcctgagcagctgctgcagccctggccagaggagcggcatgctgcacagaaatgccttccggaggaccccacccagccccaggagccggctgggcggcatcgtgggccctgcctaccagcagctggaggagagccgcatcccagaccaggacaccatcccctgccagggctacagcagcagcggcctgaagacccagaggaacaccagcatcaacatgcagctgcccagccgggagaccaacccctacttcaacagcctggagcagaaggacctggtgggctacagcagcacccgggccagctctgtgcccatcatccccagcgtgggcctggaggagacctgcctgcagatgcctggcatcagcgaggtgaagagcatcaagtggtgcaagaacagctacagcgcagatgtggtgaatgtgtccatccctgtgtctgactgcctgattgctgagcagcaggaggtgaagatcctgctggagaccgtgcaggagcagatccgcatcctgacagatgccaggagaagtgaggactatgagctggcctctgtggagacagaggacagcgcctctgaaaatacagccttcctgcccctgagccccacagccaagtctgagcgggaggcccagtttgtgctgagaaatgagatccagagggacagcgccctgaccaagtag

SEQ ID NO: 161483 - DNA, 1500 bp, synthetic construct
  misc_feature 1..1500: note = Description of Artificial Sequence: Synthetic coding sequence
  source 1..1500: mol_type = other DNA
atggagtgtggcatcccccccaccctggtgtgtgtgggccggggcggcggcctgcacaccatcaacatcatcatctggtactacttccccagcgcctggaggacctgcttcaacatcagcagctctgtgggcctgctgctgaccaacagctacaagttctacaccaccacctacagcacagagaggtctgagcacttcaagccctgccgggacaaggacctggcctactgcctgaatgatggagagtgcttcgtcatcgagaccctgaccggcagccacaagcactgccgctgcaaggagggctaccagggcgtgcgctgtgaccagttcctgcccaagacagacagcatcctgagtgaccccacagaccacctgggcatcgagttcatggagagcgaggaggtgtaccagaggcaggtgctgagcatcagctgcatcatcttcggcatcgtcatcgtgggcatgttctgtgccgccttctacttcaagagcaagaagcaggccaagcagatccaggagcagctgaaggtgccccagaatggcaagagctacagcctgaaggccagcagcaccatggccaagtctgagaacctggtgaagagccacgtgcagctgcagaactacagcaaggtggagcggcaccctgtgacagccctggagaagatgatggagagcagctttgtgggcccccagagcttccctgaggtgcccagcccagaccggggcagccagagcgtgaagcaccacaggagcctgagcagctgctgcagccctggccagaggagcggcatgctgcacagaaatgccttccggaggaccccacccagccccaggagccggctgggcggcatcgtgggccctgcctaccagcagctggaggagagccgcatcccagaccaggacaccatcccctgccagggcatcgaggtgaggaagaccatcagccacctgcccatccagctgtggtgtgtggagcggcccctggacctgaagtacagcagcagcggcctgaagacccagaggaacaccagcatcaacatgcagctgcccagccgggagaccaacccctacttcaacagcctggagcagaaggacctggtgggctacagcagcacccgggccagctctgtgcccatcatccccagcgtgggcctggaggagacctgcctgcagatgcctggcatcagcgaggtgaagagcatcaagtggtgcaagaacagctacagcgcagatgtggtgaatgtgtccatccctgtgtctgactgcctgattgctgagcagcaggaggtgaagatcctgctggagaccgtgcaggagcagatccgcatcctgacagatgcccggcggagtgaagattatgagctggcctctgtggagacagaagattctgccagcgagaacacagccttcctgcccctgagccccacagccaagtctgagcgggaggcccagtttgtgctgagaaatgagatccagagggacagcgccctgaccaagtag

SEQ ID NO: 161484 - DNA, 2163 bp, synthetic construct
  misc_feature 1..2163: note = Description of Artificial Sequence: Synthetic coding sequence
  source 1..2163: mol_type = other DNA
atgtctgagggcgctgctgctgccagccccccaggagctgccagcgctgctgctgccagcgctgaggagggcacagctgctgctgctgctgctgctgctgctgggggcggcccagatggcggcggggagggcgctgctgagcccccccgggagctgcgctgcagcgactgcatcgtgtggaaccggcagcagacctggctgtgtgtggtgcccctcttcatcggcttcatcggcctgggcctgagcctgatgctgctgaagtggatcgtggtgggctctgtgaaggagtatgtgcccacagacctggtggacagcaagggcatgggccaggaccccttcttcctgagcaagcccagcagcttccccaaggccatggagaccaccaccaccaccaccagcaccaccagccctgccaccccatctgctgggggcgccgccagcagcaggacccccaaccgcatcagcacccggctgaccaccatcacccgggcccccacccgcttccctggccaccgggtgcccatccgggccagccccaggagcaccacagccaggaacacagctgccccagccaccgtgcccagcaccacagcccccttcttcagcagcagcaccctgggcagccggccccctgtgcccggcacccccagcacccaggccatgcccagctggcccacagctgcctatgccaccagcagctacctgcatgacagcacccccagctggaccctgagccccttccaggatgctgccagcagcagcagcagcagcagcagcagcgccaccaccaccaccccagagaccagcaccagccccaagttccacaccaccacctacagcacagagaggtctgagcacttcaagccctgccgggacaaggacctggcctactgcctgaatgatggagaatgttttgtgattgagaccctgaccggcagccacaagcactgccgctgcaaggagggctaccagggcgtgcgctgtgaccagttcctgcccaagacagacagcatcctgagtgaccccacagaccacctgggcatcgagttcatggagagcgaggaggtgtaccagaggcaggtgctgagcatcagctgcatcatctttggaattgtgattgtgggcatgttctgtgccgccttctacttcaagagcaagaagcaggccaagcagatccaggagcagctgaaggtgccccagaatggcaagagctacagcctgaaggccagcagcaccatggccaagtctgagaacctggtgaagagccacgtgcagctgcagaactacagcaaggtggagcggcaccctgtgacagccctggagaagatgatggagagcagctttgtgggcccccagagcttccctgaggtgcccagcccagaccggggcagccagagcgtgaagcaccacaggagcctgagcagctgctgcagccctggccagaggagcggcatgctgcacagaaatgccttccggaggaccccacccagccccaggagccggctgggcggcatcgtgggccctgcctaccagcagctggaggagagccgcatcccagaccaggacaccatcccctgccagggcatcgaggtgaggaagaccatcagccacctgcccatccagctgtggtgtgtggagcggcccctggacctgaagtacagcagcagcggcctgaagacccagaggaacaccagcatcaacatgcagctgcccagccgggagaccaacccctacttcaacagcctggagcagaaggacctggtgggctacagcagcacccgggccagctctgtgcccatcatccccagcgtgggcctggaggagacctgcctgcagatgcctggcatcagcgaggtgaagagcatcaagtggtgcaagaacagctacagcgcagatgtggtgaatgtgtccatccctgtgtctgactgcctgattgctgagcagcaggaggtgaagatcctgctggagaccgtgcaggagcagatccgcatcctgacagatgccaggagaagtgaggactatgagctggcctctgtggagacagaggacagcgcctctgaaaatacagccttcctgcccctgagccccacagccaagtctgagcgggaggcccagtttgtgctgagaaatgagatccagagggacagcgccctgaccaagtag

SEQ ID NO: 161485 - DNA, 2088 bp, synthetic construct
  misc_feature 1..2088: note = Description of Artificial Sequence: Synthetic coding sequence
  source 1..2088: mol_type = other DNA
atgtctgagggcgctgctgctgccagccccccaggagctgccagcgctgctgctgccagcgctgaggagggcacagctgctgctgctgctgctgctgctgctgggggcggcccagatggcggcggggagggcgctgctgagcccccccgggagctgcgctgcagcgactgcatcgtgtggaaccggcagcagacctggctgtgtgtggtgcccctcttcatcggcttcatcggcctgggcctgagcctgatgctgctgaagtggatcgtggtgggctctgtgaaggagtatgtgcccacagacctggtggacagcaagggcatgggccaggaccccttcttcctgagcaagcccagcagcttccccaaggccatggagaccaccaccaccaccaccagcaccaccagccctgccaccccatctgctgggggcgccgccagcagcaggacccccaaccgcatcagcacccggctgaccaccatcacccgggcccccacccgcttccctggccaccgggtgcccatccgggccagccccaggagcaccacagccaggaacacagctgccccagccaccgtgcccagcaccacagcccccttcttcagcagcagcaccctgggcagccggccccctgtgcccggcacccccagcacccaggccatgcccagctggcccacagctgcctatgccaccagcagctacctgcatgacagcacccccagctggaccctgagccccttccaggatgctgccagcagcagcagcagcagcagcagcagcgccaccaccaccaccccagagaccagcaccagccccaagttccacaccaccacctacagcacagagaggtctgagcacttcaagccctgccgggacaaggacctggcctactgcctgaatgatggagaatgttttgtgattgagaccctgaccggcagccacaagcactgccgctgcaaggagggctaccagggcgtgcgctgtgaccagttcctgcccaagacagacagcatcctgagtgaccccacccacatcggcatcatcttcacagagagcgaggaggtgtaccagaggcaggtgctgagcatcagctgcatcatcttcggcatcgtcatcgtgggcatgttctgtgccgccttctacttcaagagcaagaagcaggccaagcagatccaggagcagctgaaggtgccccagaatggcaagagctacagcctgaaggccagcagcaccatggccaagtctgagaacctggtgaagagccacgtgcagctgcagaactacagcaaggtggagcggcaccctgtgacagccctggagaagatgatggagagcagctttgtgggcccccagagcttccctgaggtgcccagcccagaccggggcagccagagcgtgaagcaccacaggagcctgagcagctgctgcagccctggccagaggagcggcatgctgcacagaaatgccttccggaggaccccacccagccccaggagccggctgggcggcatcgtgggccctgcctaccagcagctggaggagagccgcatcccagaccaggacaccatcccctgccagggctacagcagcagcggcctgaagacccagaggaacaccagcatcaacatgcagctgcccagccgggagaccaacccctacttcaacagcctggagcagaaggacctggtgggctacagcagcacccgggccagctctgtgcccatcatccccagcgtgggcctggaggagacctgcctgcagatgcctggcatcagcgaggtgaagagcatcaagtggtgcaagaacagctacagcgcagatgtggtgaatgtgtccatccctgtgtctgactgcctgattgctgagcagcaggaggtgaagatcctgctggagaccgtgcaggagcagatccgcatcctgacagatgcccggcggagtgaagattatgagctggcctctgtggagacagaagattctgccagcgagaacacagccttcctgcccctgagccccacagccaagtctgagcgggaggcccagtttgtgctgagaaatgagatccagagggacagcgccctgaccaagtag

SEQ ID NO: 161486 - DNA, 1041 bp, synthetic construct
  misc_feature 1..1041: note = Description of Artificial Sequence: Synthetic coding sequence
  source 1..1041: mol_type = other DNA
atggagagcgaggaggtgtaccagaggcaggtgctgagcatcagctgcatcatctttggaattgtgattgtgggcatgttctgtgccgccttctacttcaagagcaagaagcaggccaagcagatccaggagcagctgaaggtgccccagaatggcaagagctacagcctgaaggccagcagcaccatggccaagtctgagaacctggtgaagagccacgtgcagctgcagaactacagcaaggtggagcggcaccctgtgacagccctggagaagatgatggagagcagctttgtgggcccccagagcttccctgaggtgcccagcccagaccggggcagccagagcgtgaagcaccacaggagcctgagcagctgctgcagccctggccagaggagcggcatgctgcacagaaatgccttccggaggaccccacccagccccaggagccggctgggcggcatcgtgggccctgcctaccagcagctggaggagagccgcatcccagaccaggacaccatcccctgccagggctacagcagcagcggcctgaagacccagaggaacaccagcatcaacatgcagctgcccagccgggagaccaacccctacttcaacagcctggagcagaaggacctggtgggctacagcagcacccgggccagctctgtgcccatcatccccagcgtgggcctggaggagacctgcctgcagatgcctggcatcagcgaggtgaagagcatcaagtggtgcaagaacagctacagcgcagatgtggtgaatgtgtccatccctgtgtctgactgcctgattgctgagcagcaggaggtgaagatcctgctggagaccgtgcaggagcagatccgcatcctgacagatgccaggagaagtgaggactatgagctggcctctgtggagacagaggacagcgcctctgaaaatacagccttcctgcccctgagccccacagccaagtctgagcgggaggcccagtttgtgctgagaaatgagatccagagggacagcgccctgaccaagtag

SEQ ID NO: 161487 - DNA, 1041 bp, synthetic construct; identical to SEQ ID NO: 161486
  misc_feature 1..1041: note = Description of Artificial Sequence: Synthetic coding sequence
  source 1..1041: mol_type = other DNA

SEQ ID NO: 161488 - DNA, 171 bp, synthetic construct
  misc_feature 1..171: note = Description of Artificial Sequence: Synthetic coding sequence
  source 1..171: mol_type = other DNA
atgcccacagaccacgaggagccctgtggccccagccacaagagcttctgcctgaatggaggcctgtgctacgtgatccccaccatccccagccccttctgcagcctgcatgaaaatgaaaatgacaacaatgaagacctgtatgatgacctgctgcccctgaatgaatag

SEQ ID NO: 161489 - DNA, 348 bp, synthetic construct
  misc_feature 1..348: note = Description of Artificial Sequence: Synthetic coding sequence
  source 1..348: mol_type = other DNA
atgcccacagaccacgaggagccctgtggccccagccacaagagcttctgcctgaatggaggcctgtgctacgtgatccccaccatccccagccccttctgccgctgtgtggagaactacacaggagcccgctgtgaggaggtgttcctgcccggcagcagcatccagaccaagagcaacctgtttgaggcctttgtggccctggccgtgctggtgaccctcatcatcggggccttctacttcctgtgcaggaagggccacttccagagggccagctctgtgcagtatgacatcaacctggtggagaccagcagcaccagcgcccaccacagccatgagcagcactag

SEQ ID NO: 161490 - DNA, 273 bp, synthetic construct
  misc_feature 1..273: note = Description of Artificial Sequence: Synthetic coding sequence
  source 1..273: mol_type = other DNA
atgcccacagaccacgaggagccctgtggccccagccacaagagcttctgcctgaatggaggcctgtgctacgtgatccccaccatccccagccccttctgccgctgtgtggagaactacacaggagcccgctgtgaggaggtgttcctgcccggcagcagcatccagaccaagagcaacctgtttgaggcctttgtggccctggccgtgctggtgaccctcatcatcggggccttctacttcctgtgccgctgtggcaacacctgcatgtag

SEQ ID NO: 161491 - DNA, 615 bp, synthetic construct
  misc_feature 1..615: note = Description of Artificial Sequence: Synthetic coding sequence
  source 1..615: mol_type = other DNA
atgatgcccagctgcaacagaagctgcagctgcagccggggccccagcgtggaggatggcaagtggtatggagtgcgcagctacctgcacctgttctatgaggactgtgccggcacagccctgagtgatgatcctgagggcccccctgtgctgtgcccccggcggccctggcccagcctgtgctggaagatcagcctgagcagcggcaccctgctgctgctgctgggcgtggccgccctgaccaccggctatgctgtgccccccaagctggagggcattggagagggggagttcctggtgctggaccagagagctgctgactacaaccaggccctgggcacctgccgcctggccggcacagccctgtgtgtggccgccggcgtgctgctggccatctgcctcttctgggccatgattggctggctgagccaggacaccaaggccgagcccctggaccctgaggccgacagccacgtggaggtgtttggagatgagcctgagcagcagctgagccccatcttcagaaatgccagcggccagagctggttcagccccccagccagccccttcggccagagctctgtgcagaccatccagcccaagagggacagctag

SEQ ID NO: 161492 - DNA, 615 bp, synthetic construct; identical to SEQ ID NO: 161491
  misc_feature 1..615: note = Description of Artificial Sequence: Synthetic coding sequence
  source 1..615: mol_type = other DNA

SEQ ID NO: 161493 - DNA, 1329 bp, synthetic construct
  misc_feature 1..1329: note = Description of Artificial Sequence: Synthetic coding sequence
  source 1..1329: mol_type = other DNA
atgtaccagaggatgctgcgctgtggggctgagctgggcagccctgggggcggcggcggcggcggcggcggcggcggggccggcggccgcctggccctgctgtggatcgtgcccctgaccctgagcggcctgctgggcgtggcctggggcgccagcagcctgggcgcccaccacatccaccacttccacggcagcagcaagcaccacagcgtgcccatcgccatctaccgcagccctgccagcctgcggggcggccatgctggcaccacctacatcttcagcaaaggaggcggccagatcacctacaagtggcccccaaatgaccggcccagcaccagggctgaccggctggccatcggcttcagcacagtgcagaaggaggccgtgctggtgcgggtggacagcagcagcggcctgggggactacctggagctgcacatccaccagggcaagattggagtgaagttcaacgtgggcacagatgacatcgccatcgaggagagcaatgccatcatcaatgatggcaagtaccacgtggtgcgcttcaccaggtctggaggaaatgccaccctgcaggtggacagctggcctgtgattgagcgctacccagctggccggcagctgaccatcttcaacagccaggccaccatcatcattggaggcaaggagcagggccagcccttccagggccagctgagcggcctgtactacaacggcctgaaggtgctgaacatggctgctgaaaatgatgccaacatcgccatcgtgggcaatgtgcggctggtgggggaggtgcccagctccatgaccacagagagcacagccacagccatgcagagcgagatgagcaccagcatcatggagaccaccaccaccctggccaccagcacagcccggcggggcaagccacccaccaaggagcccatcagccagaccacagatgacatcctggtggccagcgctgagtgccccagtgatgatgaggacatcgacccctgtgagcccagcagcggcggcctggccaaccccacccgggccggcggccgggagccctacccaggcagcgctgaggtgatccgggagagcagcagcaccaccggcatggtggtgggcatcgtggccgccgccgccctgtgcatcctgatcctgctgtatgccatgtacaagtacagaaacagagatgagggcagctaccacgtggatgagagcaggaactacatcagcaacagcgcccagagcaatggagctgtggtgaaggagaagcagcccagcagcgccaagagcagcaacaagaacaagaagaacaaggacaaggagtactacgtgtag

SEQ ID NO: 161494 - DNA, 4524 bp, synthetic construct
  misc_feature 1..4524: note = Description of Artificial Sequence: Synthetic coding sequence
  source 1..4524: mol_type = other DNA
atgggcacagccctgctgcagagaggaggctgcttcctgctgtgcctgagcctgctgctgctgggctgctgggccgagctgggcagcggcctggagttccctggagctgagggccagtggacccgcttccccaagtggaatgcctgctgtgagagcgagatgtccttccagctgaagaccaggtctgcccggggcctggtgctgtactttgatgatgagggcttctgtgacttcctggagctgatcctgacccggggcggccgcctgcagctgtccttcagcatcttctgtgccgagcccgccaccctgctggccgacacccctgtgaatgatggagcctggcacagcgtgcgcatccggcggcagttcaggaacaccaccctcttcatcgaccaggtggaggccaagtgggtggaggtgaagagcaagaggcgggacatgaccgtcttcagcggcctgtttgtgggcggcctgcccccagagctgcgggctgctgccctgaagctgaccctggcctctgtgcgggagcgggagcccttcaagggctggatcagagatgtgcgggtgaacagcagccaggtgctgcctgtggacagcggggaggtgaagctggatgatgagccccccaacagcggcggcggcagcccctgtgaggccggggaggagggggagggcggcgtgtgcctgaatggaggagtgtgcagcgtggtggatgaccaggccgtgtgtgactgcagcaggacaggcttccggggcaaggactgcagccaggaggacaacaacgtggagggcctggcccacctgatgatgggagaccagggcaagagcaagggcaaggaggagtacatcgccaccttcaagggcagcgagtacttctgctatgacctgagccagaaccccatccagagcagcagtgatgagatcaccctgtccttcaagaccctgcagagaaatggcctgatgctgcacacaggcaagtctgctgactatgtgaacctggccctgaagaatggagctgtgtccctggtgatcaacctgggcagcggggcctttgaggccctggtggagcctgtgaatggcaagttcaatgacaatgcctggcatgatgtgaaggtgaccaggaacctgcggcagcacagcggcatcggccacgccatggtgaccatctctgtggatggcatcctgaccaccaccggctacacccaggaggactacaccatgctgggcagtgatgacttcttctacgtgggcggcagccccagcacagctgacctgcccggcagccctgtgagcaacaacttcatgggctgcctgaaggaggtggtgtacaagaacaatgatgtgcggctggagctgagccggctggccaagcagggcgaccccaagatgaagatccacggcgtggtggccttcaagtgtgaaaatgtggccaccctggaccccatcacctttgagaccccagagagcttcatcagcctgcccaagtggaatgccaagaagacaggcagcatcagctttgacttccgcaccacagagcccaacggcctcatcctcttcagccacggcaagcccaggcaccagaaggatgccaagcacccccagatgatcaaggtggacttctttgccatcgagatgctggatggccacctgtacctgctgctggacatgggcagcggcaccatcaagatcaaggccctgctgaagaaggtgaatgatggagagtggtaccacgtggacttccagagagatggccgcagcggcaccatctctgtgaacaccctgcggaccccctacacagcccctggagagagcgagatcctggacctggatgatgagctgtacctgggcggcctgcctgagaacaaggccggcctggtgttccccacagaggtgtggacagccctgctgaactacggctacgtgggctgcatccgggacctcttcattgatggccagagcaaggacatccggcagatggccgaggtgcagagcacagctggggtgaagcccagctgcagcaaggagacagccaagccctgcctgagcaacccctgcaagaacaacggcatgtgcagagatggctggaaccgctacgtgtgtgactgcagcggcaccggctacctgggccgcagctgtgagcgggaggccaccgtgctgtcctatgatggctccatgttcatgaagatccagctgcctgtggtgatgcacacagaagcagaagatgtgtccctgcgcttccgcagccagagggcctacggcatcctgatggccaccaccagccgggacagcgctgacaccctgcggctggagctggatgctggccgggtgaagctgactgtgaacctggactgcatccgcatcaactgcaacagcagcaaaggacctgagaccctgtttgctggctacaacctgaatgacaatgagtggcacacagtgcgggtggtgcggcggggcaagagcctgaagctgactgtggatgaccagcaggccatgacaggccagatggccggggaccacacccggctggagttccacaacattgaaacaggcatcatcacagaaagacgctacctgagctctgtgcccagcaacttcatcggccacctgcagagcctgaccttcaacggcatggcctacatcgacctgtgcaagaatggagacatcgactactgtgagctgaatgccaggtttggcttcaggaacatcatcgctgaccctgtgaccttcaagaccaagagcagctatgtggccctggccaccctgcaggcctacacctccatgcacctgttcttccagttcaagaccaccagcctggatggcctcatcctgtacaacagcggagatggaaatgacttcatcgtggtggagctggtgaagggctacctgcactacgtgtttgacctgggcaatggagccaacctgatcaagggcagcagcaacaagcccctgaatgacaaccagtggcacaacgtgatgatcagccgggacaccagcaacctgcacacagtgaagattgacaccaagatcaccacccagatcacagctggggccaggaacctggacctgaagagtgacctgtacatcggcggcgtggccaaggagacctacaagagcctgcccaagctggtgcacgccaaggagggcttccagggctgcctggcctctgtggacctgaatggccgcctgcctgacctgatcagtgatgccctcttctgcaatggccagatcgagcggggctgtgagggccccagcaccacctgccaggaggacagctgcagcaaccagggcgtgtgcctgcagcagtgggatggcttcagctgtgactgcagcatgaccagcttcagcggccccctgtgcaatgaccccggcaccacctacatcttcagcaagggcggcggccagatcacctacaagtggcccccaaatgaccggcccagcaccagggctgaccggctggccatcggcttcagcacagtgcagaaggaggccgtgctggtgcgggtggacagcagcagcggcctgggggactacctggagctgcacatccaccagggcaagattggagtgaagttcaacgtgggcacagatgacatcgccatcgaggagagcaatgccatcatcaatgatggcaagtaccacgtggtgcgcttcaccaggtctggaggaaatgccaccctgcaggtggacagctggcctgtgattgaaagatacccagctggcaacaatgacaatgaaaggctggccatcgcccggcagaggatcccctaccgcctgggccgggtggtggatgagtggctgctggacaagggccggcagctgaccatcttcaacagccaggccaccatcatcatcggcggcaaggagcagggccagcccttccagggccagctgagcggcctgtactacaacggcctgaaggtgctgaacatggccgcagaaaatgatgccaacatcgccatcgtgggcaatgtgcggctggtgggggaggtgcccagctccatgaccacagagagcacagccacagccatgcagagcgagatgagcaccagcatcatggagaccaccaccaccctggccaccagcacagcccggcggggcaagccacccaccaaggagcccatcagccagaccacagatgacatcctggtggccagcgcagaatgtcccagtgatgatgaagatattgacccctgtgagcccagcagcggcggcctggccaaccccaccagggctgggggccgggagccctacccaggcagcgctgaggtgatccgggagagcagcagcaccaccggcatggtggtgggcatcgtggccgctgctgccctgtgcatcctgatcctgctgtatgccatgtacaagtacagaaacagagatgagggcagctaccacgtggatgagagcaggaactacatcagcaacagcgcccagagcaatggagctgtggtgaaggagaagcagcccagcagcgccaagagcagcaacaagaacaagaagaacaaggacaaggagtactacgtgtag

SEQ ID NO: 161495 - DNA, 1488 bp, synthetic construct
  misc_feature 1..1488: note = Description of Artificial Sequence: Synthetic coding sequence
  source 1..1488: mol_type = other DNA
atgatcagccgggacaccagcaacctgcacacagtgaagattgacaccaagatcaccacccagatcacagctggggccaggaacctggacctgaagagtgacctgtacatcggcggcgtggccaaggagacctacaagagcctgcccaagctggtgcacgccaaggagggcttccagggctgcctggcctctgtggacctgaatggccgcctgcctgacctgatcagtgatgccctcttctgcaatggccagatcgagcggggctgtgaggtggccctgatgaaggctgacctgcagggccccagcaccacctgccaggaggacagctgcagcaaccagggcgtgtgcctgcagcagtgggatggcttcagctgtgactgcagcatgaccagcttcagcggccccctgtgcaatgaccccggcaccacctacatcttcagcaagggcggcggccagatcacctacaagtggcccccaaatgaccggcccagcaccagggctgaccggctggccatcggcttcagcacagtgcagaaggaggccgtgctggtgcgggtggacagcagcagcggcctgggggactacctggagctgcacatccaccagggcaagattggagtgaagttcaacgtgggcacagatgacatcgccatcgaggagagcaatgccatcatcaatgatggcaagtaccacgtggtgcgcttcaccaggtctggaggaaatgccaccctgcaggtggacagctggcctgtgattgaaagatacccagctggccggcagctgaccatcttcaacagccaggccaccatcatcatcggcggcaaggagcagggccagcccttccagggccagctgagcggcctgtactacaacggcctgaaggtgctgaacatggccgcagaaaatgatgccaacatcgccatcgtgggcaatgtgcggctggtgggggaggtgcccagctccatgaccacagagagcacagccacagccatgcagagcgagatgagcaccagcatcatggagaccaccaccaccctggccaccagcacagcccggcggggcaagccacccaccaaggagcccatcagccagaccacagatgacatcctggtggccagcgcagaatgtcccagtgatgatgaagatattgacccctgtgagcccagcagcggcggcctggccaaccccaccagggctgggggccgggagccctacccaggcagcgctgaggtgatccgggagagcagcagcaccaccggcatggtggtgggcatcgtggccgctgctgccctgtgcatcctgatcctgctgtatgccatgtacaagtacagaaacagagatgagggcagctaccacgtggatgagagcaggaactacatcagcaacagcgcccagagcaatggagctgtggtgaaggagaagcagcccagcagcgccaagagcagcaacaagaacaagaagaacaaggacaaggagtactacgtgtag

SEQ ID NO: 161496 - DNA, 4500 bp, synthetic construct
  misc_feature 1..4500: note = Description of Artificial Sequence: Synthetic coding sequence
  source 1..4500: mol_type = other DNA
atgggcacagccctgctgcagagaggaggctgcttcctgctgtgcctgagcctgctgctgctgggctgctgggccgagctgggcagcggcctggagttccctggagctgagggccagtggacccgcttccccaagtggaatgcctgctgtgagagcgagatgtccttccagctgaagaccaggtctgcccggggcctggtgctgtactttgatgatgagggcttctgtgacttcctggagctgatcctgacccggggcggccgcctgcagctgtccttcagcatcttctgtgccgagcccgccaccctgctggccgacacccctgtgaatgatggagcctggcacagcgtgcgcatccggcggcagttcaggaacaccaccctcttcatcgaccaggtggaggccaagtgggtggaggtgaagagcaagaggcgggacatgaccgtcttcagcggcctgtttgtgggcggcctgcccccagagctgcgggctgctgccctgaagctgaccctggcctctgtgcgggagcgggagcccttcaagggctggatcagagatgtgcgggtgaacagcagccaggtgctgcctgtggacagcggggaggtgaagctggatgatgagccccccaacagcggcggcggcagcccctgtgaggccggggaggagggggagggcggcgtgtgcctgaatggaggagtgtgcagcgtggtggatgaccaggccgtgtgtgactgcagcaggacaggcttccggggcaaggactgcagccaggccgacaccaacctggagggcctggcccacctgatgatgggagaccaggccaagagcaagaggaaggaggagtacatcgccaccttcaagggcagcgagtacttctgctatgacctgagccagaaccccatccagagcagcagtgatgagatcaccctgtccttcaagaccctgcagagaaatggcctgatgctgcacacaggcaagtctgctgactatgtgaacctggccctgaagaatggagctgtgtccctggtgatcaacctgggcagcggggcctttgaggccctggtggagcctgtgaatggcaagttcaatgacaatgcctggcatgatgtgaaggtgaccaggaacctgcggcaggtgaccatctctgtggatggcatcctgaccaccaccggctacacccaggaggactacaccatgctgggcagtgatgacttcttctacgtgggcggcagccccagcacagctgacctgcccggcagccctgtgagcaacaacttcatgggctgcctgaaggaggtggtgtacaagaacaatgatgtgcggctggagctgagccggctggccaagcagggcgaccccaagatgaagatccacggcgtggtggccttcaagtgtgaaaatgtggccaccctggaccccatcacctttgagaccccagagagcttcatcagcctgcccaagtggaatgccaagaagacaggcagcatcagctttgacttccgcaccacagagcccaacggcctcatcctcttcagccacggcaagcccaggcaccagaaggatgccaagcacccccagatgatcaaggtggacttctttgccatcgagatgctggatggccacctgtacctgctgctggacatgggcagcggcaccatcaagatcaaggccctgctgaagaaggtgaatgatggagagtggtaccacgtggacttccagagagatggccgcagcggcaccatctctgtgaacaccctgcggaccccctacacagcccctggagagagcgagatcctggacctggatgatgagctgtacctgggcggcctgcctgagaacaaggccggcctggtgttccccacagaggtgtggacagccctgctgaactacggctacgtgggctgcatccgggacctcttcattgatggccagagcaaggacatccggcagatggccgaggtgcagagcacagctggggtgaagcccagctgcagcaaggagacagccaagccctgcctgagcaacccctgcaagaacaacggcatgtgcagagatggctggaaccgctacgtgtgtgactgcagcggcaccggctacctgggccgcagctgtgagcgggaggccaccgtgctgtcctatgatggctccatgttcatgaagatccagctgcctgtggtgatgcacacagaagcagaagatgtgtccctgcgcttccgcagccagagggcctacggcatcctgatggccaccaccagccgggacagcgctgacaccctgcggctggagctggatgctggccgggtgaagctgactgtgaacctggactgcatccgcatcaactgcaacagcagcaaaggacctgagaccctgtttgctggctacaacctgaatgacaatgagtggcacacagtgcgggtggtgcggcggggcaagagcctgaagctgactgtggatgaccagcaggccatgacaggccagatggccggggaccacacccggctggagttccacaacattgaaacaggcatcatcacagaaagacgctacctgagctctgtgcccagcaacttcatcggccacctgcagagcctgaccttcaacggcatggcctacatcgacctgtgcaagaatggagacatcgactactgtgagctgaatgccaggtttggcttcaggaacatcatcgctgaccctgtgaccttcaagaccaagagcagctatgtggccctggccaccctgcaggcctacacctccatgcacctgttcttccagttcaagaccaccagcctggatggcctcatcctgtacaacagcggagatggaaatgacttcatcgtggtggagctggtgaagggctacctgcactacgtgtttgacctgggcaatggagccaacctgatcaagggcagcagcaacaagcccctgaatgacaaccagtggcacaacgtgatgatcagccgggacaccagcaacctgcacacagtgaagattgacaccaagatcaccacccagatcacagctggggccaggaacctggacctgaagagtgacctgtacatcggcggcgtggccaaggagacctacaagagcctgcccaagctggtgcacgccaaggagggcttccagggctgcctggcctctgtggacctgaatggccgcctgcctgacctgatcagtgatgccctcttctgcaatggccagatcgagcggggctgtgagggccccagcaccacctgccaggaggacagctgcagcaaccagggcgtgtgcctgcagcagtgggatggcttcagctgtgactgcagcatgaccagcttcagcggccccctgtgcaatgaccccggcaccacctacatcttcagcaagggcggcggccagatcacctacaagtggcccccaaatgaccggcccagcaccagggctgaccggctggccatcggcttcagcacagtgcagaaggaggccgtgctggtgcgggtggacagcagcagcggcctgggggactacctggagctgcacatccaccagggcaagattggagtgaagttcaacgtgggcacagatgacatcgccatcgaggagagcaatgccatcatcaatgatggcaagtaccacgtggtgcgcttcaccaggtctggaggaaatgccaccctgcaggtggacagctggcctgtgattgaaagatacccagctggcaacaatgacaatgaaaggctggccatcgcccggcagaggatcccctaccgcctgggccgggtggtggatgagtggctgctggacaagggccggcagctgaccatcttcaacagccaggccaccatcatcatcggcggcaaggagcagggccagcccttccagggccagctgagcggcctgtactacaacggcctgaaggtgctgaacatggccgcagaaaatgatgccaacatcgccatcgtgggcaatgtgcggctggtgggggaggtgcccagctccatgaccacagagagcacagccacagccatgcagagcgagatgagcaccagcatcatggagaccaccaccaccctggccaccagcacagcccggcggggcaagccacccaccaaggagcccatcagccagaccacagatgacatcctggtggccagcgcagaatgtcccagtgatgatgaagatattgacccctgtgagcccagcagcggcggcctggccaaccccaccagggctgggggccgggagccctacccaggcagcgctgaggtgatccgggagagcagcagcaccaccggcatggtggtgggcatcgtggccgctgctgccctgtgcatcctgatcctgctgtatgccatgtacaagtacagaaacagagatgagggcagctaccacgtggatgagagcaggaactacatcagcaacagcgcccagagcaatggagctgtggtgaaggagaagcagcccagcagcgccaagagcagcaacaagaacaagaagaacaaggacaaggagtactacgtgtag

SEQ ID NO: 161497 - DNA, 4644 bp, synthetic construct
  misc_feature 1..4644: note = Description of Artificial Sequence: Synthetic coding sequence
  source 1..4644: mol_type = other DNA
atgggcacagccctgctgcagagaggaggctgcttcctgctgtgcctgagcctgctgctgctgggctgctgggccgagctgggcagcggcctggagttccctggagctgagggccagtggacccgcttccccaagtggaatgcctgctgtgagagcgagatgtccttccagctgaagaccaggtctgcccggggcctggtgctgtactttgatgatgagggcttctgtgacttcctggagctgatcctgacccggggcggccgcctgcagctgtccttcagcatcttctgtgccgagcccgccaccctgctggccgacacccctgtgaatgatggagcctggcacagcgtgcgcatccggcggcagttcaggaacaccaccctcttcatcgaccaggtggaggccaagtgggtggaggtgaagagcaagaggcgggacatgaccgtcttcagcggcctgtttgtgggcggcctgcccccagagctgcgggctgctgccctgaagctgaccctggcctctgtgcgggagcgggagcccttcaagggctggatcagagatgtgcgggtgaacagcagccaggtgctgcctgtggacagcggggaggtgaagctggatgatgagccccccaacagcggcggcggcagcccctgtgaggccggggaggagggggagggcggcgtgtgcctgaatggaggagtgtgcagcgtggtggatgaccaggccgtgtgtgactgcagcaggacaggcttccggggcaaggactgcagccaggagatcaagtttggcctgcagtgtgtgctgcctgtgctgctgcatgacaatgaccagggcaagtactgctgcatcaacacagccaagcccctgacagagaaggacaacaacgtggagggcctggcccacctgatgatgggagaccagggcaagagcaagggcaaggaggagtacatcgccaccttcaagggcagcgagtacttctgctatgacctgagccagaaccccatccagagcagcagtgatgagatcaccctgtccttcaagaccctgcagagaaatggcctgatgctgcacacaggcaagtctgctgactatgtgaacctggccctgaagaatggagctgtgtccctggtgatcaacctgggcagcggggcctttgaggccctggtggagcctgtgaatggcaagttcaatgacaatgcctggcatgatgtgaaggtgaccaggaacctgcggcagcacagcggcattggacatgccatggtgaacaagctgcactgcagcgtgaccatctctgtggatggcatcctgaccaccaccggctacacccaggaggactacaccatgctgggcagtgatgacttcttctacgtgggcggcagccccagcacagctgacctgcccggcagccctgtgagcaacaacttcatgggctgcctgaaggaggtggtgtacaagaacaatgatgtgcggctggagctgagccggctggccaagcagggcgaccccaagatgaagatccacggcgtggtggccttcaagtgtgaaaatgtggccaccctggaccccatcacctttgagaccccagagagcttcatcagcctgcccaagtggaatgccaagaagacaggcagcatcagctttgacttccgcaccacagagcccaacggcctcatcctcttcagccacggcaagcccaggcaccagaaggatgccaagcacccccagatgatcaaggtggacttctttgccatcgagatgctggatggccacctgtacctgctgctggacatgggcagcggcaccatcaagatcaaggccctgctgaagaaggtgaatgatggagagtggtaccacgtggacttccagagagatggccgcagcggcaccatctctgtgaacaccctgcggaccccctacacagcccctggagagagcgagatcctggacctggatgatgagctgtacctgggcggcctgcctgagaacaaggccggcctggtgttccccacagaggtgtggacagccctgctgaactacggctacgtgggctgcatccgggacctcttcattgatggccagagcaaggacatccggcagatggccgaggtgcagagcacagctggggtgaagcccagctgcagcaaggagacagccaagccctgcctgagcaacccctgcaagaacaacggcatgtgcagagatggctggaaccgctacgtgtgtgactgcagcggcaccggctacctgggccgcagctgtgagcgggaggccaccgtgctgtcctatgatggctccatgttcatgaagatccagctgcctgtggtgatgcacacagaagcagaagatgtgtccctgcgcttccgcagccagagggcctacggcatcctgatggccaccaccagccgggacagcgctgacaccctgcggctggagctggatgctggccgggtgaagctgactgtgaacctggactgcatccgcatcaactgcaacagcagcaaaggacctgagaccctgtttgctggctacaacctgaatgacaatgagtggcacacagtgcgggtggtgcggcggggcaagagcctgaagctgactgtggatgaccagcaggccatgacaggccagatggccggggaccacacccggctggagttccacaacattgaaacaggcatcatcacagaaagacgctacctgagctctgtgcccagcaacttcatcggccacctgcagagcctgaccttcaacggcatggcctacatcgacctgtgcaagaatggagacatcgactactgtgagctgaatgccaggtttggcttcaggaacatcatcgctgaccctgtgaccttcaagaccaagagcagctatgtggccctggccaccctgcaggcctacacctccatgcacctgttcttccagttcaagaccaccagcctggatggcctcatcctgtacaacagcggagatggaaatgacttcatcgtggtggagctggtgaagggctacctgcactacgtgtttgacctgggcaatggagccaacctgatcaagggcagcagcaacaagcccctgaatgacaaccagtggcacaacgtgatgatcagccgggacaccagcaacctgcacacagtgaagattgacaccaagatcaccacccagatcacagctggggccaggaacctggacctgaagagtgacctgtacatcggcggcgtggccaaggagacctacaagagcctgcccaagctggtgcacgccaaggagggcttccagggctgcctggcctctgtggacctgaatggccgcctgcctgacctgatcagtgatgccctcttctgcaatggccagatcgagcggggctgtgagggccccagcaccacctgccaggaggacagctgcagcaaccagggcgtgtgcctgcagcagtgggatggcttcagctgtgactgcagcatgaccagcttcagcggccccctgtgcaatgaccccggcaccacctacatcttcagcaagggcggcggccagatcacctacaagtggcccccaaatgaccggcccagcaccagggctgaccggctggccatcggcttcagcacagtgcagaaggaggccgtgctggtgcgggtggacagcagcagcggcctgggggactacctggagctgcacatccaccagggcaagattggagtgaagttcaacgtgggcacagatgacatcgccatcgaggagagcaatgccatcatcaatgatggcaagtaccacgtggtgcgcttcaccaggtctggaggaaatgccaccctgcaggtggacagctggcctgtgattgaaagatacccagctggcaacaatgacaatgaaaggctggccatcgcccggcagaggatcccctaccgcctgggccgggtggtggatgagtggctgctggacaagggccggcagctgaccatcttcaacagccaggccaccatcatcatcggcggcaaggagcagggccagcccttccagggccagctgagcggcctgtactacaacggcctgaaggtgctgaacatggccgcagaaaatgatgccaacatcgccatcgtgggcaatgtgcggctggtgggggaggtgcccagctccatgaccacagagagcacagccacagccatgcagagcgagatgagcaccagcatcatggagaccaccaccaccctggccaccagcacagcccggcggggcaagccacccaccaaggagcccatcagccagaccacagatgacatcctggtggccagcgcagaatgtcccagtgatgatgaagatattgacccctgtgagcccagcagcggcggcctggccaaccccaccagggctgggggccgggagccctacccaggcagcgctgaggtgatccgggagagcagcagcaccaccggcatggtggtgggcatcgtggccgctgctgccctgtgcatcctgatcctgctgtatgccatgtacaagtacagaaacagagatgagggcagctaccacgtggatgagagcaggaactacatcagcaacagcgcccagagcaatggagctgtggtgaaggagaagcagcccagcagcgccaagagcagcaacaagaacaagaagaacaaggacaaggagtactacgtgtag

SEQ ID NO: 161498 - DNA, 4434 bp, synthetic construct
  misc_feature 1..4434: note = Description of Artificial Sequence: Synthetic coding sequence
  source 1..4434: mol_type = other DNA
atgggcacagccctgctgcagagaggaggctgcttcctgctgtgcctgagcctgctgctgctgggctgctgggccgagctgggcagcggcctggagttccctggagctgagggccagtggacccgcttccccaagtggaatgcctgctgtgagagcgagatgtccttccagctgaagaccaggtctgcccggggcctggtgctgtactttgatgatgagggcttctgtgacttcctggagctgatcctgacccggggcggccgcctgcagctgtccttcagcatcttctgtgccgagcccgccaccctgctggccgacacccctgtgaatgatggagcctggcacagcgtgcgcatccggcggcagttcaggaacaccaccctcttcatcgaccaggtggaggccaagtgggtggaggtgaagagcaagaggcgggacatgaccgtcttcagcggcctgtttgtgggcggcctgcccccagagctgcgggctgctgccctgaagctgaccctggcctctgtgcgggagcgggagcccttcaagggctggatcagagatgtgcgggtgaacagcagccaggtgctgcctgtggacagcggggaggtgaagctggatgatgagccccccaacagcggcggcggcagcccctgtgaggccggggaggagggggagggcggcgtgtgcctgaatggaggagtgtgcagcgtggtggatgaccaggccgtgtgtgactgcagcaggacaggcttccggggcaaggactgcagccaggaggacaacaacgtggagggcctggcccacctgatgatgggagaccagggcaagagcaagggcaaggaggagtacatcgccaccttcaagggcagcgagtacttctgctatgacctgagccagaaccccatccagagcagcagtgatgagatcaccctgtccttcaagaccctgcagagaaatggcctgatgctgcacacaggcaagtctgctgactatgtgaacctggccctgaagaatggagctgtgtccctggtgatcaacctgggcagcggggcctttgaggccctggtggagcctgtgaatggcaagttcaatgacaatgcctggcatgatgtgaaggtgaccaggaacctgcggcagcacagcggcatcggccacgccatggtgaccatctctgtggatggcatcctgaccaccaccggctacacccaggaggactacaccatgctgggcagtgatgacttcttctacgtgggcggcagccccagcacagctgacctgcccggcagccctgtgagcaacaacttcatgggctgcctgaaggaggtggtgtacaagaacaatgatgtgcggctggagctgagccggctggccaagcagggcgaccccaagatgaagatccacggcgtggtggccttcaagtgtgaaaatgtggccaccctggaccccatcacctttgagaccccagagagcttcatcagcctgcccaagtggaatgccaagaagacaggcagcatcagctttgacttccgcaccacagagcccaacggcctcatcctcttcagccacggcaagcccaggcaccagaaggatgccaagcacccccagatgatcaaggtggacttctttgccatcgagatgctggatggccacctgtacctgctgctggacatgggcagcggcaccatcaagatcaaggccctgctgaagaaggtgaatgatggagagtggtaccacgtggacttccagagagatggccgcagcggcaccatctctgtgaacaccctgcggaccccctacacagcccctggagagagcgagatcctggacctggatgatgagctgtacctgggcggcctgcctgagaacaaggccggcctggtgttccccacagaggtgtggacagccctgctgaactacggctacgtgggctgcatccgggacctcttcattgatggccagagcaaggacatccggcagatggccgaggtgcagagcacagctggggtgaagcccagctgcagcaaggagacagccaagccctgcctgagcaacccctgcaagaacaacggcatgtgcagagatggctggaaccgctacgtgtgtgactgcagcggcaccggctacctgggccgcagctgtgagcgggaggccaccgtgctgtcctatgatggctccatgttcatgaagatccagctgcctgtggtgatgcacacagaagcagaagatgtgtccctgcgcttccgcagccagagggcctacggcatcctgatggccaccaccagccgggacagcgctgacaccctgcggctggagctggatgctggccgggtgaagctgactgtgaacctggactgcatccgcatcaactgcaacagcagcaaaggacctgagaccctgtttgctggctacaacctgaatgacaatgagtggcacacagtgcgggtggtgcggcggggcaagagcctgaagctgactgtggatgaccagcaggccatgacaggccagatggccggggaccacacccggctggagttccacaacattgaaacaggcatcatcacagaaagacgctacctgagctctgtgcccagcaacttcatcggccacctgcagagcctgaccttcaacggcatggcctacatcgacctgtgcaagaatggagacatcgactactgtgagctgaatgccaggtttggcttcaggaacatcatcgctgaccctgtgaccttcaagaccaagagcagctatgtggccctggccaccctgcaggcctacacctccatgcacctgttcttccagttcaagaccaccagcctggatggcctcatcctgtacaacagcggagatggaaatgacttcatcgtggtggagctggtgaagggctacctgcactacgtgtttgacctgggcaatggagccaacctgatcaagggcagcagcaacaagcccctgaatgacaaccagtggcacaacgtgatgatcagccgggacaccagcaacctgcacacagtgaagattgacaccaagatcaccacccagatcacagctggggccaggaacctggacctgaagagtgacctgtacatcggcggcgtggccaaggagacctacaagagcctgcccaagctggtgcacgccaaggagggcttccagggctgcctggcctctgtggacctgaatggccgcctgcctgacctgatcagtgatgccctcttctgcaatggccagatcgagcggggctgtgagggccccagcaccacctgccaggaggacagctgcagcaaccagggcgtgtgcctgcagcagtgggatggcttcagctgtgactgcagcatgaccagcttcagcggccccctgtgcaatgaccccggcaccacctacatcttcagcaagggcggcggccagatcacctacaagtggcccccaaatgaccggcccagcaccagggctgaccggctggccatcggcttcagcacagtgcagaaggaggccgtgctggtgcgggtggacagcagcagcggcctgggggactacctggagctgcacatccaccagggcaagattggagtgaagttcaacgtgggcacagatgacatcgccatcgaggagagcaatgccatcatcaatgatggcaagtaccacgtggtgcgcttcaccaggtctggaggaaatgccaccctgcaggtggacagctggcctgtgattgaaagatacccagctggccggcagctgaccatcttcaacagccaggccaccatcatcatcggcggcaaggagcagggccagcccttccagggccagctgagcggcctgtactacaacggcctgaaggtgctgaacatggccgcagaaaatgatgccaacatcgccatcgtgggcaatgtgcggctggtgggggaggtgcccagctccatgaccacagagagcacagccacagccatgcagagcgagatgagcaccagcatcatggagaccaccaccaccctggccaccagcacagcccggcggggcaagccacccaccaaggagcccatcagccagaccacagatgacatcctggtggccagcgcagaatgtcccagtgatgatgaagatattgacccctgtgagcccagcagcggcggcctggccaaccccaccagggctgggggccgggagccctacccaggcagcgctgaggtgatccgggagagcagcagcaccaccggcatggtggtgggcatcgtggccgctgctgccctgtgcatcctgatcctgctgtatgccatgtacaagtacagaaacagagatgagggcagctaccacgtggatgagagcaggaactacatcagcaacagcgcccagagcaatggagctgtggtgaaggagaagcagcccagcagcgccaagagcagcaacaagaacaagaagaacaaggacaaggagtactacgtgtag

SEQ ID NO: 161499 - DNA, 4434 bp, synthetic construct
  misc_feature 1..4434: note = Description of Artificial Sequence: Synthetic coding sequence
  source 1..4434: mol_type = other DNA
atgggcacagccctgctgcagagaggaggctgcttcctgctgtgcctgagcctgctgctgctgggctgctgggccgagctgggcagcggcctggagttccctggagctgagggccagtggacccgcttccccaagtggaatgcctgctgtgagagcgagatgtccttccagctgaagaccaggtctgcccggggcctggtgctgtactttgatgatgagggcttctgtgacttcctggagctgatcctgacccggggcggccgcctgcagctgtccttcagcatcttctgtgccgagcccgccaccctgctggccgacacccctgtgaatgatggagcctggcacagcgtgcgcatccggcggcagttcaggaacaccaccctcttcatcgaccaggtggaggccaagtgggtggaggtgaagagcaagaggcgggacatgaccgtcttcagcggcctgtttgtgggcggcctgcccccagagctgcgggctgctgccctgaagctgaccctggcctctgtgcgggagcgggagcccttcaagggctggatcagagatgtgcgggtgaacagcagccaggtgctgcctgtggacagcggggaggtgaagctggatgatgagccccccaacagcggcggcggcagcccctgtgaggccggggaggagggggagggcggcgtgtgcctgaatggaggagtgtgcagcgtggtggatgaccaggccgtgtgtgactgcagcaggacaggcttccggggcaaggactgcagccaggccgacaccaacctggagggcctggcccacctgatgatgggagaccaggccaagagcaagaggaaggaggagtacatcgccaccttcaagggcagcgagtacttctgctatgacctgagccagaaccccatccagagcagcagtgatgagatcaccctgtccttcaagaccctgcagagaaatggcctgatgctgcacacaggcaagtctgctgactatgtgaacctggccctgaagaatggagctgtgtccctggtgatcaacctgggcagcggggcctttgaggccctggtggagcctgtgaatggcaagttcaatgacaatgcctggcatgatgtgaaggtgaccaggaacctgcggcagcacagcggcatcggccacgccatggtgaccatctctgtggatggcatcctgaccaccaccggctacacccaggaggactacaccatgctgggcagtgatgacttcttctacgtgggcggcagccccagcacagctgacctgcccggcagccctgtgagcaacaacttcatgggctgcctgaaggaggtggtgtacaagaacaatgatgtgcggctggagctgagccggctggccaagcagggcgaccccaagatgaagatccacggcgtggtggccttcaagtgtgaaaatgtggccaccctggaccccatcacctttgagaccccagagagcttcatcagcctgcccaagtggaatgccaagaagacaggcagcatcagctttgacttccgcaccacagagcccaacggcctcatcctcttcagccacggcaagcccaggcaccagaaggatgccaagcacccccagatgatcaaggtggacttctttgccatcgagatgctggatggccacctgtacctgctgctggacatgggcagcggcaccatcaagatcaaggccctgctgaagaaggtgaatgatggagagtggtaccacgtggacttccagagagatggccgcagcggcaccatctctgtgaacaccctgcggaccccctacacagcccctggagagagcgagatcctggacctggatgatgagctgtacctgggcggcctgcctgagaacaaggccggcctggtgttccccacagaggtgtggacagccctgctgaactacggctacgtgggctgcatccgggacctcttcattgatggccagagcaaggacatccggcagatggccgaggtgcagagcacagctggggtgaagcccagctgcagcaaggagacagccaagccctgcctgagcaacccctgcaagaacaacggcatgtgcagagatggctggaaccgctacgtgtgtgactgcagcggcaccggctacctgggccgcagctgtgagcgggaggccaccgtgctgtcctatgatggctccatgttcatgaagatccagctgcctgtggtgatgcacacagaagcagaagatgtgtccctgcgcttccgcagccagagggcctacggcatcctgatggccaccaccagccgggacagcgctgacaccctgcggctggagctggatgctggccgggtgaagctgactgtgaacctggactgcatccgcatcaactgcaacagcagcaaaggacctgagaccctgtttgctggctacaacctgaatgacaatgagtggcacacagtgcgggtggtgcggcggggcaagagcctgaagctgactgtggatgaccagcaggccatgacaggccagatggccggggaccacacccggctggagttccacaacattgaaacaggcatcatcacagaaagacgctacctgagctctgtgcccagcaacttcatcggccacctgcagagcctgaccttcaacggcatggcctacatcgacctgtgcaagaatggagacatcgactactgtgagctgaatgccaggtttggcttcaggaacatcatcgctgaccctgtgaccttcaagaccaagagcagctatgtggccctggccaccctgcaggcctacacctccatgcacctgttcttccagttcaagaccaccagcctggatggcctcatcctgtacaacagcggagatggaaatgacttcatcgtggtggagctggtgaagggctacctgcactacgtgtttgacctgggcaatggagccaacctgatcaagggcagcagcaacaagcccctgaatgacaaccagtggcacaacgtgatgatcagccgggacaccagcaacctgcacacagtgaagattgacaccaagatcaccacccagatcacagctggggccaggaacctggacctgaagagtgacctgtacatcggcggcgtggccaaggagacctacaagagcctgcccaagctggtgcacgccaaggagggcttccagggctgcctggcctctgtggacctgaatggccgcctgcctgacctgatcagtgatgccctcttctgcaatggccagatcgagcggggctgtgagggccccagcaccacctgccaggaggacagctgcagcaaccagggcgtgtgcctgcagcagtgggatggcttcagctgtgactgcagcatgaccagcttcagcggccccctgtgcaatgaccccggcaccacctacatcttcagcaagggcggcggccagatcacctacaagtggcccccaaatgaccggcccagcaccagggctgaccggctggccatcggcttcagcacagtgcagaaggaggccgtgctggtgcgggtggacagcagcagcggcctgggggactacctggagctgcacatccaccagggcaagattggagtgaagttcaacgtgggcacagatgacatcgccatcgaggagagcaatgccatcatcaatgatggcaagtaccacgtggtgcgcttcaccaggtctggaggaaatgccaccctgcaggtggacagctggcctgtgattgaaagatacccagctggccggcagctgaccatcttcaacagccaggccaccatcatcatcggcggcaaggagcagggccagcccttccagggccagctgagcggcctgtactacaacggcctgaaggtgctgaacatggccgcagaaaatgatgccaacatcgccatcgtgggcaatgtgcggctggtgggggaggtgcccagctccatgaccacagagagcacagccacagccatgcagagcgagatgagcaccagcatcatggagaccaccaccaccctggccaccagcacagcccggcggggcaagccacccaccaaggagcccatcagccagaccacagatgacatcctggtggccagcgcagaatgtcccagtgatgatgaagatattgacccctgtgagcccagcagcggcggcctggccaaccccaccagggctgggggccgggagccctacccaggcagcgctgaggtgatccgggagagcagcagcaccaccggcatggtggtgggcatcgtggccgctgctgccctgtgcatcctgatcctgctgtatgccatgtacaagtacagaaacagagatgagggcagctaccacgtggatgagagcaggaactacatcagcaacagcgcccagagcaatggagctgtggtgaaggagaagcagcccagcagcgccaagagcagcaacaagaacaagaagaacaaggacaaggagtactacgtgtag

SEQ ID NO: 161500 - DNA, 4647 bp, synthetic construct
  misc_feature 1..4647: note = Description of Artificial Sequence: Synthetic coding sequence
  source 1..4647: mol_type = other DNA
atgggcacagccctgctgcagagaggaggctgcttcctgctgtgcctgagcctgctgctgctgggctgctgggccgagctgggcagcggcctggagttccctggagctgagggccagtggacccgcttccccaagtggaatgcctgctgtgagagcgagatgtccttccagctgaagaccaggtctgcccggggcctggtgctgtactttgatgatgagggcttctgtgacttcctggagctgatcctgacccggggcggccgcctgcagctgtccttcagcatcttctgtgccgagcccgccaccctgctggccgacacccctgtgaatgatggagcctggcacagcgtgcgcatccggcggcagttcaggaacaccaccctcttcatcgaccaggtggaggccaagtgggtggaggtgaagagcaagaggcgggacatgaccgtcttcagcggcctgtttgtgggcggcctgcccccagagctgcgggctgctgccctgaagctgaccctggcctctgtgcgggagcgggagcccttcaagggctggatcagagatgtgcgggtgaacagcagccaggtgctgcctgtggacagcggggaggtgaagctggatgatgagccccccaacagcggcggcggcagcccctgtgaggccggggaggagggggagggcggcgtgtgcctgaatggaggagtgtgcagcgtggtggatgaccaggccgtgtgtgactgcagcaggacaggcttccggggcaaggactgcagccaggagatcaagtttggcctgcagtgtgtgctgcctgtgctgctgcatgacaatgaccagggcaagtactgctgcatcaacacagccaagcccctgacagagaagaaggacaatgactttgagggcctggcccacctgatgatgggagaccaggccaagagcaagaggaaggaggagtacatcgccaccttcaagggcagcgagtacttctgctatgacctgagccagaaccccatccagagcagcagtgatgagatcaccctgtccttcaagaccctgcagagaaatggcctgatgctgcacacaggcaagtctgctgactatgtgaacctggccctgaagaatggagctgtgtccctggtgatcaacctgggcagcggggcctttgaggccctggtggagcctgtgaatggcaagttcaatgacaatgcctggcatgatgtgaaggtgaccaggaacctgcggcagcacagcggcatcggccacgccatggtgaacaagctgcactgcagcgtgaccatctctgtggatggcatcctgaccaccaccggctacacccaggaggactacaccatgctgggcagtgatgacttcttctacgtgggcggcagccccagcacagctgacctgcccggcagccctgtgagcaacaacttcatgggctgcctgaaggaggtggtgtacaagaacaatgatgtgcggctggagctgagccggctggccaagcagggcgaccccaagatgaagatccatggagtggtggccttcaagtgtgaaaatgtggccaccctggaccccatcacctttgagaccccagagagcttcatcagcctgcccaagtggaatgccaagaagacaggcagcatcagctttgacttccgcaccacagagcccaacggcctcatcctcttcagccacggcaagcccaggcaccagaaggatgccaagcacccccagatgatcaaggtggacttctttgccatcgagatgctggatggccacctgtacctgctgctggacatgggcagcggcaccatcaagatcaaggccctgctgaagaaggtgaatgatggagagtggtaccacgtggacttccagagagatggccgcagcggcaccatctctgtgaacaccctgcggaccccctacacagcccctggagagagcgagatcctggacctggatgatgagctgtacctgggcggcctgcctgagaacaaggccggcctggtgttccccacagaggtgtggacagccctgctgaactacggctacgtgggctgcatccgggacctcttcattgatggccagagcaaggacatccggcagatggccgaggtgcagagcacagctggggtgaagcccagctgcagcaaggagacagccaagccctgcctgagcaacccctgcaagaacaacggcatgtgcagagatggctggaacagatatgtgtgtgactgcagcggcaccggctacctgggccgcagctgtgagcgggaggccaccgtgctgtcctatgatggctccatgttcatgaagatccagctgcctgtggtgatgcacacagaagcagaagatgtgtccctgcgcttccgcagccagagggcctacggcatcctgatggccaccaccagccgggacagcgctgacaccctgcggctggagctggatgctggccgggtgaagctgactgtgaacctggactgcatccgcatcaactgcaacagcagcaagggccctgagaccctgtttgctggctacaacctgaatgacaatgagtggcacacagtgcgggtggtgagaagaggcaagagcctgaagctgactgtggatgaccagcaggccatgacaggccagatggccggggaccacacccggctggagttccacaacatcgagaccggcatcatcacagagcggcgctacctgagctctgtgcccagcaacttcatcggccacctgcagagcctgaccttcaacggcatggcctacatcgacctgtgcaagaatggagacatcgactactgtgagctgaatgcccgcttcggcttcaggaacatcatcgctgaccctgtgaccttcaagaccaagagcagctatgtggccctggccaccctgcaggcctacacctccatgcacctgttcttccagttcaagaccaccagcctggatggcctcatcctgtacaacagcggagatggaaatgacttcatcgtggtggagctggtgaagggctacctgcactacgtgtttgacctgggcaatggagccaacctgatcaagggcagcagcaacaagcccctgaatgacaaccagtggcacaacgtgatgatcagccgggacaccagcaacctgcacacagtgaagattgacaccaagatcaccacccagatcacagctggggccaggaacctggacctgaagagtgacctgtacatcggcggcgtggccaaggagacctacaagagcctgcccaagctggtgcacgccaaggagggcttccagggctgcctggcctctgtggacctgaatggccgcctgcctgacctgatcagtgatgccctcttctgcaatggccagatcgagcggggctgtgagggccccagcaccacctgccaggaggacagctgcagcaaccagggcgtgtgcctgcagcagtgggatggcttcagctgtgactgcagcatgaccagcttcagcggccccctgtgcaatgaccccggcaccacctacatcttcagcaaaggaggcggccagatcacctacaagtggcccccaaatgaccggcccagcaccagggctgaccggctggccatcggcttcagcacagtgcagaaggaggccgtgctggtgcgggtggacagcagcagcggcctgggggactacctggagctgcacatccaccagggcaagattggagtgaagttcaacgtgggcacagatgacatcgccatcgaggagagcaatgccatcatcaatgatggcaagtaccacgtggtgcgcttcaccaggtctggaggaaatgccaccctgcaggtggacagctggcctgtgattgagcgctacccagctggcaacaatgacaatgaaaggctggccatcgcccggcagaggatcccctaccgcctgggccgggtggtggatgagtggctgctggacaagggccggcagctgaccatcttcaacagccaggccaccatcatcattggaggcaaggagcagggccagcccttccagggccagctgagcggcctgtactacaacggcctgaaggtgctgaacatggctgctgaaaatgatgccaacatcgccatcgtgggcaatgtgcggctggtgggggaggtgcccagctccatgaccacagagagcacagccacagccatgcagagcgagatgagcaccagcatcatggagaccaccaccaccctggccaccagcacagcccggcggggcaagccacccaccaaggagcccatcagccagaccacagatgacatcctggtggccagcgctgagtgccccagtgatgatgaggacatcgacccctgtgagcccagcagcggcggcctggccaaccccacccgggccggcggccgggagccctacccaggcagcgctgaggtgatccgggagagcagcagcaccaccggcatggtggtgggcatcgtggccgccgccgccctgtgcatcctgatcctgctgtatgccatgtacaagtacagaaacagagatgagggcagctaccacgtggatgagagcaggaactacatcagcaacagcgcccagagcaatggagctgtggtgaaggagaagcagcccagcagcgccaagagcagcaacaagaacaagaagaacaaggacaaggagtactacgtgtag

SEQ ID NO: 161501 - DNA, 1191 bp, synthetic construct
  misc_feature 1..1191: note = Description of Artificial Sequence: Synthetic coding sequence
  source 1..1191: mol_type = other DNA
gccctggagatctgggagcagcccccagccccccggctgctcttccctggcctgcccttccgcaccagccccagccctgctgccttctaccgcagccctgccagcctgcggggcggccatgctggcaccacctacatcttcagcaaaggaggcggccagatcacctacaagtggcccccaaatgaccggcccagcaccagggctgaccggctggccatcggcttcagcacagtgcagaaggaggccgtgctggtgcgggtggacagcagcagcggcctgggggactacctggagctgcacatccaccagggcaagattggagtgaagttcaacgtgggcacagatgacatcgccatcgaggagagcaatgccatcatcaatgatggcaagtaccacgtggtgcgcttcaccaggtctggaggaaatgccaccctgcaggtggacagctggcctgtgattgagcgctacccagctggccggcagctgaccatcttcaacagccaggccaccatcatcattggaggcaaggagcagggccagcccttccagggccagctgagcggcctgtactacaacggcctgaaggtgctgaacatggctgctgaaaatgatgccaacatcgccatcgtgggcaatgtgcggctggtgggggaggtgcccagctccatgaccacagagagcacagccacagccatgcagagcgagatgagcaccagcatcatggagaccaccaccaccctggccaccagcacagcccggcggggcaagccacccaccaaggagcccatcagccagaccacagatgacatcctggtggccagcgctgagtgccccagtgatgatgaggacatcgacccctgtgagcccagcagcggcggcctggccaaccccacccgggccggcggccgggagccctacccaggcagcgctgaggtgatccgggagagcagcagcaccaccggcatggtggtgggcatcgtggccgccgccgccctgtgcatcctgatcctgctgtatgccatgtacaagtacagaaacagagatgagggcagctaccacgtggatgagagcaggaactacatcagcaacagcgcccagagcaatggagctgtggtgaaggagaagcagcccagcagcgccaagagcagcaacaagaacaagaagaacaaggacaaggagtactacgtgtag

SEQ ID NO: 161502 - DNA, 5139 bp, synthetic construct
  misc_feature 1..5139: note = Description of Artificial Sequence: Synthetic coding sequence
  source 1..5139: mol_type = other DNA
atggccagcggcagccgctggaggcccaccccaccacccctgctgctgctgctgctgctggccctggccgcccgggcagatggcctggagtttggaggcggccctggccagtgggcccgctatgcccgctgggccggggccgccagcagcggggagctgtccttcagcctgcggaccaatgccacccgggccctgctgctgtacctggatgatggaggagactgtgacttcctggagctgctgctggtggatggccgcctgcggctgcgcttcaccctgagctgtgccgagcccgccaccctgcagctggacacccctgtggctgatgaccgctggcacatggtgctgctgaccagagatgcccggaggacagccctggccgtggatggagaggcccgggctgctgaggtgcgcagcaagagaagagagatgcaggtggccagtgacctgtttgtgggcggcatccccccagatgtgcggctgagcgccctgaccctgagcacagtgaagtatgagccccccttccggggcctgctggccaacctgaagctgggggagcggcccccagccctgctgggcagccagggcctgcggggggccacagctgaccccctgtgtgccccagccaggaacccctgtgccaatggaggcctgtgcaccgtgctggcccctggagaggtgggctgtgactgcagccacacaggctttggaggcaagttctgcagcgaggaggagcaccccatggagggccctgcccacctgaccctgaacagcgaggtgggcagcctgctcttcagcgagggcggggccggccggggcggcgctggagatgtgcaccagcccaccaagggcaaggaggagtttgtggccaccttcaagggaaatgagttcttctgctatgacctgagccacaaccccatccagagcagcacagatgagatcaccctggccttccgcaccctgcagagaaatggcctgatgctgcacacaggcaagtctgctgactatgtgaacctgagcctgaagtctggagctgtgtggctggtgatcaacctgggcagcggggcctttgaggccctggtggagcctgtgaatggcaagttcaatgacaatgcctggcatgatgtgcgggtgaccaggaacctgcggcagcacgccggcatcggccacgccatggtgaacaagctgcactacctggtgaccatctctgtggatggcatcctgaccaccaccggctacacccaggaggactacaccatgctgggcagtgatgacttcttctacatcggcggcagccccaacacagctgacctgcccggcagccctgtgagcaacaacttcatgggctgcctgaaggatgtggtgtacaagaacaatgacttcaagctggagctgagccggctggccaaggagggggaccccaagatgaagctgcagggcgacctgtccttccgctgtgaagatgtggccgccctggaccctgtgacctttgagagccctgaggcctttgtggccctgccccgctggagcgccaagaggacaggcagcatcagcctggacttccgcaccacagagcccaacggcctgctgctcttcagccagggccggcgggccggcggcggggccggcagccacagcagcgcccagagagctgactactttgccatggagctgctggatggccacctgtacctgctgctggacatgggcagcggcggcatcaagctgcgggccagcagcaggaaggtgaatgatggagagtggtgccacgtggacttccagagagatggcaggaagggcagcatctctgtgaacagccgcagcacccccttcctggccaccggggacagcgagatcctggacctggagagcgagctgtacctgggcggcctgcctgagggcggccgggtggacctgcccctgcccccagaggtgtggacagctgccctgcgggccggctacgtgggctgtgtgcgggacctcttcattgatggccgcagccgggacctgcggggcctggccgaggcccagggcgctgtgggcgtggcccccttctgcagccgggagaccctgaagcagtgtgccagcgccccctgcagaaatggaggagtgtgccgggagggctggaaccgcttcatctgtgactgcattggaacaggcttcctgggccgggtgtgtgagcgggaggccaccgtgctgtcctatgatggctccatgtacatgaagatcatgctgcccaatgccatgcacacagaagcagaagatgtgtccctgcgcttcatgagccagagggcctacggcctgatgatggccaccaccagccgggagagcgctgacaccctgcggctggagctggatggcggccagatgaagctgactgtgaacctggactgcctgcgggtgggctgtgcccccagcaaaggacctgagaccctgtttgctggccacaagctgaatgacaatgagtggcacacagtgcgggtggtgcggcggggcaagagcctgcagctgtctgtggacaacgtgacagtggagggccagatggccggggcccacatgaggctggagttccacaacatcgagaccggcatcatgacagagcggcgcttcatctctgtggtgcccagcaacttcatcggccacctgagcggcctggtgttcaacggccagccctacatggaccagtgcaaggatggagacatcacctactgtgagctgaatgcccgcttcggcctgcgggccatcgtggccgaccctgtgaccttcaagagccgcagcagctacctggccctggccaccctgcaggcctatgcctccatgcacctgttcttccagttcaagaccacagccccagatggcctgctgctcttcaacagcggaaatggaaatgacttcatcgtcatcgagctggtgaagggctacatccactacgtgtttgacctgggcaatggccccagcctgatgaagggcaacagcgacaagcctgtgaatgacaaccagtggcacaacgtggtggtgtcccgggaccctggaaatgtgcacaccctgaagattgacagcaggacagtgacccagcacagcaatggagccaggaacctggacctgaagggggagctgtacatcggcggcctgagcaagaacatgttcagcaacctgcccaagctggtggccagcagagatggcttccagggctgcctggcctctgtggacctgaatggccgcctgcctgacctgattgctgatgccctgcaccgcatcggccaggtggagcggggctgtgatggccccagcaccacctgcacagaggagagctgtgccaaccagggcgtgtgcctgcagcagtgggatggcttcacctgtgactgcaccatgaccagctatggaggccctgtgtgcaatgaccccggcaccacctacatctttggaaaaggaggagccctgatcacctacacctggcccccaaatgaccggcccagcaccaggatggaccggctggccgtgggcttcagcacccaccagaggtctgctgtgctggtgcgggtggacagcgccagcggcctgggggactacctgcagctgcacatcgaccagggcaccgtgggcgtcatcttcaacgtgggcacagatgacatcaccattgatgagcccaatgccatcgtgtctgatggcaagtaccacgtggtgcgcttcaccaggtctggaggaaatgccaccctgcaggtggacagctggcctgtgaatgaaagatacccagctggcaactttgacaatgaaaggctggccatcgcccggcagaggatcccctaccgcctgggccgggtggtggatgagtggctgctggacaagggccggcagctgaccatcttcaacagccaggccgccatcaagattggaggccgggaccagggccggcccttccagggccaggtgtctggcctgtactacaacggcctgaaggtgctggccctggccgctgagagtgaccccaacgtgaggacagagggccacctgcggctggtgggggagggccccagcgtgctgctgtctgctgagaccacagccaccaccctgctggccgacatggccaccaccatcatggagaccaccaccaccatggccaccaccaccacccggcggggccgcagccccaccctgcgggacagcaccacccagaacacagatgacctgctggtggccagcgctgagtgccccagtgatgatgaggacctggaggagtgtgagcccagcactggaggagagctgatcctgcccatcatcacagaggacagcctggaccccccacctgtggccaccaggagcccctttgtgcccccaccacccaccttctaccccttcctgactggagtgggcgccacccaggacaccctgcccccacctgctgcccggcggcccccatctgggggcccctgccaggccgagagagatgacagcgactgtgaggagcccatcgaggccagcggctttgccagcggggaggtgtttgacagcagcctgcccccaacagatgatgaggacttctacaccaccttccccctggtgacagacaggaccaccctgctgagccccaggaagccagccccccggcccaacctgaggacagatggagccaccggggcccctggggtgctgtttgcccccagcgccccagcccccaacctgcctgctgggaagatgaaccaccgggaccccctgcagcccctgctggagaacccccccctgggccctggggcccccaccagctttgagccccggcggcccccacccctgcggcctggggtgaccagcgcccctggcttcccccacctgcccacagccaaccccactggacctggagagcggggccccccaggagctgtggaggtgatccgggagagcagcagcaccaccggcatggtggtgggcatcgtggccgccgccgccctgtgcatcctgatcctgctgtatgccatgtacaagtacagaaacagagatgagggcagctaccaggtggaccagagcaggaactacatcagcaacagcgcccagagcaatggagctgtggtgaaggagaaggccccagctgcccccaagacccccagcaaggccaagaagaacaaggacaaggagtactacgtgtag

SEQ ID NO: 161503 - DNA, 4929 bp, synthetic construct
  misc_feature 1..4929: note = Description of Artificial Sequence: Synthetic coding sequence
  source 1..4929: mol_type = other DNA
atggccagcggcagccgctggaggcccaccccaccacccctgctgctgctgctgctgctggccctggccgcccgggcagatggcctggagtttggaggcggccctggccagtgggcccgctatgcccgctgggccggggccgccagcagcggggagctgtccttcagcctgcggaccaatgccacccgggccctgctgctgtacctggatgatggaggagactgtgacttcctggagctgctgctggtggatggccgcctgcggctgcgcttcaccctgagctgtgccgagcccgccaccctgcagctggacacccctgtggctgatgaccgctggcacatggtgctgctgaccagagatgcccggaggacagccctggccgtggatggagaggcccgggctgctgaggtgcgcagcaagagaagagagatgcaggtggccagtgacctgtttgtgggcggcatccccccagatgtgcggctgagcgccctgaccctgagcacagtgaagtatgagccccccttccggggcctgctggccaacctgaagctgggggagcggcccccagccctgctgggcagccagggcctgcggggggccacagctgaccccctgtgtgccccagccaggaacccctgtgccaatggaggcctgtgcaccgtgctggcccctggagaggtgggctgtgactgcagccacacaggctttggaggcaagttctgcagcgaggcccccagccccttccagggccctgcccacctgaccctgaacagcgagggcaaggaggagtttgtggccaccttcaagggaaatgagttcttctgctatgacctgagccacaaccccatccagagcagcacagatgagatcaccctggccttccgcaccctgcagagaaatggcctgatgctgcacacaggcaagtctgctgactatgtgaacctgagcctgaagtctggagctgtgtggctggtgatcaacctgggcagcggggcctttgaggccctggtggagcctgtgaatggcaagttcaatgacaatgcctggcatgatgtgcgggtgaccaggaacctgcggcagcacgccggcatcggccacgccatggtgaccatctctgtggatggcatcctgaccaccaccggctacacccaggaggactacaccatgctgggcagtgatgacttcttctacatcggcggcagccccaacacagctgacctgcccggcagccctgtgagcaacaacttcatgggctgcctgaaggatgtggtgtacaagaacaatgacttcaagctggagctgagccggctggccaaggagggggaccccaagatgaagctgcagggcgacctgtccttccgctgtgaagatgtggccgccctggaccctgtgacctttgagagccctgaggcctttgtggccctgccccgctggagcgccaagaggacaggcagcatcagcctggacttccgcaccacagagcccaacggcctgctgctcttcagccagggcagaagagctgggggcggggccggcagccacagcagcgcccagagagctgactactttgccatggagctgctggatggccacctgtacctgctgctggacatgggcagcggcggcatcaagctgcgggccagcagcaggaaggtgaatgatggagagtggtgccacgtggacttccagagagatggcaggaagggcagcatctctgtgaacagccgcagcacccccttcctggccactggagacagcgagatcctggacctggagagcgagctgtacctgggcggcctgcctgagggcggccgggtggacctgcccctgcccccagaggtgtggacagctgccctgcgggccggctacgtgggctgtgtgcgggacctcttcattgatggccgcagccgggacctgcggggcctggccgaggcccagggcgctgtgggcgtggcccccttctgcagccgggagaccctgaagcagtgtgccagcgccccctgcagaaatggaggagtgtgccgggagggctggaaccgcttcatctgtgactgcatcggcaccggcttcctgggccgggtgtgtgagcgggaggccaccgtgctgtcctatgatggctccatgtacatgaagatcatgctgcccaatgccatgcacacagaagcagaagatgtgtccctgcgcttcatgagccagagggcctacggcctgatgatggccaccaccagccgggagagcgctgacaccctgcggctggagctggatggcggccagatgaagctgactgtgaacctgggcaaaggacctgagaccctgtttgctggccacaagctgaatgacaatgagtggcacacagtgcgggtggtgcggcggggcaagagcctgcagctgtctgtggacaacgtgacagtggagggccagatggccggggcccacatgaggctggagttccacaacatcgagaccggcatcatgacagagcggcgcttcatctctgtggtgcccagcaacttcatcggccacctgagcggcctggtgttcaacggccagccctacatggaccagtgcaaggatggagacatcacctactgtgagctgaatgcccgcttcggcctgcgggccatcgtggccgaccctgtgaccttcaagagccgcagcagctacctggccctggccaccctgcaggcctatgcctccatgcacctgttcttccagttcaagaccacagccccagatggcctgctgctcttcaacagcggaaatggaaatgacttcatcgtcatcgagctggtgaagggctacatccactacgtgtttgacctgggcaatggccccagcctgatgaagggcaacagcgacaagcctgtgaatgacaaccagtggcacaacgtggtggtgtcccgggaccctggaaatgtgcacaccctgaagattgacagcaggacagtgacccagcacagcaatggagccaggaacctggacctgaagggggagctgtacatcggcggcctgagcaagaacatgttcagcaacctgcccaagctggtggccagcagagatggcttccagggctgcctggcctctgtggacctgaatggccgcctgcctgacctgattgctgatgccctgcaccgcatcggccaggtggagcggggctgtgatggccccagcaccacctgcacagaggagagctgtgccaaccagggcgtgtgcctgcagcagtgggatggcttcacctgtgactgcaccatgaccagctatggaggccctgtgtgcaatgaccccggcaccacctacatctttggaaaaggaggagccctgatcacctacacctggcccccaaatgaccggcccagcaccaggatggaccggctggccgtgggcttcagcacccaccagaggtctgctgtgctggtgcgggtggacagcgccagcggcctgggggactacctgcagctgcacatcgaccagggcaccgtgggcgtcatcttcaacgtgggcacagatgacatcaccattgatgagcccaatgccatcgtgtctgatggcaagtaccacgtggtgcgcttcaccaggtctggaggaaatgccaccctgcaggtggacagctggcctgtgaatgaaagatacccagctggccggcagctgaccatcttcaacagccaggccgccatcaagattggaggccgggaccagggccggcccttccagggccaggtgtctggcctgtactacaacggcctgaaggtgctggccctggccgctgagagtgaccccaacgtgaggacagagggccacctgcggctggtgggggagggccccagcgtgctgctgtctgctgagaccacagccaccaccctgctggccgacatggccaccaccatcatggagaccaccaccaccatggccaccaccaccacccggcggggccgcagccccaccctgcgggacagcaccacccagaacacagatgacctgctggtggccagcgctgagtgccccagtgatgatgaggacctggaggagtgtgagcccagcactggaggagagctgatcctgcccatcatcacagaggacagcctggaccccccacctgtggccaccaggagcccctttgtgcccccaccacccaccttctaccccttcctgactggagtgggcgccacccaggacaccctgcccccacctgctgcccggcggcccccatctgggggcccctgccaggccgagagagatgacagcgactgtgaggagcccatcgaggccagcggctttgccagcggggaggtgtttgacagcagcctgcccccaacagatgatgaggacttctacaccaccttccccctggtgacagacaggaccaccctgctgagccccaggaagccagccccccggcccaacctgaggacagatggagccaccggggcccctggggtgctgtttgcccccagcgccccagcccccaacctgcctgctgggaagatgaaccaccgggaccccctgcagcccctgctggagaacccccccctgggccctggggcccccaccagctttgagccccggcggcccccacccctgcggcctggggtgaccagcgcccctggcttcccccacctgcccacagccaaccccactggacctggagagcggggccccccaggagctgtggaggtgatccgggagagcagcagcaccaccggcatggtggtgggcatcgtggccgccgccgccctgtgcatcctgatcctgctgtatgccatgtacaagtacagaaacagagatgagggcagctaccaggtggaccagagcaggaactacatcagcaacagcgcccagagcaatggagctgtggtgaaggagaaggccccagctgcccccaagacccccagcaaggccaagaagaacaaggacaaggagtactacgtgtag

SEQ ID NO: 161504 - DNA, 5139 bp, synthetic construct; identical to SEQ ID NO: 161502
  misc_feature 1..5139: note = Description of Artificial Sequence: Synthetic coding sequence
  source 1..5139: mol_type = other DNA

SEQ ID NO: 161505 - DNA, 4929 bp, synthetic construct
  misc_feature 1..4929: note = Description of Artificial Sequence: Synthetic coding sequence
  source 1..4929: mol_type = other DNA
atggccagcggcagccgctggaggcccaccccaccacccctgctgctgctgctgctgctggccctggccgcccgggcagatggcctggagtttggaggcggccctggccagtgggcccgctatgcccgctgggccggggccgccagcagcggggagctgtccttcagcctgcggaccaatgccacccgggccctgctgctgtacctggatgatggaggagactgtgacttcctggagctgctgctggtggatggccgcctgcggctgcgcttcaccctgagctgtgccgagcccgccaccctgcagctggacacccctgtggctgatgaccgctggcacatggtgctgctgaccagagatgcccggaggacagccctggccgtggatggagaggcccgggctgctgaggtgcgcagcaagagaagagagatgcaggtggccagtgacctgtttgtgggcggcatccccccagatgtgcggctgagcgccctgaccctgagcacagtgaagtatgagccccccttccggggcctgctggccaacctgaagctgggggagcggcccccagccctgctgggcagccagggcctgcggggggccacagctgaccccctgtgtgccccagccaggaacccctgtgccaatggaggcctgtgcaccgtgctggcccctggagaggtgggctgtgactgcagccacacaggctttggaggcaagttctgcagcgaggaggagcaccccatggagggccctgcccacctgaccctgaacagcgagggcaaggaggagtttgtggccaccttcaagggaaatgagttcttctgctatgacctgagccacaaccccatccagagcagcacagatgagatcaccctggccttccgcaccctgcagagaaatggcctgatgctgcacacaggcaagtctgctgactatgtgaacctgagcctgaagtctggagctgtgtggctggtgatcaacctgggcagcggggcctttgaggccctggtggagcctgtgaatggcaagttcaatgacaatgcctggcatgatgtgcgggtgaccaggaacctgcggcagcacgccggcatcggccacgccatggtgaccatctctgtggatggcatcctgaccaccaccggctacacccaggaggactacaccatgctgggcagtgatgacttcttctacatcggcggcagccccaacacagctgacctgcccggcagccctgtgagcaacaacttcatgggctgcctgaaggatgtggtgtacaagaacaatgacttcaagctggagctgagccggctggccaaggagggggaccccaagatgaagctgcagggcgacctgtccttccgctgtgaagatgtggccgccctggaccctgtgacctttgagagccctgaggcctttgtggccctgccccgctggagcgccaagaggacaggcagcatcagcctggacttccgcaccacagagcccaacggcctgctgctcttcagccagggcagaagagctgggggcggggccggcagccacagcagcgcccagagagctgactactttgccatggagctgctggatggccacctgtacctgctgctggacatgggcagcggcggcatcaagctgcgggccagcagcaggaaggtgaatgatggagagtggtgccacgtggacttccagagagatggcaggaagggcagcatctctgtgaacagccgcagcacccccttcctggccactggagacagcgagatcctggacctggagagcgagctgtacctgggcggcctgcctgagggcggccgggtggacctgcccctgcccccagaggtgtggacagctgccctgcgggccggctacgtgggctgtgtgcgggacctcttcattgatggccgcagccgggacctgcggggcctggccgaggcccagggcgctgtgggcgtggcccccttctgcagccgggagaccctgaagcagtgtgccagcgccccctgcagaaatggaggagtgtgccgggagggctggaaccgcttcatctgtgactgcatcggcaccggcttcctgggccgggtgtgtgagcgggaggccaccgtgctgtcctatgatggctccatgtacatgaagatcatgctgcccaatgccatgcacacagaagcagaagatgtgtccctgcgcttcatgagccagagggcctacggcctgatgatggccaccaccagccgggagagcgctgacaccctgcggctggagctggatggcggccagatgaagctgactgtgaacctgggcaaaggacctgagaccctgtttgctggccacaagctgaatgacaatgagtggcacacagtgcgggtggtgcggcggggcaagagcctgcagctgtctgtggacaacgtgacagtggagggccagatggccggggcccacatgaggctggagttccacaacatcgagaccggcatcatgacagagcggcgcttcatctctgtggtgcccagcaacttcatcggccacctgagcggcctggtgttcaacggccagccctacatggaccagtgcaaggatggagacatcacctactgtgagctgaatgcccgcttcggcctgcgggccatcgtggccgaccctgtgaccttcaagagccgcagcagctacctggccctggccaccctgcaggcctatgcctccatgcacctgttcttccagttcaagaccacagccccagatggcctgctgctcttcaacagcggaaatggaaatgacttcatcgtcatcgagctggtgaagggctacatccactacgtgtttgacctgggcaatggccccagcctgatgaagggcaacagcgacaagcctgtgaatgacaaccagtggcacaacgtggtggtgtcccgggaccctggaaatgtgcacaccctgaagattgacagcaggacagtgacccagcacagcaatggagccaggaacctggacctgaagggggagctgtacatcggcggcctgagcaagaacatgttcagcaacctgcccaagctggtggccagcagagatggcttccagggctgcctggcctctgtggacctgaatggccgcctgcctgacctgattgctgatgccctgcaccgcatcggccaggtggagcggggctgtgatggccccagcaccacctgcacagaggagagctgtgccaaccagggcgtgtgcctgcagcagtgggatggcttcacctgtgactgcaccatgaccagctatggaggccctgtgtgcaatgaccccggcaccacctacatctttggaaaaggaggagccctgatcacctacacctggcccccaaatgaccggcccagcaccaggatggaccggctggccgtgggcttcagcacccaccagaggtctgctgtgctggtgcgggtggacagcgccagcggcctgggggactacctgcagctgcacatcgaccagggcaccgtgggcgtcatcttcaacgtgggcacagatgacatcaccattgatgagcccaatgccatcgtgtctgatggcaagtaccacgtggtgcgcttcaccaggtctggaggaaatgccaccctgcaggtggacagctggcctgtgaatgaaagatacccagctggccggcagctgaccatcttcaacagccaggccgccatcaagattggaggccgggaccagggccggcccttccagggccaggtgtctggcctgtactacaacggcctgaaggtgctggccctggccgctgagagtgaccccaacgtgaggacagagggccacctgcggctggtgggggagggccccagcgtgctgctgtctgctgagaccacagccaccaccctgctggccgacatggccaccaccatcatggagaccaccaccaccatggccaccaccaccacccggcggggccgcagccccaccctgcgggacagcaccacccagaacacagatgacctgctggtggccagcgctgagtgccccagtgatgatgaggacctggaggagtgtgagcccagcactggaggagagctgatcctgcccatcatcacagaggacagcctggaccccccacctgtggccaccaggagcccctttgtgcccccaccacccaccttctaccccttcctgactggagtgggcgccacccaggacaccctgcccccacctgctgcccggcggcccccatctgggggcccctgccaggccgagagagatgacagcgactgtgaggagcccatcgaggccagcggctttgccagcggggaggtgtttgacagcagcctgcccccaacagatgatgaggacttctacaccaccttccccctggtgacagacaggaccaccctgctgagccccaggaagccagccccccggcccaacctgaggacagatggagccaccggggcccctggggtgctgtttgcccccagcgccccagcccccaacctgcctgctgggaagatgaaccaccgggaccccctgcagcccctgctggagaacccccccctgggccctggggcccccaccagctttgagccccggcggcccccacccctgcggcctggggtgaccagcgcccctggcttcccccacctgcccacagccaaccccactggacctggagagcggggccccccaggagctgtggaggtgatccgggagagcagcagcaccaccggcatggtggtgggcatcgtggccgccgccgccctgtgcatcctgatcctgctgtatgccatgtacaagtacagaaacagagatgagggcagctaccaggtggaccagagcaggaactacatcagcaacagcgcccagagcaatggagctgtggtgaaggagaaggccccagctgcccccaagacccccagcaaggccaagaagaacaaggacaaggagtactacgtgtag

SEQ ID NO: 161506 - DNA, 5118 bp, synthetic construct
  misc_feature 1..5118: note = Description of Artificial Sequence: Synthetic coding sequence
  source 1..5118: mol_type = other DNA
atggccagcggcagccgctggaggcccaccccaccacccctgctgctgctgctgctgctggccctggccgcccgggcagatggcctggagtttggaggcggccctggccagtgggcccgctatgcccgctgggccggggccgccagcagcggggagctgtccttcagcctgcggaccaatgccacccgggccctgctgctgtacctggatgatggaggagactgtgacttcctggagctgctgctggtggatggccgcctgcggctgcgcttcaccctgagctgtgccgagcccgccaccctgcagctggacacccctgtggctgatgaccgctggcacatggtgctgctgaccagagatgcccggaggacagccctggccgtggatggagaggcccgggctgctgaggtgcgcagcaagagaagagagatgcaggtggccagtgacctgtttgtgggcggcatccccccagatgtgcggctgagcgccctgaccctgagcacagtgaagtatgagccccccttccggggcctgctggccaacctgaagctgggggagcggcccccagccctgctgggcagccagggcctgcggggggccacagctgaccccctgtgtgccccagccaggaacccctgtgccaatggaggcctgtgcaccgtgctggcccctggagaggtgggctgtgactgcagccacacaggctttggaggcaagttctgcagcgaggaggagcaccccatggagggccctgcccacctgaccctgaacagcgaggtgggcagcctgctcttcagcgagggcggggccggccggggcggcgctggagatgtgcaccagcccaccaagggcaaggaggagtttgtggccaccttcaagggaaatgagttcttctgctatgacctgagccacaaccccatccagagcagcacagatgagatcaccctggccttccgcaccctgcagagaaatggcctgatgctgcacacaggcaagtctgctgactatgtgaacctgagcctgaagtctggagctgtgtggctggtgatcaacctgggcagcggggcctttgaggccctggtggagcctgtgaatggcaagttcaatgacaatgcctggcatgatgtgcgggtgaccaggaacctgcggcagcacgccggcatcggccacgccatggtgaccatctctgtggatggcatcctgaccaccaccggctacacccaggaggactacaccatgctgggcagtgatgacttcttctacatcggcggcagccccaacacagctgacctgcccggcagccctgtgagcaacaacttcatgggctgcctgaaggatgtggtgtacaagaacaatgacttcaagctggagctgagccggctggccaaggagggggaccccaagatgaagctgcagggcgacctgtccttccgctgtgaagatgtggccgccctggaccctgtgacctttgagagccctgaggcctttgtggccctgccccgctggagcgccaagaggacaggcagcatcagcctggacttccgcaccacagagcccaacggcctgctgctcttcagccagggcagaagagctgggggcggggccggcagccacagcagcgcccagagagctgactactttgccatggagctgctggatggccacctgtacctgctgctggacatgggcagcggcggcatcaagctgcgggccagcagcaggaaggtgaatgatggagagtggtgccacgtggacttccagagagatggcaggaagggcagcatctctgtgaacagccgcagcacccccttcctggccactggagacagcgagatcctggacctggagagcgagctgtacctgggcggcctgcctgagggcggccgggtggacctgcccctgcccccagaggtgtggacagctgccctgcgggccggctacgtgggctgtgtgcgggacctcttcattgatggccgcagccgggacctgcggggcctggccgaggcccagggcgctgtgggcgtggcccccttctgcagccgggagaccctgaagcagtgtgccagcgccccctgcagaaatggaggagtgtgccgggagggctggaaccgcttcatctgtgactgcatcggcaccggcttcctgggccgggtgtgtgagcgggaggccaccgtgctgtcctatgatggctccatgtacatgaagatcatgctgcccaatgccatgcacacagaagcagaagatgtgtccctgcgcttcatgagccagagggcctacggcctgatgatggccaccaccagccgggagagcgctgacaccctgcggctggagctggatggcggccagatgaagctgactgtgaacctggactgcctgcgggtgggctgtgcccccagcaagggccctgagaccctgtttgctggccacaagctgaatgacaatgagtggcacacagtgcgggtggtgagaagaggcaagagcctgcagctgtctgtggacaacgtgacagtggagggccagatggccggggcccacatgaggctggagttccacaacattgaaacaggcatcatgacagaaagacgcttcatctctgtggtgcccagcaacttcatcggccacctgagcggcctggtgttcaacggccagccctacatggaccagtgcaaggatggagacatcacctactgtgagctgaatgccaggtttggcctgcgggccatcgtggccgaccctgtgaccttcaagagccgcagcagctacctggccctggccaccctgcaggcctatgcctccatgcacctgttcttccagttcaagaccacagccccagatggcctgctgctcttcaacagcggaaatggaaatgacttcatcgtgattgagctggtgaagggctacatccactacgtgtttgacctgggcaatggccccagcctgatgaagggcaacagcgacaagcctgtgaatgacaaccagtggcacaacgtggtggtgtcccgggaccctggaaatgtgcacaccctgaagattgacagcaggacagtgacccagcacagcaatggagccaggaacctggacctgaagggggagctgtacatcggcggcctgagcaagaacatgttcagcaacctgcccaagctggtggccagcagagatggcttccagggctgcctggcctctgtggacctgaatggccgcctgcctgacctgattgctgatgccctgcacagaattggccaggtggagcggggctgtgatggccccagcaccacctgcacagaggagagctgtgccaaccagggcgtgtgcctgcagcagtgggatggcttcacctgtgactgcaccatgaccagctatggaggccctgtgtgcaatgaccccggcaccacctacatctttgggaagggcggggccctgatcacctacacctggcccccaaatgaccggcccagcaccaggatggaccggctggccgtgggcttcagcacccaccagaggtctgctgtgctggtgcgggtggacagcgccagcggcctgggggactacctgcagctgcacatcgaccagggcaccgtgggcgtcatcttcaacgtgggcacagatgacatcaccattgatgagcccaatgccatcgtgtctgatggcaagtaccacgtggtgcgcttcaccaggtctggaggaaatgccaccctgcaggtggacagctggcctgtgaatgaaagatacccagctggcaactttgacaatgaaaggctggccatcgcccggcagaggatcccctaccgcctgggccgggtggtggatgagtggctgctggacaagggccggcagctgaccatcttcaacagccaggccgccatcaagattggaggccgggaccagggccggcccttccagggccaggtgtctggcctgtactacaacggcctgaaggtgctggccctggccgctgagagtgaccccaacgtgaggacagagggccacctgcggctggtgggggagggccccagcgtgctgctgtctgctgagaccacagccaccaccctgctggccgacatggccaccaccatcatggagaccaccaccaccatggccaccaccaccacccggcggggccgcagccccaccctgcgggacagcaccacccagaacacagatgacctgctggtggccagcgcagaatgtcccagtgatgatgaggacctggaggagtgtgagcccagcactggaggagagctgatcctgcccatcatcacagaggacagcctggaccccccacctgtggccaccaggagcccctttgtgcccccaccacccaccttctaccccttcctgactggagtgggcgccacccaggacaccctgcccccacctgctgcccggcggccccccagcggcggcccctgccaggccgagagagatgacagcgactgtgaggagcccatcgaggccagcggctttgccagcggggaggtgtttgacagcagcctgcccccaacagatgatgaggacttctacaccaccttccccctggtgacagacaggaccaccctgctgagccccaggaagccagccccccggcccaacctgaggacagatggagccactggagcccctggggtgctgtttgcccccagcgccccagcccccaacctgcctgctgggaagatgaaccaccgggaccccctgcagcccctgctggagaacccccccctgggccctggggcccccaccagctttgagccccggcggcccccacccctgcggcctggggtgaccagcgcccctggcttcccccacctgcccacagccaaccccaccggccctggagagcggggccccccaggagctgtggaggtgatccgggagagcagcagcaccaccggcatggtggtgggcatcgtggccgctgctgccctgtgcatcctgatcctgctgtatgccatgtacaagtacagaaacagagatgagggcagctaccaggtggaccagagcaggaactacatcagcaacagcgcccagagcaatggagctgtggtgaaggagaaggccccagctgcccccaagacccccagcaaggccaagaagaacaaggacaaggagtactacgtgtag

SEQ ID NO: 161507 - DNA, 2001 bp, synthetic construct
  misc_feature 1..2001: note = Description of Artificial Sequence: Synthetic coding sequence
  source 1..2001: mol_type = other DNA
atgcctcctgggggcagcggccctgggggctgcccccggcggcccccagccctggccggccccctgcccccacctcctcctcctcctcctccacccctgctgcccctgctgcccctgctgctgctgctgctgctgggcgctgctgagggcgcccgggtgagcagcagcctgagcaccacccaccacgtgcaccacttccacagcaagcacggcaccgtgcccatcgccatcaacaggatgcccttcctgacccggggcggccatgctggcaccacctacatctttggaaaaggaggagccctgatcacctacacctggcccccaaatgaccggcccagcaccaggatggaccggctggccgtgggcttcagcacccaccagaggtctgctgtgctggtgcgggtggacagcgccagcggcctgggggactacctgcagctgcacatcgaccagggcaccgtgggcgtcatcttcaacgtgggcacagatgacatcaccattgatgagcccaatgccatcgtgtctgatggcaagtaccacgtggtgcgcttcaccaggtctggaggaaatgccaccctgcaggtggacagctggcctgtgaatgaaagatacccagctggcaactttgacaatgaaaggctggccatcgcccggcagaggatcccctaccgcctgggccgggtggtggatgagtggctgctggacaagggccggcagctgaccatcttcaacagccaggccgccatcaagattggaggccgggaccagggccggcccttccagggccaggtgtctggcctgtactacaacggcctgaaggtgctggccctggccgctgagagtgaccccaacgtgaggacagagggccacctgcggctggtgggggagggccccagcgtgctgctgtctgctgagaccacagccaccaccctgctggccgacatggccaccaccatcatggagaccaccaccaccatggccaccaccaccacccggcggggccgcagccccaccctgcgggacagcaccacccagaacacagatgacctgctggtggccagcgctgagtgccccagtgatgatgaggacctggaggagtgtgagcccagcactggaggagagctgatcctgcccatcatcacagaggacagcctggaccccccacctgtggccaccaggagcccctttgtgcccccaccacccaccttctaccccttcctgactggagtgggcgccacccaggacaccctgcccccacctgctgcccggcggcccccatctgggggcccctgccaggccgagagagatgacagcgactgtgaggagcccatcgaggccagcggctttgccagcggggaggtgtttgacagcagcctgcccccaacagatgatgaggacttctacaccaccttccccctggtgacagacaggaccaccctgctgagccccaggaagccagccccccggcccaacctgaggacagatggagccaccggggcccctggggtgctgtttgcccccagcgccccagcccccaacctgcctgctgggaagatgaaccaccgggaccccctgcagcccctgctggagaacccccccctgggccctggggcccccaccagctttgagccccggcggcccccacccctgcggcctggggtgaccagcgcccctggcttcccccacctgcccacagccaaccccactggacctggagagcggggccccccaggagctgtggaggtgatccgggagagcagcagcaccaccggcatggtggtgggcatcgtggccgccgccgccctgtgcatcctgatcctgctgtatgccatgtacaagtacagaaacagagatgagggcagctaccaggtggaccagagcaggaactacatcagcaacagcgcccagagcaatggagctgtggtgaaggagaaggccccagctgcccccaagacccccagcaaggccaagaagaacaaggacaaggagtactacgtgtag

SEQ ID NO: 161508 - DNA, 1299 bp, synthetic construct
  misc_feature 1..1299: note = Description of Artificial Sequence: Synthetic coding sequence
  source 1..1299: mol_type = other DNA
atgcacctgcgcatccacgcccggcgcagccccccaagaagacctgcctggaccctgggcatctggttcctgttctggggctgcatcgtgtcctctgtgtggagcagcagcaatgtggccagcagcagcagcaccagcagcagccctggcagccacagccagcacgagcaccacttccacggcagcaagcaccacagcgtgcccatcagcatctaccgcagccctgtgtccctgcggggcggccatgctggggccacctacatctttgggaagagcggcggcctcatcctgtacacctggccagccaatgaccggcccagcaccaggagtgaccggctggccgtgggcttcagcaccaccgtgaaggatggcatcctggtgagaattgattctgcccctggcctgggggacttcctgcagctgcacatcgagcagggcaagattggagtggtgttcaacatcggcaccgtggacatcagcatcaaggaggagaggacccctgtgaatgatggcaagtaccacgtggtgcgcttcaccagaaatggaggaaatgccaccctgcaggtggacaactggcctgtgaatgagcactaccccaccggccggcagctgaccatcttcaacacccaggcccagatcgccatcggcggcaaggacaagggccgcctcttccagggccagctgagcggcctgtactatgatggcctgaaggtgctgaacatggctgctgagaacaaccccaacatcaagatcaatggatctgtgcggctggtgggggaggtgcccagcatcctgggcaccacccagaccacctccatgcctcctgagatgagcaccaccgtgatggagaccaccaccaccatggccaccaccaccaccaggaagaacagaagcacagccagcatccagcccaccagtgatgacctggtgagcagcgctgagtgcagcagtgatgatgaggactttgtggagtgtgagcccagcacaggccgcagcgccaaccccacagagcccggcatcagaagagtgcctggggccagcgaggtgatccgggagagcagcagcaccaccggcatggtggtgggcatcgtggccgctgctgccctgtgcatcctgatcctgctgtatgccatgtacaagtacagaaacagagatgagggcagctaccaggtggatgagaccaggaactacatcagcaacagcgcccagagcaatggcaccctgatgaaggagaagcagcagagcagcaagagcggccacaagaagcagaagaacaaggaccgggagtactacgtgtag

SEQ ID NO: 161509 - DNA, 4932 bp, synthetic construct
  misc_feature 1..4932: note = Description of Artificial Sequence: Synthetic coding sequence
  source 1..4932: mol_type = other DNA
atgagcagcaccctgcacagcgtcttcttcaccctgaaggtgtccatcctgctgggcagcctgctgggcctgtgcctgggcctggagttcatgggcctgcccaaccagtgggcccgctacctgcgctgggatgccagcaccaggagtgacctgtccttccagttcaagaccaacgtgtccacaggcctgctgctgtacctggatgatggaggagtgtgtgacttcctgtgcctgagcctggtggatggccgggtgcagctgcgcttctccatggactgtgccgagacagctgtgctgagcaacaagcaggtgaatgacagctcctggcacttcctgatggtgtcccgggaccggctgaggacagtgctgatgctggatggagagggccagagcggggagctgcagccccagaggccctacatggatgtggtgtctgacctcttcctgggcggcgtgcccacagacatccggcccagcgccctgaccctggatggagtgcaggccatgcctggcttcaagggcctcatcctggacctgaagtatggcaacagcgagccccggctgctgggcagcagaggagtgcagatggatgctgagggcccctgtggggagcggccctgtgaaaatggaggcatctgcttcctgctggatggccaccccacctgtgactgcagcaccaccggctatggaggcaagctgtgcagcgagggcagcagcggggacccctgcctgagccacctgatgatgtctgagcaggcccgggaggagaatgtggccaccttccggggcagcgagtacctgtgctatgacctgagccagaaccccatccagagcagcagtgatgagatcaccctgtccttcaagacctggcagagaaatggcctcatcctgcacacaggcaagtctgctgactatgtgaacctggccctgaaggatggagctgtgtccctggtgatcaacctgggcagcggggcctttgaggccatcgtggagcctgtgaatggcaagttcaatgacaatgcctggcatgatgtgaaggtgaccaggaacctgcggcaggtgaccatctctgtggatggcatcctgaccaccaccggctacacccaggaggactacaccatgctgggcagtgatgacttcttctacgtgggcggcagccccagcacagctgacctgcccggcagccctgtgagcaacaacttcatgggctgcctgaaggaggtggtgtacaagaacaatgacatccggctggagctgagccggctggccagaattgctgacaccaagatgaagatctatggagaggtggtgttcaagtgtgaaaatgtggccaccctggaccccatcaactttgagaccccagaggcctacatcagcctgcccaagtggaacaccaagaggatgggcagcatcagctttgacttccgcaccacagagcccaacggcctcatcctcttcacccacggcaagccccaggagaggaaggatgcccggagccagaagaacaccaaggtggacttctttgctgtggagctgctggatggcaacctgtacctgctgctggacatgggcagcggcaccatcaaggtgaaggccacccagaagaaggccaatgatggagagtggtaccacgtggacatccagagagatggccgcagcggcaccatctctgtgaacagcaggaggacccccttcaccgccagcggggagagcgagatcctggacctggagggggacatgtacctgggcggcctgcctgaaaatagagctggcctcatcctgcccacagagctgtggacagccatgctgaactacggctacgtgggctgcatccgggacctcttcattgatggccgcagcaagaacatccggcagctggccgagatgcagaatgctgctggggtgaagagcagctgcagcaggatgtctgccaagcagtgtgacagctacccctgcaagaacaatgctgtgtgcaaggatggctggaaccgcttcatctgtgactgcaccggcaccggctactggggccgcacctgtgagcgggaggccagcatcctgtcctatgatggctccatgtacatgaagatcatcatgcccatggtgatgcacacagaagcagaagatgtgtccttccgcttcatgagccagagggcctacggcctgctggtggccaccaccagccgggacagcgctgacaccctgcggctggagctggatggcggccgggtgaagctgatggtgaacctggactgcatccgcatcaactgcaacagcagcaagggccctgagaccctgtatgccggccagaagctgaatgacaatgagtggcacacagtgcgggtggtgagaagaggcaagagcctgaagctgactgtggatgatgatgtggccgagggcaccatggtgggggaccacacccggctggagttccacaacattgaaacaggcatcatgacagagaagcgctacatctctgtggtgcccagcagcttcatcggccacctgcagagcctgatgtttaatggcctgctgtacatcgacctgtgcaagaatggagacatcgactactgtgagctgaaggccaggtttggcctgaggaacatcatcgctgaccctgtgaccttcaagaccaagagcagctacctgagcctggccaccctgcaggcctacacctccatgcacctgttcttccagttcaagaccaccagcccagatggcttcatcctcttcaacagcggagatggaaatgacttcatcgctgtggagctggtgaagggctacatccactacgtgtttgacctgggcaatggccccaacgtcatcaagggcaacagcgaccggcccctgaatgacaaccagtggcacaacgtggtgatcacccgggacaacagcaacacccacagcctgaaggtggacaccaaggtggtgacccaggtgatcaatggagccaagaacctggacctgaagggggacctgtacatggccggcctggcccagggcatgtacagcaacctgcccaagctggtggccagcagagatggcttccagggctgcctggcctctgtggacctgaatggccgcctgcctgacctgatcaatgatgccctgcacaggagcggccagatcgagcggggctgtgagggccccagcaccacctgccaggaggacagctgtgccaaccagggcgtgtgcatgcagcagtgggagggcttcacctgtgactgcagcatgaccagctacagcggcaaccagtgcaatgaccccggggccacctacatctttgggaagagcggcggcctcatcctgtacacctggccagccaatgaccggcccagcaccaggagtgaccggctggccgtgggcttcagcaccaccgtgaaggatggcatcctggtgagaattgacagcgcccctggcctgggggacttcctgcagctgcacatcgagcagggcaagattggagtggtgttcaacattggaacagtggacatcagcatcaaggaggagaggacccctgtgaatgatggcaagtaccacgtggtgcgcttcaccagaaatggaggaaatgccaccctgcaggtggacaactggcctgtgaatgagcactaccccaccggccggcagctgaccatcttcaacacccaggcccagatcgccatcggcggcaaggacaagggccgcctcttccagggccagctgagcggcctgtactatgatggcctgaaggtgctgaacatggctgctgagaacaaccccaacatcaagatcaatggatctgtgcggctggtgggggaggtgcccagcatcctgggcaccacccagaccacctccatgcctcctgagatgagcaccaccgtgatggagaccaccaccaccatggccaccaccaccaccaggaagaacagaagcacagccagcatccagcccaccagtgatgacctggtgtcctctgcagaatgttccagtgatgatgaagattttgtggagtgtgagcccagcacagcccggggggagctggtgatccccctgctggtggaggaccccctggccaccccacccatcgccacccgggcccccagcatcaccctgccccccaccttccggcccctgctgaccatcatcgagaccaccaaggacagcctgtccatgaccagcgaggccggcctgccctgcctgagtgaccagggcagtgatggctgtgatgatgatggcctggtgatcagcggctacggcagcggggagacctttgacagcaacctgcccccaacagatgatgaggacttctacaccaccttcagcctggtgacagacaagagcctgagcaccagcatctttgaaggaggctacaaggcccacgcccccaagtgggagagcaaggacttccggcccaacaaggtgtctgagaccagcaggaccaccaccaccagcctgagccctgagctgatccgcttcaccgccagcagcagcagcggcatggtgcccaagctgcctgctgggaagatgaacaacagagacctgaagccccagcctgacatcgtgctgctgcccctgcccacagcctatgagctggacagcaccaagctgaagagccccctcatcaccagccccatgttcagaaatgtgcccacagccaaccccacagagcccggcatccggcgggtgcctggggccagcgaggtgatccgggagagcagcagcaccaccggcatggtggtgggcatcgtggccgccgccgccctgtgcatcctgatcctgctgtatgccatgtacaagtacagaaacagagatgagggcagctaccaggtggatgagaccaggaactacatcagcaacagcgcccagagcaatggcaccctgatgaaggagaagcagcagagcagcaagagcggccacaagaagcagaagaacaaggaccgggagtactacgtgtag

SEQ ID NO: 161510 - DNA, 4179 bp, synthetic construct
  misc_feature 1..4179: note = Description of Artificial Sequence: Synthetic coding sequence
  source 1..4179: mol_type = other DNA
atgagcagcaccctgcacagcgtcttcttcaccctgaaggtgtccatcctgctgggcagcctgctgggcctgtgcctgggcctggagttcatgggcctgcccaaccagtgggcccgctacctgcgctgggatgccagcaccaggagtgacctgtccttccagttcaagaccaacgtgtccacaggcctgctgctgtacctggatgatggaggagtgtgtgacttcctgtgcctgagcctggtggatggccgggtgcagctgcgcttctccatggactgtgccgagacagctgtgctgagcaacaagcaggtgaatgacagctcctggcacttcctgatggtgtcccgggaccggctgaggacagtgctgatgctggatggagagggccagagcggggagctgcagccccagaggccctacatggatgtggtgtctgacctcttcctgggcggcgtgcccacagacatccggcccagcgccctgaccctggatggagtgcaggccatgcctggcttcaagggcctcatcctggacctgaagtatggcaacagcgagccccggctgctgggcagcagaggagtgcagatggatgctgagggcccctgtggggagcggccctgtgaaaatggaggcatctgcttcctgctggatggccaccccacctgtgactgcagcaccaccggctatggaggcaagctgtgcagcgagggcctgagccacctgatgatgtctgagcagggccgctggaaggcccgggaggagaatgtggccaccttccggggcagcgagtacctgtgctatgacctgagccagaaccccatccagagcagcagtgatgagatcaccctgtccttcaagacctggcagagaaatggcctcatcctgcacacaggcaagtctgctgactatgtgaacctggccctgaaggatggagctgtgtccctggtgatcaacctgggcagcggggcctttgaggccatcgtggagcctgtgaatggcaagttcaatgacaatgcctggcatgatgtgaaggtgaccaggaacctgcggcaggtgaccatctctgtggatggcatcctgaccaccaccggctacacccaggaggactacaccatgctgggcagtgatgacttcttctacgtgggcggcagccccagcacagctgacctgcccggcagccctgtgagcaacaacttcatgggctgcctgaaggaggtggtgtacaagaacaatgacatccggctggagctgagccggctggccagaattgctgacaccaagatgaagatctatggagaggtggtgttcaagtgtgaaaatgtggccaccctggaccccatcaactttgagaccccagaggcctacatcagcctgcccaagtggaacaccaagaggatgggcagcatcagctttgacttccgcaccacagagcccaacggcctcatcctcttcacccacggcaagccccaggagaggaaggatgcccggagccagaagaacaccaaggtggacttctttgctgtggagctgctggatggcaacctgtacctgctgctggacatgggcagcggcaccatcaaggtgaaggccacccagaagaaggccaatgatggagagtggtaccacgtggacatccagagagatggccgcagcggcaccatctctgtgaacagcaggaggacccccttcaccgccagcggggagagcgagatcctggacctggagggggacatgtacctgggcggcctgcctgaaaatagagctggcctcatcctgcccacagagctgtggacagccatgctgaactacggctacgtgggctgcatccgggacctcttcattgatggccgcagcaagaacatccggcagctggccgagatgcagaatgctgctggggtgaagagcagctgcagcaggatgtctgccaagcagtgtgacagctacccctgcaagaacaatgctgtgtgcaaggatggctggaaccgcttcatctgtgactgcaccggcaccggctactggggccgcacctgtgagcgggaggccagcatcctgtcctatgatggctccatgtacatgaagatcatcatgcccatggtgatgcacacagaagcagaagatgtgtccttccgcttcatgagccagagggcctacggcctgctggtggccaccaccagccgggacagcgctgacaccctgcggctggagctggatggcggccgggtgaagctgatggtgaacctgggcaaaggacctgagaccctgtatgccggccagaagctgaatgacaatgagtggcacacagtgcgggtggtgcggcggggcaagagcctgaagctgactgtggatgatgatgtggccgagggcaccatggtgggggaccacacccggctggagttccacaacatcgagaccggcatcatgacagagaagcgctacatctctgtggtgcccagcagcttcatcggccacctgcagagcctgatgttcaacggcctgctgtacatcgacctgtgcaagaatggagacatcgactactgtgagctgaaggcccgcttcggcctgaggaacatcatcgctgaccctgtgaccttcaagaccaagagcagctacctgagcctggccaccctgcaggcctacacctccatgcacctgttcttccagttcaagaccaccagcccagatggcttcatcctcttcaacagcggagatggaaatgacttcatcgctgtggagctggtgaagggctacatccactacgtgtttgacctgggcaatggccccaacgtcatcaagggcaacagcgaccggcccctgaatgacaaccagtggcacaacgtggtgatcacccgggacaacagcaacacccacagcctgaaggtggacaccaaggtggtgacccaggtgatcaacggggccaagaacctggacctgaagggggacctgtacatggccggcctggcccagggcatgtacagcaacctgcccaagctggtggccagcagagatggcttccagggctgcctggcctctgtggacctgaatggccgcctgcctgacctgatcaatgatgccctgcacaggagcggccagatcgagcggggctgtgagggccccagcaccacctgccaggaggacagctgtgccaaccagggcgtgtgcatgcagcagtgggagggcttcacctgtgactgcagcatgaccagctacagcggcaaccagtgcaatgaccccggggccacctacatctttgggaagagcggcggcctcatcctgtacacctggccagccaatgaccggcccagcaccaggagtgaccggctggccgtgggcttcagcaccaccgtgaaggatggcatcctggtgagaattgattctgcccctggcctgggggacttcctgcagctgcacatcgagcagggcaagattggagtggtgttcaacatcggcaccgtggacatcagcatcaaggaggagaggacccctgtgaatgatggcaagtaccacgtggtgcgcttcaccagaaatggaggaaatgccaccctgcaggtggacaactggcctgtgaatgagcactaccccaccggcaacacagacaatgaacgcttccagatggtgaagcagaagatccccttcaagtacaacagacctgtggaggagtggctgcaggagaagggccggcagctgaccatcttcaacacccaggcccagatcgccatcggcggcaaggacaagggccgcctcttccagggccagctgagcggcctgtactatgatggcctgaaggtgctgaacatggctgctgagaacaaccccaacatcaagatcaatggatctgtgcggctggtgggggaggtgcccagcatcctgggcaccacccagaccacctccatgcctcctgagatgagcaccaccgtgatggagaccaccaccaccatggccaccaccaccaccaggaagaacagaagcacagccagcatccagcccaccagtgatgacctggtgagcagcgctgagtgcagcagtgatgatgaggactttgtggagtgtgagcccagcacaggccgcagcgcccggagcagcaatgctgcccggagcctgcgggccgccctgacctggacctggaggctgacctacaccttcacccccatcatcttcatcagctgtgtggtgcacagctag

SEQ ID NO: 161511 - DNA, 3186 bp, synthetic construct
  misc_feature 1..3186: note = Description of Artificial Sequence: Synthetic coding sequence
  source 1..3186: mol_type = other DNA
atgctgggcagtgatgacttcttctacgtgggcggcagccccagcacagctgacctgcccggcagccctgtgagcaacaacttcatgggctgcctgaaggaggtggtgtacaagaacaatgacatccggctggagctgagccggctggccagaattgctgacaccaagatgaagatctacggggaggtggtgttcaagtgtgaaaatgtggccaccctggaccccatcaactttgagaccccagaggcctacatcagcctgcccaagtggaacaccaagaggatgggcagcatcagctttgacttccgcaccacagagcccaacggcctcatcctcttcacccacggcaagccccaggagaggaaggatgcccggagccagaagaacaccaaggtggacttctttgctgtggagctgctggatggcaacctgtacctgctgctggacatgggcagcggcaccatcaaggtgaaggccacccagaagaaggccaatgatggagagtggtaccacgtggacatccagagagatggccgcagcggcaccatctctgtgaacagcaggaggacccccttcaccgccagcggggagagcgagatcctggacctggagggggacatgtacctgggcggcctgcctgagaacagagctggcctcatcctgcccacagagctgtggacagccatgctgaactacggctacgtgggctgcatccgggacctcttcattgatggccgcagcaagaacatccggcagctggccgagatgcagaatgctgctggggtgaagagcagctgcagcaggatgtctgccaagcagtgtgacagctacccctgcaagaacaatgctgtgtgcaaggatggctggaaccgcttcatctgtgactgcacaggaacaggctactggggccgcacctgtgagcgggaggccagcatcctgtcctatgatggctccatgtacatgaagatcatcatgcccatggtgatgcacacagaagcagaagatgtgtccttccgcttcatgagccagagggcctacggcctgctggtggccaccaccagccgggacagcgctgacaccctgcggctggagctggatggcggccgggtgaagctgatggtgaacctggactgcatccgcatcaactgcaacagcagcaaaggacctgagaccctgtatgccggccagaagctgaatgacaatgagtggcacacagtgcgggtggtgcggcggggcaagagcctgaagctgactgtggatgatgatgtggccgagggcaccatggtgggggaccacacccggctggagttccacaacatcgagaccggcatcatgacagagaagcgctacatctctgtggtgcccagcagcttcatcggccacctgcagagcctgatgttcaacggcctgctgtacatcgacctgtgcaagaatggagacatcgactactgtgagctgaaggcccgcttcggcctgaggaacatcatcgctgaccctgtgaccttcaagaccaagagcagctacctgagcctggccaccctgcaggcctacacctccatgcacctgttcttccagttcaagaccaccagcccagatggcttcatcctcttcaacagcggagatggaaatgacttcatcgctgtggagctggtgaagggctacatccactacgtgtttgacctgggcaatggccccaacgtcatcaagggcaacagcgaccggcccctgaatgacaaccagtggcacaacgtggtgatcacccgggacaacagcaacacccacagcctgaaggtggacaccaaggtggtgacccaggtgatcaacggggccaagaacctggacctgaagggggacctgtacatggccggcctggcccagggcatgtacagcaacctgcccaagctggtggccagcagagatggcttccagggctgcctggcctctgtggacctgaatggccgcctgcctgacctgatcaatgatgccctgcacaggagcggccagatcgagcggggctgtgagggccccagcaccacctgccaggaggacagctgtgccaaccagggcgtgtgcatgcagcagtgggagggcttcacctgtgactgcagcatgaccagctacagcggcaaccagtgcaatgaccccggggccacctacatctttgggaagagcggcggcctcatcctgtacacctggccagccaatgaccggcccagcaccaggagtgaccggctggccgtgggcttcagcaccaccgtgaaggatggcatcctggtgagaattgattctgcccctggcctgggggacttcctgcagctgcacatcgagcagggcaagattggagtggtgttcaacatcggcaccgtggacatcagcatcaaggaggagaggacccctgtgaatgatggcaagtaccacgtggtgcgcttcaccagaaatggaggaaatgccaccctgcaggtggacaactggcctgtgaatgagcactaccccaccggccggcagctgaccatcttcaacacccaggcccagatcgccatcggcggcaaggacaagggccgcctcttccagggccagctgagcggcctgtactatgatggcctgaaggtgctgaacatggctgctgagaacaaccccaacatcaagatcaatggatctgtgcggctggtgggggaggtgcccagcatcctgggcaccacccagaccacctccatgcctcctgagatgagcaccaccgtgatggagaccaccaccaccatggccaccaccaccaccaggaagaacagaagcacagccagcatccagcccaccagtgatgacctggtgagcagcgctgagtgcagcagtgatgatgaggactttgtggagtgtgagcccagcacagccaaccccacagagcccggcatccggcgggtgcctggggccagcgaggtgatccgggagagcagcagcaccaccggcatggtggtgggcatcgtggccgccgccgccctgtgcatcctgatcctgctgtatgccatgtacaagtacagaaacagagatgagggcagctaccaggtggatgagaccaggaactacatcagcaacagcgcccagagcaatggcaccctgatgaaggagaagcagcagagcagcaagagcggccacaagaagcagaagaacaaggaccgggagtactacgtgtag

SEQ ID NO: 161512 - DNA, 1380 bp, synthetic construct
  misc_feature 1..1380: note = Description of Artificial Sequence: Synthetic coding sequence
  source 1..1380: mol_type = other DNA
atgcacctgcgcatccacgcccggcgcagccccccaagaagacctgcctggaccctgggcatctggttcctgttctggggctgcatcgtgtcctctgtgtggagcagcagcaatgtggccagcagcagcagcaccagcagcagccctggcagccacagccagcacgagcaccacttccacggcagcaagcaccacagcgtgcccatcagcatctaccgcagccctgtgtccctgcggggcggccatgctggggccacctacatctttgggaagagcggcggcctcatcctgtacacctggccagccaatgaccggcccagcaccaggagtgaccggctggccgtgggcttcagcaccaccgtgaaggatggcatcctggtgagaattgattctgcccctggcctgggggacttcctgcagctgcacatcgagcagggcaagattggagtggtgttcaacatcggcaccgtggacatcagcatcaaggaggagaggacccctgtgaatgatggcaagtaccacgtggtgcgcttcaccagaaatggaggaaatgccaccctgcaggtggacaactggcctgtgaatgagcactaccccaccggcaacacagacaatgaacgcttccagatggtgaagcagaagatccccttcaagtacaacagacctgtggaggagtggctgcaggagaagggccggcagctgaccatcttcaacacccaggcccagatcgccatcggcggcaaggacaagggccgcctcttccagggccagctgagcggcctgtactatgatggcctgaaggtgctgaacatggctgctgagaacaaccccaacatcaagatcaatggatctgtgcggctggtgggggaggtgcccagcatcctgggcaccacccagaccacctccatgcctcctgagatgagcaccaccgtgatggagaccaccaccaccatggccaccaccaccaccaggaagaacagaagcacagccagcatccagcccaccagtgatgacctggtgagcagcgctgagtgcagcagtgatgatgaggactttgtggagtgtgagcccagcacagccaaccccacagagcccggcatccggcgggtgcctggggccagcgaggtgatccgggagagcagcagcaccaccggcatggtggtgggcatcgtggccgccgccgccctgtgcatcctgatcctgctgtatgccatgtacaagtacagaaacagagatgagggcagctaccaggtggatgagaccaggaactacatcagcaacagcgcccagagcaatggcaccctgatgaaggagaagcagcagagcagcaagagcggccacaagaagcagaagaacaaggaccgggagtactacgtgtag

SEQ ID NO: 161513 - DNA, 3186 bp, synthetic construct; identical to SEQ ID NO: 161511
  misc_feature 1..3186: note = Description of Artificial Sequence: Synthetic coding sequence
  source 1..3186: mol_type = other DNA

SEQ ID NO: 161514 - DNA, 1914 bp, synthetic construct
  misc_feature 1..1914: note = Description of Artificial Sequence: Synthetic coding sequence
  source 1..1914: mol_type = other DNA
atgcacctgcgcatccacgcccggcgcagccccccaagaagacctgcctggaccctgggcatctggttcctgttctggggctgcatcgtgtcctctgtgtggagcagcagcaatgtggccagcagcagcagcaccagcagcagccctggcagccacagccagcacgagcaccacttccacggcagcaagcaccacagcgtgcccatcagcatctaccgcagccctgtgtccctgcggggcggccatgctggggccacctacatctttgggaagagcggcggcctcatcctgtacacctggccagccaatgaccggcccagcaccaggagtgaccggctggccgtgggcttcagcaccaccgtgaaggatggcatcctggtgagaattgattctgcccctggcctgggggacttcctgcagctgcacatcgagcagggcaagattggagtggtgttcaacatcggcaccgtggacatcagcatcaaggaggagaggacccctgtgaatgatggcaagtaccacgtggtgcgcttcaccagaaatggaggaaatgccaccctgcaggtggacaactggcctgtgaatgagcactaccccaccggccggcagctgaccatcttcaacacccaggcccagatcgccatcggcggcaaggacaagggccgcctcttccagggccagctgagcggcctgtactatgatggcctgaaggtgctgaacatggctgctgagaacaaccccaacatcaagatcaatggatctgtgcggctggtgggggaggtgcccagcatcctgggcaccacccagaccacctccatgcctcctgagatgagcaccaccgtgatggagaccaccaccaccatggccaccaccaccaccaggaagaacagaagcacagccagcatccagcccaccagtgatgacctggtgagcagcgctgagtgcagcagtgatgatgaggactttgtggagtgtgagcccagcactggaggagagctggtgatccccctgctggtggaggaccccctggccaccccacccatcgccacccgggcccccagcatcaccctgccccccaccttccggcccctgctgaccatcatcgagaccaccaaggacagcctgtccatgaccagcgaggccggcctgccctgcctgagtgaccagggcagtgatggctgtgatgatgatggcctggtgatcagcggctacggcagcggggagacctttgacagcaacctgcccccaacagatgatgaggacttctacaccaccttcagcctggtgacagacaagagcctgagcaccagcatctttgaaggaggctacaaggcccacgcccccaagtgggagagcaaggacttccggcccaacaaggtgtctgagaccagcaggaccaccaccaccagcctgagccctgagctgatccgcttcaccgccagcagcagcagcggcatggtgcccaagctgcctgctgggaagatgaacaacagagacctgaagccccagcctgacatcgtgctgctgcccctgcccacagcctatgagctggacagcaccaagctgaagagccccctcatcaccagccccatgttcagaaatgtgcccacagccaaccccacagagcccggcatccggcgggtgcctggggccagcgaggtgatccgggagagcagcagcaccaccggcatggtggtgggcatcgtggccgccgccgccctgtgcatcctgatcctgctgtatgccatgtacaagtacagaaacagagatgagggcagctaccaggtggatgagaccaggaactacatcagcaacagcgcccagagcaatggcaccctgatgaaggagaagcagcagagcagcaagagcggccacaagaagcagaagaacaaggaccgggagtactacgtgtag

SEQ ID NO: 161515 - DNA, 429 bp, synthetic construct
  misc_feature 1..429: note = Description of Artificial Sequence: Synthetic coding sequence
  source 1..429: mol_type = other DNA
atgggcctgaagctgaatggccgctacatcagcctcatcctggccgtgcagatcgcctacctggtgcaggccgtgcgggccgccgggaaatgtgatgctgtgttcaagggcttcagtgactgcctgctgaagctgggggacagcatggccaactacccccagggcctggatgacaagaccaacatcaagacagtgtgcacctactgggaggacttccacagctgcaccgtgacagccctgacagactgccaggagggcgccaaggacatgtgggacaagctgaggaaggagagcaagaacctgaacatccagggcagcctgtttgagctgtgtggcagcggaaatggagctgctggcagcctgctgcctgccttccctgtgctgctggtgtccctgtctgctgccctggccacctggctgtccttctag

SEQ ID NO: 161516 - DNA, 8841 bp, synthetic construct
  misc_feature 1..8841: note = Description of Artificial Sequence: Synthetic coding sequence
  source 1..8841: mol_type = other DNA
atggccagcgagaagccaggccctggccctggcctggagccccagcctgtgggcctgattgctgtgggcgctgctgggggcggcggcggcggcagcggcggcggcggcactggaggcagcggcatgggagagctgcggggggccagcggcagcggctctgtgatgctgcctgctggcatgatcaaccccagcgtgcccatccggaacatccgcatgaagtttgctgtgctgattggcctcatccaggtgggggaggtgagcaacagagacatcgtggagaccgtgctgaacctgctggtgggcggggagtttgacctggagatgaacttcatcatccaggatgctgagagcatcacctgcatgacagagctgctggagcactgtgatgtgacctgccaggccgagatctggagcatgttcaccgccatcctgaggaagtctgtgaggaacctgcagaccagcacagaggtgggcctcatcgagcaggtgctgctgaagatgtctgctgtggatgacatgattgctgacctgctggtggacatgctgggcgtgctggccagctacagcatcaccgtgaaggagctgaagctgctcttctccatgctgcggggggagagcggcatctggcccaggcatgctgtgaagctgctgtctgtgctgaaccagatgccccagagacatggccctgacaccttcttcaacttccctggctgcagcgctgctgccatcgccctgccccccatcgccaagtggccctaccagaatggcttcaccctgaacacctggttcaggatggaccccctgaacaacatcaacgtggacaaggacaagccctacctgtactgcttccgcaccagcaaaggagtgggctacagcgcccactttgtgggcaactgcctgattgtgaccagcctgaagagcaagggcaagggcttccagcactgtgtgaagtatgacttccagcccaggaagtggtacatgatcagcatcgtgcacatctacaaccgctggaggaacagcgagatccgctgctacgtgaatggccagctggtgtcctatggagacatggcctggcacgtgaacaccaatgacagctatgacaagtgcttcctgggcagcagcgagacagcagatgccaacagagtcttctgtggccagctgggcgctgtgtatgtgttcagcgaggccctgaacccagcccagatctttgccatccaccagctgggccctggctacaagagcaccttcaagttcaagtctgagagtgacatccacctggccgagcaccacaagcaggtgctgtatgatggcaagctggccagcagcatcgccttcacctacaatgccaaggccacagatgcccagctgtgcctggagagcagccccaaggaaaatgccagcatctttgtgcacagcccccacgccctgatgctgcaggatgtgaaggccatcgtgacccacagcatccacagcgccatccacagcatcggcggcatccaggtgctcttccccctgtttgcccagctggacaaccggcagctgaatgacagccaggtggagaccaccgtgtgtgccaccctgctggccttcctggtggagctgctgaagagctctgtggccatgcaggagcagatgctgggcggcaagggcttcctggtgattggctacctgctggagaagagcagccgggtgcacatcaccagggctgtgctggagcagttcctgagctttgccaagtacctggatggcctgagccacggggcccccctgctgaagcagctgtgtgaccacatcctcttcaacccagccatctggatccacaccccagccaaggtgcagctgagcctgtacacctacctgtctgctgagttcatcggcacagccaccatctacaccaccatcagaagagtgggcaccgtgctgcagctgatgcacaccctgaagtactactactgggtgatcaacccagctgacagcagcggcatcacccccaagggcctggatggcccccggcccagccagaaggagatcatcagcctgcgggccttcatgctgctcttcctgaagcagctgatcctgaaggacagaggagtgaaggaggatgagctgcagagcatcctgaactacctgctgaccatgcatgaagatgagaacatccatgatgtgctgcagctgctggtggccctgatgtctgagcacccagcctccatgatcccagcctttgaccagagaaatggcatccgggtcatctacaagctgctggccagcaagtctgagagcatctgggtgcaggccctgaaggtgctgggctacttcctgaagcacctgggccacaagaggaaggtggagatcatgcacacccacagcctcttcaccctgctgggggagcggctgatgctgcacaccaacacagtgacagtgaccacctacaacaccctgtatgagatcctgacagagcaggtgtgcacccaggtggtgcacaagccccaccctgagccagacagcacagtgaagatccagaaccccatgatcctgaaggtggtggccaccctgctgaagaacagcacccccagcgctgagctgatggaggtgagaagactcttcctgagtgacatgatcaagctgttcagcaacagcagagaaaatcgccgctgcctgctgcagtgcagcgtgtggcaggactggatgttcagcctgggctacatcaaccccaagaacagcgaggagcagaagatcacagagatggtgtacaacatcttccgcatcctgctgtaccacgccatcaagtatgagtggggcggctggagggtgtgggtggacaccctgagcatcgcccacagcaaggtgacctatgaggcccacaaggagtacctggccaagatgtatgaggagtaccagaggcaggaggaggagaacatcaagaagggcaagaagggaaatgtgtccaccatcagcggcctgagcagccagaccaccggggccaagggcggcatggagatccgggagattgaggacctgagccagagccagagccctgagagcgagacagactaccctgtgtccacagacacccgggacctgctgatgagcaccaaggtgtctgatgacatcctgggcaacagcgaccggcccggcagcggcgtgcacgtggaggtgcatgacctgctggtggacatcaaggccgagaaggtggaggccacagaggtgaagctggatgacatggacctgagccctgagaccctggtgggcggagaaaatggagccctggtggaggtggagagcctgctggacaacgtgtacagcgctgctgtggagaagctgcagaacaacgtgcacggctctgtgggcatcatcaagaagaatgaggagaaggacaatggccccctcatcaccctggctgatgagaaggaggacctgcccaacagcagcaccagcttcctgtttgacaagatccccaagcaggaggagaagctgctgcctgagctgagcagcaaccacatcatccccaacatccaggacacccaggtgcacctgggcgtgtctgatgacctgggcctgctggcccacatgactggatctgtggacctgacctgcaccagcagcatcatcgaggagaaggagttcaagatccacaccaccagtgatggcatgagcagcatcagcgagcgggacctggccagcagcaccaagggcctggagtatgcagagatgacagccaccaccctggagacagagagcagcagcagcaagatcgtgcccaacattgatgctggcagcatcatcagtgacacagagaggagtgatgatggcaaggagagcggcaaggagatcaggaagatccagaccaccaccaccacccaggccgtgcagggccgcagcatcacccagcaggaccgggacctgcgggtggacctgggcttccggggcatgcccatgacagaggagcagaggcggcagttcagccctggccccaggaccaccatgttccgcatccctgagttcaagtggagccccatgcaccagaggctgctgacagacctgctgtttgccctggagacagatgtgcacgtgtggaggagccacagcaccaagtctgtgatggactttgtgaacagcaatgaaaacatcatctttgtgcacaacaccatccacctgatcagccagatggtggacaacatcatcatcgcctgtggcggcatcctgcccctgctgtctgctgccaccagccccaccgtgtccaagacagagctggagaacatcgaggtgacccagggcatgtctgctgagacagctgtgaccttcctgagccggctgatggccatggtggatgtgctggtgtttgccagcagcctgaacttcagcgagattgaggccgagaagaacatgagcagcggcggcctgatgaggcagtgcctgcggctggtgtgctgcgtggccgtgaggaactgcctggagtgccggcagaggcagagggaccggggcaacaagagcagccacggcagcagcaagccccaggaggtgccccagagcgtgacagccacagctgccagcaagacccccctggagaatgtgcccggcaacctgagccccatcaaggaccctgaccggctgctgcaggatgtggacatcaaccggctgcgggctgtggtgttcagagatgtggatgacagcaagcaggcccagttcctggccctggccgtggtgtacttcatctctgtgctgatggtgtccaagtacagagacatcctggagccccagcgggagaccaccaggacaggcagccagcccggcaggaacatccggcaggagatcaacagccccaccagcacagtggtggtgatccccagcatcccccaccccagcctgaaccacggcttcctggccaagctgatccctgagcagagctttggccacagcttctacaaggagaccccagctgccttcccagacaccatcaaggagaaggagacccccaccccaggagaggacatccaggtggagagcagcatcccccacacagattctggaattggagaggagcaggtggccagcatcctgaatggagctgagctggagaccagcactggaccagatgccatgtctgagctgctgagcaccctgagcagcgaggtgaagaagagccaggagagcctgacagagaaccccagcgagaccctgaagccagccaccagcatcagcagcatcagccagaccaagggcatcaacgtgaaggagatcctgaagagcctggtggccgcccctgtggagattgctgaatgtggccctgagcccatcccctacccagaccctgccctgaagcgggagacccaggccatcctgcccatgcagttccacagctttgacagatctgtggtggtgcctgtgaagaagcccccacctggcagcctggccgtgaccaccgtgggcgccaccacagctggcagcggcctgcccaccggcagcaccagcaacatctttgctgccactggagccacccccaagtccatgatcaacaccaccggggctgtggacagcggcagcagcagcagcagcagcagcagcagctttgtgaatggagccaccagcaagaacctgcctgctgtgcagacagtggcccccatgcctgaggacagcgctgagaacatgagcatcacagccaagctggagcgggccctggagaaggtggcccccctgctgcgggagatctttgtggactttgcccccttcctgagcaggaccctgctgggcagccacggccaggagctgctgattgagggcctggtgtgcatgaagagcagcacctctgtggtggagctggtgatgctgctgtgcagccaggagtggcagaacagcatccagaagaatgccggcctggccttcatcgagctgatcaatgaaggccgcctgctgtgccacgccatgaaggaccacatcgtgcgggtggccaatgaagctgagttcatcctgaaccggcagagagcagaagatgtgcacaagcatgctgagtttgagagccagtgtgcccagtatgctgctgaccggcgggaggaggagaagatgtgtgaccacctgatctctgctgccaagcaccgggaccacgtgacagccaaccagctgaagcagaagatcctgaacatcctgaccaacaagcatggagcctggggcgctgtgagccacagccagctgcatgacttctggaggctggactactgggaggatgacctgcggaggagaagaagatttgtgagaaatgccttcggcagcacccatgctgaggccctgctgaaggccgccattgaatatggaacagaagaagatgtggtgaagagcaagaagaccttccgcagccaggccatcgtgaaccagaatgctgagacagagctgatgctggagggagatgatgatgctgtgtccctgctgcaggagaaggagattgacaacctggccggccctgtggtgctgagcaccccagcccagctgattgcccctgtggtggtggccaagggcaccctgagcatcaccaccacagagatctactttgaggtggatgaagatgattctgccttcaagaagattgacaccaaggtgctggcctacacagagggcctgcacggcaagtggatgttcagcgagatccgggctgtgttcagccgccgctacctgctgcagaacacagccctggaggtgttcatggccaacagaacatctgtgatgttcaacttcccagaccaggccaccgtgaagaaggtggtgtacagcctgccccgggtgggcgtgggcaccagctatggcctgccccaggcccggcgcatcagcctggccaccccccggcagctgtacaagagcagcaacatgacccagcgctggcagaggcgggagatcagcaactttgagtacctgatgttcctgaacaccatcgccggccgcacctacaatgacctgaaccagtaccctgtgttcccctgggtgctgaccaactatgaaagtgaggagctggacctgaccctgcccggcaacttccgggacctgagcaagcccatcggggccctgaaccccaagagagctgtgttctatgcagagagatatgagacctgggaggatgaccagagccccccctaccactacaacacccactacagcacagccaccagcaccctgtcctggctggtgcgcatcgagcccttcaccaccttcttcctgaatgccaatgatggcaagtttgaccacccagacaggaccttcagctctgtggcccgctcctggaggaccagccagagggacaccagtgatgtgaaggagctgatccctgagttctactacctgcctgagatgtttgtgaacagcaatggctacaacctgggcgtgagagaagatgaggtggtggtgaatgatgtggacctgcccccctgggccaagaagccagaagattttgtgcgcatcaacaggatggccctggagagcgagtttgtgtcctgccagctgcaccagtggattgacctgatcttcggctacaagcagaggggccctgaggccgtgcgggccctgaatgtgttccactacctgacctatgagggctctgtgaacctggacagcatcacagatcctgtgctgcgggaggccatggaggcccagatccagaactttggccagacccccagccagctgctgattgagccccaccccccaagaagcagcgccatgcacctgtgcttcctgccccagagccccctgatgttcaaggaccagatgcagcaggacgtcatcatggtgctgaagttccccagcaacagccctgtgacccacgtggccgccaacaccctgccccacctgaccatcccagctgtggtgacagtgacctgcagccggctgtttgctgtgaaccgctggcacaacacagtgggcctgcggggggcccctggctacagcctggaccaggcccaccacctgcccatcgagatggaccccctgattgccaacaacagcggcgtgaacaagaggcagatcacagacctggtggaccagagcatccagatcaatgcccactgctttgtggtgacagctgacaaccgctacatcctgatctgtggcttctgggacaagagcttccgggtgtacagcacagaaacaggcaagctgacccagatcgtgtttggccactgggatgtggtgacctgcctggcccggtctgagagctacatcggcggggactgctacatcgtgtctggcagcagagatgccaccctgctgctgtggtactggagcggccgccaccacatcatcggggacaaccccaacagcagtgactacccagcccccagggctgtgctgactggacatgaccacgaggtggtgtgtgtgtctgtgtgtgccgagctgggcctggtgatcagcggggccaaggagggcccctgcctggtgcacaccatcaccggggacctgctgcgggccctggagggccctgagaactgcctcttccccaggctcatctctgtgtcctctgagggccactgcatcatctactatgagcggggccgcttcagcaacttcagcatcaacgggaagctgctggcccagatggagatcaatgacagcacccgggccatcctgctgagcagtgatggccagaacctggtgactggaggagacaatggagtggtggaggtgtggcaggcctgtgacttcaagcagctgtacatctacccaggctgtgatgctggcatccgggccatggacctgagccatgaccagaggaccctcatcaccggcatggccagcggcagcatcgtggccttcaacatcgacttcaaccgctggcactatgagcaccagaaccgctactag

SEQ ID NO: 161517 - DNA, 1575 bp, synthetic construct
  misc_feature 1..1575: note = Description of Artificial Sequence: Synthetic coding sequence
  source 1..1575: mol_type = other DNA
atgtttgtgaacagcaatggctacaacctgggcgtgcgggaggatgaggtggtggtgaatgatgtggacctgcccccctgggccaagaagccagaggactttgtgcgcatcaacaggatggccctggagagcgagtttgtgtcctgccagctgcaccagtggattgacctgatcttcggctacaagcagaggggccctgaggccgtgcgggccctgaatgtgttccactacctgacctatgagggctctgtgaacctggacagcatcacagatcctgtgctgcgggagatccctgaggcctacttcatccgggacccccacaccttcctgctgaccaaggacttcatcaaggccatggaggcccagatccagaactttggccagacccccagccagctgctgattgagccccaccccccaagaagcagcgccatgcacctgtgcttcctgccccagagccccctgatgttcaaggaccagatgcagcaggacgtcatcatggtgctgaagttccccagcaacagccctgtgacccacgtggccgccaacaccctgccccacctgaccatcccagctgtggtgacagtgacctgcagccggctgtttgctgtgaaccgctggcacaacacagtgggcctgcggggggcccctggctacagcctggaccaggcccaccacctgcccatcgagatggaccccctgattgccaacaacagcggcgtgaacaagaggcagatcacagacctggtggaccagagcatccagatcaatgcccactgctttgtggtgacagctgacaaccgctacatcctgatctgtggcttctgggacaagagcttccgggtgtacagcacagaaacaggcaagctgacccagatcgtgtttggccactgggatgtggtgacctgcctggcccggtctgagagctacatcggcggggactgctacatcgtgtctggcagcagagatgccaccctgctgctgtggtactggagcggccgccaccacatcatcggggacaaccccaacagcagtgactacccagcccccagggctgtgctgactggacatgaccacgaggtggtgtgtgtgtctgtgtgtgccgagctgggcctggtgatcagcggggccaaggagggcccctgcctggtgcacaccatcaccggggacctgctgcgggccctggagggccctgagaactgcctcttccccaggctcatctctgtgtcctctgagggccactgcatcatctactatgagcggggccgcttcagcaacttcagcatcaacgggaagctgctggcccagatggagatcaatgacagcacccgggccatcctgctgagcagtgatggccagaacctggtgactggaggagacaatggagtggtggaggtgtggcaggcctgtgacttcaagcagctgtacatctacccaggctgtgatgctggcatccgggccatggacctgagccatgaccagaggaccctcatcaccggcatggccagcggcagcatcgtggccttcaacatcgacttcaaccgctggcactatgagcaccagaaccgctactag

SEQ ID NO: 161518 - DNA, 8832 bp, synthetic construct
  misc_feature 1..8832: note = Description of Artificial Sequence: Synthetic coding sequence
  source 1..8832: mol_type = other DNA
atggccagcgagaagccaggccctggccctggcctggagccccagcctgtgggcctgattgctgtgggcgctgctgggggcggcggcggcggcagcggcggcggcggcactggaggcagcggcatgggagagctgcggggggccagcggcagcggctctgtgatgctgcctgctggcatgatcaaccccagcgtgcccatccggaacatccgcatgaagtttgctgtgctgattggcctcatccaggtgggggaggtgagcaacagagacatcgtggagaccgtgctgaacctgctggtgggcggggagtttgacctggagatgaacttcatcatccaggatgctgagagcatcacctgcatgacagagctgctggagcactgtgatgtgacctgccaggccgagatctggagcatgttcaccgccatcctgaggaagtctgtgaggaacctgcagaccagcacagaggtgggcctcatcgagcaggtgctgctgaagatgtctgctgtggatgacatgattgctgacctgctggtggacatgctgggcgtgctggccagctacagcatcaccgtgaaggagctgaagctgctcttctccatgctgcggggggagagcggcatctggcccaggcatgctgtgaagctgctgtctgtgctgaaccagatgccccagagacatggccctgacaccttcttcaacttccctggctgcagcgctgctgccatcgccctgccccccatcgccaagtggccctaccagaatggcttcaccctgaacacctggttcaggatggaccccctgaacaacatcaacgtggacaaggacaagccctacctgtactgcttccgcaccagcaaaggagtgggctacagcgcccactttgtgggcaactgcctgattgtgaccagcctgaagagcaagggcaagggcttccagcactgtgtgaagtatgacttccagcccaggaagtggtacatgatcagcatcgtgcacatctacaaccgctggaggaacagcgagatccgctgctacgtgaatggccagctggtgtcctatggagacatggcctggcacgtgaacaccaatgacagctatgacaagtgcttcctgggcagcagcgagacagcagatgccaacagagtcttctgtggccagctgggcgctgtgtatgtgttcagcgaggccctgaacccagcccagatctttgccatccaccagctgggccctggctacaagagcaccttcaagttcaagtctgagagtgacatccacctggccgagcaccacaagcaggtgctgtatgatggcaagctggccagcagcatcgccttcacctacaatgccaaggccacagatgcccagctgtgcctggagagcagccccaaggaaaatgccagcatctttgtgcacagcccccacgccctgatgctgcaggatgtgaaggccatcgtgacccacagcatccacagcgccatccacagcatcggcggcatccaggtgctcttccccctgtttgcccagctggacaaccggcagctgaatgacagccaggtggagaccaccgtgtgtgccaccctgctggccttcctggtggagctgctgaagagctctgtggccatgcaggagcagatgctgggcggcaagggcttcctggtgattggctacctgctggagaagagcagccgggtgcacatcaccagggctgtgctggagcagttcctgagctttgccaagtacctggatggcctgagccacggggcccccctgctgaagcagctgtgtgaccacatcctcttcaacccagccatctggatccacaccccagccaaggtgcagctgagcctgtacacctacctgtctgctgagttcatcggcacagccaccatctacaccaccatcagaagagtgggcaccgtgctgcagctgatgcacaccctgaagtactactactgggtgatcaacccagctgacagcagcggcatcacccccaagggcctggatggcccccggcccagccagaaggagatcatcagcctgcgggccttcatgctgctcttcctgaagcagctgatcctgaaggacagaggagtgaaggaggatgagctgcagagcatcctgaactacctgctgaccatgcatgaagatgagaacatccatgatgtgctgcagctgctggtggccctgatgtctgagcacccagcctccatgatcccagcctttgaccagagaaatggcatccgggtcatctacaagctgctggccagcaagtctgagagcatctgggtgcaggccctgaaggtgctgggctacttcctgaagcacctgggccacaagaggaaggtggagatcatgcacacccacagcctcttcaccctgctgggggagcggctgatgctgcacaccaacacagtgacagtgaccacctacaacaccctgtatgagatcctgacagagcaggtgtgcacccaggtggtgcacaagccccaccctgagccagacagcacagtgaagatccagaaccccatgatcctgaaggtggtggccaccctgctgaagaacagcacccccagcgctgagctgatggaggtgagaagactcttcctgagtgacatgatcaagctgttcagcaacagcagagaaaatcgccgctgcctgctgcagtgcagcgtgtggcaggactggatgttcagcctgggctacatcaaccccaagaacagcgaggagcagaagatcacagagatggtgtacaacatcttccgcatcctgctgtaccacgccatcaagtatgagtggggcggctggagggtgtgggtggacaccctgagcatcgcccacagcaaggtgacctatgaggcccacaaggagtacctggccaagatgtatgaggagtaccagaggcaggaggaggagaacatcaagaagggcaagaagggaaatgtgtccaccatcagcggcctgagcagccagaccaccggggccaagggcggcatggagatccgggagattgaggacctgagccagagccagagccctgagagcgagacagactaccctgtgtccacagacacccgggacctgctgatgagcaccaaggtgtctgatgacatcctgggcaacagcgaccggcccggcagcggcgtgcacgtggaggtgcatgacctgctggtggacatcaaggccgagaaggtggaggccacagaggtgaagctggatgacatggacctgagccctgagaccctggtgggcggagaaaatggagccctggtggaggtggagagcctgctggacaacgtgtacagcgctgctgtggagaagctgcagaacaacgtgcacggctctgtgggcatcatcaagaagaatgaggagaaggacaatggccccctcatcaccctggctgatgagaaggaggacctgcccaacagcagcaccagcttcctgtttgacaagatccccaagcaggaggagaagctgctgcctgagctgagcagcaaccacatcatccccaacatccaggacacccaggtgcacctgggcgtgtctgatgacctgggcctgctggcccacatgactggatctgtggacctgacctgcaccagcagcatcatcgaggagaaggagttcaagatccacaccaccagtgatggcatgagcagcatcagcgagcgggacctggccagcagcaccaagggcctggagtatgcagagatgacagccaccaccctggagacagagagcagcagcagcaagatcgtgcccaacattgatgctggcagcatcatcagtgacacagagaggagtgatgatggcaaggagagcggcaaggagatcaggaagatccagaccaccaccaccacccaggccgtgcagggccgcagcatcacccagcaggaccgggacctgcgggtggacctgggcttccggggcatgcccatgacagaggagcagaggcggcagttcagccctggccccaggaccaccatgttccgcatccctgagttcaagtggagccccatgcaccagaggctgctgacagacctgctgtttgccctggagacagatgtgcacgtgtggaggagccacagcaccaagtctgtgatggactttgtgaacagcaatgaaaacatcatctttgtgcacaacaccatccacctgatcagccagatggtggacaacatcatcatcgcctgtggcggcatcctgcccctgctgtctgctgccaccagccccaccacagagctggagaacatcgaggtgacccagggcatgtctgctgagacagctgtgaccttcctgagccggctgatggccatggtggatgtgctggtgtttgccagcagcctgaacttcagcgagattgaagctgagaagaacatgagcagcggcggcctgatgaggcagtgcctgcggctggtgtgctgcgtggccgtgaggaactgcctggagtgccggcagaggcagagggaccggggcaacaagagcagccacggcagcagcaagccccaggaggtgccccagagcgtgacagccacagctgccagcaagacccccctggagaatgtgcccggcaacctgagccccatcaaggaccctgaccggctgctgcaggatgtggacatcaaccggctgcgggctgtggtgttcagagatgtggatgacagcaagcaggcccagttcctggccctggccgtggtgtacttcatctctgtgctgatggtgtccaagtacagagacatcctggagccccagcgggagaccaccaggacaggcagccagcctggaagaaacatccggcaggagatcaacagccccaccagcacagtggtggtgatccccagcatcccccaccccagcctgaaccacggcttcctggccaagctgatccctgagcagagctttggccacagcttctacaaggagaccccagctgccttcccagacaccatcaaggagaaggagacccccaccccaggagaggacatccaggtggagagcagcatcccccacacagacagcggcatcggggaggagcaggtggccagcatcctgaatggagctgagctggagaccagcacaggcccagatgccatgtctgagctgctgagcaccctgagcagcgaggtgaagaagagccaggagagcctgacagagaaccccagcgagaccctgaagccagccaccagcatcagcagcatcagccagaccaagggcatcaacgtgaaggagatcctgaagagcctggtggccgcccctgtggagattgctgaatgtggccctgagcccatcccctacccagaccctgccctgaagcgggagacccaggccatcctgcccatgcagttccacagctttgacagatctgtggtggtgcctgtgaagaagcccccacctggcagcctggccgtgaccaccgtgggcgccaccacagctggcagcggcctgcccaccggcagcaccagcaacatctttgctgccaccggggccacccccaagtccatgatcaacaccactggagctgtggacagcggcagcagcagcagcagcagcagcagcagctttgtgaatggagccaccagcaagaacctgcctgctgtgcagacagtggcccccatgccagaagattctgctgagaacatgagcatcacagccaagctggagcgggccctggagaaggtggcccccctgctgcgggagatctttgtggactttgcccccttcctgagcaggaccctgctgggcagccacggccaggagctgctgattgagggcctggtgtgcatgaagagcagcacctctgtggtggagctggtgatgctgctgtgcagccaggagtggcagaacagcatccagaagaatgccggcctggccttcatcgagctgatcaatgaaggccgcctgctgtgccacgccatgaaggaccacatcgtgcgggtggccaatgaggccgagttcatcctgaaccggcagagagcagaagatgtgcacaagcacgccgagtttgagagccagtgtgcccagtatgctgctgacagaagagaggaggagaagatgtgtgaccacctgatctctgctgccaagcaccgggaccacgtgacagccaaccagctgaagcagaagatcctgaacatcctgaccaacaagcacggggcctggggcgctgtgagccacagccagctgcatgacttctggaggctggactactgggaggatgacctgcggaggagaagaagatttgtgagaaatgccttcggcagcacccacgccgaggccctgctgaaggccgccatcgagtatggaacagaggaggatgtggtgaagagcaagaagaccttccgcagccaggccatcgtgaaccagaatgctgagacagagctgatgctggagggagatgatgatgctgtgtccctgctgcaggagaaggagattgacaacctggccggccctgtggtgctgagcaccccagcccagctgattgcccctgtggtggtggccaagggcaccctgagcatcaccaccacagagatctactttgaggtggatgaagatgacagcgccttcaagaagattgacaccaaggtgctggcctacacagagggcctgcacggcaagtggatgttttctgagatccgggctgtgttcagccgccgctacctgctgcagaacacagccctggaggtgttcatggccaacagaacatctgtgatgttcaacttcccagaccaggccaccgtgaagaaggtggtgtacagcctgccccgggtgggcgtgggcaccagctatggcctgccccaggcccggcgcatcagcctggccaccccccggcagctgtacaagagcagcaacatgacccagcgctggcagaggcgggagatcagcaactttgagtacctgatgttcctgaacaccatcgccggccgcacctacaatgacctgaaccagtaccctgtgttcccctgggtgctgaccaactatgagagcgaggagctggacctgaccctgcccggcaacttccgggacctgagcaagcccatcggggccctgaaccccaagagagctgtgttctacgccgagagatatgagacctgggaggatgaccagagccccccctaccactacaacacccactacagcacagccaccagcaccctgtcctggctggtgagaattgagcccttcaccaccttcttcctgaatgccaatgatggcaagtttgaccacccagacaggaccttcagctctgtggcccgctcctggaggaccagccagagggacaccagtgatgtgaaggagctgatccctgagttctactacctgcctgagatgtttgtgaacagcaatggctacaacctgggcgtgcgggaggatgaggtggtggtgaatgatgtggacctgcccccctgggccaagaagccagaggactttgtgcgcatcaacaggatggccctggagagcgagtttgtgtcctgccagctgcaccagtggattgacctgatcttcggctacaagcagaggggccctgaggccgtgcgggccctgaatgtgttccactacctgacctatgagggctctgtgaacctggacagcatcacagatcctgtgctgcgggaggccatggaggcccagatccagaactttggccagacccccagccagctgctgattgagccccacccccccaggagcagcgccatgcacctgtgcttcctgccccagagccccctgatgttcaaggaccagatgcagcaggatgtgatcatggtgctgaagttccccagcaacagccctgtgacccacgtggccgccaacaccctgccccacctgaccatcccagctgtggtgacagtgacctgcagccggctgtttgctgtgaaccgctggcacaacacagtgggcctgcggggggcccctggctacagcctggaccaggcccaccacctgcccatcgagatggaccccctcatcgccaacaacagcggcgtgaacaagaggcagatcacagacctggtggaccagagcatccagatcaatgcccactgctttgtggtgacagctgacaaccgctacatcctgatctgtggcttctgggacaagagcttccgggtgtacagcacagagaccgggaagctgacccagatcgtgtttggccactgggatgtggtgacctgcctggcccggtctgagagctacatcggcggggactgctacatcgtgtctggcagcagagatgccaccctgctgctgtggtactggagcggccgccaccacatcattggagacaaccccaacagcagtgactacccagcccccagggctgtgctgaccggccatgaccacgaggtggtgtgtgtgtctgtgtgtgccgagctgggcctggtgatcagcggggccaaggagggcccctgcctggtgcacaccatcactggagacctgctgcgggccctggagggccctgagaactgcctcttccccaggctcatctctgtgagcagcgagggccactgcatcatctactatgaaagaggccgcttcagcaacttcagcatcaatggcaagctgctggcccagatggagatcaatgacagcacccgggccatcctgctgagcagtgatggccagaacctggtgactggaggagacaacggggtggtggaggtgtggcaggcctgtgacttcaagcagctgtacatctacccaggctgtgatgctggcatccgggccatggacctgagccatgaccagaggaccctcatcaccggcatggccagcggcagcatcgtggccttcaacatcgacttcaaccgctggcactatgagcaccagaaccgctactag

SEQ ID NO: 161519 - DNA, 8841 bp, synthetic construct
  misc_feature 1..8841: note = Description of Artificial Sequence: Synthetic coding sequence
  source 1..8841: mol_type = other DNA
atggccagcgagaagccaggccctggccctggcctggagccccagcctgtgggcctgattgctgtgggcgctgctgggggcggcggcggcggcagcggcggcggcggcactggaggcagcggcatgggagagctgcggggggccagcggcagcggctctgtgatgctgcctgctggcatgatcaaccccagcgtgcccatccggaacatccgcatgaagtttgctgtgctgattggcctcatccaggtgggggaggtgagcaacagagacatcgtggagaccgtgctgaacctgctggtgggcggggagtttgacctggagatgaacttcatcatccaggatgctgagagcatcacctgcatgacagagctgctggagcactgtgatgtgacctgccaggccgagatctggagcatgttcaccgccatcctgaggaagtctgtgaggaacctgcagaccagcacagaggtgggcctcatcgagcaggtgctgctgaagatgtctgctgtggatgacatgattgctgacctgctggtggacatgctgggcgtgctggccagctacagcatcaccgtgaaggagctgaagctgctcttctccatgctgcggggggagagcggcatctggcccaggcatgctgtgaagctgctgtctgtgctgaaccagatgccccagagacatggccctgacaccttcttcaacttccctggctgcagcgctgctgccatcgccctgccccccatcgccaagtggccctaccagaatggcttcaccctgaacacctggttcaggatggaccccctgaacaacatcaacgtggacaaggacaagccctacctgtactgcttccgcaccagcaaaggagtgggctacagcgcccactttgtgggcaactgcctgattgtgaccagcctgaagagcaagggcaagggcttccagcactgtgtgaagtatgacttccagcccaggaagtggtacatgatcagcatcgtgcacatctacaaccgctggaggaacagcgagatccgctgctacgtgaatggccagctggtgtcctatggagacatggcctggcacgtgaacaccaatgacagctatgacaagtgcttcctgggcagcagcgagacagcagatgccaacagagtcttctgtggccagctgggcgctgtgtatgtgttcagcgaggccctgaacccagcccagatctttgccatccaccagctgggccctggctacaagagcaccttcaagttcaagtctgagagtgacatccacctggccgagcaccacaagcaggtgctgtatgatggcaagctggccagcagcatcgccttcacctacaatgccaaggccacagatgcccagctgtgcctggagagcagccccaaggaaaatgccagcatctttgtgcacagcccccacgccctgatgctgcaggatgtgaaggccatcgtgacccacagcatccacagcgccatccacagcatcggcggcatccaggtgctcttccccctgtttgcccagctggacaaccggcagctgaatgacagccaggtggagaccaccgtgtgtgccaccctgctggccttcctggtggagctgctgaagagctctgtggccatgcaggagcagatgctgggcggcaagggcttcctggtgattggctacctgctggagaagagcagccgggtgcacatcaccagggctgtgctggagcagttcctgagctttgccaagtacctggatggcctgagccacggggcccccctgctgaagcagctgtgtgaccacatcctcttcaacccagccatctggatccacaccccagccaaggtgcagctgagcctgtacacctacctgtctgctgagttcatcggcacagccaccatctacaccaccatcagaagagtgggcaccgtgctgcagctgatgcacaccctgaagtactactactgggtgatcaacccagctgacagcagcggcatcacccccaagggcctggatggcccccggcccagccagaaggagatcatcagcctgcgggccttcatgctgctcttcctgaagcagctgatcctgaaggacagaggagtgaaggaggatgagctgcagagcatcctgaactacctgctgaccatgcatgaagatgagaacatccatgatgtgctgcagctgctggtggccctgatgtctgagcacccagcctccatgatcccagcctttgaccagagaaatggcatccgggtcatctacaagctgctggccagcaagtctgagagcatctgggtgcaggccctgaaggtgctgggctacttcctgaagcacctgggccacaagaggaaggtggagatcatgcacacccacagcctcttcaccctgctgggggagcggctgatgctgcacaccaacacagtgacagtgaccacctacaacaccctgtatgagatcctgacagagcaggtgtgcacccaggtggtgcacaagccccaccctgagccagacagcacagtgaagatccagaaccccatgatcctgaaggtggtggccaccctgctgaagaacagcacccccagcgctgagctgatggaggtgagaagactcttcctgagtgacatgatcaagctgttcagcaacagcagagaaaatcgccgctgcctgctgcagtgcagcgtgtggcaggactggatgttcagcctgggctacatcaaccccaagaacagcgaggagcagaagatcacagagatggtgtacaacatcttccgcatcctgctgtaccacgccatcaagtatgagtggggcggctggagggtgtgggtggacaccctgagcatcgcccacagcaaggtgacctatgaggcccacaaggagtacctggccaagatgtatgaggagtaccagaggcaggaggaggagaacatcaagaagggcaagaagggaaatgtgtccaccatcagcggcctgagcagccagaccaccggggccaagggcggcatggagatccgggagattgaggacctgagccagagccagagccctgagagcgagacagactaccctgtgtccacagacacccgggacctgctgatgagcaccaaggtgtctgatgacatcctgggcaacagcgaccggcccggcagcggcgtgcacgtggaggtgcatgacctgctggtggacatcaaggccgagaaggtggaggccacagaggtgaagctggatgacatggacctgagccctgagaccctggtgggcggagaaaatggagccctggtggaggtggagagcctgctggacaacgtgtacagcgctgctgtggagaagctgcagaacaacgtgcacggctctgtgggcatcatcaagaagaatgaggagaaggacaatggccccctcatcaccctggctgatgagaaggaggacctgcccaacagcagcaccagcttcctgtttgacaagatccccaagcaggaggagaagctgctgcctgagctgagcagcaaccacatcatccccaacatccaggacacccaggtgcacctgggcgtgtctgatgacctgggcctgctggcccacatgactggatctgtggacctgacctgcaccagcagcatcatcgaggagaaggagttcaagatccacaccaccagtgatggcatgagcagcatcagcgagcgggacctggccagcagcaccaagggcctggagtatgcagagatgacagccaccaccctggagacagagagcagcagcagcaagatcgtgcccaacattgatgctggcagcatcatcagtgacacagagaggagtgatgatggcaaggagagcggcaaggagatcaggaagatccagaccaccaccaccacccaggccgtgcagggccgcagcatcacccagcaggaccgggacctgcgggtggacctgggcttccggggcatgcccatgacagaggagcagaggcggcagttcagccctggccccaggaccaccatgttccgcatccctgagttcaagtggagccccatgcaccagaggctgctgacagacctgctgtttgccctggagacagatgtgcacgtgtggaggagccacagcaccaagtctgtgatggactttgtgaacagcaatgaaaacatcatctttgtgcacaacaccatccacctgatcagccagatggtggacaacatcatcatcgcctgtggcggcatcctgcccctgctgtctgctgccaccagccccaccggcagcaagacagagctggagaacatcgaggtgacccagggcatgtctgctgagacagctgtgaccttcctgagccggctgatggccatggtggatgtgctggtgtttgccagcagcctgaacttcagcgagattgaggccgagaagaacatgagcagcggcggcctgatgaggcagtgcctgcggctggtgtgctgcgtggccgtgaggaactgcctggagtgccggcagaggcagagggaccggggcaacaagagcagccacggcagcagcaagccccaggaggtgccccagagcgtgacagccacagctgccagcaagacccccctggagaatgtgcccggcaacctgagccccatcaaggaccctgaccggctgctgcaggatgtggacatcaaccggctgcgggctgtggtgttcagagatgtggatgacagcaagcaggcccagttcctggccctggccgtggtgtacttcatctctgtgctgatggtgtccaagtacagagacatcctggagccccagcgggagaccaccaggacaggcagccagcccggcaggaacatccggcaggagatcaacagccccaccagcacagtggtggtgatccccagcatcccccaccccagcctgaaccacggcttcctggccaagctgatccctgagcagagctttggccacagcttctacaaggagaccccagctgccttcccagacaccatcaaggagaaggagacccccaccccaggagaggacatccaggtggagagcagcatcccccacacagattctggaattggagaggagcaggtggccagcatcctgaatggagctgagctggagaccagcactggaccagatgccatgtctgagctgctgagcaccctgagcagcgaggtgaagaagagccaggagagcctgacagagaaccccagcgagaccctgaagccagccaccagcatcagcagcatcagccagaccaagggcatcaacgtgaaggagatcctgaagagcctggtggccgcccctgtggagattgctgaatgtggccctgagcccatcccctacccagaccctgccctgaagcgggagacccaggccatcctgcccatgcagttccacagctttgacagatctgtggtggtgcctgtgaagaagcccccacctggcagcctggccgtgaccaccgtgggcgccaccacagctggcagcggcctgcccaccggcagcaccagcaacatctttgctgccactggagccacccccaagtccatgatcaacaccaccggggctgtggacagcggcagcagcagcagcagcagcagcagcagctttgtgaatggagccaccagcaagaacctgcctgctgtgcagacagtggcccccatgcctgaggacagcgctgagaacatgagcatcacagccaagctggagcgggccctggagaaggtggcccccctgctgcgggagatctttgtggactttgcccccttcctgagcaggaccctgctgggcagccacggccaggagctgctgattgagggcctggtgtgcatgaagagcagcacctctgtggtggagctggtgatgctgctgtgcagccaggagtggcagaacagcatccagaagaatgccggcctggccttcatcgagctgatcaatgaaggccgcctgctgtgccacgccatgaaggaccacatcgtgcgggtggccaatgaagctgagttcatcctgaaccggcagagagcagaagatgtgcacaagcatgctgagtttgagagccagtgtgcccagtatgctgctgaccggcgggaggaggagaagatgtgtgaccacctgatctctgctgccaagcaccgggaccacgtgacagccaaccagctgaagcagaagatcctgaacatcctgaccaacaagcatggagcctggggcgctgtgagccacagccagctgcatgacttctggaggctggactactgggaggatgacctgcggaggagaagaagatttgtgagaaatgccttcggcagcacccatgctgaggccctgctgaaggccgccattgaatatggaacagaagaagatgtggtgaagagcaagaagaccttccgcagccaggccatcgtgaaccagaatgctgagacagagctgatgctggagggagatgatgatgctgtgtccctgctgcaggagaaggagattgacaacctggccggccctgtggtgctgagcaccccagcccagctgattgcccctgtggtggtggccaagggcaccctgagcatcaccaccacagagatctactttgaggtggatgaagatgattctgccttcaagaagattgacaccaaggtgctggcctacacagagggcctgcacggcaagtggatgttcagcgagatccgggctgtgttcagccgccgctacctgctgcagaacacagccctggaggtgttcatggccaacagaacatctgtgatgttcaacttcccagaccaggccaccgtgaagaaggtggtgtacagcctgccccgggtgggcgtgggcaccagctatggcctgccccaggcccggcgcatcagcctggccaccccccggcagctgtacaagagcagcaacatgacccagcgctggcagaggcgggagatcagcaactttgagtacctgatgttcctgaacaccatcgccggccgcacctacaatgacctgaaccagtaccctgtgttcccctgggtgctgaccaactatgaaagtgaggagctggacctgaccctgcccggcaacttccgggacctgagcaagcccatcggggccctgaaccccaagagagctgtgttctatgcagagagatatgagacctgggaggatgaccagagccccccctaccactacaacacccactacagcacagccaccagcaccctgtcctggctggtgcgcatcgagcccttcaccaccttcttcctgaatgccaatgatggcaagtttgaccacccagacaggaccttcagctctgtggcccgctcctggaggaccagccagagggacaccagtgatgtgaaggagctgatccctgagttctactacctgcctgagatgtttgtgaacagcaatggctacaacctgggcgtgagagaagatgaggtggtggtgaatgatgtggacctgcccccctgggccaagaagccagaagattttgtgcgcatcaacaggatggccctggagagcgagtttgtgtcctgccagctgcaccagtggattgacctgatcttcggctacaagcagaggggccctgaggccgtgcgggccctgaatgtgttccactacctgacctatgagggctctgtgaacctggacagcatcacagatcctgtgctgcgggaggccatggaggcccagatccagaactttggccagacccccagccagctgctgattgagccccaccccccaagaagcagcgccatgcacctgtgcttcctgccccagagccccctgatgttcaaggaccagatgcagcaggacgtcatcatggtgctgaagttccccagcaacagccctgtgacccacgtggccgccaacaccctgccccacctgaccatcccagctgtggtgacagtgacctgcagccggctgtttgctgtgaaccgctggcacaacacagtgggcctgcggggggcccctggctacagcctggaccaggcccaccacctgcccatcgagatggaccccctgattgccaacaacagcggcgtgaacaagaggcagatcacagacctggtggaccagagcatccagatcaatgcccactgctttgtggtgacagctgacaaccgctacatcctgatctgtggcttctgggacaagagcttccgggtgtacagcacagaaacaggcaagctgacccagatcgtgtttggccactgggatgtggtgacctgcctggcccggtctgagagctacatcggcggggactgctacatcgtgtctggcagcagagatgccaccctgctgctgtggtactggagcggccgccaccacatcatcggggacaaccccaacagcagtgactacccagcccccagggctgtgctgactggacatgaccacgaggtggtgtgtgtgtctgtgtgtgccgagctgggcctggtgatcagcggggccaaggagggcccctgcctggtgcacaccatcaccggggacctgctgcgggccctggagggccctgagaactgcctcttccccaggctcatctctgtgtcctctgagggccactgcatcatctactatgagcggggccgcttcagcaacttcagcatcaacgggaagctgctggcccagatggagatcaatgacagcacccgggccatcctgctgagcagtgatggccagaacctggtgactggaggagacaatggagtggtggaggtgtggcaggcctgtgacttcaagcagctgtacatctacccaggctgtgatgctggcatccgggccatggacctgagccatgaccagaggaccctcatcaccggcatggccagcggcagcatcgtggccttcaacatcgacttcaaccgctggcactatgagcaccagaaccgctactag

SEQ ID NO: 161520 - DNA, 1575 bp, synthetic construct; identical to SEQ ID NO: 161517
  misc_feature 1..1575: note = Description of Artificial Sequence: Synthetic coding sequence
  source 1..1575: mol_type = other DNA

SEQ ID NO: 161521 - DNA, 4728 bp, synthetic construct
  misc_feature 1..4728: note = Description of Artificial Sequence: Synthetic coding sequence
  source 1..4728: mol_type = other DNA
atgcaccagaggctgctgacagacctgctgtttgccctggagacagatgtgcacgtgtggaggagccacagcaccaagtctgtgatggactttgtgaacagcaatgaaaacatcatctttgtgcacaacaccatccacctgatcagccagatggtggacaacatcatcatcgcctgtggcggcatcctgcccctgctgtctgctgccaccagccccaccacagagctggagaacatcgaggtgacccagggcatgtctgctgagacagctgtgaccttcctgagccggctgatggccatggtggatgtgctggtgtttgccagcagcctgaacttcagcgagattgaagctgagaagaacatgagcagcggcggcctgatgaggcagtgcctgcggctggtgtgctgcgtggccgtgaggaactgcctggagtgccggcagaggcagagggaccggggcaacaagagcagccacggcagcagcaagccccaggaggtgccccagagcgtgacagccacagctgccagcaagacccccctggagaatgtgcccggcaacctgagccccatcaaggaccctgaccggctgctgcaggatgtggacatcaaccggctgcgggctgtggtgttcagagatgtggatgacagcaagcaggcccagttcctggccctggccgtggtgtacttcatctctgtgctgatggtgtccaagtacagagacatcctggagccccagcgggagaccaccaggacaggcagccagcctggaagaaacatccggcaggagatcaacagccccaccagcacagagaccccagctgccttcccagacaccatcaaggagaaggagacccccaccccaggagaggacatccaggtggagagcagcatcccccacacagacagcggcatcggggaggagcaggtggccagcatcctgaatggagctgagctggagaccagcacaggcccagatgccatgtctgagctgctgagcaccctgagcagcgaggtgaagaagagccaggagagcctgacagagaaccccagcgagaccctgaagccagccaccagcatcagcagcatcagccagaccaagggcatcaacgtgaaggagatcctgaagagcctggtggccgcccctgtggagattgctgaatgtggccctgagcccatcccctacccagaccctgccctgaagcgggagacccaggccatcctgcccatgcagttccacagctttgacagatctgtggtggtgcctgtgaagaagcccccacctggcagcctggccgtgaccaccgtgggcgccaccacagctggcagcggcctgcccaccggcagcaccagcaacatctttgctgccaccggggccacccccaagtccatgatcaacaccactggagctgtggacagcggcagcagcagcagcagcagcagcagcagctttgtgaatggagccaccagcaagaacctgcctgctgtgcagacagtggcccccatgccagaagattctgctgagaacatgagcatcacagccaagctggagcgggccctggagaaggtggcccccctgctgcgggagatctttgtggactttgcccccttcctgagcaggaccctgctgggcagccacggccaggagctgctgattgagggcctggtgtgcatgaagagcagcacctctgtggtggagctggtgatgctgctgtgcagccaggagtggcagaacagcatccagaagaatgccggcctggccttcatcgagctgatcaatgaaggccgcctgctgtgccacgccatgaaggaccacatcgtgcgggtggccaatgaggccgagttcatcctgaaccggcagagagcagaagatgtgcacaagcacgccgagtttgagagccagtgtgcccagtatgctgctgacagaagagaggaggagaagatgtgtgaccacctgatctctgctgccaagcaccgggaccacgtgacagccaaccagctgaagcagaagatcctgaacatcctgaccaacaagcacggggcctggggcgctgtgagccacagccagctgcatgacttctggaggctggactactgggaggatgacctgcggaggagaagaagatttgtgagaaatgccttcggcagcacccacgccgaggccctgctgaaggccgccatcgagtatggaacagaggaggatgtggtgaagagcaagaagaccttccgcagccaggccatcgtgaaccagaatgctgagacagagctgatgctggagggagatgatgatgctgtgtccctgctgcaggagaaggagattgacaacctggccggccctgtggtgctgagcaccccagcccagctgattgcccctgtggtggtggccaagggcaccctgagcatcaccaccacagagatctactttgaggtggatgaagatgacagcgccttcaagaagattgacaccaaggtgctggcctacacagagggcctgcacggcaagtggatgttttctgagatccgggctgtgttcagccgccgctacctgctgcagaacacagccctggaggtgttcatggccaacagaacatctgtgatgttcaacttcccagaccaggccaccgtgaagaaggtggtgtacagcctgccccgggtgggcgtgggcaccagctatggcctgccccaggcccggcgcatcagcctggccaccccccggcagctgtacaagagcagcaacatgacccagcgctggcagaggcgggagatcagcaactttgagtacctgatgttcctgaacaccatcgccggccgcacctacaatgacctgaaccagtaccctgtgttcccctgggtgctgaccaactatgagagcgaggagctggacctgaccctgcccggcaacttccgggacctgagcaagcccatcggggccctgaaccccaagagagctgtgttctacgccgagagatatgagacctgggaggatgaccagagccccccctaccactacaacacccactacagcacagccaccagcaccctgtcctggctggtgagaattgagcccttcaccaccttcttcctgaatgccaatgatggcaagtttgaccacccagacaggaccttcagctctgtggcccgctcctggaggaccagccagagggacaccagtgatgtgaaggagctgatccctgagttctactacctgcctgagatgtttgtgaacagcaatggctacaacctgggcgtgcgggaggatgaggtggtggtgaatgatgtggacctgcccccctgggccaagaagccagaggactttgtgcgcatcaacaggatggccctggagagcgagtttgtgtcctgccagctgcaccagtggattgacctgatcttcggctacaagcagaggggccctgaggccgtgcgggccctgaatgtgttccactacctgacctatgagggctctgtgaacctggacagcatcacagatcctgtgctgcgggaggccatggaggcccagatccagaactttggccagacccccagccagctgctgattgagccccacccccccaggagcagcgccatgcacctgtgcttcctgccccagagccccctgatgttcaaggaccagatgcagcaggatgtgatcatggtgctgaagttccccagcaacagccctgtgacccacgtggccgccaacaccctgccccacctgaccatcccagctgtggtgacagtgacctgcagccggctgtttgctgtgaaccgctggcacaacacagtgggcctgcggggggcccctggctacagcctggaccaggcccaccacctgcccatcgagatggaccccctcatcgccaacaacagcggcgtgaacaagaggcagatcacagacctggtggaccagagcatccagatcaatgcccactgctttgtggtgacagctgacaaccgctacatcctgatctgtggcttctgggacaagagcttccgggtgtacagcacagagaccgggaagctgacccagatcgtgtttggccactgggatgtggtgacctgcctggcccggtctgagagctacatcggcggggactgctacatcgtgtctggcagcagagatgccaccctgctgctgtggtactggagcggccgccaccacatcattggagacaaccccaacagcagtgaatgtgactacccagcccccagggctgtgctgaccggccatgaccacgaggtggtgtgtgtgtctgtgtgtgccgagctgggcctggtgatcagcggggccaaggagggcccctgcctggtgcacaccatcactggagacctgctgcgggccctggagggccctgagaactgcctcttccccaggctcatctctgtgagcagcgagggccactgcatcatctactatgaaagaggccgcttcagcaacttcagcatcaatggcaagctgctggcccagatggagatcaatgacagcacccgggccatcctgctgagcagtgatggccagaacctggtgactggaggagacaacggggtggtggaggtgtggcaggcctgtgacttcaagcagctgtacatctacccaggctgtgatgctggcatccgggccatggacctgagccatgaccagaggaccctcatcaccggcatggccagcggcagcatcgtggccttcaacatcgacttcaaccgctggcactatgagcaccagaaccgctactag

SEQ ID NO: 161522 - DNA, 2220 bp, synthetic construct
  misc_feature 1..2220: note = Description of Artificial Sequence: Synthetic coding sequence
  source 1..2220: mol_type = other DNA
atgttttctgagatccgggctgtgttcagccgccgctacctgctgcagaacacagccctggaggtgttcatggccaacagaacatctgtgatgttcaacttcccagaccaggccaccgtgaagaaggtggtgtacagcctgccccgggtgggcgtgggcaccagctatggcctgccccaggcccggcgcatcagcctggccaccccccggcagctgtacaagagcagcaacatgacccagcgctggcagaggcgggagatcagcaactttgagtacctgatgttcctgaacaccatcgccggccgcacctacaatgacctgaaccagtaccctgtgttcccctgggtgctgaccaactatgagagcgaggagctggacctgaccctgcccggcaacttccgggacctgagcaagcccatcggggccctgaaccccaagagagctgtgttctacgccgagagatatgagacctgggaggatgaccagagccccccctaccactacaacacccactacagcacagccaccagcaccctgtcctggctggtgagaattgagcccttcaccaccttcttcctgaatgccaatgatggcaagtttgaccacccagacaggaccttcagctctgtggcccgctcctggaggaccagccagagggacaccagtgatgtgaaggagctgatccctgagttctactacctgcctgagatgtttgtgaacagcaatggctacaacctgggcgtgcgggaggatgaggtggtggtgaatgatgtggacctgcccccctgggccaagaagccagaggactttgtgcgcatcaacaggatggccctggagagcgagtttgtgtcctgccagctgcaccagtggattgacctgatcttcggctacaagcagaggggccctgaggccgtgcgggccctgaatgtgttccactacctgacctatgagggctctgtgaacctggacagcatcacagatcctgtgctgcgggaggccatggaggcccagatccagaactttggccagacccccagccagctgctgattgagccccacccccccaggagcagcgccatgcacctgtgcttcctgccccagagccccctgatgttcaaggaccagatgcagcaggatgtgatcatggtgctgaagttccccagcaacagccctgtgacccacgtggccgccaacaccctgccccacctgaccatcccagctgtggtgacagtgacctgcagccggctgtttgctgtgaaccgctggcacaacacagtgggcctgcggggggcccctggctacagcctggaccaggcccaccacctgcccatcgagatggaccccctcatcgccaacaacagcggcgtgaacaagaggcagatcacagacctggtggaccagagcatccagatcaatgcccactgctttgtggtgacagctgacaaccgctacatcctgatctgtggcttctgggacaagagcttccgggtgtacagcacagagaccgggaagctgacccagatcgtgtttggccactgggatgtggtgacctgcctggcccggtctgagagctacatcggcggggactgctacatcgtgtctggcagcagagatgccaccctgctgctgtggtactggagcggccgccaccacatcattggagacaaccccaacagcagtgactacccagcccccagggctgtgctgaccggccatgaccacgaggtggtgtgtgtgtctgtgtgtgccgagctgggcctggtgatcagcggggccaaggagggcccctgcctggtgcacaccatcactggagacctgctgcgggccctggagggccctgagaactgcctcttccccaggctcatctctgtgagcagcgagggccactgcatcatctactatgaaagaggccgcttcagcaacttcagcatcaatggcaagctgctggcccagatggagatcaatgacagcacccgggccatcctgctgagcagtgatggccagaacctggtgactggaggagacaacggggtggtggaggtgtggcaggcctgtgacttcaagcagctgtacatctacccaggctgtgatgctggcatccgggccatggacctgagccatgaccagaggaccctcatcaccggcatggccagcggcagcatcgtggccttcaacatcgacttcaaccgctggcactatgagcaccagaaccgctactag

SEQ ID NO: 161523 - DNA, 8841 bp, synthetic construct; identical to SEQ ID NO: 161516
  misc_feature 1..8841: note = Description of Artificial Sequence: Synthetic coding sequence
  source 1..8841: mol_type = other DNA

SEQ ID NO: 161524 - DNA, 834 bp, synthetic construct
  misc_feature 1..834: note = Description of Artificial Sequence: Synthetic coding sequence
  source 1..834: mol_type = other DNA
atgttttctgagatccgggctgtgttcagccgccgctacctgctgcagaacacagccctggaggtgttcatggccaacagaacatctgtgatgttcaacttcccagaccaggccaccgtgaagaaggtggtgtacagcctgccccgggtgggcgtgggcaccagctatggcctgccccaggcccggcgcatcagcctggccaccccccggcagctgtacaagagcagcaacatgacccagcgctggcagaggcgggagatcagcaactttgagtacctgatgttcctgaacaccatcgccggccgcacctacaatgacctgaaccagtaccctgtgttcccctgggtgctgaccaactatgagagcgaggagctggacctgaccctgcccggcaacttccgggacctgagcaagcccatcggggccctgaaccccaagagagctgtgttctacgccgagagatatgagacctgggaggatgaccagagccccccctaccactacaacacccactacagcacagccaccagcaccctgtcctggctggtgagaattgagcccttcaccaccttcttcctgaatgccaatgatggcaagtttgaccacccagacaggaccttcagctctgtggcccgctcctggaggaccagccagagggacaccagtgatgtgaaggagctgatccctgagttctactacctgcctgagatgtttgtgaacagcaatggctacaacctgggcgtgcgggaggatgaggtggtggtgaatgatgtggacctgcccccctgggccaagaacctgaagaccctgtgtggcagcacaggctggccctag

SEQ ID NO: 161525 - DNA, 7815 bp, synthetic construct
  misc_feature 1..7815: note = Description of Artificial Sequence: Synthetic coding sequence
  source 1..7815: mol_type = other DNA
atggccagccgggagcggctgtttgagctgtggatgctgtactgcaccaagaaggaccctgactacctgaagctgtggctggacacctttgtgtcctcctatgagcagttcctggatgtggactttgagaagctgcccaccagggtggatgacatgcctcctggcatcagcctgctgcctgacaacatcctgcaggtgctgcgcatccagctgctgcagtgtgtgcagaagatggctgatggcctggaggagcagcagcaggccctgagcatcctgctggtgaagttcttcatcatcctgtgcaggaacctgagcaatgtggaggagatcggcacctgcagctacatcaactacgtgatcaccatgaccaccctgtacatccagcagctgaagagcaagaagaaggagaaggagatggctgaccagacctgcatcgaggagtttgtgattcatgccctggccttctgtgagagcctgtatgacccctacagaaactggaggcaccgcatcagcggccgcatcctgagcacagtggagaagagccggcagaagtacaagccagccagcctgactgtggagtttgtgcccttcttctaccagtgcttccaggagagcgagcacctgaaggagagcctgaagtgctgcctgctgcacctgtttggagccatcgtggccggcggccagagaaatgccctgcaggccatcagccctgccaccatggaggtgctgatgagggtgctggccgactgtgacagctgggaggatggagaccctgaggaggtgggcaggaaggccgagctgaccctgaagtgcctgacagaggtggtgcacatcctgctgagcagcaacagcgaccagaggcaggtggagaccagcaccatcctggagaactacttcaagctgctgaacagcgaccacagcgccctgcccaaccagaggaggagccggcagtgggagaaccgcttcatcgccctgcagatcaagatgctgaacaccatcacagccatgctggactgcacagacaggcctgtgctgcaggccatcttcctgaacagcaactgctttgagcacctgatccggctgctgcagaactgcaaggtgttccagggccagctggactgcctggccatcagcaccatccaggccctgacagctgtgatgaacaagagccctgctgccaaggaggtgttcaaggagagaattggctacacccacatgctggaggtgctgaagagcctgggccagccccccctggagctgctgaaggagctgatgaacatggctgtggagggggaccacacctctgtgggcatcctgggcatcagcaatgtgcagcccctgctgctgctgatccagtggctgcctgagctgcagagccatgacctgcagatcttcatcagtgactggctgaagaggatctgctgcatcaaccggcagagcaggaccacctgtgtgaatgccaacatgggcatccgcatcatcgagaccctggacctgcacagcagcctgcaccagacctgtgctgaaaatctcatcgccatccacggcagcctgggcagccagagcgtgtcctctgaggagatccggcggctgctgcggctgctgcgggtggatgagagcgagagcgtgcacccctacgtgacccctgtgacccgggccatcctgaccatggccaggaagctgagcctggagagcgccctgcagtacttcaacctgagccacagcatggccggcatctctgtgccccccatccagaagtggccaggcagcgccttctccttcagcgcctggttctgcctggaccaggaccagctgaccctgggcatcgccaacaagggcggcaagaggaagcagctgtacagcttcttcaccggcagcggcatgggctttgaggccttcatcacccacagcggcatgctggtggtggccgtgtgcaccaagcgggagtatgccaccgtgatgctgcctgaccacagcttctgtgacagcctgtggcacaacatcaccgtggtgcacatgcctgggaagaggcccttcggccagagctttgtgtacatctatgacaatggccagcagaaggtgtctgcccccctgcgcttccctgccatgaatgagcccttcaccagctgctgcatcggcagcgctggccagaggaccaccaccccaccacccagccagatcccagacccccccttcagcagccccatcaccccccacaggaccagctttggaggcatcctgagcagcgcctcctggggcggcaccatcgagaagagcaagctgatcaccaagctgatctctgctggcacccaggacagcgagtggggctgccccaccagcctggagggccagctgggcagcgtcatcatcttctatgagcccctgcagcccccccaggtgaaggccctgtacctggccggccccaactgcctgagcccctggaagtgccaggagagtgacatggctgacctgcccggcaacatcctgctgtactacacagccaaggcctgcaagaacagcatctgcctggacctgagcaccaactgcctgcacggccgcctgactggaaacaaggtggtgaactgggacatcaaggacatcatcaactgcattggaggcctgaatgtgctcttccccctgctggagcagatcagccacttcagcgagggccagatccctgaggagaagaatgaaagcacagtgcctgagagcgtgacccctgtggagggggactggctggtgtggaccagcaccaaggccagcgagagccggctggagaggaacctggtggccaccttcatcctgattgtgaagcacttcatccagaggcaccccatcaaccagggcaacctgatccacagccatggagtggccaccctgggcgccctgctgcagaaggtgcccagcaccctgatggatgtgaatgtgctgatggctgtgcagctgctgattgagcaggtgtccctggagaagaacatgcagctgctgcagcagatgtaccagtacctgctgtttgacttccgcatctggaacagaggagacttccccttcagaattggccacatccagtacctgagcaccatcatcaaggacagcagaagagtcttcaggaagaagtatggagtgcagttcctgctggacaccctgcgcatctactatggaaatggctgcaagtacaatgagctgagcctggatgacatccgcaccatccgcaccagcctgtatggcctcatcaagtacttcctgtgcaagggcggcagccatgaggagatccagagcatcatgggctacatcgccgccaccaatgaggaggagcagctgtttggcatcctggatgtgctcttcagcctgctgcggaccagccccacccggggccagctgttcctgctgctgtttgagcctggaaatgctgacatcctgtatgccctgctgctgaaccagaagtacagcgaccggctgcgggagatcatcttcaagatcatggagcagatgctgaagtgcaccaacgtgtatgaaagaagcaagcagcacatccggctgcgggaggtgggctacagcggcctgggcctgctgctgaatgaggccctggtgaacaccagcctcatcaagaacctgacccaccagatcatcaacacagaccccgtcatcaacttcaaggacctgctgtctgtggtgtacatcagccaccgggcccacatcaacgtgcgggtggccatctgcaggaaggtgctgcagatcctgcagttccagccagatgctgcccaccagatcagccagcaggtgggctggcaggacaccctggtgcggctcttcctgaaggccaagtttgaaaatggaaacaccctgcacaagcacagcagagctgtgctgatgaaggacaatgacaagaacatgagcacagaggacaccaagaagaacagtgatgagaagacagatgaggagaagatcaccagctttgccagcgccaacgtgtccagtgaccagtggagcctggaggacagacacagcctggacagcaacacccccctcttccctgaggacagctctgtgggggagctgtccttcaagtctgagaaccaggaggagttctggcacagcaaccccagccacctgagcctggacctgagcggcatcgacagctgtgagatgtctgacagcggcagccaggtgcctgacagcctgcccagcacccccagccctgtggagagcaccaagagcttctctgtgcacagcgaccgggagagcagcatcaccaatgacatgggcttcagtgatgacttcagcctgctggagagccaggagcgctgtgaggaggagctgctgcagctgctgacccacatcctgaactacgtgatgtgcaagggcctggagaagagtgatgatgacacctggattgagcggggccaggtgttcagcgccctgagcaagccaggcatcagcagcgagctgctgcggcccagtgatgagatcaagctgaccctgctgcagaagatgctggagtgggccatcagtgaaaatcgggaggccaagaccaaccctgtgacagcagaaaatgccttccggctggtgctgatcatccaggacttcctgcagagcgagggcctggtgaacagcaacatgtggacagagaagctgctggaggacatgatgctgctgtttgactgcctgtctgtgtgctacagcgagagccctgtgtgggtgaagctgagccagatccagatccagctgctgctgggcttcatcggccggggcaacctgcaggtgtgtgccatggccagcgccaagctgaacaccctgctgcagaccaaggtgattgagaaccaggatgaggcctgctacatcctgggcaagctggagcacgtgctgagccagagcatcaaggagcagacagagatctacagcttcctgatccccctggtgaggaccctggtgtccaagatctatgagctgctcttcatgaacctgcacctgcccagcctgcccttcaccaacggcagcagcagcttctttgaggacttccaggagtactgcaacagcaatgagtggcaggtgtacatcgagaagtacatcgtgccctacatgaagcagtatgaggcccacaccttctatgatggccacgagaacatggccctgtactggaaggactgctatgaggccctgatggtgaacatgcacaagagggaccgggagggcggggagagcaagctgaagttccaggagctgtttgtggagcccttcaacaggaaggcccggcaggagaacctgcgctacaacaacatgctgaagcagctgagcagccagcagctggccaccctgcggcgctggaaggccatccagctgtacctgacctgtgagcggggcccctgggccaagaggaagcagaaccccatccactggaagctggccaacgtggagaactacagcaggatgaggctgaagctggtgcccaactacaacttcaagacccatgaggaggccagcgccctgcgggacaacctgggcatccagcacagccagcccagcagtgacaccctgctgctggaggtggtgaagcaggtgaaggtgtctgacatggtggaggacaagctggacctgcctgaggaggacatcacagcccgggtgaatgtggatgagaaggaggagcaggaccagaaggagaagctggtgctgatggaggactgtgagctgatcaccatcattgatgtgattcctggccgcctggagatcaccacccagcacatctacttctatgatggcagcattgagaaggaggatggagtgggctttgacttcaagtggccccacagccagatccgggagatccacctgcggcgctacaacctgcggcgcagcgccctggagatcttccacgtggaccagagcaactacttcctgaacttcaagaaggaggtgaggaacaagatctacagccggctgctgagcctgcacagccccaacagctactacggcagccgcagcccccaggagctgttcaaggccagcggcctgacccagaagtgggtgaaccgggagatcagcaactttgactacctgatccagatcaacaccatggccggccgcacctacaatgacctggcccagtaccctgtgttcccctggatcctgcaggactacaccagcgaggagctggacctgaacaacccagctgtgttccgggacctgagcaagcccatcggcgtggtgaatgagaagaatgccaaggccatgagggagaagtatgaaaattttgaggaccccatgggcaccatcgacaagttccactacggcacccactacagcaacagcgctggggtgatgcactacctgatccgggtggagcccttcaccaccctgcacatccagctgcagagcggccgctttgactgtgccgaccggcagttccacagcatcccagccacctggcaggccctgatggacaacccctatgatgtgaaggagctgatccctgagttcttctacttccctgagttcctggagaaccagaaccagttcaacctgggccgcctgcagatcagcaaggagctggtgaatgatgtgatcctgcccaagtgggccaagtctgctgaggacttcatctacaagcacaggaaggccctggagagtgaatatgtgtctgcccacctgcacgagtggattgacctgatcttcggctacaagcagaggggccctgctgctgtggaggccctgaatgtgttctactactgcagctatgagggcgctgtggacctggatgccctgacagatgagaaggagaggaaggccctggagggcatgatcaacaactttggccagaccccctgccagctgctgaagatcaccatctccatgaactacgtgattggcacccacggctggctgccctatgacaggaacatcagcaactacttcaccttcatcaaggaccagacagtgaccaaccccaagacccagaggagcatcaatggcagctttgcccctggcctggagatcaccagcaagctgtttgtggtgtcccatgatgccaagctgctcttctctgctggctactgggacaacagcatccaggtgatgagcctgaccaagggcaagatcatcagccacatcatccgccacatggacatcgtgacctgcctggccacagactactgcggcatccacctgatcagcggcagccgggacaccacctgcatgatctggcagatcacccagcagggcggcgtgcctgtgggcctggccagcaagcccttccagatcctgtatggccacaccaatgaggtgctgtctgtgggcatcagcacagagctggacatggctgtgtctggcagcagagatggcaccgtcatcatccacaccatccccaacctggccatctcctgggagggccacatcgtggtgtacagcagcacagaggagaagaccaccctgaaggacaagaatgccctgcacctgttcagcatcaatggcaagtacctgggcagccagatcctgaaggagcaggtgtctgacatctgcatcatcggggagcacatcgtgacaggcagcatccagggcttcctgagcatccgggacctgcacagcctgaacctgagcatcaaccccctggccatgaggctgcccatccactgtgtgtgtgtgaccaaggagtacagccacatcctggtgggcctggaggatggcaagctgattgtggtgggcgtgggcaagccagctgagatgaggagcggccagctgagcaggaagttctggggcagcagcaagaggctgagccagatctctgctggggagacagagtacaacacccaggacagcaagtag

SEQ ID NO: 161526 - DNA, 8085 bp, synthetic construct
  misc_feature 1..8085: note = Description of Artificial Sequence: Synthetic coding sequence
  source 1..8085: mol_type = other DNA
atggccagccgggagcggctgtttgagctgtggatgctgtactgcaccaagaaggaccctgactacctgaagctgtggctggacacctttgtgtcctcctatgagcagttcctggatgtggactttgagaagctgcccaccagggtggatgacatgcctcctggcatcagcctgctgcctgacaacatcctgcaggtgctgcgcatccagctgctgcagtgtgtgcagaagatggctgatggcctggaggagcagcagcaggccctgagcatcctgctggtgaagttcttcatcatcctgtgcaggaacctgagcaatgtggaggagatcggcacctgcagctacatcaactacgtgatcaccatgaccaccctgtacatccagcagctgaagagcaagaagaaggagaaggagatggctgaccagacctgcatcgaggagtttgtgattcatgccctggccttctgtgagagcctgtatgacccctacagaaactggaggcaccgcatcagcggccgcatcctgagcacagtggagaagagccggcagaagtacaagccagccagcctgactgtggagtttgtgcccttcttctaccagtgcttccaggagagcgagcacctgaaggagagcctgaagtgctgcctgctgcacctgtttggagccatcgtggccggcggccagagaaatgccctgcaggccatcagccctgccaccatggaggtgctgatgagggtgctggccgactgtgacagctgggaggatggagaccctgaggaggtgggcaggaaggccgagctgaccctgaagtgcctgacagaggtggtgcacatcctgctgagcagcaacagcgaccagaggcaggtggagaccagcaccatcctggagaactacttcaagctgctgaacagcgaccacagcgccctgcccaaccagaggaggagccggcagtgggagaaccgcttcatcgccctgcagatcaagatgctgaacaccatcacagccatgctggactgcacagacaggcctgtgctgcaggccatcttcctgaacagcaactgctttgagcacctgatccggctgctgcagaactgcaaggtgttccagggccagctggactgcctggccatcagcaccatccaggccctgacagctgtgatgaacaagagccctgctgccaaggaggtgttcaaggagagaattggctacacccacatgctggaggtgctgaagagcctgggccagccccccctggagctgctgaaggagctgatgaacatggctgtggagggggaccacacctctgtgggcatcctgggcatcagcaatgtgcagcccctgctgctgctgatccagtggctgcctgagctgcagagccatgacctgcagatcttcatcagtgactggctgaagaggatctgctgcatcaaccggcagagcaggaccacctgtgtgaatgccaacatgggcatccgcatcatcgagaccctggacctgcacagcagcctgcaccagacctgtgctgaaaatctcatcgccatccacggcagcctgggcagccagagcgtgtcctctgaggagatccggcggctgctgcggctgctgcgggtggatgagagcgagagcgtgcacccctacgtgacccctgtgacccgggccatcctgaccatggccaggaagctgagcctggagagcgccctgcagtacttcaacctgagccacagcatggccggcatctctgtgccccccatccagaagtggccaggcagcgccttctccttcagcgcctggttctgcctggaccaggaccagctgaccctgggcatcgccaacaagggcggcaagaggaagcagctgtacagcttcttcaccggcagcggcatgggctttgaggccttcatcacccacagcggcatgctggtggtggccgtgtgcaccaagcgggagtatgccaccgtgatgctgcctgaccacagcttctgtgacagcctgtggcacaacatcaccgtggtgcacatgcctgggaagaggcccttcggccagagctttgtgtacatctatgacaatggccagcagaaggtgtctgcccccctgcgcttccctgccatgaatgagcccttcaccagctgctgcatcggcagcgctggccagaggaccaccaccccaccacccagccagatcccagacccccccttcagcagccccatcaccccccacaggaccagctttggaggcatcctgagcagcgcctcctggggcggcaccatcgagaagagcaagctgatcaccaagctgatctctgctggcacccaggacagcgagtggggctgccccaccagcctggagggccagctgggcagcgtcatcatcttctatgagcccctgcagcccccccaggtgaaggccctgtacctggccggccccaactgcctgagcccctggaagtgccaggagagtgacatggctgacctgcccggcaacatcctgctgtactacacagccaaggcctgcaagaacagcatctgcctggacctgagcaccaactgcctgcacggccgcctgactggaaacaaggtggtgaactgggacatcaaggacatcatcaactgcattggaggcctgaatgtgctcttccccctgctggagcagatcagccacttcagcgagggccagatccctgaggagaagaatgaaagcacagtgcctgagagcgtgacccctgtggagggggactggctggtgtggaccagcaccaaggccagcgagagccggctggagaggaacctggtggccaccttcatcctgattgtgaagcacttcatccagaggcaccccatcaaccagggcaacctgatccacagccatggagtggccaccctgggcgccctgctgcagaaggtgcccagcaccctgatggatgtgaatgtgctgatggctgtgcagctgctgattgagcaggtgtccctggagaagaacatgcagctgctgcagcagatgtaccagtacctgctgtttgacttccgcatctggaacagaggagacttccccttcagaattggccacatccagtacctgagcaccatcatcaaggacagcagaagagtcttcaggaagaagtatggagtgcagttcctgctggacaccctgcgcatctactatggaaatggctgcaagtacaatgagctgagcctggatgacatccgcaccatccgcaccagcctgtatggcctcatcaagtacttcctgtgcaagggcggcagccatgaggagatccagagcatcatgggctacatcgccgccaccaatgaggaggagcagctgtttggcatcctggatgtgctcttcagcctgctgcggaccagccccacccggggccagctgttcctgctgctgtttgagcctggaaatgctgacatcctgtatgccctgctgctgaaccagaagtacagcgaccggctgcgggagatcatcttcaagatcatggagcagatgctgaagtgcaccaacgtgtatgaaagaagcaagcagcacatccggctgcgggaggtgggctacagcggcctgggcctgctgctgaatgaggccctggtgaacaccagcctcatcaagaacctgacccaccagatcatcaacacagaccccgtcatcaacttcaaggacctgctgtctgtggtgtacatcagccaccgggcccacatcaacgtgcgggtggccatctgcaggaaggtgctgcagatcctgcagttccagccagatgctgcccaccagatcagccagcaggtgggctggcaggacaccctggtgcggctcttcctgaaggccaagtttgaaaatggaaacaccctgcacaagcacagcagagctgtgctgatgaaggacaatgacaagaacatgagcacagaggacaccaagaagaacagtgatgagaagacagatgaggagaagatcaccagctttgccagcgccaacgtgtccagtgaccagtggagcctggaggacagacacagcctggacagcaacacccccctcttccctgaggacagctctgtgggggagctgtccttcaagtctgagaaccaggaggagttctggcacagcaaccccagccacctgagcctggacctgagcggcatcgacagctgtgagatgtctgacagcggcagccaggtgcctgacagcctgcccagcacccccagccctgtggagagcaccaagagcttctctgtgcacagcgaccgggagagcagcatcaccaatgacatgggcttcagtgatgacttcagcctgctggagagccaggagcgctgtgaggaggagctgctgcagctgctgacccacatcctgaactacgtgatgtgcaagggcctggagaagagtgatgatgacacctggattgagcggggccaggtgttcagcgccctgagcaagccaggcatcagcagcgagctgctgcggcccagtgatgagatcaagctgaccctgctgcagaagatgctggagtgggccatcagtgaaaatcgggaggccaagaccaaccctgtgacagcagaaaatgccttccggctggtgctgatcatccaggacttcctgcagagcgagggcctggtgaacagcaacatgtggacagagaagctgctggaggacatgatgctgctgtttgactgcctgtctgtgtgctacagcgagagccctgtgtgggtgaagctgagccagatccagatccagctgctgctgggcttcatcggccggggcaacctgcaggtgtgtgccatggccagcgccaagctgaacaccctgctgcagaccaaggtgattgagaaccaggatgaggcctgctacatcctgggcaagctggagcacgtgctgagccagagcatcaaggagcagacagagatctacagcttcctgatccccctggtgaggaccctggtgtccaagatctatgagctgctcttcatgaacctgcacctgcccagcctgcccttcaccaacggcagcagcagcttctttgaggacttccaggagtactgcaacagcaatgagtggcaggtgtacatcgagaagtacatcgtgccctacatgaagcagtatgaggcccacaccttctatgatggccacgagaacatggccctgtactggaaggactgctatgaggccctgatggtgaacatgcacaagagggaccgggagggcggggagagcaagctgaagttccaggagctgtttgtggagcccttcaacaggaaggcccggcaggagaacctgcgctacaacaacatgctgaagcagctgagcagccagcagctggccaccctgcggcgctggaaggccatccagctgtacctgacctgtgagcggggcccctgggccaagaggaagcagaaccccatccactggaagctggccaacgtggagaactacagcaggatgaggctgaagctggtgcccaactacaacttcaagacccatgaggaggccagcgccctgcgggacaacctgggcatccagcacagccagcccagcagtgacaccctgctgctggaggtggtgaagcaggtgaaggtgtctgacatggtggaggacaagctggacctgcctgaggaggacatcacagcccgggtgaatgtggatgagaaggaggagcaggaccagaaggagaagctggtgctgatggaggactgtgagctgatcaccatcattgatgtgattcctggccgcctggagatcaccacccagcacatctacttctatgatggcagcattgagaaggaggatggagtgggctttgacttcaagtggccccacagccagatccgggagatccacctgcggcgctacaacctgcggcgcagcgccctggagatcttccacgtggaccagagcaactacttcctgaacttcaagaaggaggtgaggaacaagatctacagccggctgctgagcctgcacagccccaacagctactacggcagccgcagcccccaggagctgttcaaggccagcggcctgacccagaagtgggtgaaccgggagatcagcaactttgactacctgatccagatcaacaccatggccggccgcacctacaatgacctggcccagtaccctgtgttcccctggatcctgcaggactacaccagcgaggagctggacctgaacaacccagctgtgttccgggacctgagcaagcccatcggcgtggtgaatgagaagaatgccaaggccatgagggagaagtatgaaaattttgaggaccccatgggcaccatcgacaagttccactacggcacccactacagcaacagcgctggggtgatgcactacctgatccgggtggagcccttcaccaccctgcacatccagctgcagagcggccgctttgactgtgccgaccggcagttccacagcatcccagccacctggcaggccctgatggacaacccctatgatgtgaaggagctgatccctgagttcttctacttccctgagttcctggagaaccagaaccagttcaacctgggccgcctgcagatcagcaaggagctggtgaatgatgtgatcctgcccaagtgggccaagtctgctgaggacttcatctacaagcacaggaaggccctggagagtgaatatgtgtctgcccacctgcacgagtggattgacctgatcttcggctacaagcagaggggccctgctgctgtggaggccctgaatgtgttctactactgcagctatgagggcgctgtggacctggatgccctgacagatgagaaggagaggaaggccctggagggcatgatcaacaactttggccagaccccctgccagctgctgaaggagccccaccccccccggctgtctgctgaggaggccgtgcagaagcccaccaagattgacaccagcaccctgaacctcttccagcacctgcctgagctgaagagcttcttcatcgagggcatcagtgatggcatccccctgctgaaggccaccatccccaagaaccagtaccgctccttcatgagccagggcagccctgagctgctgatcaccatctccatgaactacgtgattggcacccacggctggctgccctatgacaggaacatcagcaactacttcaccttcatcaaggaccagacagtgaccaaccccaagacccagaggagcatcaatggcagctttgcccctggcctggagatcaccagcaagctgtttgtggtgtcccatgatgccaagctgctcttctctgctggctactgggacaacagcatccaggtgatgagcctgaccaagggcaagatcatcagccacatcatccgccacatggacatcgtgacctgcctggccacagactactgcggcatccacctgatcagcggcagccgggacaccacctgcatgatctggcagatcacccagcagggcggcgtgcctgtgggcctggccagcaagcccttccagatcctgtatggccacaccaatgaggtgctgtctgtgggcatcagcacagagctggacatggctgtgtctggcagcagagatggcaccgtcatcatccacaccatccagaagggccagtacatgaggaccctgcggcccccctgtgagagcagcctcttcctgaccatccccaacctggccatctcctgggagggccacatcgtggtgtacagcagcacagaggagaagaccaccctgaaggacaagaatgccctgcacctgttcagcatcaatggcaagtacctgggcagccagatcctgaaggagcaggtgtctgacatctgcatcatcggggagcacatcgtgacaggcagcatccagggcttcctgagcatccgggacctgcacagcctgaacctgagcatcaaccccctggccatgaggctgcccatccactgtgtgtgtgtgaccaaggagtacagccacatcctggtgggcctggaggatggcaagctgattgtggtgggcgtgggcaagccagctgagatgaggagcggccagctgagcaggaagttctggggcagcagcaagaggctgagccagatctctgctggggagacagagtacaacacccaggacagcaagtag

SEQ ID NO: 161527 - DNA, 7713 bp, synthetic construct
  misc_feature 1..7713: note = Description of Artificial Sequence: Synthetic coding sequence
  source 1..7713: mol_type = other DNA
atggccgccagcgagcggctgtatgagctgtggctgctgtactatgcccagaaggacctgggctacctgcagcagtggctgaaggcctttgtgggcgccttcaagaagagcatcagcctgagcagcctggagccccggcggcctgaggaggccggggctgaggtgcccctgctgcccctggatgagctgcacgtgctggccgagcagctgcaccaggccgacctggagcaggccctgctgctgctgaagctgttcatcatcctgtgcaggaacctggagaacattgaagctggccggggccaggtgctggtgccccgggtgctggccctgctgaccaagctggtggccgagctgaagggctgccccccaccccagggccggggcacccagctggagaatgtggccctgcacgccctgctgctgtgtgagggcctgtttgacccctaccagacctggaggcggcagaggtctggagaggtgatcagcagcaaggagaagagcaagtacaagttccccccagctgccctgccccaggagttcagcgccttcttccaggagagcctgcagaatgctgaccacctgccccccatcctgctgctgcggctcatccacctgttctgtgctgtgctggccggcggcaaggaaaatggccagatggctgtgtctgatggctctgtgaagggcctgctgtctgtggtgcggggctggagccggggccctgccccagacccctgcctggtgcccctggccctggaggccctggtgggcgctgtgcacgtgctgcacgccagccgggccccaccccggggccctgagctgcgggccctgctggagagctacttccacgtgctgaatgctgactggccagctggcctgagcagcggccctgaggaggccctggtgaccctgcgggtgtccatgctggatgccatccccatgatgctggcctgtgaggacaggcctgtgctgcaggccaccttcctgagcaacaactgctttgagcacctgaccaggctcatccagaacagcaagctgtacctgcagagccgggcccctcctgagggggacagcgacctggccacccggctgctgacagagccagatgtgcagaaggtgctggaccaggacacagatgccatcgctgtgcacgtggtgcgggtgctgacctgcatcatgtctgacagccccagcgccaaggaggtgttcaaggagcgcatcggctacccccacctgcaggaggtgctgcagagccacggcccccccacccaccggctgctgcaggagctgctgaacatggctgtggagggggaccacagcatgtgccccccaccacccatcagaaatgagcagcctgtgctggtgctggcccagtggctgcccagcctgcccacagctgagctgcggctcttcctggcccagaggctgcgctggctgtgtgacagctgcccagccagccgggccacctgtgtgcaggccggcctggtgggctgcctgctggagaccctgagcacaggcctggccctggaggcccgctgccaggagcagctgctggccctgctgcaggccctgggccgggtgtccatccggcccatggagctgcggcacctgctgcggcccaggcctggcctggacagcgagcctggaggagctgaggccggcaaggcccggcatgctggggccgtcatccgcaccctgagcggcatggcccggcaccagggccctgcccgggccctgcgctactttgacctgacccccagcatggccggcatcatggtgccccctgtgcagcgctggccaggccctggcttcaccttccacgcctggctgtgcctgcaccccatggacacagcccccaccccagcccccacccggcccctgcagaggaagcagctgtacagcttcttcaccagcagcggcagcggctttgaggccttcttcaccgctgctggcaccctggtggtggccgtgtgcaccaggaaggagtacctgaccatgagcctgcctgaggtgtcctttgctgacagcgcctggcactgtgtggccatcgtgcacgtgcccggccggcggcccttcagccagaacctggtgcacgtgtacaaggatggccacctggtgaagacagcccccctgcgctgccccagcctgtctgagcccttcagcagctgctgcatcggcagcgctggctaccgcaccaccaccaccaccaccggcctgcccaccccacctgtgcctgccaccctggcctacacccacccagccctgaccaggagccagagcgtgcctgccagcacaggcctgggctggggcagcggcctggtggcccccctgcaggagggcagcattgacagcaccctggccggcacccaggacacccgctggggcagccccaccagcctggagggggagctgggcgctgtggccatcttccacgaggccctgcaggccacagccctgcggaccctgtgcaccctgggccccaatgaaacagcccccttcaagccagagggggagctgcacgagctgagcacccggctgctgctgcactacagcccccaggcctgcaagaacaacatctgcctggacctgagccccagccacggcctggatggccgcctgaccggccaccgggtggagacctgggatgtgaaggatgtggtgaactgtgtgggcggcatgggcgccctgctgcccctgctggagcgggtggccgcccagcccaaggaggccgaggccggccctgctgagacccatgacctggtgggccctgagctgaccagcggccacaacacccagggcctggtgctgcccctgggcaagagcagcgaggagaggatggagagaaatgctgtggccgccttcctgctgatgctgaggaacttcctgcagggccacatggtgaaccaggagagcctggtgcagtgccagggccctgccatcatcggggccctgctgaggaaggtgcccagctgggccatggacatgaatgtgctgatgtctgcccagctgctgatggagcaggtggccgctgagggcagcggccccctgctgtacctgctgtaccagcacctgctcttcaacttccacctgtggaccctgagtgactttgctgtgcggctgggccacatccagtacatgagcagcatcgtgcgggagcaccggcagaagctgaggaagaagtatggagtgcagttcatcctggatgccctgcggacccactacagcccccagcgggagcggcccctggccgcagatgacctgaggacagtgcagaccagcctgctgggcctggcccgggagttcctggtgcgcagcctgtctgcagatgatgtgcaggtgacccagaccatgctgtccttcctggccgccactggagatgatggccagatcctgcggcggctgcagcagaatgaaaggctgcctgagaggagccggcagaggctgcggctgagagaatgtggcctgcagggcctggtggcctgcctgcctgagggcaccgtgagcccccagctgtgccagggcctgtacaagctgttcctgggcgccggcagcggcaacacagctgggggcggcggcagcagcggcaccctgaccccagccagccagcccggcacccccagccccctggatggcccccggcccttccctgctgcccctggccgccacagcagcagcctgagcaatgtgctggaggatggcagcctgcctgagcccaccatctctggagatgacaccagcaacaccagcaacccccagcagaccagcgaggaggagctgtgcaacctgctgaccaacgtgctcttctctgtgacctggaggggcgtggagggcagtgatgaggccgcctggagggagcggggccaggtgttttctgtgctgacccagctgggcgccagcgccaccctggtgcggcccccagactgcatcaagaggagcctgctggagatgatgctggagagcgccctgacagacatcaaggaggcccctgtgggcgtgctggccagcctgacccagcaggccctgtggctgctgcggctgctgcaggacttcctgtgtgccgagggccacggcaaccaggagctgtggagcgagaagctgtttgagggcgtgtgcagcctgctggaccggctgggcgcctggccccacctggccaacggcacagctgacctgcgggagatggcccagatcggcctgcggctggtgctgggctacatcctgctggaggacccccagctgcacgcccaggcctacgtgcggctgcacatgctgctgcagacagctgtgcctgcccggcgggaggaggcctgctacgtgctgagcaagctggaggccgccctgggccgggtgctgaacaccagcagcctggagagcgccacagatgaagctggcagccccctggccgctgctgctgctgctgctgctgctgagcgctgctcctggctggtgcccctggtgaggaccctgctggaccgggcctatgagcccctgggcctgcagtggggcctgcccagcctgccccccaccaacggcagccccaccttctttgaggacttccaggccttctgtgccaccccagagtggaggcacttcatcgacaagcaggtgcagcccaccatgagccagtttgagatggacacctacgccaagagccatgacctgatgagcggcttctggaatgcctgctatgacatgctgatgagcagcggccagaggcggcagtgggagcgggcccagagcagaagagccttccaggagctggtgctggagcccgcccagaggcgggcccggctggagggcctgcgctacacagctgtgctgaagcagcaggccacccagcacagcatggccctgctgcactggggcgccctgtggaggcagctggccagcccctgtggggcctgggccctgcgggacacccccatcccccgctggaagctgagcagcgctgagacctacagcaggatgaggctgaagctggtgcccaaccaccactttgacccccacctggaggccagcgccctgcgggacaacctgggggaggtgcccctgacccccacagaggaggccagcctgcccctggccgtgaccaaggaggccaaggtgtccaccccacctgagctgctgcaggaggaccagctgggggaggatgagctggccgagctggagacccccatggaggccgctgagctggatgagcagcgggagaagctggtgctgtctgctgagtgccagctggtgacagtggtggccgtggtgcccggcctgctggaggtgaccacccagaatgtgtacttctatgatggcagcacagagcgggtggagacagaggagggcatcggctatgacttcagaagacccctggcccagctgcgggaggtgcacctgcggcgcttcaacctgcggcgcagcgccctggagctgttcttcatcgaccaggccaactacttcctgaacttcccctgcaaggtgggcaccacccctgtgagcagccccagccagaccccccggccccagcccggccccatccccccccacacccaggtgaggaaccaggtgtacagctggctgctgcggctgcggccccccagccagggctacctgagcagccgcagcccccaggagatgctgcgggccagcggcctgacccagaagtgggtgcagcgggagatcagcaactttgagtacctgatgcagctgaacaccatcgccggccgcacctacaatgacctgagccagtaccctgtgttcccctgggtgctgcaggactatgtgagccccaccctggacctgagcaacccagctgtgttccgggacctgagcaagcccatcggcgtggtgaaccccaagcacgcccagctggtgcgggagaagtatgagagctttgaagatcctgctggcaccatcgacaagttccactacggcacccactacagcaatgctgctggggtgatgcactacctgatccgggtggagcccttcaccagcctgcacgtgcagctgcagagcggccgctttgactgcagcgaccggcagttccacagcgtggccgccgcctggcaggcccggctggagagccctgcagatgtgaaggagctgatccctgagttcttctacttcccagacttcctggagaaccagaatggatttgacctgggctgcctgcagctgaccaatgagaaggtgggagatgtggtgctgcccccctgggccagcagccctgaggacttcatccagcagcaccggcaggccctggagagtgaatatgtgtctgcccacctgcacgagtggattgacctgatcttcggctacaagcagaggggccctgctgctgaggaggccctgaatgtgttctactactgcacctatgaaggagctgtggacctggaccacgtgacagatgagcgggagaggaaggccctggagggcatcatcagcaactttggccagaccccctgccagctgctgaaggagccccaccccacccggctgtctgctgaggaggccgcccaccggctggcccggctggacaccaacagccccagcatcttccagcacctggatgagctgaaggccttctttgctgaggtggtgtctgatggagtgcccctggtgctggccctggtgccccaccggcagccccacagcttcatcacccagggcagcccagacctgctggtgacagtgtctgccagcggcctgctgggcacccacagctggctgccctatgacaggaacatcagcaactacttctccttcagcaaggaccccaccatgggcagccacaagacccagaggctgctgagcggcccctgggtgcccggcagcggcgtgtctggccaggccctggccgtggccccagatggcaagctgctcttcagcggcggccactgggatggcagcctgcgggtgacagccctgccccggggcaagctgctgagccagctgagctgccacctggatgtggtgacctgcctggccctggacacctgtggcatctacctgatcagcggcagccgggacaccacctgcatggtgtggaggctgctgcaccagggcggcctgtctgtgggcctggcccccaagcctgtgcaggtgctgtatggccacggggctgctgtgtcctgtgtggccatcagcacagagctggacatggctgtgtctggctctgaagatggcaccgtcatcatccacacagtgagaagaggccagtttgtggccgccctgcggcccctgggcgccaccttccctggccccatcttccacctggccctgggcagcgagggccagatcgtggtgcagagcagcgcctgggagaggcctggggcccaggtgacctacagcctgcacctgtacagcgtgaatggcaagctgcgggccagcctgcccctggccgagcagcccacagccctgactgtgacagaagattttgtgctgctgggcacagcccagtgtgccctgcacatcctgcagctgaacaccctgctgcctgctgccccacccctgcccatgaaggtggccatccgctctgtggccgtgaccaaggagaggagccacgtgctggtgggcctggaggatggcaagctgattgtggtggtggccggccagcccagcgaggtgcgcagcagccagtttgccaggaagctgtggaggagcagccgccgcatcagccaggtgtcctctggagaaacagagtacaaccccacagaggccaggtag

SEQ ID NO: 161528 - DNA, 1848 bp, synthetic construct
  misc_feature 1..1848: note = Description of Artificial Sequence: Synthetic coding sequence
  source 1..1848: mol_type = other DNA
atggagcccgccctgggccctggggtgcagaaggacctgggctacctgcagcagtggctgaaggcctttgtgggcgccttcaagaagagcatcagcctgagcagcctggagcccaggaggcctgaggaggccggggctgaggtgcccctgctgcccctggatgagctgcacgtgctggccgagcagctgcaccaggccgacctggagcaggccctgctgctgctgaagctgttcatcatcctgtgcaggaacctggagaacatcgaggccggccggggccaggtgctggtgccccgggtgctggccctgctgaccaagctggtggccgagctgaagggctgccccccaccccagggccggggcacccagctggagaatgtggccctgcacgccctgctgctgtgtgagggcctgtttgacccctaccagacctggaggcggcagaggtctggagaggtgatcagcagcaaggagaagagcaagtacaagtttcctcctgctgccctgccccaggagttcagcgccttcttccaggagagcctgcagaatgctgaccacctgccccccatcctgctgctgcggctcatccacctgttctgtgctgtgctggccggcggcaaggaaaatggccagatggctgtgtctgatggctctgtgaagggcctgctgtctgtggtgcggggctggagccggggccctgccccagacccctgcctggtgcccctggccctggaggccctggtgggcgctgtgcacgtgctgcacgccagccgggccccaccccggggccctgagctgcgggccctgctggagagctacttccacgtgctgaatgctgactggccagctggcctgagcagcggccctgaggaggccctggtgaccctgcgggtgtccatgctggatgccatccccatgatgctggcctgtgaagatagacctgtgctgcaggccaccttcctgagcaacaactgctttgagcacctgaccaggctcatccagaacagcaaggtgctggaccaggacacagatgccatcgctgtgcacgtggtgcgggtgctgacctgcatcatgtctgacagccccagcgccaaggaggtgttcaaggagcgcatcggctacccccacctgcaggaggtgctgcagagccacggcccccccacccaccggctgctgcaggagctgctgaacatggctgtggagggggaccacagcatgtgccccccaccacccatcagaaatgagcagcctgtgctggtgctggcccagtggctgcccagcctgcccacagctgagctgcggctcttcctggcccagaggctgcgctggctgtgtgacagctgcccagccagccgggccacctgtgtgcaggccggcctggtgggctgcctgctggagaccctgagcacaggcctggccctggaggcccgctgccaggagcagctgctggccctgctgcaggccctgggccgggtgtccatccggcccatggagctgcggcacctgctgcggcccaggcctggcctggacagcgagcctggaggagctgaggccggcaaggcccggcatgctggggccgtcatccgcaccctgagcggcatggcccggcaccagggccctgcccgggccctgcgctactttgacctgacccccagcatggccggcatcatggtgccccctgtgcagcgctggccaggccctggcttcaccttccacgcctggctgtgcctgcaccccatggacacagcccccaccccagccccacccaccctgcccagcagcggcatcggcggccgctgctaccccctgcgggactggagggctgaggtgccccccctggccggctag

SEQ ID NO: 161529 - DNA, 3012 bp, synthetic construct
  misc_feature 1..3012: note = Description of Artificial Sequence: Synthetic coding sequence
  source 1..3012: mol_type = other DNA
atgagccagtttgagatggacacctacgccaagagccatgacctgatgagcggcttctggaatgcctgctatgacatgctgatgagcagcggccagaggcggcagtgggagcgggcccagagccggcgggccttccaggagctggtgctggagcccgcccagaggcgggcccggctggagggcctgcgctacacagctgtgctgaagcagcaggccacccagcacagcatggccctgctgcactggggcgccctgtggaggcagctggccagcccctgtggggcctgggccctgcgggacacccccatcccccgctggaagctgagcagcgctgagacctacagcaggatgaggctgaagctggtgcccaaccaccactttgacccccacctggaggccagcgccctgcgggacaacctgggggaggtgcccctgacccccacagaggaggccagcctgcccctggccgtgaccaaggaggccaaggtgtccaccccacctgagctgctgcaggaggaccagctgggagaagatgagctggccgagctggagacccccatggaggccgctgagctggatgagcagcgggagaagctggtgctgtctgctgagtgccagctggtgacagtggtggccgtggtgcccggcctgctggaggtgaccacccagaatgtgtacttctatgatggcagcacagagcgggtggagacagaggagggcatcggctatgacttccggcggcccctggcccagctgcgggaggtgcacctgcggcgcttcaacctgcggcgcagcgccctggagctgttcttcatcgaccaggccaactacttcctgaacttcccctgcaaggtgggcaccacccctgtgagcagccccagccagaccccccggccccagcccggccccatccccccccacacccaggtgaggaaccaggtgtacagctggctgctgcggctgcggccccccagccagggctacctgagcagccgcagcccccaggagatgctgcgggccagcggcctgacccagaagtgggtgcagcgggagatcagcaactttgagtacctgatgcagctgaacaccatcgccggccgcacctacaatgacctgagccagtaccctgtgttcccctgggtgctgcaggactatgtgagccccaccctggacctgagcaacccagctgtgttccgggacctgagcaagcccatcggcgtggtgaaccccaagcacgcccagctggtgcgggagaagtatgagagctttgaggaccctgctggcaccatcgacaagttccactacggcacccactacagcaatgctgctggggtgatgcactacctgatccgggtggagcccttcaccagcctgcacgtgcagctgcagagcggccgctttgactgcagcgaccggcagttccacagcgtggccgccgcctggcaggcccggctggagagccctgcagatgtgaaggagctgatccctgagttcttctacttcccagacttcctggagaaccagaatggatttgacctgggctgcctgcagctgaccaatgagaaggtgggagatgtggtgctgcccccctgggccagcagccctgaggacttcatccagcagcaccggcaggccctggagagtgaatatgtgtctgcccacctgcacgagtggattgacctgatcttcggctacaagcagaggggccctgctgctgaggaggccctgaatgtgttctactactgcacctatgagggcgctgtggacctggaccacgtgacagatgagcgggagaggaaggccctggagggcatcatcagcaactttggccagaccccctgccagctgctgaaggagccccaccccacccggctgtctgctgaggaggccgcccaccggctggcccggctggacaccaacagccccagcatcttccagcacctggatgagctgaaggccttctttgctgaggtgacagtgtctgccagcggcctgctgggcacccacagctggctgccctatgacaggaacatcagcaactacttctccttcagcaaggaccccaccatgggcagccacaagacccagaggctgctgagcggcccctgggtgcccggcagcggcgtgtctggccaggccctggccgtggccccagatggcaagctgctcttcagcggcggccactgggatggcagcctgcgggtgacagccctgccccggggcaagctgctgagccagctgagctgccacctggatgtggtgacctgcctggccctggacacctgtggcatctacctgatcagcggcagccgggacaccacctgcatggtgtggaggctgctgcaccagggcggcctgtctgtgggcctggcccccaagcctgtgcaggtgctgtatggccatggagctgctgtgtcctgtgtggccatcagcacagagctggacatggctgtgtctggctctgaagatggcaccgtcatcatccacacagtgcggcggggccagtttgtggccgccctgcggcccctgggcgccaccttccctggccccatcttccacctggccctgggcagcgagggccagatcgtggtgcagagcagcgcctgggagaggcctggggcccaggtgacctacagcctgcacctgtacagcgtgaatggcaagctgcgggccagcctgcccctggccgagcagcccacagccctgactgtgacagaggactttgtgctgctgggcacagcccagtgtgccctgcacatcctgcagctgaacaccctgctgcctgctgccccacccctgcccatgaaggtggccatccgctctgtggccgtgaccaaggagaggagccacgtgctggtgggcctggaggatggcaagctgattgtggtggtggccggccagcccagcgaggtgcgcagcagccagtttgccaggaagctgtggaggagcagccgccgcatcagccaggtgagcagcggggagacagagtacaaccccacagaggccaggtag

SEQ ID NO: 161530 - DNA, 2094 bp, synthetic construct
  misc_feature 1..2094: note = Description of Artificial Sequence: Synthetic coding sequence
  source 1..2094: mol_type = other DNA
atgctgcgggccagcggcctgacccagaagtgggtgcagcgggagatcagcaactttgagtacctgatgcagctgaacaccatcgccggccgcacctacaatgacctgagccagtaccctgtgttcccctgggtgctgcaggactatgtgagccccaccctggacctgagcaacccagctgtgttccgggacctgagcaagcccatcggcgtggtgaaccccaagcacgcccagctggtgcgggagaagtatgagagctttgaggaccctgctggcaccatcgacaagttccactacggcacccactacagcaatgctgctggggtgatgcactacctgatccgggtggagcccttcaccagcctgcacgtgcagctgcagagcggccgctttgactgcagcgaccggcagttccacagcgtggccgccgcctggcaggcccggctggagagccctgcagatgtgaaggagctgatccctgagttcttctacttcccagacttcctggagaaccagaatggatttgacctgggctgcctgcagctgaccaatgagaaggtgggagatgtggtgctgcccccctgggccagcagccctgaggacttcatccagcagcaccggcaggccctggagagtgaatatgtgtctgcccacctgcacgagtggattgacctgatcttcggctacaagcagaggggccctgctgctgaggaggccctgaatgtgttctactactgcacctatgagggcgctgtggacctggaccacgtgacagatgagcgggagaggaaggccctggagggcatcatcagcaactttggccagaccccctgccagctgctgaaggagccccaccccacccggctgtctgctgaggaggccgcccaccggctggcccggctggacaccaacagccccagcatcttccagcacctggatgagctgaaggccttctttgctgaggtggtgtctgatggagtgcccctggtgctggccctggtgccccaccggcagccccacagcttcatcacccagggcagcccagacctgctggtgacagtgtctgccagcggcctgctgggcacccacagctggctgccctatgacaggaacatcagcaactacttctccttcagcaaggaccccaccatgggcagccacaagacccagaggctgctgagcggcccctgggtgcccggcagcggcgtgtctggccaggccctggccgtggccccagatggcaagctgctcttcagcggcggccactgggatggcagcctgcgggtgacagccctgccccggggcaagctgctgagccagctgagctgccacctggatgtggtgacctgcctggccctggacacctgtggcatctacctgatcagcggcagccgggacaccacctgcatggtgtggaggctgctgcaccagggcggcctgtctgtgggcctggcccccaagcctgtgcaggtgctgtatggccatggagctgctgtgtcctgtgtggccatcagcacagagctggacatggctgtgtctggctctgaagatggcaccgtcatcatccacacagtgcggcggggccagtttgtggccgccctgcggcccctgggcgccaccttccctggccccatcttccacctggccctgggcagcgagggccagatcgtggtgcagagcagcgcctgggagaggcctggggcccaggtgacctacagcctgcacctgtacagcgtgaatggcaagctgcgggccagcctgcccctggccgagcagcccacagccctgactgtgacagaggactttgtgctgctgggcacagcccagtgtgccctgcacatcctgcagctgaacaccctgctgcctgctgccccacccctgcccatgaaggtggccatccgctctgtggccgtgaccaaggagaggagccacgtgctggtgggcctggaggatggcaagctgattgtggtggtggccggccagcccagcgaggtgcgcagcagccagtttgccaggaagctgtggaggagcagccgccgcatcagccaggtgagcagcggggagacagagtacaaccccacagaggccaggtag

SEQ ID NO: 161531 - DNA, 8265 bp, synthetic construct
  misc_feature 1..8265: note = Description of Artificial Sequence: Synthetic coding sequence
  source 1..8265: mol_type = other DNA
atggccgccagcgagcggctgtatgagctgtggctgctgtactatgcccagaaggacctgggctacctgcagcagtggctgaaggcctttgtgggcgccttcaagaagagcatcagcctgagcagcctggagccccggcggcctgaggaggccggggctgaggtgcccctgctgcccctggatgagctgcacgtgctggccgagcagctgcaccaggccgacctggagcaggccctgctgctgctgaagctgttcatcatcctgtgcaggaacctggagaacattgaagctggccggggccaggtgctggtgccccgggtgctggccctgctgaccaagctggtggccgagctgaagggctgccccccaccccagggccggggcacccagctggagaatgtggccctgcacgccctgctgctgtgtgagggcctgtttgacccctaccagacctggaggcggcagaggtctggagaggtgatcagcagcaaggagaagagcaagtacaagttccccccagctgccctgccccaggagttcagcgccttcttccaggagagcctgcagaatgctgaccacctgccccccatcctgctgctgcggctcatccacctgttctgtgctgtgctggccggcggcaaggaaaatggccagatggctgtgtctgatggctctgtgaagggcctgctgtctgtggtgcggggctggagccggggccctgccccagacccctgcctggtgcccctggccctggaggccctggtgggcgctgtgcacgtgctgcacgccagccgggccccaccccggggccctgagctgcgggccctgctggagagctacttccacgtgctgaatgctgactggccagctggcctgagcagcggccctgaggaggccctggtgaccctgcgggtgtccatgctggatgccatccccatgatgctggcctgtgaggacaggcctgtgctgcaggccaccttcctgagcaacaactgctttgagcacctgaccaggctcatccagaacagcaagctgtacctgcagagccgggcccctcctgagggggacagcgacctggccacccggctgctgacagagccagatgtgcagaaggtgctggaccaggacacagatgccatcgctgtgcacgtggtgcgggtgctgacctgcatcatgtctgacagccccagcgccaaggaggtgttcaaggagcgcatcggctacccccacctgcaggaggtgctgcagagccacggcccccccacccaccggctgctgcaggagctgctgaacatggctgtggagggggaccacagcatgtgccccccaccacccatcagaaatgagcagcctgtgctggtgctggcccagtggctgcccagcctgcccacagctgagctgcggctcttcctggcccagaggctgcgctggctgtgtgacagctgcccagccagccgggccacctgtgtgcaggccggcctggtgggctgcctgctggagaccctgagcacaggcctggccctggaggcccgctgccaggagcagctgctggccctgctgcaggccctgggccgggtgtccatccggcccatggagctgcggcacctgctgcggcccaggcctggcctggacagcgagcctggaggagctgaggccggcaaggcccggcatgctggggccgtcatccgcaccctgagcggcatggcccggcaccagggccctgcccgggccctgcgctactttgacctgacccccagcatggccggcatcatggtgccccctgtgcagcgctggccaggccctggcttcaccttccacgcctggctgtgcctgcaccccatggacacagcccccaccccagcccccacccggcccctgcagaggaagcagctgtacagcttcttcaccagcagcggcagcggctttgaggccttcttcaccgctgctggcaccctggtggtggccgtgtgcaccaggaaggagtacctgaccatgagcctgcctgaggtgtcctttgctgacagcgcctggcactgtgtggccatcgtgcacgtgcccggccggcggcccttcagccagaacctggtgcacgtgtacaaggatggccacctggtgaagacagcccccctgcgctgccccagcctgtctgagcccttcagcagctgctgcatcggcagcgctggctaccgcaccaccaccaccaccaccggcctgcccaccccacctgtgcctgccaccctggcctacacccacccagccctgaccaggagccagagcgtgcctgccagcacaggcctgggctggggcagcggcctggtggcccccctgcaggagggcagcattgacagcaccctggccggcacccaggacacccgctggggcagccccaccagcctggagggggagctgggcgctgtggccatcttccacgaggccctgcaggccacagccctgcggaccctgtgcaccctgggccccaatgaaacagcccccttcaagccagagggggagctgcacgagctgagcacccggctgctgctgcactacagcccccaggcctgcaagaacaacatctgcctggacctgagccccagccacggcctggatggccgcctgaccggccaccgggtggagacctgggatgtgaaggatgtggtgaactgtgtgggcggcatgggcgccctgctgcccctgctggagcgggtggccgcccagcccaaggaggccgaggccggccctgctgagacccatgacctggtgggccctgagctgaccagcggccacaacacccagggcctggtgctgcccctgggcaagagcagcgaggagaggatggagagaaatgctgtggccgccttcctgctgatgctgaggaacttcctgcagggccacatggtgaaccaggagagcctggtgcagtgccagggccctgccatcatcggggccctgctgaggaaggtgcccagctgggccatggacatgaatgtgctgatgtctgcccagctgctgatggagcaggtggccgctgagggcagcggccccctgctgtacctgctgtaccagcacctgctcttcaacttccacctgtggaccctgagtgactttgctgtgcggctgggccacatccagtacatgagcagcatcgtgcgggagcaccggcagaagctgaggaagaagtatggagtgcagttcatcctggatgccctgcggacccactacagcccccagcgggagcggcccctggccgcagatgacctgaggacagtgcagaccagcctgctgggcctggcccgggagttcctggtgcgcagcctgtctgcagatgatgtgcaggtgacccagaccatgctgtccttcctggccgccactggagatgatggccaggccgtgggcgccctggacctgctgctggccctgctgcacggcagcctggtgcaggagagcctggccgtgttcctgctggagcccggcaacctggaggtgctgctggccctgctggtgcggcccggcagcctgcccctgctgcctgacagagtgtgcaagatcctgcggcggctgcagcagaatgaaaggctgcctgagaggagccggcagaggctgcggctgcgggagtgtggcctgcagggcctggtggcctgcctgcctgagggcaccgtgagcccccagctgtgccagggcctgtacaagctgttcctgggcgctgactgcctgaacctgagtgacctgctggccgtggtgcagctgagcctgcaggccgacctgtctgtgcggctggacatctgccggcagctgttccacctgatctacggccagccagatgtggtgcggctgctggcccggcaggccggctggcaggatgtgctgacccggctgtatgtgctggaggccgccacagctggcagccccccacccagcagccctgagagccccaccagccccaagccagccccacccaagccacccacagagagccctgctgagcccagtgatgtgttcctgcccagcgaggccccctgcccagaccctgatggcttctaccacgccctgagccccttctgcaccccatttgacctgggcctggagaggagctctgtgggcagcggcaacacagctgggggcggcggcagcagcggcaccctgaccccagccagccagcccggcacccccagccccctggatggcccccggcccttccctgctgcccctggccgccacagcagcagcctgagcaatgtgctggaggatggcagcctgcctgagcccaccatctctggagatgacaccagcaacaccagcaacccccagcagaccagcgaggaggagctgtgcaacctgctgaccaacgtgctcttctctgtgacctggaggggcgtggagggcagtgatgaggccgcctggagggagcggggccaggtgttttctgtgctgacccagctgggcgccagcgccaccctggtgcggcccccagactgcatcaagaggagcctgctggagatgatgctggagagcgccctgacagacatcaaggaggcccctgtgggcgtgctggccagcctgacccagcaggccctgtggctgctgcggctgctgcaggacttcctgtgtgccgagggccacggcaaccaggagctgtggagcgagaagctgtttgagggcgtgtgcagcctgctggaccggctgggcgcctggccccacctggccaacggcacagctgacctgcgggagatggcccagatcggcctgcggctggtgctgggctacatcctgctggaggacccccagctgcacgcccaggcctacgtgcggctgcacatgctgctgcagacagctgtgcctgcccggcgggaggaggcctgctacgtgctgagcaagctggaggccgccctgggccgggtgctgaacaccagcagcctggagagcgccacagatgaagctggcagccccctggccgctgctgctgctgctgctgctgctgagcgctgctcctggctggtgcccctggtgaggaccctgctggaccgggcctatgagcccctgggcctgcagtggggcctgcccagcctgccccccaccaacggcagccccaccttctttgaggacttccaggccttctgtgccaccccagagtggaggcacttcatcgacaagcaggtgcagcccaccatgagccagtttgagatggacacctacgccaagagccatgacctgatgagcggcttctggaatgcctgctatgacatgctgatgagcagcggccagaggcggcagtgggagcgggcccagagcagaagagccttccaggagctggtgctggagcccgcccagaggcgggcccggctggagggcctgcgctacacagctgtgctgaagcagcaggccacccagcacagcatggccctgctgcactggggcgccctgtggaggcagctggccagcccctgtggggcctgggccctgcgggacacccccatcccccgctggaagctgagcagcgctgagacctacagcaggatgaggctgaagctggtgcccaaccaccactttgacccccacctggaggccagcgccctgcgggacaacctgggggaggtgcccctgacccccacagaggaggccagcctgcccctggccgtgaccaaggaggccaaggtgtccaccccacctgagctgctgcaggaggaccagctgggggaggatgagctggccgagctggagacccccatggaggccgctgagctggatgagcagcgggagaagctggtgctgtctgctgagtgccagctggtgacagtggtggccgtggtgcccggcctgctggaggtgaccacccagaatgtgtacttctatgatggcagcacagagcgggtggagacagaggagggcatcggctatgacttcagaagacccctggcccagctgcgggaggtgcacctgcggcgcttcaacctgcggcgcagcgccctggagctgttcttcatcgaccaggccaactacttcctgaacttcccctgcaaggtgggcaccacccctgtgagcagccccagccagaccccccggccccagcccggccccatccccccccacacccaggtgaggaaccaggtgtacagctggctgctgcggctgcggccccccagccagggctacctgagcagccgcagcccccaggagatgctgcgggccagcggcctgacccagaagtgggtgcagcgggagatcagcaactttgagtacctgatgcagctgaacaccatcgccggccgcacctacaatgacctgagccagtaccctgtgttcccctgggtgctgcaggactatgtgagccccaccctggacctgagcaacccagctgtgttccgggacctgagcaagcccatcggcgtggtgaaccccaagcacgcccagctggtgcgggagaagtatgagagctttgaagatcctgctggcaccatcgacaagttccactacggcacccactacagcaatgctgctggggtgatgcactacctgatccgggtggagcccttcaccagcctgcacgtgcagctgcagagcggccgctttgactgcagcgaccggcagttccacagcgtggccgccgcctggcaggcccggctggagagccctgcagatgtgaaggagctgatccctgagttcttctacttcccagacttcctggagaaccagaatggatttgacctgggctgcctgcagctgaccaatgagaaggtgggagatgtggtgctgcccccctgggccagcagccctgaggacttcatccagcagcaccggcaggccctggagagtgaatatgtgtctgcccacctgcacgagtggattgacctgatcttcggctacaagcagaggggccctgctgctgaggaggccctgaatgtgttctactactgcacctatgaaggagctgtggacctggaccacgtgacagatgagcgggagaggaaggccctggagggcatcatcagcaactttggccagaccccctgccagctgctgaaggagccccaccccacccggctgtctgctgaggaggccgcccaccggctggcccggctggacaccaacagccccagcatcttccagcacctggatgagctgaaggccttctttgctgaggtggtgtctgatggagtgcccctggtgctggccctggtgccccaccggcagccccacagcttcatcacccagggcagcccagacctgctggtgacagtgtctgccagcggcctgctgggcacccacagctggctgccctatgacaggaacatcagcaactacttctccttcagcaaggaccccaccatgggcagccacaagacccagaggctgctgagcggcccctgggtgcccggcagcggcgtgtctggccaggccctggccgtggccccagatggcaagctgctcttcagcggcggccactgggatggcagcctgcgggtgacagccctgccccggggcaagctgctgagccagctgagctgccacctggatgtggtgacctgcctggccctggacacctgtggcatctacctgatcagcggcagccgggacaccacctgcatggtgtggaggctgctgcaccagggcggcctgtctgtgggcctggcccccaagcctgtgcaggtgctgtatggccacggggctgctgtgtcctgtgtggccatcagcacagagctggacatggctgtgtctggctctgaagatggcaccgtcatcatccacacagtgagaagaggccagtttgtggccgccctgcggcccctgggcgccaccttccctggccccatcttccacctggccctgggcagcgagggccagatcgtggtgcagagcagcgcctgggagaggcctggggcccaggtgacctacagcctgcacctgtacagcgtgaatggcaagctgcgggccagcctgcccctggccgagcagcccacagccctgactgtgacagaagattttgtgctgctgggcacagcccagtgtgccctgcacatcctgcagctgaacaccctgctgcctgctgccccacccctgcccatgaaggtggccatccgctctgtggccgtgaccaaggagaggagccacgtgctggtgggcctggaggatggcaagctgattgtggtggtggccggccagcccagcgaggtgcgcagcagccagtttgccaggaagctgtggaggagcagccgccgcatcagccaggtgtcctctggagaaacagagtacaaccccacagaggccaggtag

SEQ ID NO: 161532 - DNA, 7116 bp, synthetic construct
  misc_feature 1..7116: note = Description of Artificial Sequence: Synthetic coding sequence
  source 1..7116: mol_type = other DNA
atggccgcccctgagagcggccctgccctgagccctggaacagctgagggggaggaggagaccatcctgtatgacctgctggtgaacacagagtggcccccagagacagaggtgcagccccggggcaaccagaagcacggggccagcttcatcatcaccaaggccatccgggaccggctgctcttcctgcggcagtacatctggtacagccctgcccccttcctgctgcctgatggcctggtgcggctggtgaacaagcagatcaactggcacctggtgctggccagcaatggcaagctgctggccgctgtgcaggaccagtgtgtggagatccgcagcgccaaggatgacttcaccagcatcatcggcaagtgccaggtgcccaaggaccccaagccccagtggaggagagtggcctggagctatgactgcaccctgctggcctatgcagagagcactggaacagtgcgggtgtttgacctgatgggcagcgagctgtttgtgatcagccctgccagcagcttcatcggggacctgtcctatgccatcgccggcctcatcttcctggagtacaaggccagcgcccagtggagcgctgagctgctggtgatcaactacagaggagagctgcggagctacctggtgtctgtgggcaccaaccagagctaccaggagagccactgcttctccttcagcagccactacccccacggcatcaacacagccatctaccaccctggccaccggctgctgctggtgggcggctgtgaaacagctgaggtgggcatgagcaaggccagcagctgtggcctgagcgcctggagggtgctgagcggcagcccctactacaagcaggtgaccaatggaggagatggagtgacagctgtgcccaagaccctgggcctgctgaggatgctgtctgtgaagttctacagccggcagggccaggagcaggacggcatcttcaagatgagcctgagcccagatggcatgctgctggccgccatccacttcagcggcaagctgagcatctgggccatccccagcctgaagcagcagggcgagtggggccagaatgagcagcccggctatgatgacctgaacccagactggaggctgagcacagagaagaggaagaagatcaaggacaaggagagcttctaccccctgattgatgtgaactggtgggccgacagcgctgtgaccctggcccgctgcagcggggccctgactgtgtcctctgtgaagaccctgaagaacctgctgggcaagagctgtgagtggtttgagcccagcccccaggtgacagccacccatgatggcggcttcctgagcctggagtgtgagatcaagctggcccccaagaggagccggctggagaccagggctggggaggaggatgaaggagaagaagattctgacagcgactatgagatcagcgccaaggcccgctacttcggctacatcaagcagggcctgtacctggtgacagagatggagagatttgccccacccaggaagaggcccaggaccatcaccaagaactaccgcctggtgtccctgcggagcaccaccccagaggagctgtaccagaggaagattgagagcgaggagtatgaggaggccctgagcctggcccacacctacggcctggacacagacctggtgtaccagaggcagtggaggaagtctgctgtgaatgtggccagcatccagaactacctgagcaagatcaagaagaggtcctgggtgctgcatgaatgtctggagcgggtgcctgaaaatgtggatgctgccaaggagctgctgcagtatggcctgaagggcacagacctggaggccctgctggccatcggcaaaggagcagatgatggccgcttcaccctgcccggggagattgatattgacagcatctcctatgaggagctgagccccccagatgaggagcccgccaagaacaagaaggagaaggagctgaagaagaggcaggagctgctgaagctggtgaacttcagcaagctgaccctggagcagaaggagctgtgccgctgcaggaggaagctgctgacctacctggaccggctggccacctatgaggagatcctgggcgtgccccacgccagcgagcagagatatgatgctgagttcttcaagaagttcaggaaccagaacatcgtgctgagcgcccggacctacgcccaggagagcaatgtgcaggccctggagatcctcttcacctaccacggcagtgacctgctgccccaccggctggccatcctgagcaacttccctgagaccaccagcccccatgagtacagcgtgctgctgcctgaggcctgcttcaacggggacagcctgatgatcatcccctggcatgagcacaagcaccgggccaaggactggtgtgaggagctggcctgcaggatggtggtggagcccaacctgcaggatgaaagtgagttcctgtatgctgcccagcctgagctgctgcgcttcaggatgacccagctgactgtggagaaggtgatggactggtaccagaccagggctgaggagattgagcactacgcccggcaggtggactgtgccctgagcctcatccggctgggcatggagaggaacatccctggcctgctggtgctgtgtgacaacctggtgaccctggagaccctggtgtatgaggcccgctgtgatgtgaccctgaccctgaaggagctgcagcagatgaaggacatcgagaagctgcggctgctgatgaacagctgcagcgaggacaagtatgtgaccagcgcctaccagtggatggtgcccttcctgcaccgctgtgagaagcagagccctggggtggccaatgagctgctgaaggagtacctggtgaccctggccaagggggacctgaagttccccctgaagatcttccagcacagcaagccagacctgcagcagaagatcatcccagaccaggaccagctgatggccatcgccctggagtgcatctacacctgtgaaagaaatgaccagctgtgcctgtgctatgacctgctggagtgcctgcctgagcggggctatggagacaagacagaggccaccaccaagctgcatgacatggtggaccagctggagcagatcctgtctgtgtctgagctgctggagaagcacggcctggagaagcccatcagctttgtgaagaacacccagagcagcagcgaggaggccaggaagctgatggtgcggctgaccaggcacactggaaggaagcagccccctgtgtctgagagccactggaggaccctgctgcaggacatgctgaccatgcagcagaatgtgtacacctgcctggacagtgatgcctgctatgagatcttcacagagagcctgctgtgcagcagccggctggagaacatccacctggccggccagatgatgcactgcagcgcctgcagtgaaaatcctcctgctggcatcgcccacaagggcaagccccactacagagtgtcctatgagaagagcattgacctggtgctggccgccagccgggagtacttcaacagcagcaccaacctgacagacagctgcatggacctggcccgctgctgcctgcagctgatcacagaccggcccccagccatccaggaggagctggacctgatccaggccgtgggctgcctggaggagtttggagtgaagatcctgcccctgcaggtgcggctgtgcccagaccgcatcagcctcatcaaggagtgcatcagccagagccccacctgctacaagcagagcaccaagctgctgggcctggccgagctgctgcgggtggccggggagaaccctgaggagcggcggggccaggtgctgatcctgctggtggagcaggccctgcgcttccatgactacaaggccgcctccatgcactgccaggagctgatggccaccggctaccccaagtcctgggatgtgtgcagccagctgggccagagcgagggctaccaggacctggccacccggcaggagctgatggcctttgccctgacccactgcccccccagcagcattgagctgctgctggccgccagcagcagcctgcagacagagatcctgtaccagagggtgaacttccagatccaccatgaaggaggagagaacatcagcgccagccccctgaccagcaaggctgtgcaggaggatgaggtgggcgtgcccggcagcaacagcgctgacctgctgcgctggaccacagccaccaccatgaaggtgctgagcaacaccaccaccaccaccaaggctgtgctgcaggccgtgtctgatggccagtggtggaagaagagcctgacctacctgcggcccctgcagggccagaagtgtggcggggcctaccagatcggcaccacagccaatgaagacctggagaagcagggctgccaccccttctatgagagcgtcatcagcaacccctttgtggccgagagcgagggcacctatgacacctaccagcacgtgcctgtggagagctttgctgaggtgctgctgaggacaggcaagctggccgaggccaagaacaagggggaggtgttccccaccacagaggtgctgctgcagctggccagcgaggccctgcccaatgacatgaccctggccctggcctacctgctggccctgccccaggtgctggatgccaaccgctgctttgagaagcagagccccagcgccctgagcctgcagctggccgcctactactacagcctgcagatctatgcccggctggccccctgcttccgggacaagtgccaccccctgtacagagctgaccccaaggagctgatcaagatggtgaccaggcatgtgaccaggcatgagcacgaggcctggccagaagatctcatcagcctgaccaagcagctgcactgctacaatgaaaggctgctggacttcacccaggcccagatcctgcagggcctgaggaaaggagtggatgtgcagcgcttcaccgcagatgaccagtacaagcgggagaccatcctgggcctggccgagaccctggaggagagcgtgtacagcatcgccatcagcctggcccagcgctacagcgtgagccgctgggaggtgttcatgacccacctggagttcctgttcacagacagcggcctgagcaccctggagattgagaacagagcccaggacctgcacctgtttgagaccctgaagacagatcctgaggccttccaccagcacatggtgaagtacatctaccccaccatcggcggctttgaccacgagcggctgcagtactacttcaccctgctggagaactgtggctgtgccgacctgggcaactgtgccatcaagccagagacccacatccggctgctgaagaagttcaaggtggtggccagcggcctgaactacaagaagctgacagatgagaacatgagccccctggaggccctggagcctgtgctgagcagccagaacatcctgagcatcagcaagctggtgcccaagatccctgagaaggatggccagatgctgagccccagcagcctgtacaccatctggctgcagaagctgttctggacaggagacccccacctgatcaagcaggtgcccggcagcagccctgagtggctgcacgcctatgatgtgtgcatgaagtactttgaccggctgcaccctggggacctgatcaccgtggtggatgctgtgaccttcagccccaaggctgtgaccaagctgtctgtggaggccaggaaggagatgaccaggaaggccatcaagacagtgaagcacttcatcgagaagcccaggaagagaaattctgaagatgaggcccaggaggccaaggacagcaaggtgacctacgccgacaccctgaaccacctggagaagagcctggcccacctggagaccctgagccacagcttcatcctgagcctgaagaacagcgagcaggagaccctgcagaagtacagccacctgtatgacctgagccgctctgagaaggagaagctgcatgatgaagctgtggccatctgcctggatggccagcccctggccatgatccagcagctgctggaggtggccgtgggccccctggacatcagccccaaggacatcgtgcagagcgccatcatgaagatcatcagcgccctgagcggcggcagcgctgacctgggcggcccccgggaccccctgaaggtgctggagggcgtggtggccgctgtgcacgcctctgtggacaagggggaggagctggtgtccccagaggacctgctggagtggctgcggcccttctgtgctgatgatgcctggcctgtgcggccccgcatccacgtgctgcagatcctgggccagagcttccacctgacagaggaggacagcaagctgctggtgttcttcagaacagaggccatcctgaaggcctcctggccccagaggcaggtggacattgctgacattgaaaatgaggagaaccgctactgcctcttcatggagctgctggagagcagccaccatgaagctgagttccagcacctggtgctgctgctgcaggcctggccacccatgaagtcagaatatgtgatcaccaacaacccctgggtgcggctggccaccgtgatgctgacccgctgcaccatggagaacaaggagggcctgggcaatgaggtgctgaagatgtgccgcagcctgtacaacaccaagcagatgctgcctgctgagggcgtgaaggagctgtgcctgctgctgctgaaccagagcctgctgctgcccagcctgaagctgctgctggagagcagagatgagcacctgcacgagatggccctggagcagatcacagctgtgaccaccgtgaatgacagcaactgtgaccaggagctgctgagcctgctgctggatgccaagctgctggtgaagtgtgtgtccacccccttctacccccgcatcgtggaccacctgctggccagcctgcagcagggccgctgggatgctgaggagctgggccgccacctgcgggaggccggccatgaagctgaggccggcagcctgctgctggccgtgcggggcacccaccaggccttccgcaccttcagcacagccctgcgggccgcccagcactgggtgtag

SEQ ID NO: 161533 - DNA, 6756 bp, synthetic construct
  misc_feature 1..6756: note = Description of Artificial Sequence: Synthetic coding sequence
  source 1..6756: mol_type = other DNA
atggccgcccctgagagcggccctgccctgagccctggaacagctgagggggaggaggagaccatcctgtatgacctgctggtgaacacagagtggcccccagagacagaggtgcagccccggggcaaccagaagcacggggccagcttcatcatcaccaaggccatccgggaccggctgctcttcctgcggcagtacatctggtacagccctgcccccttcctgctgcctgatggcctggtgcggctggtgaacaagcagatcaactggcacctggtgctggccagcaatggcaagctgctggccgctgtgcaggaccagtgtgtggagatccgcagcgccaaggatgacttcaccagcatcatcggcaagtgccaggtgcccaaggaccccaagccccagtggaggagagtggcctggagctatgactgcaccctgctggcctatgcagagagcactggaacagtgcgggtgtttgacctgatgggcagcgagctgtttgtgatcagccctgccagcagcttcatcggggacctgtcctatgccatcgccggcctcatcttcctggagtacaaggccagcgcccagtggagcgctgagctgctggtgatcaactacagaggagagctgcggagctacctggtgtctgtgggcaccaaccagagctaccaggagagccactgcttctccttcagcagccactacccccacggcatcaacacagccatctaccaccctggccaccggctgctgctggtgggcggctgtgaaacagctgaggtgggcatgagcaaggccagcagctgtggcctgagcgcctggagggtgctgagcggcagcccctactacaagcaggtgaccaatggaggagatggagtgacagctgtgcccaagaccctgggcctgctgaggatgctgtctgtgaagttctacagccggcagggccaggagcaggacggcatcttcaagatgagcctgagcccagatggcatgctgctggccgccatccacttcagcggcaagctgagcatctgggccatccccagcctgaagcagcagggcgagtggggccagaatgagcagcccggctatgatgacctgaacccagactggaggctgagcacagagaagaggaagaagatcaaggacaaggagagcttctaccccctgattgatgtgaactggtgggccgacagcgctgtgaccctggcccgctgcagcggggccctgactgtgtcctctgtgaagaccctgaagaacctgctgggcaagagctgtgagtggtttgagcccagcccccaggtgacagccacccatgatggcggcttcctgagcctggagtgtgagatcaagctggcccccaagaggagccggctggagaccagggctggggaggaggatgaaggagaagaagattctgacagcgactatgagatcagcgccaaggcccgctacttcggctacatcaagcagggcctgtacctggtgacagagatggagagatttgccccacccaggaagaggcccaggaccatcaccaagaactaccgcctggtgtccctgcggagcaccaccccagaggagctgtaccagaggaagattgagagcgaggagtatgaggaggccctgagcctggcccacacctacggcctggacacagacctggtgtaccagaggcagtggaggaagtctgctgtgaatgtggccagcatccagaactacctgagcaagatcaagaagaggtcctgggtgctgcatgaatgtctggagcgggtgcctgaaaatgtggatgctgccaaggagctgctgcagtatggcctgaagggcacagacctggaggccctgctggccatcggcaaaggagcagatgatggccgcttcaccctgcccggggagattgatattgacagcatctcctatgaggagctgagccccccagatgaggagcccgccaagaacaagaaggagaaggagctgaagaagaggcaggagctgctgaagctggtgaacttcagcaagctgaccctggagcagaaggagctgtgccgctgcaggaggaagctgctgacctacctggaccggctggccacctatgaggagatcctgggcgtgccccacgccagcgagcagagatatgatgctgagttcttcaagaagttcaggaaccagaacatcgtgctgagcgcccggacctacgcccaggagagcaatgtgcaggccctggagatcctcttcacctaccacggcagtgacctgctgccccaccggctggccatcctgagcaacttccctgagaccaccagcccccatgagtacagcgtgctgctgcctgaggcctgcttcaacggggacagcctgatgatcatcccctggcatgagcacaagcaccgggccaaggactggtgtgaggagctggcctgcaggatggtggtggagcccaacctgcaggatgaaagtgagttcctgtatgctgcccagcctgagctgctgcgcttcaggatgacccagctgactgtggagaaggtgatggactggtaccagaccagggctgaggagattgagcactacgcccggcagctgcagcagaagatcatcccagaccaggaccagctgatggccatcgccctggagtgcatctacacctgtgaaagaaatgaccagctgtgcctgtgctatgacctgctggagtgcctgcctgagcggggctatggagacaagacagaggccaccaccaagctgcatgacatggtggaccagctggagcagatcctgtctgtgtctgagctgctggagaagcacggcctggagaagcccatcagctttgtgaagaacacccagagcagcagcgaggaggccaggaagctgatggtgcggctgaccaggcacactggaaggaagcagccccctgtgtctgagagccactggaggaccctgctgcaggacatgctgaccatgcagcagaatgtgtacacctgcctggacagtgatgcctgctatgagatcttcacagagagcctgctgtgcagcagccggctggagaacatccacctggccggccagatgatgcactgcagcgcctgcagtgaaaatcctcctgctggcatcgcccacaagggcaagccccactacagagtgtcctatgagaagagcattgacctggtgctggccgccagccgggagtacttcaacagcagcaccaacctgacagacagctgcatggacctggcccgctgctgcctgcagctgatcacagaccggcccccagccatccaggaggagctggacctgatccaggccgtgggctgcctggaggagtttggagtgaagatcctgcccctgcaggtgcggctgtgcccagaccgcatcagcctcatcaaggagtgcatcagccagagccccacctgctacaagcagagcaccaagctgctgggcctggccgagctgctgcgggtggccggggagaaccctgaggagcggcggggccaggtgctgatcctgctggtggagcaggccctgcgcttccatgactacaaggccgcctccatgcactgccaggagctgatggccaccggctaccccaagtcctgggatgtgtgcagccagctgggccagagcgagggctaccaggacctggccacccggcaggagctgatggcctttgccctgacccactgcccccccagcagcattgagctgctgctggccgccagcagcagcctgcagacagagatcctgtaccagagggtgaacttccagatccaccatgaaggaggagagaacatcagcgccagccccctgaccagcaaggctgtgcaggaggatgaggtgggcgtgcccggcagcaacagcgctgacctgctgcgctggaccacagccaccaccatgaaggtgctgagcaacaccaccaccaccaccaaggctgtgctgcaggccgtgtctgatggccagtggtggaagaagagcctgacctacctgcggcccctgcagggccagaagtgtggcggggcctaccagatcggcaccacagccaatgaagacctggagaagcagggctgccaccccttctatgagagcgtcatcagcaacccctttgtggccgagagcgagggcacctatgacacctaccagcacgtgcctgtggagagctttgctgaggtgctgctgaggacaggcaagctggccgaggccaagaacaagggggaggtgttccccaccacagaggtgctgctgcagctggccagcgaggccctgcccaatgacatgaccctggccctggcctacctgctggccctgccccaggtgctggatgccaaccgctgctttgagaagcagagccccagcgccctgagcctgcagctggccgcctactactacagcctgcagatctatgcccggctggccccctgcttccgggacaagtgccaccccctgtacagagctgaccccaaggagctgatcaagatggtgaccaggcatgtgaccaggcatgagcacgaggcctggccagaagatctcatcagcctgaccaagcagctgcactgctacaatgaaaggctgctggacttcacccaggcccagatcctgcagggcctgaggaaaggagtggatgtgcagcgcttcaccgcagatgaccagtacaagcgggagaccatcctgggcctggccgagaccctggaggagagcgtgtacagcatcgccatcagcctggcccagcgctacagcgtgagccgctgggaggtgttcatgacccacctggagttcctgttcacagacagcggcctgagcaccctggagattgagaacagagcccaggacctgcacctgtttgagaccctgaagacagatcctgaggccttccaccagcacatggtgaagtacatctaccccaccatcggcggctttgaccacgagcggctgcagtactacttcaccctgctggagaactgtggctgtgccgacctgggcaactgtgccatcaagccagagacccacatccggctgctgaagaagttcaaggtggtggccagcggcctgaactacaagaagctgacagatgagaacatgagccccctggaggccctggagcctgtgctgagcagccagaacatcctgagcatcagcaagctggtgcccaagatccctgagaaggatggccagatgctgagccccagcagcctgtacaccatctggctgcagaagctgttctggacaggagacccccacctgatcaagcaggtgcccggcagcagccctgagtggctgcacgcctatgatgtgtgcatgaagtactttgaccggctgcaccctggggacctgatcaccgtggtggatgctgtgaccttcagccccaaggctgtgaccaagctgtctgtggaggccaggaaggagatgaccaggaaggccatcaagacagtgaagcacttcatcgagaagcccaggaagagaaattctgaagatgaggcccaggaggccaaggacagcaaggtgacctacgccgacaccctgaaccacctggagaagagcctggcccacctggagaccctgagccacagcttcatcctgagcctgaagaacagcgagcaggagaccctgcagaagtacagccacctgtatgacctgagccgctctgagaaggagaagctgcatgatgaagctgtggccatctgcctggatggccagcccctggccatgatccagcagctgctggaggtggccgtgggccccctggacatcagccccaaggacatcgtgcagagcgccatcatgaagatcatcagcgccctgagcggcggcagcgctgacctgggcggcccccgggaccccctgaaggtgctggagggcgtggtggccgctgtgcacgcctctgtggacaagggggaggagctggtgtccccagaggacctgctggagtggctgcggcccttctgtgctgatgatgcctggcctgtgcggccccgcatccacgtgctgcagatcctgggccagagcttccacctgacagaggaggacagcaagctgctggtgttcttcagaacagaggccatcctgaaggcctcctggccccagaggcaggtggacattgctgacattgaaaatgaggagaaccgctactgcctcttcatggagctgctggagagcagccaccatgaagctgagttccagcacctggtgctgctgctgcaggcctggccacccatgaagtcagaatatgtgatcaccaacaacccctgggtgcggctggccaccgtgatgctgacccgctgcaccatggagaacaaggagggcctgggcaatgaggtgctgaagatgtgccgcagcctgtacaacaccaagcagatgctgcctgctgagggcgtgaaggagctgtgcctgctgctgctgaaccagagcctgctgctgcccagcctgaagctgctgctggagagcagagatgagcacctgcacgagatggccctggagcagatcacagctgtgaccaccgtgaatgacagcaactgtgaccaggagctgctgagcctgctgctggatgccaagctgctggtgaagtgtgtgtccacccccttctacccccgcatcgtggaccacctgctggccagcctgcagcagggccgctgggatgctgaggagctgggccgccacctgcgggaggccggccatgaagctgaggccggcagcctgctgctggccgtgcggggcacccaccaggccttccgcaccttcagcacagccctgcgggccgcccagcactgggtgtag

SEQ ID NO: 161534 - DNA, 10662 bp, synthetic construct
  misc_feature 1..10662: note = Description of Artificial Sequence: Synthetic coding sequence
  source 1..10662: mol_type = other DNA
atggtggtgtctgctggcccctggagcagcgagaaggccgagatgaacatcctggagatcaatgagaccctgcggccccagctggccgagaagaagcagcagttcaggaacctgaaggagaagtgcttcctgacccagctggccggcttcctggccaaccggcagaagaagtacaagtatgaggagtgcaaggacctgatcaagttcatgctgagaaatgaaaggcagttcaaggaggagaagctggccgagcagctgaagcaggccgaggagctgcggcagtacaaggtgctggtgcacagccaggagcgggagctgacccagctgcgggagaagctgcgggagggcagagatgccagccgcagcctgtatgagcacctgcaggccctgctgaccccagatgagccagacaagagccagggccaggacctgcaggagcagctggccgagggctgccgcctggcccagcacctggtgcagaagctgagcccagaaaatgatgaagatgaagatgaagatgtgcaggtggaggaggccgagaaggtgctggagagcagcgccccccgggaggtgcagaaggccgaggagagcaaggtgcctgaggacagcctggaggagtgtgccatcacctgcagcaacagccacggcccctgtgacagcaaccagccccacaagaacatcaagatcacctttgaagaagatgaggtgaacagcaccctggtggtggaccgggagagcagccatgatgagtgccaggatgccctgaacatcctgcctgtgcccggccccaccagcagcgccaccaacgtgtccatggtggtgtctgctggccccctgagcagcgagaaggccgagatgaacatcctggagatcaatgagaagctgcggccccagctggccgagaagaagcagcagttcaggaacctgaaggagaagtgcttcctgacccagctgagcggcttcctggccaaccagcagaagaagtacaagtatgaggagtgcaaggacctgatcaagttcatgctgagaaatgaaaggcagttcaaggaggagaagctggccgagcagctgaagcaggccgaggagctgcggcagtacaaggtgctggtgcacgcccaggagcgggagctgacccagctgaaggagaagctgcgggagggcagagatgccagccgcagcctgaatgagcacctgcaggccctgctgaccccctatgagccagacaagagccagggccaggacctgcaggagcagctggccgagggctgccgcctggcccagcacctggtgcagaagctgagcccagaaaatgacaatgatgatgatgaagatgtgcaggtggaggtggccgagaaggtgcagaagagcagcgccccccgggagatgcagaaggccgaggagaaggaggtgcctgaggacagcctggaggagtgtgccatcacctacagcaacagccacggcagctatgacagcaaccagccccacaggaagaccaagatcacctttgaggaggacaaggtggacagcaccctcatcggcagcagcagccacgtggagtgggaggatgctgtgcacatcatcccagaaaatgaaagtgatgatgaggaggaggaggagaagggccctgtgagccccaggaacctgcaggagagcgaggaggaggaggtgccccaggagagctgggatgagggctacagcaccctgagcatccccccagagatgctggccagctaccagagctacagcagcaccttccacagcctggaggagcagcaggtgtgcatggctgtggacatcggccgccaccgctgggaccaggtgaagaaggaggaccaggaggccaccggcccccggctgagccgggagctgctggatgagaaggagcctgaggtgctgcaggacagcctggaccgctgctacagcacccccagcggctacctggagctgcctgacctgggccagccctacagcagcgctgtgtacagcctggaggagcagtacctgggcctggccctggatgtggaccgcatcaagaaggaccaggaggaggaggaggaccagggccccccctgcccccggctgagccgggagctgctggaggtggtggagcctgaggtgctgcaggacagcctggaccgctgctacagcacccccagcagctgcctggagcagcctgacagctgccagccctacggcagcagcttctacgccctggaggagaagcacgtgggcttcagcctggatgtgggggagattgagaagaagggcaagggcaagaagagaagaggccgccgcagcaagaaggagaggagaagaggaaggaaggagggggaggaggaccagaaccccccctgcccccggctgagccgggagctgctggatgagaagggccctgaggtgctgcaggacagcctggaccgctgctacagcaccccatctggctgcctggagctgacagacagctgccagccctacagaagtgccttctacgtgctggagcagcagagggtgggctttgctgtggacatggatgaaattgagaagtaccaggaggtggaggaggaccaggaccccagctgcccccggctgagccgggagctgctggatgagaaggagcctgaggtgctgcaggacagcctggaccgctgctacagcacccccagcggctacctggagctgcctgacctgggccagccctacagcagcgctgtgtacagcctggaggagcagtacctgggcctggccctggatgtggaccgcatcaagaaggaccaggaggaggaggaggaccagggccccccctgcccccggctgagccgggagctgctggaggtggtggagcctgaggtgctgcaggacagcctggaccgctgctacagcacccccagcagctgcctggagcagcctgacagctgccagccctacggcagcagcttctacgccctggaggagaagcacgtgggcttcagcctggatgtgggggagattgagaagaagggcaagggcaagaagagaagaggccgccgcagcaagaaggagaggagaagaggaaggaaggagggggaggaggaccagaaccccccctgcccccggctgagccgggagctgctggatgagaagggccctgaggtgctgcaggacagcctggaccgctgctacagcaccccatctggctgcctggagctgacagacagctgccagccctacagaagtgccttctacgtgctggagcagcagagggtgggctttgctgtggacatggatgaaattgagaagtaccaggaggtggaggaggaccaggaccccagctgcccccggctgagccgggagctgctggatgagaaggagcctgaggtgctgcaggacagcctggaccgctgctacagcacccccagcggctacctggagctgcctgacctgggccagccctacagcagcgctgtgtacagcctggaggagcagtacctgggcctggccctggatgtggaccgcatcaagaaggatgaggaggaggaggaggaccaggaccccccctgcccccggctgagccgggagctgctggaggtggtggcccctgaggtgctgcaggacagcctggaccgctgctacagcacccccagcagctgcctggagcagcctgacagctgccagccctacggcagcagcttctacgccctggaggagaagcacgtgggcttcagcctggatgtgggggagattgagaagaagggcaagggcaagaagagaagaggccgccgcagcaagaaggagaggagaagaggaaggaaggagggggaggaggaccagaaccccccctgcccccggctgagccgggagctgctggatgagaagggccctgaggtgctgcaggacagcctggaccgctgctacagcaccccatctggctgcctggagctgacagacagctgccagccctacagaagtgccttctacgtgctggagcagcagagggtgggcatggctgtggacatggatgaaattgagaagtaccaggaggtggaggaggaccaggaccccagctgcccccggctgagccgggagctgctggatgagaaggagcctgaggtgctgcaggacagcctgaaccgctgctacagcacccccagcggctacctggagctgcctgacctgggccagccctacagcagcgctgtgtacagcctggaggagcagtacctgggcctggccctggatgtggaccgcatcaagaaggaccaggaggaggaggaggatgaggaccaggaccccccctgcccccggctgagccgggagctgctggaggtggtggagcctgaggtgctgcaggacagcctggaccgctgctacagcacccccagcagctgcctggagcagcctgacagctgccagccctacggcagcagcttctacgccctggaggagaaccacgtgggcttcagcctggatgtgggggagattgagaagaagggcaagggcaagaagagaagaggccgccgcagcaagaaggagaggagaagaggaaggaaggagggggaggaggaccagaaccccccctgcccccggctgagccgggagctgctggatgagaagggccctgaggtgctgcaggacagcctggaccgctgctacagcaccccatctggctgcctggagctgacagacagctgccagccctacagaagtgccttctacgtgctggagcagcagcacgtgggcctggccgtggacatggatgaaattgagaagtaccaggaggtggaggaggaccaggaccccagctgcccccggctgagccgggagctgctggatgagaaggagcctgaggtgctgcaggacagcctggaccgctgctacagcacccccagcggctacctggagctgcctgacctgggccagccctacagcagcgctgtgtacagcctggaggagcagtacctgggcctggccctggatgtggaccgcatcaagaaggaccaggaggaggaggaggaccagggccccccctgcccccggctgagccgggagctgctggaggtggtggagcctgaggtgctgcaggacagcctggaccgctgctacagcacccccagcagctgcctggagcagcctgacagctgccagccctacggcagcagcttctacgccctggaggagaaccacgtgggcttcagcctggatgtgggggagattgagaagaagggcaagggcaagaagagaagaggccgccgcagcaagaaggagaggagaagaggaaggaaggagggggaggaggaccagaaccccccctgcccccggctgagccgggagctgctggatgagaagggccctgaggtgctgcaggacagcctggaccgctgctacagcaccccatctggctgcctggagctgacagacagctgccagccctacagaagtgccttctacgtgctggagcagcagcacgtgggcctggccgtggacatggatgaaattgagaagtaccaggaggtggaggaggaccaggaccccagctgcccccggctgagccgggagctgctggatgagaaggagcctgaggtgctgcaggacagcctggaccgctgctacagcacccccagcggctacctggagctgcctgacctgggccagccctacagcagcgctgtgtacagcctggaggagcagtacctgggcctggccctggatgtggaccgcatcaagaaggaccaggaggaggaggaggaccagggccccccctgcccccggctgagccgggagctgctggaggtggtggagcctgaggtgctgcaggacagcctggaccgctgctacagcacccccagcagctgcctggagcagcctgacagctgccagccctacggcagcagcttctacgccctggaggagaaccacgtgggcttcagcctggatgtgggggagattgagaagaagggcaagggcaagaagagaagaggccgccgcagcaagaaggagaggagaagaggaaggaaggagggggaggaggaccagaaccccccctgcccccggctgagccgggagctgctggatgagaagggccctgaggtgctgcaggacagcctggaccgctgctacagcaccccatctggctgcctggagctgacagacagctgccagccctacagaagtgccttctacgtgctggagcagcagcacgtgggcctggccgtggacatggatgaaattgagaagtaccaggaggtggaggaggaccaggaccccagctgcccccggctgagccgggagctgctggatgagaaggagcctgaggtgctgcaggacagcctggaccgctgctacagcacccccagcggctacctggagctgcctgacctgggccagccctacagcagcgctgtgtacagcctggaggagcagtacctgggcctggccctggatgtggaccgcatcaagaaggaccaggaggaggaggaggaccagggccccccctgcccccggctgagccgggagctgctggaggtggtggagcctgaggtgctgcaggacagcctggaccgctgctacagcacccccagcagctgcctggagcagcctgacagctgccagccctacggcagcagcttctacgccctggaggagaaccacgtgggcttcagcctggatgtgggggagattgagaagaagggcaagggcaagaagagaagaggccgccgcagcaagaaggagaggagaagaggaaggaaggagggggaggaggaccagaaccccccctgcccccggctgagccgggagctgctggatgagaagggccctgaggtgctgcaggacagcctggaccgctgctacagcaccccatctggctgcctggagctgacagacagctgccagccctacagaagtgccttctacgtgctggagcagcagcacgtgggcctggccgtggacatggatgaaattgagaagtaccaggaggtggaggaggaccaggaccccagctgcccccggctgagccgggagctgctggatgagaaggagcctgaggtgctgcaggacagcctggaccgctgctacagcacccccagcggctacctggagctgcctgacctgggccagccctacagcagcgctgtgtacagcctggaggagcagtacctgggcctggccctggatgtggaccgcatcaagaaggaccaggaggaggaggaggaccagggccccccctgcccccggctgagccgggagctgctggaggtggtggagcctgaggtgctgcaggacagcctggaccgctgctacagcacccccagcagctgcctggagcagcctgacagctgccagccctacggcagcagcttctacgccctggaggagaaccacgtgggcttcagcctggatgtgggggagattgagaagaagggcaagggcaagaagagaagaggccgccgcagcaagaaggagaggagaagaggaaggaaggagggggaggaggaccagaaccccccctgcccccggctgagccgggagctgctggatgagaagggccctgaggtgctgcaggacagcctggaccgctgctacagcaccccatctggctgcctggagctgacagacagctgccagccctacagaagtgccttctacgtgctggagcagcagcacgtgggcctggccgtggacatggatgaaattgagaagtaccaggaggtggaggaggaccaggaccccagctgcccccggctgagccgggagctgctggatgagaaggagcctgaggtgctgcaggacagcctggaccgctgctacagcacccccagcggctacctggagctgcctgacctgggccagccctacagcagcgctgtgtacagcctggaggagcagtacctgggcctggccctggatgtggaccgcatcaagaaggaccaggaggaggaggaggaccagggccccccctgcccccggctgagccgggagctgctggaggtggtggagcctgaggtgctgcaggacagcctggaccgctgctacagcacccccagcagctgcctggagcagcctgacagctgccagccctacggcagcagcttctacgccctggaggagaagcacgtgggcttcagcctggatgtgggggagattgagaagaagggcaagggcaagaagagaagaggccgccgcagcaagaaggagaggagaagaggaaggaaggagggggaggaggaccagaaccccccctgcccccggctgagccgggagctgctggatgagaagggccctgaggtgctgcaggacagcctggaccgctgctacagcaccccatctggctgcctggagctgacagacagctgccagccctacagaagtgccttctacgtgctggagcagcagcacgtgggcctggccgtggacatggatgaaattgagaagtaccaggaggtggaggaggaccaggaccccagctgcccccggctgagccgggagctgctggatgagaaggagcctgaggtgctgcaggacagcctggaccgctgctacagcacccccagcggctacctggagctgcctgacctgggccagccctacagcagcgctgtgtacagcctggaggagcagtacctgggcctggccctggatgtggaccgcatcaagaaggaccaggaggaggaggaggaccagggccccccctgcccccggctgagccgggagctgctggaggtggtggagcctgaggtgctgcaggacagcctggaccgctgctacagcacccccagcagctgcctggagcagcctgacagctgccagccctacggcagcagcttctacgccctggaggagaagcacgtgggcttcagcctggatgtgggggagattgagaagaagggcaagggcaagaagagaagaggccgccgcagcaagaaggagaggagaagaggaaggaaggagggggaggaggaccagaaccccccctgcccccggctgagccgggagctgctggatgagaagggccccaaggtgctgcaggacagcctggaccgctgctacagcaccccatctggctgcctggagctgtgtgacagctgccagccctacagaagtgccttctacgtgctggagcagcagagggtgggcctggccgtggacatggatgaaattgagaagtaccaggaggtggaggaggaccaggaccccagctgcccccggctgagccgggagctgctggatgagaagggccctgaggtgctgcaggacagcctggaccgctgctacagcacccccagcggctgcctggagctgtgtgacagctgccagccctaccgcagcgccttctacatcctggagcagcagagggtgggcctggccgtggacatggatgaaattgagaagtaccaggaggtggaggaggaccaggaccccagctgcccccggctgagccgggagctgctggatgagaaggagcctgaggtgctgcaggacagcctggaccgctgctacagcaccccatctggctacctggagctgcctgacctgggccagccctacagcagcgctgtgtacagcctggaggagcagtacctgggcctggccctggatgtggaccgcatcaagaaggaccaggaggaggaggaggaccagggccccccctgcccccggctgagccgggagctgctggaggtggtggagcctgaggtgctgcaggacagcctggaccgctgctacagcacccccagcagctgcctggagcagcctgacagctgccagccctacggcagcagcttctacgccctggaggagaagcacgtgggcttcagcctggatgtgggggagattgagaagaagggcaagggcaagaagaggcggggcagaagaagcaagaaggagcggcggcggggcaggaaggagggggaggaggaccagaaccccccctgcccccggctgagccgggagctgctggatgagaagggccctgaggtgctgcaggacagcctggaccgctgctacagcacccccagcggctgcctggagctgtgtgacagctgccagccctaccgcagcgccttctacgtgctggagcagcagcacgtgggcctggccgtggacatggatgaaattgagaagtaccaggaggtggaggaggaccaggaccccagctgcccccggctgagccgggagctgctggatgagaaggagcctgaggtgctgcaggacagcctggaccgctgctacagcaccccatctggctacctggagctgcctgacctgggccagccctacagcagcgctgtgtacagcctggaggagcagtacctgggcctggccctggatgtggacaagattgagaagaagggcaagggcaagaagagaagaggccgccgcagcaagaaggagaggagaagaggaaggaaggagggggaggaggaccagaaccccccctgcccccggctgaatggagtgctgatggaggtggaggagcgggaggtgctgcaggacagcctggaccgctgctacagcacccccagcatgtactttgagctgcctgacagcttccagcactacagatctgtgttctacagctttgaggagcagcacatcagctttgccctgtatgtggacaaccgcttcttcaccctgactgtgaccagcctgcacctggtgttccagatgggcgtcatcttcccccagtag

SEQ ID NO: 161535 - DNA, 900 bp, synthetic construct
  misc_feature 1..900: note = Description of Artificial Sequence: Synthetic coding sequence
  source 1..900: mol_type = other DNA
atggtggtgtctgctggccccctgagcagcgagaaggccgagatgaacatcctggagatcaatgagaagctgcggccccagctggccgagaagaagcagcagttcaggaacctgaaggagaagtgcttcctgacccagctgagcggcttcctggccaaccagcagaagaagtacaagtatgaggagtgcaaggacctgatcaagttcatgctgagaaatgaaaggcagttcaaggaggagaagctggccgagcagctgaagcaggccgaggagctgcggcagtacaaggtgctggtgcacgcccaggagcgggagctgacccagctgaaggagaagctgcgggagggcagagatgccagccgcagcctgaatgagcacctgcaggccctgctgaccccctatgagccagacaagagccagggccaggacctgcaggagcagctggccgagggctgccgcctggcccagcacctggtgcagaagctgagcccagaaaatgacaatgatgatgatgaagatgtgcaggtggaggtggccgagaaggtgcagaagagcagcgccccccgggagatgcagaaggccgaggagaaggaggtgcctgaggacagcctggaggagtgtgccatcacctacagcaacagccacggcagctatgacagcaaccagccccacaggaagaccaagatcacctttgaggaggacaaggtggacagcaccctgattggcagcagcagccacgtggagtgggaggatgctgtgcacatcatcccagaaaatgaaagtgatgatgaggaggaggaggagaagggccctgtgagccccaggacctctgtgggcagcagcgagaagggcggcccccggggcaacagaagccaggcccagcagggcgccgccggctag

SEQ ID NO: 161536 - DNA, 2010 bp, synthetic construct
  misc_feature 1..2010: note = Description of Artificial Sequence: Synthetic coding sequence
  source 1..2010: mol_type = other DNA
atggtggtgtctgctggccccctgagcagcgagaaggccgagatgaacatcctggagatcaatgagaagctgcggccccagctggccgagaagaagcagcagttcaggaacctgaaggagaagtgcttcctgacccagctgagcggcttcctggccaaccagcagaagaagtacaagtatgaggagtgcaaggacctgatcaagttcatgctgagaaatgaaaggcagttcaaggaggagaagctggccgagcagctgaagcaggccgaggagctgcggcagtacaaggtgctggtgcacgcccaggagcgggagctgacccagctgaaggagaagctgcgggagggcagagatgccagccgcagcctgaatgagcacctgcaggccctgctgaccccctatgagccagacaagagccagggccaggacctgcaggagcagctggccgagggctgccgcctggcccagcacctggtgcagaagctgagcccagaaaatgacaatgatgatgatgaagatgtgcaggtggaggtggccgagaaggtgcagaagagcagcgccccccgggagatgcagaaggccgaggagaaggaggtgcctgaggacagcctggaggagtgtgccatcacctacagcaacagccacggcagctatgacagcaaccagccccacaggaagaccaagatcacctttgaggaggacaaggtggacagcaccctgattggcagcagcagccacgtggagtgggaggatgctgtgcacatcatcccagaaaatgaaagtgatgatgaggaggaggaggagaagggccctgtgagccccaggaacctgcaggagagcgaggaggaggaggtgccccaggagagctgggatgagggctacagcaccctgagcatccccccagagatgctggccagctaccagagctacagcagcaccttccacagcctggaggagcagcaggtgtgcatggctgtggacatcggccgccaccgctgggaccaggtgaagaaggaggaccaggaggccaccggccccagccgggagctgctggatgagaagggccctgaggtgttccaggacagccaggaccgctgctacagcaccccatctggctgcctggagctgacagacagctgccagccctacagaagtgccttctacatcctggagcagcagagggtgggcctggccatcgacatggatgaaattgagaagtaccaggaggtggaggaggaccaggaccccagctgcccccggctgagccgggagctgctggatgagaaggagcctgaggtgctgcaggacagcctggaccgctgctacagcacccccagcggctacctggagctgcctgacctgggccagccctacagcagcgctgtgtacagcctggaggagcagtacctgggcctggccctggatgtggaccgcatcaagaaggaccaggaggaggaggaggaccagggccccccctgcccccggctgagccgggagctgctggatgagaagggccctgaggtgctgcaggacagcctggaccgctgctacagcaccccatctggctgcctggagctgacagacagctgccagccctacagaagtgccttctacgtgctggagcagcagcacgtgggcctggccgtggacatggatgaaattgagaagaagggcaagggcaagaagagaagaggccgccgcagcaagaaggagaggagaagaggaaggaaggagggggaggaggaccagaaccccccctgcccccggctgaatggagtgctgatggaggtggaggagcgggaggtgctgcaggacagcctggaccgctgctacagcacccccagcatgtactttgagctgcctgacagcttccagcactacagatctgtgttctacagctttgaggagcagcacatcagctttgccctgtatgtggacaaccgcttcttcaccctgactgtgaccagcctgcacctggtgttccagatgggcgtcatcttcccccagtag

SEQ ID NO: 161537 - DNA, 2022 bp, synthetic construct
  misc_feature 1..2022: note = Description of Artificial Sequence: Synthetic coding sequence
  source 1..2022: mol_type = other DNA
atggtggtgtctgctggcccctggagcagcgagaaggccgagatgaacatcctggagatcaatgagaccctgcggccccagctggccgagaagaagcagcagttcaggaacctgaaggagaagtgcttcctgacccagctggccggcttcctggccaaccggcagaagaagtacaagtatgaggagtgcaaggacctgatcaagttcatgctgagaaatgaaaggcagttcaaggaggagaagctggccgagcagctgaagcaggccgaggagctgcggcagtacaaggtgctggtgcacagccaggagcgggagctgacccagctgcgggagaagctgcgggagggcagagatgccagccgcagcctgtatgagcacctgcaggccctgctgaccccagatgagccagacaagagccagggccaggacctgcaggagcagctggccgagggctgccgcctggcccagcacctggtgcagaagctgagcccagaaaatgatgaagatgaagatgaagatgtgcaggtggaggaggccgagaaggtgctggagagcagcgccccccgggaggtgcagaaggccgaggagagcaaggtgcctgaggacagcctggaggagtgtgccatcacctgcagcaacagccacggcccctgtgacagcaaccagccccacaagaacatcaagatcacctttgaagaagatgaggtgaacagcaccctggtggtggaccgggagagcagccatgatgagtgccaggatgccctgaacatcctgcctgaaaatgaaagtgatgatgaggaggaggaggagaagggccctgtgagccccaggaacctgcaggagagcgaggaggaggaggtgccccaggagagctgggatgagggctacagcaccctgagcatccccccagagatgctggccagctaccagagctacagcagcaccttccacagcctggaggagcagcaggtgtgcatggctgtggacatcggccgccaccgctgggaccaggtgaagaaggaggaccaggaggccaccggcccccggctgagccgggagctgctggatgagaagggccctgaggtgctgcaggacagcctggaccgctgctacagcaccccatctggctgcctggagctgacagacagctgccagccctacagaagtgccttctacgtgctggagcagcagagggtgggctttgctgtggacatggatgaaattgagaagtaccaggaggtggaggaggaccaggaccccagctgcccccggctgagccgggagctgctggatgagaaggagcctgaggtgctgcaggacagcctggaccgctgctacagcacccccagcggctacctggagctgcctgacctgggccagccctacagcagcgctgtgtacagcctggaggagcagtacctgggcctggccctggatgtggaccgcatcaagaaggaccaggaggaggaggaggaccagggccccccctgcccccggctgagccgggagctgctggaggtggtggagcctgaggtgctgcaggacagcctggaccgctgctacagcacccccagcagctgcctggagcagcctgacagctgccagccctacggcagcagcttctacgccctggaggagaagcacgtgggcttcagcctggatgtgggggagattgagaagaagggcaagggcaagaagagaagaggccgccgcagcaagaaggagaggagaagaggaaggaaggagggggaggaggaccagaaccccccctgcccccggctgaatggagtgctgatggaggtggaggagcgggaggtgctgcaggacagcctggaccgctgctacagcacccccagcatgtactttgagctgcctgacagcttccagcactacagatctgtgttctacagctttgaggagcagcacatcagctttgccctgtatgtggacaaccgcttcttcaccctgactgtgaccagcctgcacctggtgttccagatgggcgtcatcttcccccagtag

SEQ ID NO: 161538 - DNA, 519 bp, synthetic construct
  misc_feature 1..519: note = Description of Artificial Sequence: Synthetic coding sequence
  source 1..519: mol_type = other DNA
atggctgtggacatcggccgccaccgctgggaccaggtgaagaaggaggaccaggaggccaccggccccagccgggagctgctggatgagaagggccctgaggtgttccaggacagccaggaccgctgctacagcacccccagcggctgcctggagctgacagacagctgccagccctaccgcagcgccttctacatcctggagcagcagagggtgggcctggccatcgacatggatgaaattgagaagtaccaggaggtggaggaggaccaggaccccagctgcccccggctgagccgggagctgctggatgagaaggagcctgaggtgctgcaggacagcctggaccgctgctacagcaccccatctggctacctggagctgcctgacctgggccagccctacagcagcgctgtgtacagcctggaggagcagtacctgggcctggccctggatgtggaccgcatcaagaaggaccaggaggaggaggaggaccagggccccccctgccccaggtag

SEQ ID NO: 161539 - DNA, 2295 bp, synthetic construct
  misc_feature 1..2295: note = Description of Artificial Sequence: Synthetic coding sequence
  source 1..2295: mol_type = other DNA
atgttcagcaacagcacaggccgcctgcccggccagcccacagaggagatccagcagtacaaggtgctggtgcacagccaggagcgggagctgacccagctgcgggagaagctgcgggagggcagagatgccagccgcagcctgtatgagcacctgcaggccctgctgaccccagatgagccagacaagagccagggccaggacctgcaggagcagctggccgagggctgccgcctggcccagcacctggtgcagaagctgagcccagaaaatgatgaagatgaagatgaagatgtgcaggtggaggaggccgagaaggtgctggagagcagcgccccccgggaggtgcagaaggccgaggagagcaaggtgcctgaggacagcctggaggagtgtgccatcacctgcagcaacagccacggcccctgtgacagcaaccagccccacaagaacatcaagatcacctttgaggaggatgaggtgaacagcaccctggtggtggaccgggagagcagccatgatgagtgccaggatgccctgaacatcctgcctgtgcccggccccaccagcagcgccaccaacgtgtccatggtggtgtctgctggccccctgagcagcgagaaggccgagatgaacatcctggagatcaatgagaagctgcggccccagctggccgagaagaagcagcagttcaggaacctgaaggagaagtgcttcctgacccagctgagcggcttcctggccaaccagcagaagaagtacaagtatgaggagtgcaaggacctgatcaagttcatgctgagaaatgaaaggcagttcaaggaggagaagctggccgagcagctgaagcaggccgaggagctgcggcagtacaaggtgctggtgcacgcccaggagcgggagctgacccagctgaaggagaagctgcgggagggcagagatgccagccgcagcctgaatgagcacctgcaggccctgctgaccccctatgagccagacaagagccagggccaggacctgcaggagcagctggccgagggctgccgcctggcccagcacctggtgcagaagctgagcccagaaaatgacaatgatgatgatgaagatgtgcaggtggaggtggccgagaaggtgcagaagagcagcgccccccgggagatgcagaaggccgaggagaaggaggtgcctgaggacagcctggaggagtgtgccatcacctacagcaacagccacggcagctatgacagcaaccagccccacaggaagaccaagatcacctttgaggaggacaaggtggacagcaccctgattggcagcagcagccacgtggagtgggaggatgctgtgcacatcatcccagaaaatgaaagtgatgatgaggaggaggaggagaagggccctgtgagccccaggaacctgcaggagagcgaggaggaggaggtgccccaggagagctgggatgagggctacagcaccctgagcatccccccagagatgctggccagctaccagagctacagcagcaccttccacagcctggaggagcagcaggtgtgcatggctgtggacatcggccgccaccgctgggaccaggtgaagaaggaggaccaggaggccaccggcccccggctgagccgggagctgctggatgagaagggccctgaggtgctgcaggacagcctggaccgctgctacagcaccccatctggctgcctggagctgacagacagctgccagccctacagaagtgccttctacgtgctggagcagcagcacgtgggcctggccgtggacatggatgaaattgagaagtaccaggaggtggaggaggaccaggaccccagctgcccccggctgagccgggagctgctggatgagaaggagcctgaggtgctgcaggacagcctggaccgctgctacagcacccccagcggctacctggagctgcctgacctgggccagccctacagcagcgctgtgtacagcctggaggagcagtacctgggcctggccctggatgtggaccgcatcaagaaggaccaggaggaggaggaggaccagggccccccctgcccccggctgagccgggagctgctggaggtggtggagcctgaggtgctgcaggacagcctggaccgctgctacagcacccccagcagctgcctggagcagcctgacagctgccagccctacggcagcagcttctacgccctggaggagaagcacgtgggcttcagcctggatgtgggggagattgagaagaagggcaagggcaagaagagaagaggccgctag

SEQ ID NO: 161540 - DNA, 105 bp, synthetic construct
  misc_feature 1..105: note = Description of Artificial Sequence: Synthetic coding sequence
  source 1..105: mol_type = other DNA
attggcagcagcagccacgtggagtgggaggatgctgtgcacatcatcccagaaaatgaaagtgatgatgaggaggaggaggagaagggccctgtgagcccctag

SEQ ID NO: 161541 - DNA, 2517 bp, synthetic construct
  misc_feature 1..2517: note = Description of Artificial Sequence: Synthetic coding sequence
  source 1..2517: mol_type = other DNA
atggtggtgtctgctggcccctggagcagcgagaaggccgagatgaacatcctggagatcaatgagaagctgcggccccagctggccgagaacaagcagcagttcaggaacctgaaggagcgctgcttcctgacccagctggccggcttcctggccaaccggcagaagaagtacaagtatgaggagtgcaaggacctgatcaagttcatgctgagaaatgaaaggcagttcaaggaggagaagctggccgagcagctgaagcaggccgaggagctgcggcagtacaaggtgctggtgcacagccaggagcgggagctgacccagctgcgggagaagctgcgggagggcagagatgccagccgcagcctgaatgagcacctgcaggccctgctgaccccagatgagccagacaagagccagggccaggacctgcaggagcagctggccgagggctgccgcctggcccagcacctggtgcagaagctgagcccagaaaatgatgaagatgaagatgaagatgtgcaggtggaggaggatgagaaggtgctggagagcagcgccccccgggaggtgcagaaggccgaggagagcaaggtgcctgaggacagcctggaggagtgtgccatcacctgcagcaacagccacggcccctgtgacagcatccagccccacaagaacatcaagatcacctttgaggaggacaaggtgaacagcagcctggtggtggaccgggagagcagccatgatggctgccaggatgccctgaacatcctgcctgtgcccggccccaccagcagcgccaccaacgtgtccatggtggtgtctgctggccccctgagcagcgagaaggccgagatgaacatcctggagatcaatgagaagctgtgcccccagctggccgagaagaagcagcagttccgcagcctgaaggagaagtgctttgtgacccaggtggcctgcttcctggccaagcagcagaacaagtacaagtatgaggagtgcaaggacctgatcaagtccatgctgagaaatgaaaggcagttcaaggaggagaagctggccgagcagctgaagcaggccgaggagctgcggcagtacaaggtgctggtgcacagccaggagcgggagctgacccagctgcgggagaagctgcgggagggcagagatgccagccgcagcctgaatgagcacctgcaggccctgctgaccccagatgagccagacaagagccagggccaggacctgcaggagcagctggccgagggctgccgcctggcccagcacctggtgcagaagctgagcccagaaaatgacaatgatgatgatgaagatgtgcaggtggaggtggccgagaaggtgcagaagagcagcagcccccgggagatgcagaaggccgaggagaaggaggtgcctgaggacagcctggaggagtgtgccatcacctgcagcaacagccacggcccctatgacagcaaccagccccacaggaagcccaagagccacctgaggaagaccaagagcacccagctgagcctggcccaccccctgatgctgaatggaaggatgctgtacaccctgagccagaagatgaaggtgatgatgaggaagaggaagaagaagggccagtgcctgcccggcatctgccgcagcctgaagaggaggaagagccccaggagccctggcatgaaggtgatccggctgagccagttcctgctgaagggccaccgctgggaccaggtgaagaaggaggaccaggaggccaccggcccccggctgagccgggagctgctggatgagaaggagcctgaggtgctgcaggacagcctggaccgctgctacagcaccccatctgtgtacctgggcctgacagacagctgccagccctacagaagtgccttctacgtgctggagcagcagagaattggcctggccgtggacatggatgaaattgagaagtaccaggaggtggaggaggaccaggaccccagctgcccccggctgagccgggagctgctggccgagaaggagcctgaggtgctgcaggacagcctggaccgctgctacagcacccccagcggctacctggagctgcctgacctgggccagccctacagatctgctgtgtacagcctggaggagcagtacctgggcctggccctggatgtggaccgcatcaagaaggaccaggaggaggaggaggaccagggccccccctgcccccggctgagccgggagctgctggaggtggtggagcctgaggtgctgcaggacagcctggatgtgatccagctgctgcctgtggtgctgaacagcctgaccccagccagccccacagaggtgcccttcatgcactggaggaagaacatgctggccttcctgctgacctgggagaagctgaagagaagaggccggggcaggaaggagggggaggaggaccagaggaggaaggaggagggggaggagaagaagggcaagaagatcaagacccaccacgcccctggcagcgctgcctgctag

SEQ ID NO: 161542 - DNA, 2373 bp, synthetic construct
  misc_feature 1..2373: note = Description of Artificial Sequence: Synthetic coding sequence
  source 1..2373: mol_type = other DNA
atgttcagcaacagcacaggccgcctgcccggccagcccacagaggagatccagcagtacaaggtgctggtgcacagccaggagcgggagctgacccagctgcgggagaagctgcgggagggcagagatgccagccgcagcctgaatgagcacctgcaggccctgctgaccccagatgagccagacaagagccagggccaggacctgcaggagcagctggccgagggctgccgcctggcccagcacctggtgcagaagctgagcccagaaaatgatgaagatgaagatgaagatgtgcaggtggaggaggatgagaaggtgctggagagcagcgccccccgggaggtgcagaaggccgaggagagcaaggtgcctgaggacagcctggaggagtgtgccatcacctgcagcaacagccacggcccctgtgacagcatccagccccacaagaacatcaagatcacctttgaggaggacaaggtgaacagcagcctggtggtggaccgggagagcagccatgatggctgccaggatgccctgaacatcctgcctgtgcccggccccaccagcagcgccaccaacgtgtccatggtggtgtctgctggccccctgagcagcgagaaggccgagatgaacatcctggagatcaatgagaagctgtgcccccagctggccgagaagaagcagcagttccgcagcctgaaggagaagtgctttgtgacccaggtggcctgcttcctggccaagcagcagaacaagtacaagtatgaggagtgcaaggacctgatcaagtccatgctgagaaatgaaaggcagttcaaggaggagaagctggccgagcagctgaagcaggccgaggagctgcggcagtacaaggtgctggtgcacagccaggagcgggagctgacccagctgcgggagaagctgcgggagggcagagatgccagccgcagcctgaatgagcacctgcaggccctgctgaccccagatgagccagacaagagccagggccaggacctgcaggagcagctggccgagggctgccgcctggcccagcacctggtgcagaagctgagcccagaaaatgacaatgatgatgatgaagatgtgcaggtggaggtggccgagaaggtgcagaagagcagcagcccccgggagatgcagaaggccgaggagaaggaggtgcctgaggacagcctggaggagtgtgccatcacctgcagcaacagccacggcccctatgacagcaaccagccccacaggaagaccaagatcacctttgaggaggacaaggtggacagcaccctgattggcagcagcagccacgtggagtgggaggatgctgtgcacatcatcccagaaaatgaaagtgatgatgaggaggaggaggagaagggccctgtgagccccaggaacctgcaggagagcgaggaggaggaggtgccccaggagagctgggatgagggctacagcaccctgagcatccccccagagcggctggccagctaccagagctacagcagcaccttccacagcctggaggagcagcaggtgtgcatggctgtggacatcggccgccaccgctgggaccaggtgaagaaggaggaccaggaggccaccggcccccggctgagccgggagctgctggatgagaaggagcctgaggtgctgcaggacagcctggaccgctgctacagcaccccatctgtgtacctgggcctgacagacagctgccagccctacagaagtgccttctacgtgctggagcagcagagaattggcctggccgtggacatggatgaaattgagaagtaccaggaggtggaggaggaccaggaccccagctgcccccggctgagccgggagctgctggccgagaaggagcctgaggtgctgcaggacagcctggaccgctgctacagcacccccagcggctacctggagctgcctgacctgggccagccctacagatctgctgtgtacagcctggaggagcagtacctgggcctggccctggatgtggaccgcatcaagaaggaccaggaggaggaggaggaccagggccccccctgcccccggctgagccgggagctgctggaggtggtggagcctgaggtgctgcaggacagcctggatgtgatccagctgctgcctgtggtgctgaacagcctgaccccagccagccccacagaggtgcccttcatgcactggaggaagaacatgctggccttcctgctgacctgggagaagctgaagagaagaggccggggcaggaaggagggggaggaggaccagaggaggaaggaggagggggaggagaagaagggcaagaagatcaagacccaccacgcccctggcagcgctgcctgctag

SEQ ID NO: 161543 - DNA, 258 bp, synthetic construct
  misc_feature 1..258: note = Description of Artificial Sequence: Synthetic coding sequence
  source 1..258: mol_type = other DNA
gagatgcagaaggccgaggagaaggaggtgcctgaggacagcctggaggagtgtgccatcacctgcagcaacagccacggcccctatgacagcaaccagccccacaggaagaccaagatcacctttgaggaggacaaggtggacagcaccctcatcggcagcagcagccacgtggagtgggaggatgctgtgcacatcatcccagaaaatgaaagtgatgatgaggaggaggaggagaagggccctgtgagcccctag

SEQ ID NO: 161544 - DNA, 1101 bp, synthetic construct
  misc_feature 1..1101: note = Description of Artificial Sequence: Synthetic coding sequence
  source 1..1101: mol_type = other DNA
ctggccagctaccagagctacagcagcaccttccacagcctggaggagcagcaggtgtgcatggctgtggacatcggccgccaccgctgggaccaggtgaagaaggaggaccaggaggccaccggcccccggctgagccgggagctgctggatgagaaggagcctgaggtgctgcaggacagcctggaccgctgctacagcacccccagcgtgtacctgggcctgacagacagctgccagccctaccgcagcgccttctacgtgctggagcagcagagaattggcctggccgtggacatggatgaaattgagaagtaccaggaggtggaggaggaccaggaccccagctgcccccggctgagccgggagctgctggccgagaaggagcctgaggtgctgcaggacagcctggaccgctgctacagcaccccatctggctacctggagctgcctgacctgggccagccctacagatctgctgtgtacagcctggaggagcagtacctgggcctggccctggatgtggaccgcatcaagaaggaccaggaggaggaggaggaccagggccccccctgcccccggctgagccgggagctgctggaggtggtggagcctgaggtgctgcaggacagcctgtgctacagcacccccagcagctgcctggagcagcctgacagctgccagccctacggcagcagcttctacgccctggaggagaagcacgtgggcttcagcctggatgtgggggagattgagaagaagggcaagggcaagaagaggcggggcagaagaagcaagaagaagagaagaagaggaaggaaggagggggaggaggaccagaaccccccctgcccccggctgagctctgtgctgatggaggtggaggtgcctgaggtgctgcaggacagcctggaccgctactacagcacccccagcatgtactttgagctgcctgacagcttccagcactaccgcagcgtcttctacagctttgaggagcagcacatcagctttgccctggacatggacaaccgcttcttcaccctgactgtgcgcagcctgcacctggtgttccagatgggcgtcatcttcccccagtag

SEQ ID NO: 161545 - DNA, 2598 bp, synthetic construct
  misc_feature 1..2598: note = Description of Artificial Sequence: Synthetic coding sequence
  source 1..2598: mol_type = other DNA
atggtggtgtctgctggcccctggagcagcgagaaggccgagatgaacatcctggagatcaatgagaagctgcggccccagctggccgagaacaagcagcagttcaggaacctgaaggagcgctgcttcctgacccagctggccggcttcctggccaaccggcagaagaagtacaagtatgaggagtgcaaggacctgatcaagttcatgctgagaaatgaaaggcagttcaaggaggagaagctggccgagcagctgaagcaggccgaggagctgcggcagtacaaggtgctggtgcacagccaggagcgggagctgacccagctgcgggagaagctgcgggagggcagagatgccagccgcagcctgaatgagcacctgcaggccctgctgaccccagatgagccagacaagagccagggccaggacctgcaggagcagctggccgagggctgccgcctggcccagcacctggtgcagaagctgagcccagaaaatgatgaagatgaagatgaagatgtgcaggtggaggaggatgagaaggtgctggagagcagcgccccccgggaggtgcagaaggccgaggagagcaaggtgcctgaggacagcctggaggagtgtgccatcacctgcagcaacagccacggcccctgtgacagcatccagccccacaagaacatcaagatcacctttgaggaggacaaggtgaacagcagcctggtggtggaccgggagagcagccatgatggctgccaggatgccctgaacatcctgcctgtgcccggccccaccagcagcgccaccaacgtgtccatggtggtgtctgctggccccctgagcagcgagaaggccgagatgaacatcctggagatcaatgagaagctgtgcccccagctggccgagaagaagcagcagttccgcagcctgaaggagaagtgctttgtgacccaggtggcctgcttcctggccaagcagcagaacaagtacaagtatgaggagtgcaaggacctgatcaagtccatgctgagaaatgaaaggcagttcaaggaggagaagctggccgagcagctgaagcaggccgaggagctgcggcagtacaaggtgctggtgcacagccaggagcgggagctgacccagctgcgggagaagctgcgggagggcagagatgccagccgcagcctgaatgagcacctgcaggccctgctgaccccagatgagccagacaagagccagggccaggacctgcaggagcagctggccgagggctgccgcctggcccagcacctggtgcagaagctgagcccagaaaatgacaatgatgatgatgaagatgtgcaggtggaggtggccgagaaggtgcagaagagcagcagcccccgggagatgcagaaggccgaggagaaggaggtgcctgaggacagcctggaggagtgtgccatcacctgcagcaacagccacggcccctatgacagcaaccagccccacaggaagaccaagatcacctttgaggaggacaaggtggacagcaccctcatcggcagcagcagccacgtggagtgggaggatgctgtgcacatcatcccagaaaatgaaagtgatgatgaggaggaggaggagaagggccctgtgagccccaggaacctgcaggagagcgaggaggaggaggtgccccaggagagctgggatgagggctacagcaccctgagcatccccccagagcggctggccagctaccagagctacagcagcaccttccacagcctggaggagcagcaggtgtgcatggctgtggacatcggccgccaccgctgggaccaggtgaagaaggaggaccaggaggccaccggcccccggctgagccgggagctgctggatgagaaggagcctgaggtgctgcaggacagcctggaccgctgctacagcacccccagcgtgtacctgggcctgacagacagctgccagccctaccgcagcgccttctacgtgctggagcagcagagaattggcctggccgtggacatggatgaaattgagaagtaccaggaggtggaggaggaccaggaccccagctgcccccggctgagccgggagctgctggccgagaaggagcctgaggtgctgcaggacagcctggaccgctgctacagcaccccatctggctacctggagctgcctgacctgggccagccctacagatctgctgtgtacagcctggaggagcagtacctgggcctggccctggatgtggaccgcatcaagaaggaccaggaggaggaggaggaccagggccccccctgcccccggctgagccgggagctgctggaggtggtggagcctgaggtgctgcaggacagcctggatgtgatccagctgctgcctgtggtgctgaacagcctgaccccagccagccccacagaggtgcccttcatgcactggaggaagaacatgctggccttcctgctgacctgggagaagctgaagaggcggggccggggcaggaaggagggggaggaggaccagaggaggaaggaggagggggaggagaagaagggcaagaagatcaagacccaccacgcccctggcagcgctgcctgctag

SEQ ID NO: 161546 - DNA, 2373 bp, synthetic construct
  misc_feature 1..2373: note = Description of Artificial Sequence: Synthetic coding sequence
  source 1..2373: mol_type = other DNA
atgttcagcaacagcacaggccgcctgcccggccagcccacagaggagatccagcagtacaaggtgctggtgcacagccaggagcgggagctgacccagctgcgggagaagctgcgggagggcagagatgccagccgcagcctgaatgagcacctgcaggccctgctgaccccagatgagccagacaagagccagggccaggacctgcaggagcagctggccgagggctgccgcctggcccagcagctggtgcagaagctgagcccagaaaatgatgaagatgaagatgaagatgtgcaggtggaggaggatgagaaggtgctggagagcagcgccccccgggaggtgcagaaggccgaggagagcaaggtgcctgaggacagcctggaggagtgtgccatcacctgcagcaacagccacggcccctgtgacagcaaccagccccacaagaacatcaagatcacctttgaggaggacaaggtgaacagcagcctggtggtggaccgggagtacagccatgatgagtgccaggatgccctgaacatcctgcctgtgcccggccccaccagcagcgccaccaacgtgtccatggtggtgtctgctggccccctgagcagcgagaaggccgagatgaacatcctggagatcaatgagaagctgcggccccagctggccgagaagaagcagcagttccgcagcctgaaggagaagtgctttgtgacccaggtggcctgcttcctggccaagcagcagaacaagtacaagtatgaggagtgcaaggacctgatcaagtccatgctgagaaatgagctgcagttcaaggaggagaagctggccgagcagctgaagcaggccgaggagctgcggcagtacaaggtgctggtgcacagccaggagcgggagctgacccagctgcgggagaagctgcgggagggcagagatgccagccgcagcctgaatgagcacctgcaggccctgctgaccccagatgagccagacaagagccagggccaggacctgcaggagcagctggccgagggctgccgcctggcccagcacctggtgcagaagctgagcccagaaaatgacaatgatgatgatgaagatgtgcaggtggaggtggccgagaaggtgcagaagagcagcagcccccgggagatgcagaaggccgaggagaaggaggtgcctgaggacagcctggaggagtgtgccatcacctgcagcaacagccacggcccctatgacagcaaccagccccacaggaagaccaagatcacctttgaggaggacaaggtggacagcaccctgattggcagcagcagccacgtggagtgggaggatgctgtgcacatcatcccagaaaatgaaagtgatgatgaggaggaggaggagaagggccctgtgagccccaggaacctgcaggagagcgaggaggaggaggtgccccaggagagctgggatgagggctacagcaccctgagcatccccccagagcggctggccagctaccagagctacagcagcaccttccacagcctggaggagcagcaggtgtgcatggctgtggacatcggccgccaccgctgggaccaggtgaagaaggaggaccaggaggccaccggcccccggctgagccgggagctgctggccgagaaggagcctgaggtgctgcaggacagcctggaccgctgctacagcaccccatctgtgtacctgggcctgacagacagctgccagccctacagaagtgccttctacgtgctggagcagcagagggtgggcctggccgtggacatggatgaaattgagaagtaccaggaggtggaggaggaccaggaccccagctgcccccggctgagccgggagctgctggccgagaaggagcctgaggtgctgcaggacagcctggaccgctgctacagcacccccagcggctacctggagctgcctgacctgggccagccctacagatctgctgtgtacagcctggaggagcagtacctgggcctggccctggatgtggaccgcatcaagaaggaccaggaggaggaggaggaccagggccccccctgcccccggctgagccgggagctgctggaggtggtggagcctgaggtgctgcaggacagcctggatgtgatccagctgctgcctgtggtgctgaacagcctgaccccagccagccccacagaggtgcccttcatgcactggaggaagaacatgctggccttcctgctgacctgggagaagctgaagagaagaggccggggcaggaaggagggggaggaggaccagaggaggaaggaggagggggaggagaagaagggcaagaagatcaagacccaccacgcccctggcagcacagcctgctag

SEQ ID NO: 161547 - DNA, 234 bp, synthetic construct
  misc_feature 1..234: note = Description of Artificial Sequence: Synthetic coding sequence
  source 1..234: mol_type = other DNA
atggatgaaattgagaagtaccaggaggtggaggaggaccaggaccccagctgcccccggctgagccgggagctgctggccgagaaggagcctgaggtgctgcaggacagcctggaccgctgctacagcacccccagcggctacctggagctgcctgacctgggccagccctacagatctgctgtgtacagcctggaggagcagtacctgggcctggccctggatgtggactag

SEQ ID NO: 161548 - DNA, 234 bp, synthetic construct
  misc_feature 1..234: note = Description of Artificial Sequence: Synthetic coding sequence
  source 1..234: mol_type = other DNA
atggatgaaattgagaagtaccaggaggtggaggaggaccaggaccccagctgcccccggctgagccgggagctgctggccgagaaggagcctgaggtgctgcaggacagcctggaccgctggtacagcacccccagcggctacctggagctgcctgacctgggccagccctacagatctgctgtgtacagcctggaggagcagtacctgggcctggccctggatgtggactag

SEQ ID NO: 161549 - DNA, 234 bp, synthetic construct; identical to SEQ ID NO: 161547
  misc_feature 1..234: note = Description of Artificial Sequence: Synthetic coding sequence
  source 1..234: mol_type = other DNA

SEQ ID NO: 161550 - DNA, 207 bp, synthetic construct
  misc_feature 1..207: note = Description of Artificial Sequence: Synthetic coding sequence
  source 1..207: mol_type = other DNA
gagatgcagaaggccgaggagaaggaggtgcctgaggacagcctggaggagtgtgccatcacctgcagcaacagccacggcccctatgacagcaaccagccccacaggaagaccaagatcacctttgaggaggacaaggtggacagcaccctcatcggcagcagcagccacgtggagtgggaggatgctgtgcacatcatcccctag

SEQ ID NO: 161551 - DNA, 9996 bp, synthetic construct
  misc_feature 1..9996: note = Description of Artificial Sequence: Synthetic coding sequence
  source 1..9996: mol_type = other DNA
atggtggtgtctgctggcccctggagcagcgagaaggccgagatgaacatcctggagatcaatgagaagctgcggccccagctggccgagaacaagcagcagttcaggaacctgaaggagcgctgcttcctgacccagctggccggcttcctggccaaccggcagaagaagtacaagtatgaggagtgcaaggacctgatcaagttcatgctgagaaatgaaaggcagttcaaggaggagaagctggccgagcagctgaagcaggccgaggagctgcggcagtacaaggtgctggtgcacagccaggagcgggagctgacccagctgcgggagaagctgcgggagggcagagatgccagccgcagcctgaatgagcacctgcaggccctgctgaccccagatgagccagacaagagccagggccaggacctgcaggagcagctggccgagggctgccgcctggcccagcagctggtgcagaagctgagcccagaaaatgatgaagatgaagatgaagatgtgcaggtggaggaggatgagaaggtgctggagagcagcgccccccgggaggtgcagaaggccgaggagagcaaggtgcctgaggacagcctggaggagtgtgccatcacctgcagcaacagccacggcccctgtgacagcaaccagccccacaagaacatcaagatcacctttgaggaggacaaggtgaacagcacagtggtggtggacaggaagagcagccatgatgagtgccaggatgccctgaacatcctgcctgtgcccggccccaccagcagcgccaccaacgtgtccatggtggtgtctgctggccccctgagcagcgagaaggccgagatgaacatcctggagatcaatgagaagctgcggccccagctggccgagaagaagcagcagttccgcagcctgaaggagaagtgctttgtgacccagctggccggcttcctggccaagcagcagaacaagtacaagtatgaggagtgcaaggacctgatcaagtccatgctgagaaatgagctgcagttcaaggaggagaagctggccgagcagctgaagcaggccgaggagctgcggcagtacaaggtgctggtgcacagccaggagcgggagctgacccagctgcgggagaagctgcgggagggcagagatgccagccgcagcctgaatgagcacctgcaggccctgctgaccccagatgagccagacaagagccagggccaggacctgcaggagcagctggccgagggctgccgcctggcccagcacctggtgcagaagctgagcccagaaaatgatgaagatgaagatgaagatgtgcaggtggaggaggatgagaaggtgctggagagcagcagcccccgggagatgcagaaggccgaggagagcaaggtgcctgaggacagcctggaggagtgtgccatcacctgcagcaacagccacggcccctgtgacagcaaccagccccacaagaacatcaagatcacctttgaggaggacaaggtgaacagcagcctggtggtggaccgggagtacagccatgatgagtgccaggatgccctgaacatcctgcctgtgcccggccccaccagcagcgccaccaacgtgtccatggtggtgtctgctggccccctgagcagcgagaaggccgagatgaacatcctggagatcaatgagaagctgcggccccagctggccgagaagaagcagcagttccgcagcctgaaggagaagtgctttgtgacccaggtggcctgcttcctggccaagcagcagaacaagtacaagtatgaggagtgcaaggacctgatcaagtccatgctgagaaatgagctgcagttcaaggaggagaagctggccgagcagctgaagcaggccgaggagctgcggcagtacaaggtgctggtgcacagccaggagcgggagctgacccagctgcgggagaagctgcgggagggcagagatgccagccgcagcctgaatgagcacctgcaggccctgctgaccccagatgagccagacaagagccagggccaggacctgcaggagcagctggccgagggctgccgcctggcccagcacctggtgcagaagctgagcccagaaaatgacaatgatgatgatgaagatgtgcaggtggaggtggccgagaaggtgcagaagagcagcagcccccgggagatgcagaaggccgaggagaaggaggtgcctgaggacagcctggaggagtgtgccatcacctgcagcaacagccacggcccctatgacagcaaccagccccacaggaagaccaagatcacctttgaggaggacaaggtggacagcaccctgattggcagcagcagccacgtggagtgggaggatgctgtgcacatcatcccagaaaatgaaagtgatgatgaggaggaggaggagaagggccctgtgagccccaggaacctgcaggagagcgaggaggaggaggtgccccaggagagctgggatgagggctacagcaccctgagcatccccccagagcggctggccagctaccagagctacagcagcaccttccacagcctggaggagcagcaggtgtgcatggctgtggacatcggcagcgagtacagcatcgtgaaggtgatcaagctgcagttcatggcccagagccaggccatgcctgtgcccacctggacagactgccacgacatcgagctgaaggccggccaccgctgggaccaggtgaagaaggaggaccaggaggccaccggcccccggctgagccgggagctgctggccgagaaggagcctgaggtgctgcaggacagcctggaccgctgctacagcacccccagcgtgtacctgggcctgacagacagctgccagccctaccgcagcgccttctacgtgctggagcagcagagggtgggcctggccgtggacatggatgaaattgagaagtaccaggaggtggaggaggaccaggaccccagctgcccccggctgagccgggagctgctggccgagaaggagcctgaggtgctgcaggacagcctggaccgctggtacagcaccccatctggctacctggagctgcctgacctgggccagccctacagatctgctgtgtacagcctggaggagcagtacctgggcctggccctggatgtggaccgcatcaagaaggaccaggaggaggaggaggaccagggccccccctgcccccggctgagccgggagctgctggaggtggtggagcctgaggtgctgcaggacagcctggaccgctgctacagcacccccagcagctgcctggagcagcctgacagctgccagccctaccgcagcagcttctacgccctggaggagaagcacgtgggcttcagcctggatgtgggggagattgagaagaagggcaagggcaagaagaggcggggcagaagaagcaagaagaagagaagaagaggaaggaaggagggggaggaggaccagaaccccccctgcccccggctgagccgggagctgctggccgagaaggagcctgaggtgctgcaggacagcctggaccgctggtacagcacccccagcgtgtacctgggcctgacagacccctgccagccctaccgcagcgccttctacgtgctggagcagcagagggtgggcctggccgtggacatggatgaaattgagaagtaccaggaggtggaggaggaccaggaccccagctgcccccggctgagccgggagctgctggccgagaaggagcctgaggtgctgcaggacagcctggaccgctggtacagcaccccatctggctacctggagctgcctgacctgggccagccctacagatctgctgtgtacagcctggaggagcagtacctgggcctggccctggatgtggaccgcatcaagaaggaccaggaggaggaggaggaccagggccccccctgcccccggctgagccgggagctgctggaggtggtggagcctgaggtgctgcaggacagcctggaccgctgctacagcacccccagcagctgcctggagcagcctgacagctgccagccctaccgcagcagcttctacgccctggaggagaagcacgtgggcttcagcctggatgtgggggagattgagaagaagggcaagggcaagaagaggcggggcagaagaagcaagaagaagagaagaagaggaaggaaggagggggaggaggaccagaaccccccctgcccccggctgagccgggagctgctggccgagaaggagcctgaggtgctgcaggacagcctggaccgctggtacagcacccccagcgtgtacctgggcctgacagacccctgccagccctaccgcagcgccttctacgtgctggagcagcagagggtgggcctggccgtggacatggatgaaattgagaagtaccaggaggtggaggaggaccaggaccccagctgcccccggctgagccgggagctgctggccgagaaggagcctgaggtgctgcaggacagcctggaccgctggtacagcaccccatctggctacctggagctgcctgacctgggccagccctacagatctgctgtgtacagcctggaggagcagtacctgggcctggccctggatgtggaccgcatcaagaaggaccaggaggaggaggaggaccagggccccccctgcccccggctgagccgggagctgctggaggtggtggagcctgaggtgctgcaggacagcctggaccgctgctacagcacccccagcagctgcctggagcagcctgacagctgccagccctaccgcagcagcttctacgccctggaggagaagcacgtgggcttcagcctggatgtgggggagattgagaagaagggcaagggcaagaagaggcggggcagaagaagcaagaagaagagaagaagaggaaggaaggagggggaggaggaccagaaccccccctgcccccggctgagccgggagctgctggccgagaaggagcctgaggtgctgcaggacagcctggaccgctggtacagcacccccagcgtgtacctgggcctgacagacccctgccagccctaccgcagcgccttctacgtgctggagcagcagagggtgggcctggccgtggacatggatgaaattgagaagtaccaggaggtggaggaggaccaggaccccagctgcccccggctgagccgggagctgctggccgagaaggagcctgaggtgctgcaggacagcctggaccgctggtacagcaccccatctggctacctggagctgcctgacctgggccagccctacagatctgctgtgtacagcctggaggagcagtacctgggcctggccctggatgtggaccgcatcaagaaggaccaggaggaggaggaggaccagggccccccctgcccccggctgagccgggagctgctggaggtggtggagcctgaggtgctgcaggacagcctggaccgctgctacagcacccccagcagctgcctggagcagcctgacagctgccagccctaccgcagcagcttctacgccctggaggagaagcacgtgggcttcagcctggatgtgggggagattgagaagaagggcaagggcaagaagaggcggggcagaagaagcaagaagaagagaagaagaggaaggaaggagggggaggaggaccagaaccccccctgcccccggctgagccgggagctgctggccgagaaggagcctgaggtgctgcaggacagcctggaccgctggtacagcacccccagcgtgtacctgggcctgacagacccctgccagccctaccgcagcgccttctacgtgctggagcagcagagggtgggcctggccgtggacatggatgaaattgagaagtaccaggaggtggaggaggaccaggaccccagctgcccccggctgagccgggagctgctggccgagaaggagcctgaggtgctgcaggacagcctggaccgctggtacagcaccccatctggctacctggagctgcctgacctgggccagccctacagatctgctgtgtacagcctggaggagcagtacctgggcctggccctggatgtggacaagattgagaagtaccaggaggtggaggaggaccaggaccccagctgcccccggctgagccgggagctgctggccgagaaggagcctgaggtgctgcaggacagcctggaccgctggtacagcacccccagcgtgtacctgggcctgacagacccctgccagccctaccgcagcgccttctacgtgctggagcagcagagggtgggcctggccgtggacatggatgaaattgagaagtaccaggaggtggaggaggaccaggaccccagctgcccccggctgagccgggagctgctggccgagaaggagcctgaggtgctgcaggacagcctggaccgctgctacagcaccccatctggctacctggagctgcctgacctgggccagccctacagatctgctgtgtacagcctggaggagcagtacctgggcctggccctggatgtggaccgcatcaagaaggaccaggaggaggaggaggaccagggccccccctgcccccggctgagccgggagctgctggaggtggtggagcctgaggtgctgcaggacagcctggaccgctgctacagcacccccagcagctgcctggagcagcctgacagctgccagccctaccgcagcagcttctacgccctggaggagaagcacgtgggcttcagcctggatgtgggggagattgagaagtaccaggaggtggaggaggaccaggaccccagctgcccccggctgagccgggagctgctggccgagaaggagcctgaggtgctgcaggacagcctggaccgctggtacagcaccccatctgtgtacctgggcctgacagacccctgccagccctacagaagtgccttctacgtgctggagcagcagagggtgggcctggccgtggacatggatgaaattgagaagtaccaggaggtggaggaggaccaggaccccagctgcccccggctgagccgggagctgctggccgagaaggagcctgaggtgctgcaggacagcctggaccgctgctacagcacccccagcggctacctggagctgcctgacctgggccagccctacagatctgctgtgtacagcctggaggagcagtacctgggcctggccctggatgtggaccgcatcaagaaggaccaggaggaggaggaggaccagggccccccctgcccccggctgagccgggagctgctggaggtggtggagcctgaggtgctgcaggacagcctggaccgctgctacagcacccccagcagctgcctggagcagcctgacagctgccagccctaccgcagcagcttctacgccctggaggagaagcacgtgggcttcagcctggatgtgggggagattgagaagaagggcaagggcaagaagagaagaggccgccgcagcaagaagaagagaagaagaggaaggaaggagggggaggaggaccagaaccccccctgcccccggctgagccgggagctgctggccgagaaggagcctgaggtgctgcaggacagcctggaccgctggtacagcaccccatctgtgtacctgggcctgacagacccctgccagccctacagaagtgccttctacgtgctggagcagcagagggtgggcctggccgtggacatggatgaaattgagaagtaccaggaggtggaggaggaccaggaccccagctgcccccggctgagccgggagctgctggccgagaaggagcctgaggtgctgcaggacagcctggaccgctggtacagcacccccagcggctacctggagctgcctgacctgggccagccctacagatctgctgtgtacagcctggaggagcagtacctgggcctggccctggatgtggaccgcatcaagaaggaccaggaggaggaggaggaccagggccccccctgcccccggctgagccgggagctgctggaggtggtggagcctgaggtgctgcaggacagcctggaccgctgctacagcacccccagcagctgcctggagcagcctgacagctgccagccctaccgcagcagcttctacgccctggaggagaagcacgtgggcttcagcctggatgtgggggagattgagaagaagggcaagggcaagaagagaagaggccgccgcagcaagaagaagagaagaagaggaaggaaggagggggaggaggaccagaaccccccctgcccccggctgagccgggagctgctggccgagaaggagcctgaggtgctgcaggacagcctggaccgctggtacagcaccccatctgtgtacctgggcctgacagacccctgccagccctacagaagtgccttctacgtgctggagcagcagagggtgggcctggccgtggacatggatgaaattgagaagtaccaggaggtggaggaggaccaggaccccagctgcccccggctgagccgggagctgctggccgagaaggagcctgaggtgctgcaggacagcctggaccgctgctacagcacccccagcggctacctggagctgcctgacctgggccagccctacagatctgctgtgtacagcctggaggagcagtacctgggcctggccctggatgtggaccgcatcaagaaggaccaggaggaggaggaggaccagggccccccctgcccccggctgagccgggagctgctggaggtggtggagcctgaggtgctgcaggacagcctggaccgctgctacagcacccccagcagctgcctggagcagcctgacagctgccagccctaccgcagcagcttctacgccctggaggagaagcacgtgggcttcagcctggatgtgggggagattgagaagaagggcaagggcaagaagagaagaggccgccgcagcaagaagaagagaagaagaggaaggaaggagggggaggaggaccagaaccccccctgcccccggctgagccgggagctgctggccgagaaggagcctgaggtgctgcaggacagcctggaccgctggtacagcaccccatctgtgtacctgggcctgacagacccctgccagccctgccgcagcgccttctacgtgctggagcagcagagggtgggcctggccgtggacatggatgaaattgagaagtaccaggaggtggaggaggaccaggaccccagctgcccccggctgagccgggagctgctggccgagaaggagcctgaggtgctgcaggacagcctggaccgctgctacagcacccccagcggctacctggagctgcctgacctgggccagccctacagatctgctgtgtacagcctggaggagcagtacctgggcctggccctggatgtggaccgcatcaagaaggaccaggaggaggaggaggaccagggccccccctgcccccggctgagccgggagctgctggaggtggtggagcctgaggtgctgcaggacagcctggaccgctgctacagcacccccagcagctgcctggagcagcctgacagctgccagccctaccgcagcagcttctacgccctggaggagaagcacgtgggcttcagcctggatgtgggggagattgagaagaagggcaagggcaagaagagaagaggccgccgcagcaagaagaagagaagaagaggaaggaaggagggggaggaggaccagaaccccccctgcccccggctgaacagcgtgctgatggaggtggaggagcctgaggtgctgcaggacagcctggaccgctgctacagcacccccagcatgtactttgagctgcctgacagcttccagcactacagatctgtgttctacagctttgaggagcagcacatcacctttgccctggacatggacaacagcttcttcaccctgactgtgaccagcctgcacctggtgttccagatgggcgtcatcttcccccagtag

SEQ ID NO: 161552 - DNA, 234 bp, synthetic construct; identical to SEQ ID NO: 161547
  misc_feature 1..234: note = Description of Artificial Sequence: Synthetic coding sequence
  source 1..234: mol_type = other DNA

SEQ ID NO: 161553 - DNA, 2517 bp, synthetic construct
  misc_feature 1..2517: note = Description of Artificial Sequence: Synthetic coding sequence
  source 1..2517: mol_type = other DNA
atggtggtgtctgctggcccctggagcagcgagaaggccgagatgaacatcctggagatcaatgagaagctgcggccccagctggccgagaacaagcagcagttcaggaacctgaaggagcgctgcttcctgacccagctggccggcttcctggccaaccggcagaagaagtacaagtatgaggagtgcaaggacctgatcaagttcatgctgagaaatgaaaggcagttcaaggaggagaagctggccgagcagctgaagcaggccgaggagctgcggcagtacaaggtgctggtgcacagccaggagcgggagctgacccagctgcgggagaagctgcgggagggcagagatgccagccgcagcctgaatgagcacctgcaggccctgctgaccccagatgagccagacaagagccagggccaggacctgcaggagcagctggccgagggctgccgcctggcccagcagctggtgcagaagctgagcccagaaaatgatgaagatgaagatgaagatgtgcaggtggaggaggatgagaaggtgctggagagcagcgccccccgggaggtgcagaaggccgaggagagcaaggtgcctgaggacagcctggaggagtgtgccatcacctgcagcaacagccacggcccctgtgacagcaaccagccccacaagaacatcaagatcacctttgaggaggacaaggtgaacagcagcctggtggtggaccgggagtacagccatgatgagtgccaggatgccctgaacatcctgcctgtgcccggccccaccagcagcgccaccaacgtgtccatggtggtgtctgctggccccctgagcagcgagaaggccgagatgaacatcctggagatcaatgagaagctgcggccccagctggccgagaagaagcagcagttccgcagcctgaaggagaagtgctttgtgacccaggtggcctgcttcctggccaagcagcagaacaagtacaagtatgaggagtgcaaggacctgatcaagtccatgctgagaaatgagctgcagttcaaggaggagaagctggccgagcagctgaagcaggccgaggagctgcggcagtacaaggtgctggtgcacagccaggagcgggagctgacccagctgcgggagaagctgcgggagggcagagatgccagccgcagcctgaatgagcacctgcaggccctgctgaccccagatgagccagacaagagccagggccaggacctgcaggagcagctggccgagggctgccgcctggcccagcacctggtgcagaagctgagcccagaaaatgacaatgatgatgatgaagatgtgcaggtggaggtggccgagaaggtgcagaagagcagcagcccccgggagatgcagaaggccgaggagaaggaggtgcctgaggacagcctggaggagtgtgccatcacctgcagcaacagccacggcccctatgacagcaaccagccccacaggaagcccaagagccacctgaggaagaccaagagcacccagctgagcctggcccaccccctgatgctgaatggaaggatgctgtacaccctgagccagaagatgaaggtgatgatgaggaagaggaagaagaagggccagtgcctgcccggcatctgccgcagcctgaagaggaggaagagccccaggagccctggcatgaaggtgatccggctgagccagttcctgctgaagggccaccgctgggaccaggtgaagaaggaggaccaggaggccaccggcccccggctgagccgggagctgctggccgagaaggagcctgaggtgctgcaggacagcctggaccgctgctacagcaccccatctgtgtacctgggcctgacagacagctgccagccctacagaagtgccttctacgtgctggagcagcagagggtgggcctggccgtggacatggatgaaattgagaagtaccaggaggtggaggaggaccaggaccccagctgcccccggctgagccgggagctgctggccgagaaggagcctgaggtgctgcaggacagcctggaccgctgctacagcacccccagcggctacctggagctgcctgacctgggccagccctacagatctgctgtgtacagcctggaggagcagtacctgggcctggccctggatgtggaccgcatcaagaaggaccaggaggaggaggaggaccagggccccccctgcccccggctgagccgggagctgctggaggtggtggagcctgaggtgctgcaggacagcctggatgtgatccagctgctgcctgtggtgctgaacagcctgaccccagccagccccacagaggtgcccttcatgcactggaggaagaacatgctggccttcctgctgacctgggagaagctgaagagaagaggccggggcaggaaggagggggaggaggaccagaggaggaaggaggagggggaggagaagaagggcaagaagatcaagacccaccacgcccctggcagcacagcctgctag

SEQ ID NO: 161554 - DNA, 288 bp, synthetic construct
  misc_feature 1..288: note = Description of Artificial Sequence: Synthetic coding sequence
  source 1..288: mol_type = other DNA
attgctgagattgagaagtaccaggaggtggaggaggaccaggaccccagctgcccccggctgagccgggagctgctggccgagaaggagcctgaggtgctgcaggacagcctggaccgctggtacagcacccccagcggctacctggagctgcctgacctgggccagccctacagatctgctgtgtacagcctggaggagcagtacctgggcctggccctggatgtggacaagattgagaagtaccaggaggtggaggaggaccaggaccccagctgccccaggtag

SEQ ID NO: 161555 - DNA, 234 bp, synthetic construct; identical to SEQ ID NO: 161547
  misc_feature 1..234: note = Description of Artificial Sequence: Synthetic coding sequence
  source 1..234: mol_type = other DNA

SEQ ID NO: 161556 - DNA, 2784 bp, synthetic construct
  misc_feature 1..2784: note = Description of Artificial Sequence: Synthetic coding sequence
  source 1..2784: mol_type = other DNA
tgagatctcatcaagtccatgctgagaaatgaaaggcagttcaaggaggagaagctggccgagcagctgaagcaggccgaggagctgcggcagtacaaggtgctggtgcacgcccaggagcgggagctgacccagctgcgggagaagctgcgggagggcagagatgccagccgcagcctgaatgagcacctgcaggccctgctgaccccagatgagccagacaagagccagggccaggacctgcaggagcagctggccgagggctgccgcctggcccagcacctggtgcagaagctgagcccagaaaatgacaatgatgatgatgaagatgtgcaggtggaggtggccgagaaggtgcagaagagcagcgccccccgggagatgcagaaggccgaggagaaggaggtgcctgaggacagcctggaggagtgtgccatcacctgcagcaacagccacggcccctatgacagcaaccagccccacaggaagaccaagatcacctttgaggaggacaaggtggacagcaccctcatcggcagcagcagccacgtggagtgggaggatgctgtgcacatcatcccagaaaatgaaagtgatgatgaggaggaggaggagaagggccctgtgagccccaggaacctgcaggagagcgaggaggaggaggtgccccaggagagctgggatgagggctacagcaccctgagcatccccccagagatgctggccagctacaagagctacagcagcaccttccacagcctggaggagcagcaggtgtgcatggctgtggacatcggccgccaccgctgggaccaggtgaagaaggaggaccacgaggccaccggcccccggctgagccgggagctgctggatgagaagggccctgaggtgctgcaggacagcctggaccgctgctacagcacccccagcggctgcctggagctgacagacagctgccagccctaccgcagcgccttctacgtgctggagcagcagagggtgggcctggccgtgaacatggatgaaattgagaagtaccaggaggtggaggaggaccaggaccccagctgcccccggctgagccgggagctgctggatgagaaggagcctgaggtgctgcaggacagcctgggccgctgctacagcaccccatctggctacctggagctgcctgacctgggccagccctacagcagcgctgtgtacagcctggaggagcagtacctgggcctggccctggatgtggaccgcatcaagaaggaccaggaggaggaggaggaccagggccccccctgcccccggctgagccgggagctgctggaggtggtggagcctgaggtgctgcaggacagcctggaccgctgctacagcacccccagcagctgcctggagcagcctgacagctgccagccctacggcagcagcttctacgccctggaggagaagcacgtgggcttcagcctggatgtgggggagattgagaagaagggcaagggcaagaagaggcggggcagaagaagcaagaaggagcggcggcggggcaggaaggagggggaggaggaccagaaccccccctgcccccggctgagccgggagctgctggatgagaagggccctgaggtgctgcaggacagcctggaccgctgctacagcacccccagcggctgcctggagctgacagacagctgccagccctaccgcagcgccttctacatcctggagcagcagagggtgggcctggccgtggacatggatgaaattgagaagtaccaggaggtggaggaggaccaggaccccagctgcccccggctgtctggagagctgctggatgagaaggagcctgaggtgctgcaggagagcctggaccgctgctacagcaccccatctggctgcctggagctgacagacagctgccagccctacagaagtgccttctacatcctggagcagcagagggtgggcctggccgtggacatggatgaaattgagaagtaccaggaggtggaggaggaccaggaccccagctgcccccggctgagccgggagctgctggatgagaaggagcctgaggtgctgcaggacagcctgggccgctgctacagcacccccagcggctacctggagctgcctgacctgggccagccctacagcagcgctgtgtacagcctggaggagcagtacctgggcctggccctggatgtggaccgcatcaagaaggaccaggaggaggaggaggaccagggccccccctgcccccggctgagccgggagctgctggaggtggtggagcctgaggtgctgcaggacagcctggaccgctgctacagcacccccagcagctgcctggagcagcctgacagctgccagccctacggcagcagcttctacgccctggaggagaagcacgtgggcttcagcctggatgtgggggagattgagaagaagggcaagggcaagaagagaagaggccgccgcagcaagaaggagaggagaagaggaaggaaggagggggaggaggaccagaaccccccctgcccccggctgaacagcatgctgatggaggtggaggagcctgaggtgctgcaggacagcctggacatctgctacagcacccccagcatgtactttgagctgcctgacagcttccagcactacagatctgtgttctacagctttgaggaggagcacatcagctttgccctgtatgtggacaaccgcttcttcaccctgactgtgaccagcctgcacctggtgttccagatgggcgtcatcttcccccagtag

SEQ ID NO: 161557 - DNA, 2766 bp, synthetic construct
  misc_feature 1..2766: note = Description of Artificial Sequence: Synthetic coding sequence
  source 1..2766: mol_type = other DNA
atgctgagaaatgaaaggcagttcaaggaggagaagctggccgagcagctgaagcaggccgaggagctgcggcagtacaaggtgctggtgcacgcccaggagcgggagctgacccagctgcgggagaagctgcgggagggcagagatgccagccgcagcctgaatgagcacctgcaggccctgctgaccccagatgagccagacaagagccagggccaggacctgcaggagcagctggccgagggctgccgcctggcccagcacctggtgcagaagctgagcccagaaaatgacaatgatgatgatgaagatgtgcaggtggaggtggccgagaaggtgcagaagagcagcgccccccgggagatgcagaaggccgaggagaaggaggtgcctgaggacagcctggaggagtgtgccatcacctgcagcaacagccacggcccctatgacagcaaccagccccacaggaagaccaagatcacctttgaggaggacaaggtggacagcaccctcatcggcagcagcagccacgtggagtgggaggatgctgtgcacatcatcccagaaaatgaaagtgatgatgaggaggaggaggagaagggccctgtgagccccaggaacctgcaggagagcgaggaggaggaggtgccccaggagagctgggatgagggctacagcaccctgagcatccccccagagatgctggccagctacaagagctacagcagcaccttccacagcctggaggagcagcaggtgtgcatggctgtggacatcggccgccaccgctgggaccaggtgaagaaggaggaccacgaggccaccggcccccggctgagccgggagctgctggatgagaagggccctgaggtgctgcaggacagcctggaccgctgctacagcacccccagcggctgcctggagctgacagacagctgccagccctaccgcagcgccttctacgtgctggagcagcagagggtgggcctggccgtgaacatggatgaaattgagaagtaccaggaggtggaggaggaccaggaccccagctgcccccggctgagccgggagctgctggatgagaaggagcctgaggtgctgcaggacagcctgggccgctgctacagcaccccatctggctacctggagctgcctgacctgggccagccctacagcagcgctgtgtacagcctggaggagcagtacctgggcctggccctggatgtggaccgcatcaagaaggaccaggaggaggaggaggaccagggccccccctgcccccggctgagccgggagctgctggaggtggtggagcctgaggtgctgcaggacagcctggaccgctgctacagcacccccagcagctgcctggagcagcctgacagctgccagccctacggcagcagcttctacgccctggaggagaagcacgtgggcttcagcctggatgtgggggagattgagaagaagggcaagggcaagaagaggcggggcagaagaagcaagaaggagcggcggcggggcaggaaggagggggaggaggaccagaaccccccctgcccccggctgagccgggagctgctggatgagaagggccctgaggtgctgcaggacagcctggaccgctgctacagcacccccagcggctgcctggagctgacagacagctgccagccctaccgcagcgccttctacatcctggagcagcagagggtgggcctggccgtggacatggatgaaattgagaagtaccaggaggtggaggaggaccaggaccccagctgcccccggctgtctggagagctgctggatgagaaggagcctgaggtgctgcaggagagcctggaccgctgctacagcaccccatctggctgcctggagctgacagacagctgccagccctacagaagtgccttctacatcctggagcagcagagggtgggcctggccgtggacatggatgaaattgagaagtaccaggaggtggaggaggaccaggaccccagctgcccccggctgagccgggagctgctggatgagaaggagcctgaggtgctgcaggacagcctgggccgctgctacagcacccccagcggctacctggagctgcctgacctgggccagccctacagcagcgctgtgtacagcctggaggagcagtacctgggcctggccctggatgtggaccgcatcaagaaggaccaggaggaggaggaggaccagggccccccctgcccccggctgagccgggagctgctggaggtggtggagcctgaggtgctgcaggacagcctggaccgctgctacagcacccccagcagctgcctggagcagcctgacagctgccagccctacggcagcagcttctacgccctggaggagaagcacgtgggcttcagcctggatgtgggggagattgagaagaagggcaagggcaagaagagaagaggccgccgcagcaagaaggagaggagaagaggaaggaaggagggggaggaggaccagaaccccccctgcccccggctgaacagcatgctgatggaggtggaggagcctgaggtgctgcaggacagcctggacatctgctacagcacccccagcatgtactttgagctgcctgacagcttccagcactacagatctgtgttctacagctttgaggaggagcacatcagctttgccctgtatgtggacaaccgcttcttcaccctgactgtgaccagcctgcacctggtgttccagatgggcgtcatcttcccccagtag

SEQ ID NO: 161558 - DNA, 810 bp, synthetic construct
  misc_feature 1..810: note = Description of Artificial Sequence: Synthetic coding sequence
  source 1..810: mol_type = other DNA
atggatgaaattgagaagtaccaggaggtggaggaggaccaggaccccagctgcccccggctgagccgggagctgctggatgagaaggagcctgaggtgctgcaggacagcctgggccgctgctacagcacccccagcggctacctggagctgcctgacctgggccagccctacagcagcgctgtgtacagcctggaggagcagtacctgggcctggccctggatgtggaccgcatcaagaaggaccaggaggaggaggaggaccagggccccccctgcccccggctgagccgggagctgctggaggtggtggagcctgaggtgctgcaggacagcctggaccgctgctacagcacccccagcagctgcctggagcagcctgacagctgccagccctacggcagcagcttctacgccctggaggagaagcacgtgggcttcagcctggatgtgggggagattgagaagaagggcaagggcaagaagagaagaggccgccgcagcaagaaggagaggagaagaggaaggaaggagggggaggaggaccagaaccccccctgcccccggctgaacagcatgctgatggaggtggaggagcctgaggtgctgcaggacagcctggacatctgctacagcacccccagcatgtactttgagctgcctgacagcttccagcactacagatctgtgttctacagctttgaggaggagcacatcagctttgccctgtatgtggacaaccgcttcttcaccctgactgtgaccagcctgcacctggtgttccagatgggcgtcatcttcccccagtag

SEQ ID NO: 161559 - DNA, 1539 bp, synthetic construct
  misc_feature 1..1539: note = Description of Artificial Sequence: Synthetic coding sequence
  source 1..1539: mol_type = other DNA
tgatatgaggagtgcaaggacctgatcaagtccatgctgagaaatgaaaggcagttcaaggaggagaagctggccgagcagctgaagcaggccgaggagctgcggcagtacaaggtgctggtgcacgcccaggagcgggagctgacccagctgcgggagaagctgcgggagggcagagatgccagccgcagcctgaatgagcacctgcaggccctgctgaccccagatgagccagacaagagccagggccaggacctgcaggagcagctggccgagggctgccgcctggcccagcacctggtgcagaagctgagcccagaaaatgacaatgatgatgatgaagatgtgcaggtggaggtggccgagaaggtgcagaagagcagcgccccccgggagatgcagaaggccgaggagaaggaggtgcctgaggacagcctggaggagtgtgccatcacctgcagcaacagccacggcccctatgacagcaaccagccccacaggaagaccaagatcacctttgaggaggacaaggtggacagcaccctgattggcagcagcagccacgtggagtgggaggatgctgtgcacatcatcccagaaaatgaaagtgatgatgaggaggaggaggagaagggccctgtgagccccaggaacctgcaggagagcgaggaggaggaggtgccccaggagagctgggatgagggctacagcaccctgagcatccccccagagatgctggccagctacaagagctacagcagcaccttccacagcctggaggagcagcaggtgtgcatggctgtggacatcggccgccaccgctgggaccaggtgaagaaggaggaccacgaggccaccggcccccggctgagccgggagctgctggatgagaagggccctgaggtgctgcaggacagcctggaccgctgctacagcaccccatctggctgcctggagctgacagacagctgccagccctacagaagtgccttctacgtgctggagcagcagagggtgggcctggccgtgaacatggatgaaattgagaagtaccaggaggtggaggaggaccaggaccccagctgcccccggctgagccgggagctgctggatgagaaggagcctgaggtgctgcaggacagcctgggccgctgctacagcacccccagcggctacctggagctgcctgacctgggccagccctacagcagcgctgtgtacagcctggaggagcagtacctgggcctggccctggatgtggaccgcatcaagaaggaccaggaggaggaggaggaccagggccccccctgcccccggctgagccgggagctgctggaggtggtggagcctgaggtgctgcaggacagcctggaccgctgctacagcacccccagcagctgcctggagcagcctgacagctgccagccctacggcagcagcttctacgccctggaggagaagcacgtgggcttcagcctggatgtgggggagattgagaagaagggcaagggcaagaagagaagaggccgccgctcctag

SEQ ID NO: 161560 - DNA, 567 bp, synthetic construct
  misc_feature 1..567: note = Description of Artificial Sequence: Synthetic coding sequence
  source 1..567: mol_type = other DNA
atggatgaaattgagaagtaccaggaggtggaggaggaccaggaccccagctgcccccggctgagccgggagctgctggatgagaaggagcctgaggtgctgcaggacagcctgggccgctgctacagcacccccagcggctacctggagctgcctgacctgggccagccctacagcagcgctgtgtacagcctggaggagcagtacctgggcctggccctggatgtggaccgcatcaagaaggaccaggaggaggaggaggaccagggccccccctgcccccggctgagccgggagctgctggaggtggtggagcctgaggtgctgcaggacagcctggaccgctgctacagcacccccagcagctgcctggagcagcctgacagctgccagccctacggcagcagcttctacgccctggaggagaagcacgtgggcttcagcctggatgtgggggagattgagaagaagggcaagggcaagaagagaagaggccgccgcagcaagaaggagaggagaagaggaaggaaggagggggaggaggaccagaaccccccctgcccctag

SEQ ID NO: 161561 - DNA, 1539 bp, synthetic construct; identical to SEQ ID NO: 161559
  misc_feature 1..1539: note = Description of Artificial Sequence: Synthetic coding sequence
  source 1..1539: mol_type = other DNA

SEQ ID NO: 161562 - DNA, 1539 bp, synthetic construct; identical to SEQ ID NO: 161559
  misc_feature 1..1539: note = Description of Artificial Sequence: Synthetic coding sequence
  source 1..1539: mol_type = other DNA

SEQ ID NO: 161563 - DNA, 753 bp, synthetic construct
  misc_feature 1..753: note = Description of Artificial Sequence: Synthetic coding sequence
  source 1..753: mol_type = other DNA
gagattgagaagtaccaggaggtggaggaggaccaggaccccagctgcccccggctgagccgggagctgctggatgagaaggagcctgaggtgctgcaggacagcctgggccgctgctacagcacccccagcggctacctggagctgcctgacctgggccagccctacagcagcgctgtgtacagcctggaggagcagtacctgggcctggccctggatgtggaccgcatcaagaaggaccaggaggaggaggaggaccagggccccccctgcccccggctgagccgggagctgctggaggtggtggagcctgaggtgctgcaggacagcctggaccgctgctacagcacccccagcagctgcctggagcagcctgacagctgccagccctacggcagcagcttctacgccctggaggagaagcacgtgggcttcagcctggatgtgggggagattgagaagaagggcaagggcaagaagagaagaggccgccgcagcaagaaggagaggagaagaggaaggaaggagggggaggaggaccagaaccccccctgcccccggctgtctggagagctgctggatgagaaggagcctgaggtgctgcaggagagcctggaccgctgctacagcaccccatctggctgcctggagctgacagacagctgccagccctacagaagtgccttctacatcctggagcagcagagggtgggcctggccgtggacatggatggagagtacctgtccatgtag

SEQ ID NO: 161564 - DNA, 1539 bp, synthetic construct; identical to SEQ ID NO: 161559
  misc_feature 1..1539: note = Description of Artificial Sequence: Synthetic coding sequence
  source 1..1539: mol_type = other DNA

SEQ ID NO: 161565 - DNA, 1539 bp, synthetic construct; identical to SEQ ID NO: 161559
  misc_feature 1..1539: note = Description of Artificial Sequence: Synthetic coding sequence
  source 1..1539: mol_type = other DNA

SEQ ID NO: 161566 - DNA, 1539 bp, synthetic construct; identical to SEQ ID NO: 161559
  misc_feature 1..1539: note = Description of Artificial Sequence: Synthetic coding sequence
  source 1..1539: mol_type = other DNA

SEQ ID NO: 161567 - DNA, 1539 bp, synthetic construct; identical to SEQ ID NO: 161559
  misc_feature 1..1539: note = Description of Artificial Sequence: Synthetic coding sequence
  source 1..1539: mol_type = other DNA

SEQ ID NO: 161568 - DNA, 2013 bp, synthetic construct
  misc_feature 1..2013: note = Description of Artificial Sequence: Synthetic coding sequence
  source 1..2013: mol_type = other DNA
atggtggtgtctgctggccccctgagcagcgagaaggccgagatgaacatcctggagatcaatgagaagctgcggccccagctggccgagaagaagcagcagttcaggaacctgaaggagaagtgcttcctgacccagctggccggcttcctggccaaccggcagaagaagtacaagtatgaggagtgcaaggacctgatcaagttcatgctgagaaatgaaaggcagttcaaggaggagaagctggccgagcagctgaagcaggccgaggagctgcggcagtacaaggtgctggtgcacgcccaggagcgggagctgacccagctgcgggagaagctgcgggagggcagagatgccagccgcagcctgaatgagcacctgcaggccctgctgaccccagatgagccagacaagagccagggccaggacctgcaggagcagctggccgagggctgccgcctgacccagcacctggtgcagaagctgagcccagaaaatgacaatgatgatgatgaagatgtgcaggtggaggtggccgagaaggtgcagaagagcagcgccccccgggagatgcagaaggccgaggagaaggaggtgcctgaggacagcctggaggagtgtgccatcacctgcagcaacagccacggcccctatgacagcaaccagccccacaagaagaccaagatcacctttgaggaggacaaggtggacagcaccctgattggcagcagcagccacgtggagtgggaggatgctgtgcacatcatcccagaaaatgaaagtgatgatgaggaggaggaggagaagggccctgtgagccccaggaacctgcaggagagcgaggaggaggaggtgccccaggagagctgggatgagggctacagcaccctgagcatccccccagagatgctggccagctaccagagctacagcagcaccttccacagcctggaggagcagcaggtgtgcatggctgtggacatcggccgccaccgctgggaccaggtgaagaaggaggaccaggaggccaccggcccccggctgagccgggagctgctggatgagaaggagcctgaggtgctgcaggacagcctggaccgctgctacagcaccccatctggctgcctggagctgacagacagctgccagccctacagaagtgccttctacgtgctggagcagcagagggtgggcctggccatcgacatggatgaaattgagaagtaccaggaggtggaggaggaccaggaccccagctgcccccggctgagccgggagctgctggatgagaaggagcctgaggtgctgcaggacagcctggaccgctgctacagcacccccagcgactacctggagctgcctgacctgggccagccctacagcagcgctgtgtacagcctggaggagcagtacctgggcctggccctggatgtggaccgcatcaagaaggaccaggaggaggaggaggaccagggccccccctgcccccggctgagccgggagctgctggaggtggtggagcctgaggtgctgcaggacagcctggaccgctgctacagcacccccagcagctgcctggagcagcctgacagctgccagccctacggcagcagcttctacgccctggaggagaagcacgtgggcttcagcctggatgtgggggagattgagaagaagggcaagggcaagaagagaagaggccgccgcagcaagaagaagagaagaagaggaaggaaggagggggaggatgacaaccccccctgcccccggctgtatggagtgctgatggaggtggaggagcctgaggtgctgcaggacagcctggaccgctgctacagcacccccagcatgtactttgagcagcctgacagcttccagcactaccgcagcgtcttctacagctttgaggaggagcacatcagctttgccctgtatgtggacaaccgcttcttcaccctgactgtgaccagcctgcacctggtgttccagatgggcgtcatcttcccccagtag

SEQ ID NO: 161569 - DNA, 2013 bp, synthetic construct; identical to SEQ ID NO: 161568
  misc_feature 1..2013: note = Description of Artificial Sequence: Synthetic coding sequence
  source 1..2013: mol_type = other DNA

SEQ ID NO: 161570 - DNA, 2013 bp, synthetic construct
  misc_feature 1..2013: note = Description of Artificial Sequence: Synthetic coding sequence
  source 1..2013: mol_type = other DNA
atggtggtgtctgctggccccctgagcagcgagaaggccgagatgaacatcctggagatcaatgagaagctgcggccccagctggccgagaagaagcagcagttcaggaacctgaaggagaagtgcttcctgacccagctggccggcttcctggccaaccggcagaagaagtacaagtatgaggagtgcaaggacctgatcaagttcatgctgagaaatgaaaggcagttcaaggaggagaagctggccgagcagctgaagcaggccgaggagctgcggcagtacaaggtgctggtgcacgcccaggagcgggagctgacccagctgcgggagaagctgcgggagggcagagatgccagccgcagcctgaatgagcacctgcaggccctgctgaccccagatgagccagacaagagccagggccaggacctgcaggagcagctggccgagggctgccgcctgacccagcacctggtgcagaagctgagcccagaaaatgacaatgatgatgatgaagatgtgcaggtggaggtggccgagaaggtgcagaagagcagcgccccccgggagatgcagaaggccgaggagaaggaggtgcctgaggacagcctggaggagtgtgccatcacctgcagcaacagccacggcccctatgacagcaaccagccccacaagaagaccaagatcacctttgaggaggacaaggtggacagcaccctgattggcagcagcagccacgtggagtgggaggatgctgtgcacatcatcccagaaaatgaaagtgatgatgaggaggaggaggagaagggccctgtgagccccaggaacctgcaggagagcgaggaggaggaggtgccccaggagagctgggatgagggctacagcaccctgagcatccccccagagatgctggccagctaccagagctacagcagcaccttccacagcctggaggagcagcaggtgtgcatggctgtggacatcggccgccaccgctgggaccaggtgaagaaggaggaccaggaggccaccggcccccggctgagccgggagctgctggatgagaaggagcctgaggtgctgcaggacagcctggaccgctgctacagcaccccatctggctgcctggagctgacagacagctgccagccctacagaagtgccttctacgtgctggagcagcagagggtgggcctggccatcgacatggatgaaattgagaagtaccaggaggtggaggaggaccaggaccccagctgcccccggctgagccgggagctgctggatgagaaggagcctgaggtgctgcaggacagcctggaccgctgctacagcacccccagcgactacctggagctgcctgacctgggccagccctacagcagcgctgtgtacagcctggaggagcagtacctgggcctggccctggatgtggaccgcatcaagaaggaccaggaggaggaggaggaccagggccccccctgcccccggctgagccgggagctgctggaggtggtggagcctgaggtgctgcaggacagcctggaccgctactacagcacccccagcagctgcctggagcagcctgacagctgccagccctacggcagcagcttctacgccctggaggagaagcacgtgggcttcagcctggatgtgggggagattgagaagaagggcaagggcaagaagagaagaggccgccgcagcaagaagaagagaagaagaggaaggaaggagggggaggatgacaaccccccctgcccccggctgaatggagtgctgatggaggtggaggagcctgaggtgctgcaggacagcctggaccgctgctacagcacccagagcatgtactttgagctgcctgacagcttccagcactaccgcagcgtcttctacagctttgaggaggagcacatcagctttgccctgtatgtggacaaccgcttcttcaccctgactgtgaccagcctgcacctggtgttccagatgggcgtcatcttcccccagtag

SEQ ID NO: 161571 - DNA, 2013 bp, synthetic construct; identical to SEQ ID NO: 161570
  misc_feature 1..2013: note = Description of Artificial Sequence: Synthetic coding sequence
  source 1..2013: mol_type = other DNA

SEQ ID NO: 161572 - DNA, 2526 bp, synthetic construct
  misc_feature 1..2526: note = Description of Artificial Sequence: Synthetic coding sequence
  source 1..2526: mol_type = other DNA
atggtggtgtctgctggcccctggagcagcgagaaggccgagatgaacatcctggagatcaatgagaagctgcggccccagctggccgagaacaagcagcagtttggaaacctgaaggagcgctgctttgtgacccagctggccggcttcctggccaaccagcagaagaagtacaactatgaggagtgcaaggacctgatcaagttcatgctgagaaatgaaaggcagttcaaggaggagaagctggccgagcagctgaagcaggccgaggagctgcggcagtacaaggtgctggtgcacagccaggagcgggagctgacccagctgcgggagaagctgcgggagggcagagatgccagccgcagcctgaatgagcacctgcaggccctgctgaccctggatgagccagacaagagccagggccaggacctgcaggagcagctggccgagggctgccgcctggcccagcacctggtgcagaagctgagcccagaaaatgatgaagatgaagatgaagatgtgcaggtggaggaggccgagaaggtgcagaagagcagcgccccccgggaggtgcagaagacagaggagagcaaggtgcctgaggacagcctggaggagtgtgccatcacctgcagcaacagccacggcccctgtgacagcaaccagccccacaagaacatcaagatcacctttgaagaagatgaggtgaacagcaccctggtggtggaccgggagagcagccatgatgagtgccaggatgccctgaacatcctgcctgtgcccggccccaccagcagcgccaccaacgtgtccatggtggtgtctgctggccccctgagcagcgagaaggccgagatgaacatcctggagatcaatgagaagctgcacccccagctggccgagaagaagcagcagttcaggaacctgaaggagcgctgctttgtgacccagctggccggcttcctggccaaccagcagaagaagtacaagtatgaggagtgcaaggacctgatcaagtccatgctgagaaatgaaaggcagttcaaggaggagaagctggccgagcagctgaagcaggccgaggagctgcggcagtacaaggtgctggtgcacgcccaggagcgggagctgacccagctgcgggagaagctgcgggagggcagagatgccagccgcagcctgaatgagcacctgcaggccctgctgaccccagatgagccagacaagagccagggccaggacctgcaggagcagctggccgagggctgccgcctggcccagcacctggtgcagaagctgagcccagaaaatgacaatgatgatgatgaagatgtgcaggtggagctggccgagaaggtgcagaagagcagcgccccccgggagatgcagaaggccgaggagaaggaggtgcctgaggacagccaggaggagtgtgccatcacctacagcaacagccacggcccctatgacagcaaccagccccacaggaagaccaagatcacctttgaggaggacaaggtggacagcaccctcatcggcagcagcagccacgtggagtgggaggatgctgtgcacatcatcccagaaaatgaaagtgatgatgaggaggaggaggagaagggccctgtgagccccaggaacctgcaggagagcgaggaggaggaggtgccccaggagagctgggatgagggctacagcaccctgagcatccccccagagatgctggccagctaccagagctacagcagcaccttccacagcctggaggagcagcaggtgtgcatggctgtggacatcggccgccaccgctgggaccaggtgaagaaggaggaccaggaggccaccggcccccggctgagccgggagctgctggatgagaagggccctgaggtgctgcaggacagcctggaccgctgctacagcacccccagcggctgcctggagctgacagacagctgccagccctaccgcagcgccttctacgtgctggagcagcagagggtgggcctggccgtggacatggatgaaattgagaagtaccaggaggtggaggaggaccaggaccccagctgcccccggctgagccgggagctgctggatgagaaggagcctgaggtgctgcaggacagcctggaccgctgctacagcaccccatctggctacctggagctgcctgacctgggccagccctacagcagcgctgtgtacagcctggaggagcagtacctgggcctggccctggatgtggacaggaccaagaaggaccaggaggaggaggaggaccagggccccccctgcccccggctgagccgggagctgctggaggtggtggagcctgaggtgctgcaggacagcctggaccgctgctacagcacccccagcagctgcctggagcagcctgacagctgccagccctacggcagcagcttctacgccctggaggagaagcacgtgggcttcagcctggatgtgggggagattgagaagaagggcaagggcaagaagaggcggggcagaagaagctag

SEQ ID NO: 161573 - DNA, 13866 bp, synthetic construct
  misc_feature 1..13866: note = Description of Artificial Sequence: Synthetic coding sequence
  source 1..13866: mol_type = other DNA
atggtggtgtctgctggcccctggagcagcgagaaggccgagatgaacatcctggagatcaatgagaagctgcggccccagctggccgagaacaagcagcagtttggaaacctgaaggagcgctgctttgtgacccagctggccggcttcctggccaaccagcagaagaagtacaactatgaggagtgcaaggacctgatcaagttcatgctgagaaatgaaaggcagttcaaggaggagaagctggccgagcagctgaagcaggccgaggagctgcggcagtacaaggtgctggtgcacagccaggagcgggagctgacccagctgcgggagaagctgcgggagggcagagatgccagccgcagcctgaatgagcacctgcaggccctgctgaccctggatgagccagacaagagccagggccaggacctgcaggagcagctggccgagggctgccgcctggcccagcacctggtgcagaagctgagcccagaaaatgatgaagatgaagatgaagatgtgcaggtggaggaggccgagaaggtgcagaagagcagcgccccccgggaggtgcagaagacagaggagagcaaggtgcctgaggacagcctggaggagtgtgccatcacctgcagcaacagccacggcccctgtgacagcaaccagccccacaagaacatcaagatcacctttgaagaagatgaggtgaacagcaccctggtggtggaccgggagagcagccatgatgagtgccaggatgccctgaacatcctgcctgtgcccggccccaccagcagcgccaccaacgtgtccatggtggtgtctgctggccccctgagcagcgagaaggccgagatgaacatcctggagatcaatgagaagctgcacccccagctggccgagaagaagcagcagttcaggaacctgaaggagcgctgctttgtgacccagctggccggcttcctggccaaccagcagaagaagtacaagtatgaggagtgcaaggacctgatcaagtccatgctgagaaatgaaaggcagttcaaggaggagaagctggccgagcagctgaagcaggccgaggagctgcggcagtacaaggtgctggtgcacgcccaggagcgggagctgacccagctgcgggagaagctgcgggagggcagagatgccagccgcagcctgaatgagcacctgcaggccctgctgaccccagatgagccagacaagagccagggccaggacctgcaggagcagctggccgagggctgccgcctggcccagcacctggtgcagaagctgagcccagaaaatgacaatgatgatgatgaagatgtgcaggtggagctggccgagaaggtgcagaagagcagcgccccccgggagatgcagaaggccgaggagaaggaggtgcctgaggacagccaggaggagtgtgccatcacctacagcaacagccacggcccctatgacagcaaccagccccacaggaagaccaagatcacctttgaggaggacaaggtggacagcaccctcatcggcagcagcagccacgtggagtgggaggatgctgtgcacatcatcccagaaaatgaaagtgatgatgaggaggaggaggagaagggccctgtgagccccaggaacctgcaggagagcgaggaggaggaggtgccccaggagagctgggatgagggctacagcaccctgagcatccccccagagatgctggccagctaccagagctacagcagcaccttccacagcctggaggagcagcaggtgtgcatggctgtggacatcggccgccaccgctgggaccaggtgaagaaggaggaccaggaggccaccggcccccggctgagccgggagctgctggatgagaagggccctgaggtgctgcaggacagcctggaccgctgctacagcacccccagcggctgcctggagctgacagacagctgccagccctaccgcagcgccttctacgtgctggagcagcagagaattggcctggccgtggacatggatgaaattgagaagtaccaggaggtggaggaggaccaggaccccagctgcccccggctgagccgggagctgctggatgagaaggagcctgaggtgctgcaggacagcctggaccgctgctacagcaccccatctggctacctggagctgcctgacctgggccagccctacagcagcgctgtgtacagcctggaggagcagtacctgggcctggccctggatgtggacaggaccaagaaggaccaggaggaggaggaggaccagggccccccctgcccccggctgagccgggagctgctggaggtggtggagcctgaggtgctgcaggacagcctggaccgctgctacagcacccccagcagctgcctggagcagcctgacagctgccagccctacggcagcagcttctacgccctggaggagaagcacgtgggcttcagcctggatgtgggggagattgagaagaagggcaagggcaagaagaggcggggcagaagaagcaagaaggagcggcggcggggcaggaaggagggggaggaggaccagaaccccccctgcccccggctgagccgggagctgctggatgagaagggccctgaggtgctgcaggacagcctggacaggagctacagcacccccagcggctgcctggagctgacagacagctgccagccctaccgcagcgccttctacgtgctggagcagcagagggtgggcctggccgtggacatggatgaaattgagaagtaccaggaggtggaggaggaccaggaccccagctgcccccggctgagccgggagctgctggatgagaaggagcctgaggtgctgcaggacagcctggaccgctgctacagcaccccatctggctacctggagctgcctgacctgggccagccctacagcagcgctgtgtacagcctggaggagcagtacctgggcctggccctggatgtggacaggaccaagaaggaccaggaggaggaggaggaccagggccccccctgcccccggctgagccgggagctgctggaggtggtggagcctgaggtgctgcaggacagcctggaccgctgctacagcacccccagcagctgcctggagcagcctgacagctgccagccctacggcagcagcttctacgccctggaggagaagcacgtgggcttcagcctggatgtgggggagattgagaagaagggcaagggcaagaagaggcggggcagaagaagcaagaaggagcggcggcggggcaggaaggagggggaggaggaccagaaccccccctgcccccggctgagccgggagctgctggatgagaagggccctgaggtgctgcaggacagcctggaccgctgctacagcacccccagcggctgcctggagctgacagacagctgccagccctaccgcagcgccttctacgtgctggagcagcagagggtgggcctggccgtggacatggatgaaattgagaagtaccaggaggtggaggaggaccaggaccccagctgcccccggctgagccgggagctgctggatgagaaggagcctgaggtgctgcaggacagcctggaccgctgctacagcaccccatctggctacctggagctgcctgacctgggccagccctacagcagcgctgtgtacagcctggaggagcagtacctgggcctggccctggatgtggacaggaccaagaaggaccaggaggaggaggaggaccagggccccccctgcccccggctgagccgggagctgctggaggtggtggagcctgaggtgctgcaggacagcctggaccgctgctacagcacccccagcagctgcctggagcagcctgacagctgccagccctacggcagcagcttctacgccctggaggagaagcacgtgggcttcagcctggatgtgggggagattgagaagaagggcaagggcaagaagaggcggggcagaagaagcaagaaggagcggcggcggggcaggaaggagggggaggaggaccagaaccccccctgcccccggctgagccgggagctgctggatgagaagggccctgaggtgctgcaggacagcctggacaggagctacagcacccccagcggctgcctggagctgacagacagctgccagccctaccgcagcgccttctacgtgctggagcagcagagggtgggcctggccgtggacatggatgaaattgagaagtaccaggaggtggaggaggaccaggaccccagctgcccccggctgagccgggagctgctggatgagaaggagcctgaggtgctgcaggacagcctggaccgctgctacagcaccccatctggctacctggagctgcctgacctgggccagccctacagcagcgctgtgtacagcctggaggagcagtacctgggcctggccctggatgtggacaggaccaagaaggaccaggaggaggaggaggaccagggccccccctgcccccggctgagccgggagctgctggaggtggtggagcctgaggtgctgcaggacagcctggaccgctgctacagcacccccagcagctgcctggagcagcctgacagctgccagccctacggcagcagcttctacgccctggaggagaagcacgtgggcttcagcctggatgtgggggagattgagaagaagggcaagggcaagaagaggcggggcagaagaagcaagaaggagcggcggcggggcaggaaggagggggaggaggaccagaaccccccctgcccccggctgagccgggagctgctggatgagaagggccctgaggtgctgcaggacagcctggaccgctgctacagcacccccagcggctgcctggagctgacagacagctgccagccctaccgcagcgccttctacgtgctggagcagcagagggtgggcctggccgtggacatggatgaaattgagaagtaccaggaggtggaggaggaccaggaccccagctgcccccggctgagccgggagctgctggatgagaaggagcctgaggtgctgcaggacagcctggaccgctgctacagcaccccatctggctacctggagctgcctgacctgggccagccctacagcagcgctgtgtacagcctggaggagcagtacctgggcctggccctggatgtggacaggaccaagaaggaccaggaggaggaggaggaccagggccccccctgcccccggctgagccgggagctgctggaggtggtggagcctgaggtgctgcaggacagcctggaccgctgctacagcacccccagcagctgcctggagcagcctgacagctgccagccctacggcagcagcttctacgccctggaggagaagcacgtgggcttcagcctggatgtgggggagattgagaagaagggcaagggcaagaagaggcggggcagaagaagcaagaaggagcggcggcggggcaggaaggagggggaggaggaccagaaccccccctgcccccggctgagccgggagctgctggatgagaagggccctgaggtgctgcaggacagcctggacaggagctacagcacccccagcggctgcctggagctgacagacagctgccagccctaccgcagcgccttctacgtgctggagcagcagagggtgggcctggccgtggacatggatgaaattgagaagtaccaggaggtggaggaggaccaggaccccagctgcccccggctgagccgggagctgctggatgagaaggagcctgaggtgctgcaggacagcctggaccgctgctacagcaccccatctggctacctggagctgcctgacctgggccagccctacagcagcgctgtgtacagcctggaggagcagtacctgggcctggccctggatgtggacaggaccaagaaggaccaggaggaggaggaggaccagggccccccctgcccccggctgagccgggagctgctggaggtggtggagcctgaggtgctgcaggacagcctggaccgctgctacagcacccccagcagctgcctggagcagcctgacagctgccagccctacggcagcagcttctacgccctggaggagaagcacgtgggcttcagcctggatgtgggggagattgagaagaagggcaagggcaagaagaggcggggcagaagaagcaagaaggagcggcggcggggcaggaaggagggggaggaggaccagaaccccccctgcccccggctgagccgggagctgctggatgagaagggccctgaggtgctgcaggacagcctggacaggagctacagcacccccagcggctgcctggagctgacagacagctgccagccctaccgcagcgccttctacgtgctggagcagcagagggtgggcctggccgtggacatggatgaaattgagaagtaccaggaggtggaggaggaccaggaccccagctgcccccggctgagccgggagctgctggatgagaaggagcctgaggtgctgcaggacagcctggaccgctgctacagcaccccatctggctacctggagctgcctgacctgggccagccctacagcagcgctgtgtacagcctggaggagcagtacctgggcctggccctggatgtggacaggaccaagaaggaccaggaggaggaggaggaccagggccccccctgcccccggctgagccgggagctgctggaggtggtggagcctgaggtgctgcaggacagcctggaccgctgctacagcacccccagcagctgcctggagcagcctgacagctgccagccctacggcagcagcttctacgccctggaggagaagcacgtgggcttcagcctggatgtgggggagattgagaagaagggcaagggcaagaagaggcggggcagaagaagcaagaaggagcggcggcggggcaggaaggagggggaggaggaccagaaccccccctgcccccggctgagccgggagctgctggatgagaagggccctgaggtgctgcaggacagcctggacaggagctacagcacccccagcggctgcctggagctgacagacagctgccagccctaccgcagcgccttctacgtgctggagcagcagagggtgggcctggccgtggacatggatgaaattgagaagtaccaggaggtggaggaggaccaggaccccagctgcccccggctgagccgggagctgctggatgagaaggagcctgaggtgctgcaggacagcctggaccgctgctacagcaccccatctggctacctggagctgcctgacctgggccagccctacagcagcgctgtgtacagcctggaggagcagtacctgggcctggccctggatgtggacaggaccaagaaggaccaggaggaggaggaggaccagggccccccctgcccccggctgagccgggagctgctggaggtggtggagcctgaggtgctgcaggacagcctggaccgctgctacagcacccccagcagctgcctggagcagcctgacagctgccagccctacggcagcagcttctacgccctggaggagaagcacgtgggcttcagcctggatgtgggggagattgagaagaagggcaagggcaagaagaggcggggcagaagaagcaagaaggagcggcggcggggcaggaaggagggggaggaggaccagaaccccccctgcccccggctgagccgggagctgctggatgagaagggccctgaggtgctgcaggacagcctggacaggagctacagcacccccagcggctgcctggagctgacagacagctgccagccctaccgcagcgccttctacgtgctggagcagcagagggtgggcctggccgtggacatggatgaaattgagaagtaccaggaggtggaggaggaccaggaccccagctgcccccggctgagccgggagctgctggatgagaaggagcctgaggtgctgcaggacagcctggaccgctgctacagcaccccatctggctacctggagctgcctgacctgggccagccctacagcagcgctgtgtacagcctggaggagcagtacctgggcctggccctggatgtggacaggaccaagaaggaccaggaggaggaggaggaccagggccccccctgcccccggctgagccgggagctgctggaggtggtggagcctgaggtgctgcaggacagcctggaccgctgctacagcacccccagcagctgcctggagcagcctgacagctgccagccctacggcagcagcttctacgccctggaggagaagcacgtgggcttcagcctggatgtgggggagattgagaagaagggcaagggcaagaagaggcggggcagaagaagcaagaaggagcggcggcggggcaggaaggagggggaggaggaccagaaccccccctgcccccggctgagccgggagctgctggatgagaaggagcctgaggtgctgcaggacagcctggaccgctgctacagcacccccagcggctacctggagctgcctgacctgggccagccctacagcagcgctgtgtacagcctggaggagcagtacctgggcctggccctggatgtggacaggaccaagaaggaccaggaggaggaggaggaccagggccccccctgcccccggctgagccgggagctgctggaggtggtggagcctgaggtgctgcaggacagcctggaccgctgctacagcacccccagcagctgcctggagcagcctgacagctgccagccctacggcagcagcttctacgccctggaggagaagcacgtgggcttcagcctggatgtgggggagattgagaagaagggcaagggcaagaagagaagaggccgccgcagcaagaaggagaggagaagaggaaggaaggagggggaggaggaccagaaccccccctgcccccggctgagccgggagctgctggatgagaaggagcctgaggtgctgcaggacagcctggaccgctgctacagcaccccatctggctacctggagctgcctgacctgggccagccctacagcagcgctgtgtacagcctggaggagcagtacctgggcctggccctggatgtggacaggaccaagaaggaccaggaggaggaggaggaccagggccccccctgcccccggctgagccgggagctgctggaggtggtggagcctgaggtgctgcaggacagcctggaccgctgctacagcacccccagcagctgcctggagcagcctgacagctgccagccctacggcagcagcttctacgccctggaggagaagcacgtgggcttcagcctggatgtgggggagattgagaagaagggcaagggcaagaagaggcggggcagaagaagcaagaaggagcggcggcggggcaggaaggagggggaggaggaccagaaccccccctgcccccggctgagccgggagctgctggatgagaaggagcctgaggtgctgcaggacagcctggaccgctgctacagcacccccagcggctacctggagctgcctgacctgggccagccctacagcagcgctgtgtacagcctggaggagcagtacctgggcctggccctggatgtggacaggaccaagaaggaccaggaggaggaggaggaccagggccccccctgcccccggctgagccgggagctgctggaggtggtggagcctgaggtgctgcaggacagcctggaccgctgctacagcacccccagcagctgcctggagcagcctgacagctgccagccctacggcagcagcttctacgccctggaggagaagcacgtgggcttcagcctggatgtgggggagattgagaagaagggcaagggcaagaagagaagaggccgccgcagcaagaaggagaggagaagaggaaggaaggagggggaggaggaccagaaccccccctgcccccggctgagccgggagctgctggatgagaagggccctgaggtgctgcaggacagcctggaccgctgctacagcaccccatctggctgcctggagctgacagacagctgccagccctacagaagtgccttctacgtgctggagcagcagagggtgggcctggccgtggacatggatgaaattgagaagtaccaggaggtggaggaggaccaggaccccagctgcccccggctgagccgggagctgctggatgagaaggagcctgaggtgctgcaggacagcctggaccgctgctacagcacccccagcggctacctggagctgcctgacctgggccagccctacagcagcgctgtgtacagcctggaggagcagtacctgggcctggccctggatgtggacaggaccaagaaggaccaggaggaggaggaggaccagggccccccctgcccccggctgagccgggagctgctggaggtggtggagcctgaggtgctgcaggacagcctggaccgctgctacagcacccccagcagctgcctggagcagcctgacagctgccagccctacggcagcagcttctacgccctggaggagaagcacgtgggcttcagcctggatgtgggggagattgagaagaagggcaagggcaagaagagaagaggccgccgcagcaagaaggagaggagaagaggaaggaaggagggggaggaggaccagaaccccccctgcccccggctgagccgggagctgctggatgagaagggccctgaggtgctgcaggacagcctggaccgctgctacagcaccccatctggctgcctggagctgacagacagctgccagccctacagaagtgccttctacgtgctggagcagcagagggtgggcctggccgtggacatggatgaaattgagaagtaccaggaggtggaggaggaccaggaccccagctgcccccggctgagccgggagctgctggatgagaaggagcctgaggtgctgcaggacagcctggaccgctgctacagcacccccagcggctacctggagctgcctgacctgggccagccctacagcagcgctgtgtacagcctggaggagcagtacctgggcctggccctggatgtggacaggaccaagaaggaccaggaggaggaggaggaccagggccccccctgcccccggctgagccgggagctgctggaggtggtggagcctgaggtgctgcaggacagcctggaccgctgctacagcacccccagcagctgcctggagcagcctgacagctgccagccctacggcagcagcttctacgccctggaggagaagcacgtgggcttcagcctggatgtgggggagattgagaagaagggcaagggcaagaagagaagaggccgccgcagcaagaaggagaggagaagaggaaggaaggagggggaggaggaccagaaccccccctgcccccggctgagccgggagctgctggatgagaagggccctgaggtgctgcaggacagcctggaccgctgctacagcaccccatctggctgcctggagctgacagacagctgccagccctacagaagtgccttctacgtgctggagcagcagagggtgggcctggccgtggacatggatgaaattgagaagtaccaggaggtggaggaggaccaggaccccagctgcccccggctgagccgggagctgctggatgagaaggagcctgaggtgctgcaggacagcctggaccgctgctacagcacccccagcggctacctggagctgcctgacctgggccagccctacagcagcgctgtgtacagcctggaggagcagtacctgggcctggccctggatgtggacaggaccaagaaggaccaggaggaggaggaggaccagggccccccctgcccccggctgagccgggagctgctggaggtggtggagcctgaggtgctgcaggacagcctggaccgctgctacagcacccccagcagctgcctggagcagcctgacagctgccagccctacggcagcagcttctacgccctggaggagaagcacgtgggcttcagcctggatgtgggggagattgagaagaagggcaagggcaagaagagaagaggccgccgcagcaagaaggagaggagaagaggaaggaaggagggggaggaggaccagaccccaccctgcccccggctgagccgggagctgctggatgagaagggccctgaggtgctgcaggacagcctggaccgctgctacagcaccccatctggctgcctggagctgacagacagctgccagccctacagaagtgccttctacgtgctggagcagcagagggtgggcctggccgtggacatggatgaaattgagaagtaccaggaggtggaggaggaccaggaccccagctgcccccggctgagccgggagctgctggatgagaaggagcctgaggtgctgcaggacagcctggaccgctgctacagcacccccagcggctacctggagctgcctgacctgggccagccctacagcagcgctgtgtacagcctggaggagcagtacctgggcctggccctggatgtggacaggaccaagaaggaccaggaggaggaggaggaccagggccccccctgcccccggctgagccgggagctgctggaggtggtggagcctgaggtgctgcaggacagcctggaccgctgctacagcacccccagcagctgcctggagcagcctgacagctgccagccctacggcagcagcttctacgccctggaggagaagcacgtgggcttcagcctggatgtgggggagattgagaagaagggcaagggcaagaagagaagaggccgccgcagcaagaaggagaggagaagaggaaggaaggagggggaggaggaccagaaccccccctgcccccggctgagccgggagctgctggatgagaagggccctgaggtgctgcaggacagcctggaccgctgctacagcaccccatctggctgcctggagctgacagacagctgccagccctacagaagtgccttctacgtgctggagcagcagagggtgggcctggccgtggacatggatgaaattgagaagtaccaggaggtggaggaggaccaggaccccagctgcccccggctgagccgggagctgctggatgagaaggagcctgaggtgctgcaggacagcctggaccgctgctacagcacccccagcggctacctggagctgcctgacctgggccagccctacagcagcgctgtgtacagcctggaggagcagtacctgggcctggccctggatgtggacaggaccaagaaggaccaggaggaggaggaggaccagggccccccctgcccccggctgagccgggagctgctggaggtggtggagcctgaggtgctgcaggacagcctggaccgctgctacagcacccccagcagctgcctggagcagcctgacagctgccagccctacggcagcagcttctacgccctggaggagaagcacgtgggcttcagcctggatgtgggggagattgagaagaagggcaagggcaagaagagaagaggccgccgcagcaagaagaagagaagaagaggaaggaaggagggggaggaggaccagaaccccccctgcccccggctgaatggagtgctgatggaggtggaggagcctgaggtgctgcaggacagcctggatggctgctacagcacccccagcatgtactttgagctgcctgacagcttccagcactacagatctgtgttctacagctttgaggagcagcacatcagctttgccctgtatgtggacaaccgcttcttcaccctgactgtgaccagcctgcacctggtgttccagatgggcgtcatcttcccccagtag

SEQ ID NO: 161574 - DNA, 780 bp, synthetic construct
  misc_feature 1..780: note = Description of Artificial Sequence: Synthetic coding sequence
  source 1..780: mol_type = other DNA
atggtggtgtctgctggcccctggagcagcgagaaggccgagatgaacatcctggagatcaatgagaagctgcggccccagctggccgagaacaagcagcagtttggaaacctgaaggagcgctgctttgtgacccagctggccggcttcctggccaaccagcagaagaagtacaactatgaggagtgcaaggacctgatcaagttcatgctgagaaatgaaaggcagttcaaggaggagaagctggccgagcagctgaagcaggccgaggagctgcggcagtacaaggtgctggtgcacagccaggagcgggagctgacccagctgcgggagaagctgcgggagggcagagatgccagccgcagcctgaatgagcacctgcaggccctgctgaccctggatgagccagacaagagccagggccaggacctgcaggagcagctggccgagggctgccgcctggcccagcacctggtgcagaagctgagcccagaaaatgatgaagatgaagatgaagatgtgcaggtggaggaggccgagaaggtgcagaagagcagcgccccccgggaggtgcagaagacagaggagagcaaggtgcctgaggacagcctggaggagtgtgccatcacctgcagcaacagccacggcccctgtgacagcaaccagccccacaagaacatcaagatcacctttgaagaagatgaggtgaacagcaccctggtggtggaccgggagagcagccatgatgagtgccaggatgccctgaacatcctgccctag

SEQ ID NO: 161575 - DNA, 456 bp, synthetic construct
  misc_feature 1..456: note = Description of Artificial Sequence: Synthetic coding sequence
  source 1..456: mol_type = other DNA
ctgagccgggagctgctggaggtggtggagcctgaggtgctgcaggacagcctggaccgctgctacagcacccccagcagctgcctggagcagcctgacagctgccagccctacggcagcagcttctacgccctggaggagaagcacgtgggcttcagcctggatgtgggggagattgagaagaagggcaagggcaagaagaggcggggcagaagaagcaagaaggagcggcggcggggcaggaaggagggggaggaggaccagaccccaccctgcccccggctgagccgggagctgctggatgagaagggccctgaggtgctgcaggacagcctggaccgctgctacagcacccccagcggctgcctggagctgacagacagctgccagccctaccgcagcgccttctacgtgctggagcagcagagggtgggcctggccgtggacatggactag

SEQ ID NO: 161576 - DNA, 456 bp, synthetic construct
  misc_feature 1..456: note = Description of Artificial Sequence: Synthetic coding sequence
  source 1..456: mol_type = other DNA
ctgagccgggagctgctggaggtggtggagcctgaggtgctgcaggacagcctggaccgctgctacagcacccccagcagctgcctggagcagcctgacagctgccagccctacggcagcagcttctacgccctggaggagaagcacgtgggcttcagcctggatgtgggggagattgagaagaagggcaagggcaagaagaggcggggcagaagaagcaagaaggagcggcggcggggcaggaaggagggggaggaggaccagaaccccccctgcccccggctgagccgggagctgctggatgagaagggccctgaggtgctgcaggacagcctggaccgctgctacagcacccccagcggctgcctggagctgacagacagctgccagccctaccgcagcgccttctacgtgctggagcagcagagggtgggcctggccgtggacatggactag

SEQ ID NO: 161577 - DNA, 456 bp, synthetic construct
  misc_feature 1..456: note = Description of Artificial Sequence: Synthetic coding sequence
  source 1..456: mol_type = other DNA
ctgagccgggagctgctggaggtggtggagcctgaggtgctgcaggacagcctggaccgctgctacagcacccccagcagctgcctggagcagcctgacagctgccagccctacggcagcagcttctacgccctggaggagaagcacgtgggcttcagcctggatgtgggggagattgagaagaagggcaagggcaagaagaggcggggcagaagaagcaagaaggagcggcggcggggcaggaaggagggggaggaggaccagaaccccccctgcccccggctgagccgggagctgctggatgagaagggccctgaggtgctgcaggacagcctggacaggagctacagcacccccagcggctgcctggagctgacagacagctgccagccctaccgcagcgccttctacgtgctggagcagcagagggtgggcctggccgtggacatggactag

SEQ ID NO: 161578 - DNA, 456 bp, synthetic construct; identical to SEQ ID NO: 161576
  misc_feature 1..456: note = Description of Artificial Sequence: Synthetic coding sequence
  source 1..456: mol_type = other DNA

SEQ ID NO: 161579 - DNA, 2016 bp, synthetic construct
  misc_feature 1..2016: note = Description of Artificial Sequence: Synthetic coding sequence
  source 1..2016: mol_type = other DNA
atggtggtgtctgctggccccctgagcagcgagaaggccgagatgaacatcctggagatcaatgagaagctgcacccccagctggccgagaagaagcagcagttcaggaacctgaaggagcgctgctttgtgacccagctggccggcttcctggccaaccagcagaagaagtacaagtatgaggagtgcaaggacctgatcaagtccatgctgagaaatgaaaggcagttcaaggaggagaagctggccgagcagctgaagcaggccgaggagctgcggcagtacaaggtgctggtgcacgcccaggagcgggagctgacccagctgcgggagaagctgcgggagggcagagatgccagccgcagcctgaatgagcacctgcaggccctgctgaccccagatgagccagacaagagccagggccaggacctgcaggagcagctggccgagggctgccgcctggcccagcacctggtgcagaagctgagcccagaaaatgacaatgatgatgatgaagatgtgcaggtggagctggccgagaaggtgcagaagagcagcgccccccgggagatgcagaaggccgaggagaaggaggtgcctgaggacagccaggaggagtgtgccatcacctacagcaacagccacggcccctatgacagcaaccagccccacaggaagaccaagatcacctttgaggaggacaaggtggacagcaccctgattggcagcagcagccacgtggagtgggaggatgctgtgcacatcatcccagaaaatgaaagtgatgatgaggaggaggaggagaagggccctgtgagccccaggaacctgcaggagagcgaggaggaggaggtgccccaggagagctgggatgagggctacagcaccctgagcatccccccagagatgctggccagctaccagagctacagcagcaccttccacagcctggaggagcagcaggtgtgcatggctgtggacatcggccgccaccgctgggaccaggtgaagaaggaggaccaggaggccaccggcccccggctgagccgggagctgctggatgagaagggccctgaggtgctgcaggacagcctggaccgctgctacagcaccccatctggctgcctggagctgacagacagctgccagccctacagaagtgccttctacgtgctggagcagcagagggtgggcctggccgtggacatggatgaaattgagaagtaccaggaggtggaggaggaccaggaccccagctgcccccggctgagccgggagctgctggatgagaaggagcctgaggtgctgcaggacagcctggaccgctgctacagcacccccagcggctacctggagctgcctgacctgggccagccctacagcagcgctgtgtacagcctggaggagcagtacctgggcctggccctggatgtggacaggaccaagaaggaccaggaggaggaggaggaccagggccccccctgcccccggctgagccgggagctgctggaggtggtggagcctgaggtgctgcaggacagcctggaccgctgctacagcacccccagcagctgcctggagcagcctgacagctgccagccctacggcagcagcttctacgccctggaggagaagcacgtgggcttcagcctggatgtgggggagattgagaagaagggcaagggcaagaagagaagaggccgccgcagcaagaagaagagaagaagaggaaggaaggagggggaggaggaccagaaccccccctgcccccggctgaatggagtgctgatggaggtggaggagcctgaggtgctgcaggacagcctggatggctgctacagcacccccagcatgtactttgagctgcctgacagcttccagcactacagatctgtgttctacagctttgaggagcagcacatcagctttgccctgtatgtggacaaccgcttcttcaccctgactgtgaccagcctgcacctggtgttccagatgggcgtcatcttcccccagtag

SEQ ID NO: 161580 - DNA, 474 bp, synthetic construct
  misc_feature 1..474: note = Description of Artificial Sequence: Synthetic coding sequence
  source 1..474: mol_type = other DNA
ctgagccgggagctgctggaggtggtggagcctgaggtgctgcaggacagcctggaccgctgctacagcacccccagcagctgcctggagcagcctgacagctgccagccctacggcagcagcttctacgccctggaggagaagcacgtgggcttcagcctggatgtgggggagattgagaagaagggcaagggcaagaagaggcggggcagaagaagcaagaaggagcggcggcggggcaggaaggagggggaggaggaccagaaccccccctgcccccggctgagccgggagctgctggatgagaagggccctgaggtgctgcaggacagcctggaccgctgctacagcacccccagcggctgcctggagctgacagacagctgccagccctaccgcagcgccttctacgtgctggagcagcagagggtgggcctggccgtggacatggatggagagtacctgtccatgtag

SEQ ID NO: 161581 - DNA, 681 bp, synthetic construct
  misc_feature 1..681: note = Description of Artificial Sequence: Synthetic coding sequence
  source 1..681: mol_type = other DNA
ctgagccgggagctgctggaggtggtggagcctgaggtgctgcaggacagcctggaccgctgctacagcacccccagcagctgcctggagcagcctgacagctgccagccctacggcagcagcttctacgccctggaggagaagcacgtgggcttcagcctggatgtgggggagattgagaagaagggcaagggcaagaagaggcggggcagaagaagcaagaaggagcggcggcggggcaggaaggagggggaggaggaccagaaccccccctgcccccggctgagccgggagctgctggatgagaagggccctgaggtgctgcaggacagcctggaccgctgctacagcacccccagcggctgcctggagctgacagacagctgccagccctaccgcagcgccttctacgtgctggagcagcagagggtgggcctggccgtggacatggatgaaattgagaagtaccaggaggtggaggaggaccaggaccccagctgcccccggctgagccgggagctgctggatgagaaggagcctgaggtgctgcaggacagcctggaccgctgctacagcaccccatctggctacctggagctgcctgacctgggccagccctacagcagcgctgtgtacagcctggaggagcagtacctgggcctggccctggatgtggactag

SEQ ID NO: 161582 - DNA, 810 bp, synthetic construct
  misc_feature 1..810: note = Description of Artificial Sequence: Synthetic coding sequence
  source 1..810: mol_type = other DNA
atggatgaaattgagaagtaccaggaggtggaggaggaccaggaccccagctgcccccggctgagccgggagctgctggatgagaaggagcctgaggtgctgcaggacagcctggaccgctgctacagcacccccagcggctacctggagctgcctgacctgggccagccctacagcagcgctgtgtacagcctggaggagcagtacctgggcctggccctggatgtggacaggaccaagaaggaccaggaggaggaggaggaccagggccccccctgcccccggctgagccgggagctgctggaggtggtggagcctgaggtgctgcaggacagcctggaccgctgctacagcacccccagcagctgcctggagcagcctgacagctgccagccctacggcagcagcttctacgccctggaggagaagcacgtgggcttcagcctggatgtgggggagattgagaagaagggcaagggcaagaagagaagaggccgccgcagcaagaagaagagaagaagaggaaggaaggagggggaggaggaccagaaccccccctgcccccggctgaatggagtgctgatggaggtggaggagcctgaggtgctgcaggacagcctggatggctgctacagcacccccagcatgtactttgagctgcctgacagcttccagcactacagatctgtgttctacagctttgaggagcagcacatcagctttgccctgtatgtggacaaccgcttcttcaccctgactgtgaccagcctgcacctggtgttccagatgggcgtcatcttcccccagtag

SEQ ID NO: 161583 - DNA, 474 bp, synthetic construct; identical to SEQ ID NO: 161580
  misc_feature 1..474: note = Description of Artificial Sequence: Synthetic coding sequence
  source 1..474: mol_type = other DNA

SEQ ID NO: 161584 - DNA, 525 bp, synthetic construct
  misc_feature 1..525: note = Description of Artificial Sequence: Synthetic coding sequence
  source 1..525: mol_type = other DNA
ctgagccgggagctgctggaggtggtggagcctgaggtgctgcaggacagcctggaccgctgctacagcacccccagcagctgcctggagcagcctgacagctgccagccctacggcagcagcttctacgccctggaggagaagcacgtgggcttcagcctggatgtgggggagattgagaagaagggcaagggcaagaagaggcggggcagaagaagcaagaagaagagaagaagaggaaggaaggagggggaggaggaccagaaccccccctgcccccggctgaatggagtgctgatggaggtggaggagcctgaggtgctgcaggacagcctggatggctgctacagcacccccagcatgtactttgagctgcctgacagcttccagcactaccgcagcgtcttctacagctttgaggagcagcacatcagctttgccctgtatgtggacaaccgcttcttcaccctgactgtgaccagcctgcacctggtgttccagatgggcgtcatcttcccccagtag

SEQ ID NO: 161585 - DNA, 456 bp, synthetic construct; identical to SEQ ID NO: 161577
  misc_feature 1..456: note = Description of Artificial Sequence: Synthetic coding sequence
  source 1..456: mol_type = other DNA

SEQ ID NO: 161586 - DNA, 759 bp, synthetic construct
  misc_feature 1..759: note = Description of Artificial Sequence: Synthetic coding sequence
  source 1..759: mol_type = other DNA
atggatgaaattgagaagtaccaggaggtggaggaggaccaggaccccagctgcccccggctgagccgggagctgctggatgagaaggagcctgaggtgctgcaggacagcctggaccgctgctacagcacccccagcggctacctggagctgcctgacctgggccagccctacagcagcgctgtgtacagcctggaggagcagtacctgggcctggccctggatgtggacaggaccaagaaggaccaggaggaggaggaggaccagggccccccctgcccccggctgagccgggagctgctggaggtggtggagcctgaggtgctgcaggacagcctggaccgctgctacagcacccccagcagctgcctggagcagcctgacagctgccagccctacggcagcagcttctacgccctggaggagaagcacgtgggcttcagcctggatgtgggggagattgagaagaagggcaagggcaagaagagaagaggccgccgcagcaagaaggagaggagaagaggaaggaaggagggggaggaggaccagaaccccccctgcccccggctgagccgggagctgctggatgagaagggccctgaggtgctgcaggacagcctggaccgctgctacagcaccccatctggctgcctggagctgacagacagctgccagccctacagaagtgccttctacgtgctggagcagcagagggtgggcctggccgtggacatggatggagagtacctgtccatgtag

SEQ ID NO: 161587 - DNA, 1734 bp, synthetic construct
  misc_feature 1..1734: note = Description of Artificial Sequence: Synthetic coding sequence
  source 1..1734: mol_type = other DNA
atggtggtgtctgctggcccctggagcggggagaaggccgagatgaacatcctggagatcaacaagaagagccggccccagctggccgagaacaagcagcagttcaggaacctgaagcagaagtgcctggtgacccaggtggcctacttcctggccaaccggcagaacaactatgactatgaggactgcaaggacctgatcaagtccatgctgagagatgagcggctgctgacagaggagaagctggccgaggagctgggccaggccgaggagctgcggcagtacaaggtgctggtgcacagccaggagcgggagctgacccagctgcgggagaagctgcaggagggcagagatgccagccgcagcctgaaccagcacctgcaggccctgctgaccccagatgagccagacaacagccagggccgggacctgcgggagcagctggccgagggctgccgcctggcccagcacctggtgcagaagctgagcccagaaaatgatgatgatgaagatgaagatgtgaaggtggaggaggccgagaaggtgcaggagctgtatgccccccgggaggtgcagaaggccgaggagaaggaggtgcctgaggacagcctggaggagtgtgccatcacctgcagcaacagccaccacccctgtgagagcaaccagccctacggcaacacccgcatcacctttgaggaggaccaggtggacagcaccctgattgacagcagcagccatgatgagtggctggatgctgtgtgcatcatcccagaaaatgaaagtgaccacgagcaggaggaggagaagggccctgtgagccccaggaacctgcaggagagcgaggaggaggaggccccccaggagagctgggatgaaggagactggaccctgagcatccccccagacatgtctgccagctaccagagcgacaggagcaccttccacagcgtggaggagcagcaggtgggcctggccctggacatcggccgccactggtgtgaccaggtgaagaaggaggaccaggaggccaccagcccccggctgagccgggagctgctggatgagaaggagcctgaggtgctgcaggacagcctggaccgcttctacagcaccccatttgagtacctggagctgcctgacctgtgccagccctacagaagtgacttctacagcctgcaggagcagcacctgggcctggccctggacctggacaggatgaagaaggaccaggaggaggaggaggaccagggccccccctgcccccggctgagccgggagctgcctgaggtggtggagcctgaggacctgcaggacagcctggaccgctggtacagcacccccttctcctacccagagctgcctgacagctgccagccctacggcagctgcttctacagcctggaggaggagcacgtgggcttcagcctggatgtggatgaaattgagaagtaccaggagggggaggaggaccagaagccaccctgcccccggctgaatgaggtgctgatggaggccgaggagcctgaggtgctgcaggacagcctggaccgctgctacagcaccaccagcacctacttccagctgcacgccagcttccagcagtacagaagtgccttctacagctttgaggagcaggatgtgtccctggccctggatgtggacaaccgcttcttcaccctgaccgtcatccgccaccacctggccttccagatgggcgtcatcttcccccactag

SEQ ID NO: 161588 - DNA, 1902 bp, synthetic construct
  misc_feature 1..1902: note = Description of Artificial Sequence: Synthetic coding sequence
  source 1..1902: mol_type = other DNA
atgcccctgacccccaccgtgcagggcttccagtggaccctgcggggcccagatgtggagaccagcccctttggagcccccagggctgccagccacggcgtgggccgccaccaggagctgcgggaccccaccgtgcccggccccaccagcagcgccaccaacgtgtccatggtggtgtctgctggcccctggagcggggagaaggccgagatgaacatcctggagatcaacaagaagagccggccccagctggccgagaacaagcagcagttcaggaacctgaagcagaagtgcctggtgacccaggtggcctacttcctggccaaccggcagaacaactatgactatgaggactgcaaggacctgatcaagtccatgctgagagatgagcggctgctgacagaggagaagctggccgaggagctgggccaggccgaggagctgcggcagtacaaggtgctggtgcacagccaggagcgggagctgacccagctgcgggagaagctgcaggagggcagagatgccagccgcagcctgaaccagcacctgcaggccctgctgaccccagatgagccagacaacagccagggccgggacctgcgggagcagctggccgagggctgccgcctggcccagcacctggtgcagaagctgagcccagaaaatgatgatgatgaagatgaagatgtgaaggtggaggaggccgagaaggtgcaggagctgtatgccccccgggaggtgcagaaggccgaggagaaggaggtgcctgaggacagcctggaggagtgtgccatcacctgcagcaacagccaccacccctgtgagagcaaccagccctacggcaacacccgcatcacctttgaggaggaccaggtggacagcaccctgattgacagcagcagccatgatgagtggctggatgctgtgtgcatcatcccagaaaatgaaagtgaccacgagcaggaggaggagaagggccctgtgagccccaggaacctgcaggagagcgaggaggaggaggccccccaggagagctgggatgaaggagactggaccctgagcatccccccagacatgtctgccagctaccagagcgacaggagcaccttccacagcgtggaggagcagcaggtgggcctggccctggacatcggccgccactggtgtgaccaggtgaagaaggaggaccaggaggccaccagcccccggctgagccgggagctgctggatgagaaggagcctgaggtgctgcaggacagcctggaccgcttctacagcaccccatttgagtacctggagctgcctgacctgtgccagccctacagaagtgacttctacagcctgcaggagcagcacctgggcctggccctggacctggacaggatgaagaaggaccaggaggaggaggaggaccagggccccccctgcccccggctgagccgggagctgcctgaggtggtggagcctgaggacctgcaggacagcctggaccgctggtacagcacccccttctcctacccagagctgcctgacagctgccagccctacggcagctgcttctacagcctggaggaggagcacgtgggcttcagcctggatgtggatgaaattgagaagtaccaggagggggaggaggaccagaagccaccctgcccccggctgaatgaggtgctgatggaggccgaggagcctgaggtgctgcaggacagcctggaccgctgctacagcaccaccagcacctacttccagctgcacgccagcttccagcagtacagaagtgccttctacagctttgaggagcaggatgtgtccctggccctggatgtggacaaccgcttcttcaccctgaccgtcatccgccaccacctggccttccagatgggcgtcatcttcccccactag

SEQ ID NO: 161589 - DNA, 1866 bp, synthetic construct
  misc_feature 1..1866: note = Description of Artificial Sequence: Synthetic coding sequence
  source 1..1866: mol_type = other DNA
atgcccctgacccccaccgtgcagggcttccagtggaccctgcggggcccagatgtggagaccagcccctttggagcccccagggctgccagccacggcgtgggccgccaccaggagctgcgggaccccaccgtgcccggccccaccagcagcgccaccaacgtgtccatggtggtgtctgctggcccctggagcggggagaaggccgagatgaacatcctggagatcaacaagaagagccggccccagctggccgagaacaagcagcagttcaggaacctgaagcagaagtgcctggtgacccaggtggcctacttcctggccaaccggcagaacaactatgactatgaggactgcaaggacctgatcaagtccatgctgagagatgagcggctgctgacagaggagaagctggccgaggagctgggccaggccgaggagctgcggcagtacaaggtgctggtgcacagccaggagcgggagctgacccagctgcgggagaagctgcaggagggcagagatgccagccgcagcctgaaccagcacctgcaggccctgctgaccccagatgagccagacaacagccagggccgggacctgcgggagcagctggccgagggctgccgcctggcccagcacctggtgcagaagctgagcccagaaaatgatgatgatgaagatgaagatgtgaaggtggaggaggccgagaaggtgcaggagctgtatgccccccgggaggtgcagaaggccgaggagaaggaggtgcctgaggacagcctggaggagtgtgccatcacctgcagcaacagccaccacccctgtgagagcaaccagccctacggcaacacccgcatcacctttgaggaggaccaggtggacagcaccctgattgacagcagcagccatgatgagtggctggatgctgtgtgcatcatcccagaaaatgaaagtgaccacgagcaggaggaggagaagggccctgtgagccccaggagcagcggccgcttctgctgcctgatctctgtgggctacatcttctgccacccctgcccagcctggctgatccggaacctgcaggagagcgaggaggaggaggccccccaggagagctgggatgagggccactggtgtgaccaggtgaagaaggaggaccaggaggccaccagcccccggctgagccgggagctgctggatgagaaggagcctgaggtgctgcaggacagcctggaccgcttctacagcaccccatttgagtacctggagctgcctgacctgtgccagccctacagaagtgacttctacagcctgcaggagcagcacctgggcctggccctggacctggacaggatgaagaaggaccaggaggaggaggaggaccagggccccccctgcccccggctgagccgggagctgcctgaggtggtggagcctgaggacctgcaggacagcctggaccgctggtacagcacccccttctcctacccagagctgcctgacagctgccagccctacggcagctgcttctacagcctggaggaggagcacgtgggcttcagcctggatgtggatgaaattgagaagtaccaggagggggaggaggaccagaagccaccctgcccccggctgaatgaggtgctgatggaggccgaggagcctgaggtgctgcaggacagcctggaccgctgctacagcaccaccagcacctacttccagctgcacgccagcttccagcagtacagaagtgccttctacagctttgaggagcaggatgtgtccctggccctggatgtggacaaccgcttcttcaccctgaccgtcatccgccaccacctggccttccagatgggcgtcatcttcccccactag

SEQ ID NO: 161590 - DNA, 1062 bp, synthetic construct
  misc_feature 1..1062: note = Description of Artificial Sequence: Synthetic coding sequence
  source 1..1062: mol_type = other DNA
atggtggtgtctgctggcccctggagcggggagaaggccgagatgaacatcctggagatcaacaagaagagccggccccagctggccgagaacaagcagcagttcaggaacctgaagcagaagtgcctggtgacccaggtggcctacttcctggccaaccggcagaacaactatgactatgaggactgcaaggacctgatcaagtccatgctgagagatgagcggctgctgacagaggagaagctggccgaggagctgggccaggccgaggagctgcggcagtacaaggtgctggtgcacagccaggagcgggagctgacccagctgcgggagaagctgcaggagggcagagatgccagccgcagcctgaaccagcacctgcaggccctgctgaccccagatgagccagacaacagccagggccgggacctgcgggagcagctggccgagggctgccgcctggcccagcacctggtgcagaagctgagcccagaaaatgatgatgatgaagatgaagatgtgaaggtggaggaggccgagaaggtgcaggagctgtatgccccccgggaggtgcagaaggccgaggagaaggaggtgcctgaggacagcctggaggagtgtgccatcacctgcagcaacagccaccacccctgtgagagcaaccagccctacggcaacacccgcatcacctttgaggaggaccaggtggacagcaccctgattgacagcagcagccatgatgagtggctggatgctgtgtgcatcatcccagaaaatgaaagtgaccacgagcaggaggaggagaagggccctgtgagccccaggaacctgcaggagagcgaggaggaggaggccccccaggagagctgggatgaaggagactggaccctgagcatccccccagacatgtctgccagctaccagagcgacaggagcaccttccacagcgtggaggagcagcaggtgggcctggccctggacatcggccgccactggtgtgaccaggagaagggcggcccccggggccacaagagccaggcccagcagggcgccgccggctag

SEQ ID NO: 161591 - DNA, 1668 bp, synthetic construct
  misc_feature 1..1668: note = Description of Artificial Sequence: Synthetic coding sequence
  source 1..1668: mol_type = other DNA
atggtggtgtctgctggcccctggagcggggagaaggccgagatgaacatcctggagatcaacaagaagagccggccccagctggccgagaacaagcagcagttcaggaacctgaagcagaagtgcctggtgacccaggtggcctacttcctggccaaccggcagaacaactatgactatgaggactgcaaggacctgatcaagtccatgctgagagatgagcggctgctgacagaggagaagctggccgaggagctgggccaggccgaggagctgcggcagtacaaggtgctggtgcacagccaggagcgggagctgacccagctgcgggagaagctgcaggagggcagagatgccagccgcagcctgaaccagcacctgcaggccctgctgaccccagatgagccagacaacagccagggccgggacctgcgggagcagctggccgagggctgccgcctggcccagcacctggtgcagaagctgagcccagaaaatgatgatgatgaagatgaagatgtgaaggtggaggaggccgagaaggtgcaggagctgtatgccccccgggaggtgcagaaggccgaggagaaggaggtgcctgaggacagcctggaggagtgtgccatcacctgcagcaacagccaccacccctgtgagagcaaccagccctacggcaacacccgcatcacctttgaggaggaccaggtggacagcaccctgattgacagcagcagccatgatgagtggctggatgctgtgtgcatcatcccagaaaatgaaagtgaccacgagcaggaggaggagaagggccctgtgagccccaggaacctgcaggagagcgaggaggaggaggccccccaggagagctgggatgaaggagactggaccctgagcatccccccagacatgtctgccagctaccagagcgacaggagcaccttccacagcgtggaggagcagcaggtgggcctggccctggacatcggccgccactggtgtgaccaggtgaagaaggaggaccaggaggccaccagcccccggctgagccgggagctgctggatgagaaggagcctgaggtgctgcaggacagcctggaccgcttctacagcaccccatttgagtacctggagctgcctgacctgtgccagccctacagaagtgacttctacagcctgcaggagcagcacctgggcctggccctggacctggacaggatgaagaaggaccaggaggaggaggaggaccagggccccccctgcccccggctgagccgggagctgcctgaggtggtggagcctgaggacctgcaggacagcctggaccgctggtacagcacccccttctcctacccagagctgcctgacagctgccagccctacggcagctgcttctacagcctggaggaggagcacgtgggcttcagcctggatgtggatgaaattgagaagtaccaggagggggaggaggaccagaagccaccctgcccccggctgaatgaggtgctgatggaggccgaggagcctgaggtgctgcaggacagcctggaccgctgctacagcaccaccagcacctacttccagctgcacgccagcttccagcagtacagaagtgccttctacagctttgaggagcaggatgtgtccctggccctggatgtggacaactag

SEQ ID NO: 161592 - DNA, 1692 bp, synthetic construct
  misc_feature 1..1692: note = Description of Artificial Sequence: Synthetic coding sequence
  source 1..1692: mol_type = other DNA
atgcccctgacccccaccgtgcagggcttccagtggaccctgcggggcccagatgtggagaccagcccctttggagcccccagggctgccagccacggcgtgggccgccaccaggagctgcgggaccccacagattatgaggactgcaaggacctgatcaagtccatgctgagagatgagcggctgctgacagaggagaagctggccgaggagctgggccaggccgaggagctgcggcagtacaaggtgctggtgcacagccaggagcgggagctgacccagctgcgggagaagctgcaggagggcagagatgccagccgcagcctgaaccagcacctgcaggccctgctgaccccagatgagccagacaacagccagggccgggacctgcgggagcagctggccgagggctgccgcctggcccagcacctggtgcagaagctgagcccagaaaatgatgatgatgaagatgaagatgtgaaggtggaggaggccgagaaggtgcaggagctgtatgccccccgggaggtgcagaaggccgaggagaaggaggtgcctgaggacagcctggaggagtgtgccatcacctgcagcaacagccaccacccctgtgagagcaaccagccctacggcaacacccgcatcacctttgaggaggaccaggtggacagcaccctgattgacagcagcagccatgatgagtggctggatgctgtgtgcatcatcccagaaaatgaaagtgaccacgagcaggaggaggagaagggccctgtgagccccaggaacctgcaggagagcgaggaggaggaggccccccaggagagctgggatgaaggagactggaccctgagcatccccccagacatgtctgccagctaccagagcgacaggagcaccttccacagcgtggaggagcagcaggtgggcctggccctggacatcggccgccactggtgtgaccaggtgaagaaggaggaccaggaggccaccagcccccggctgagccgggagctgctggatgagaaggagcctgaggtgctgcaggacagcctggaccgcttctacagcaccccatttgagtacctggagctgcctgacctgtgccagccctacagaagtgacttctacagcctgcaggagcagcacctgggcctggccctggacctggacaggatgaagaaggaccaggaggaggaggaggaccagggccccccctgcccccggctgagccgggagctgcctgaggtggtggagcctgaggacctgcaggacagcctggaccgctggtacagcacccccttctcctacccagagctgcctgacagctgccagccctacggcagctgcttctacagcctggaggaggagcacgtgggcttcagcctggatgtggatgaaattgagaagtaccaggagggggaggaggaccagaagccaccctgcccccggctgaatgaggtgctgatggaggccgaggagcctgaggtgctgcaggacagcctggaccgctgctacagcaccaccagcacctacttccagctgcacgccagcttccagcagtacagaagtgccttctacagctttgaggagcaggatgtgtccctggccctggatgtggacaaccgcttcttcaccctgaccgtcatccgccaccacctggccttccagatgggcgtcatcttcccccactag

SEQ ID NO: 161593 - DNA, 1917 bp, synthetic construct
  misc_feature 1..1917: note = Description of Artificial Sequence: Synthetic coding sequence
  source 1..1917: mol_type = other DNA
atggtggtgtctgctgaccccctgagcagcgagagagctgagatgaacatcctggagatcaaccaggagctgcggagccagctggccgagagcaaccagcagttccgggacctgaaggagaagttcctgatcacccaggccacagcctacagcctggccaaccagctgaagaagtacaagtgtgaggagtacaaggacatcatcgacagcgtgctgagagatgagctgcagagcatggagaagctggccgagaagctgcggcaggccgaggagctgcggcagtacaaggccctggtgcacagccaggccaaggagctgacccagctgcgggagaagctgcgggagggcagagatgccagccgctggctgaacaagcacctgaagaccctgctgaccccagatgatcctgacaagagccagggccaggacctgcgggagcagctggccgagggccaccggctggccgagcacctggtgcacaagctgagcccagaaaatgatgaagatgaagatgaagatgaagatgacaaggatgaggaggtggagaaggtgcaggagagccctgccccccgggaggtgcagaagacagaggagaaggaggtgccccaggacagcctggaggagtgtgctgtgacctgcagcaacagccacaaccccagcaacagcaaccagccccacaggagcaccaagatcaccttcaaggagcacgaggtggacagcgccctggtggtggagagcgagcacccccatgatgaggaggaggaggccctgaacatccccccagagaaccagaatgaccacgaggaggaggagggcaaggcccctgtgcccccaagacaccacgacaagagcaacagctaccgccaccgggaggtgtccttcctggccctggatgagcagaaggtgtgcagcgcccaggatgtggcccgggactacagcaaccccaagtgggatgagaccagcctgggcttcctggagaagcagagcgacctggaggaggtgaagggccaggagaccgtggccccccggctgagccggggccccctgcgggtggacaagcatgagatcccccaggagagcctggatggctgctgcctgacccccagcatcctgcctgacctgacccccagctaccacccctactggagcaccctgtacagctttgaggacaagcaggtgtccctggccctggtggacaagatcaagaaggaccaggaggagattgaggaccagagccccccctgcccccggctgagccaggagctgcctgaggtgaaggagcaggaggtgcctgaggacagcgtgaatgaggtgtacctgaccccatctgtgcaccatgatgtgtctgactgccaccagccctacagcagcaccctgagcagcctggaggaccagctggcctgcagcgccctggatgtggccagccccacagaagctgcctgcccccagggcacctggagcggggacctgagccaccaccagagcgaggtgcaggtgtcccaggcccagctggagcccagcaccctggtgcccagctgcctgcggctgcagctggaccagggcttccactgtggaaatggcctggcccagaggggcctgagcagcaccacctgcagcttcagcgccaatgctgacagcggcaaccagtggcccttccaggagctggtgctggagcccagcctgggcatgaagaaccccccccagctggaggatgatgccctggagggcagcgccagcaacacccagggccggcaggtgacaggccgcatccgggccagcctggtgctgatcctgaagaccatcagaagaaggctgcccttcagcaagtggaggctggccttccgctttgctggcccccatgctgagagcgctgagatccccaacacagctggccgcacccagaggatggccggctag

SEQ ID NO: 161594 - DNA, 1917 bp, synthetic construct; identical to SEQ ID NO: 161593
  misc_feature 1..1917: note = Description of Artificial Sequence: Synthetic coding sequence
  source 1..1917: mol_type = other DNA

SEQ ID NO: 161595 - DNA, 1722 bp, synthetic construct
  misc_feature 1..1722: note = Description of Artificial Sequence: Synthetic coding sequence
  source 1..1722: mol_type = other DNA
atggtggtgtctgctgaccccctgagcagcgagagagctgagatgaacatcctggagatcaaccaggagctgcggagccagctggccgagagcaaccagcagttccgggacctgaaggagaagttcctgatcacccaggccacagcctacagcctggccaaccagctgaagaagtacaagtgtgaggagtacaaggacatcatcgacagcgtgctgagagatgagctgcagagcatggagaagctggccgagaagctgcggcaggccgaggagctgcggcagtacaaggccctggtgcacagccaggccaaggagctgacccagctgcgggagaagctgcgggagggcagagatgccagccgctggctgaacaagcacctgaagaccctgctgaccccagatgatcctgacaagagccagggccaggacctgcgggagcagctggccgagggccaccggctggccgagcacctggtgcacaagctgagcccagaaaatgatgaagatgaagatgaagatgaagatgacaaggatgaggaggtggagaaggtgcaggagagccctgccccccgggaggtgcagaagacagaggagaaggaggtgccccaggacagcctggaggagtgtgctgtgacctgcagcaacagccacaaccccagcaacagcaaccagccccacaggagcaccaagatcaccttcaaggagcacgaggtggacagcgccctggtggtggagagcgagcacccccatgatgaggaggaggaggccctgaacatccccccagagaaccagaatgaccacgaggaggaggagggcaaggcccctgtgcccccaagaaaccggcagagcctggagcccggggagctgaccaacctgcgggacttcctgatcagccctgtggtgagccacgtggccaaccctggccaccacgacaagagcaacagctaccgccaccgggaggtgtccttcctggccctggatgagcagaaggtgtgcagcgcccaggatgtggcccgggactacagcaaccccaagtgggatgagaccagcctgggcttcctggagaagcagagcgacctggaggaggtgaagggccaggagaccgtggccccccggctgagccggggccccctgcgggtggacaagcatgagatcccccaggagagcctggatggctgctgcctgacccccagcatcctgcctgacctgacccccagctaccacccctactggagcaccctgtacagctttgaggacaagcaggtgtccctggccctggtggacaagatcaagaaggaccaggaggagattgaggaccagagccccccctgcccccggctgagccaggagctgcctgaggtgaaggagcaggaggtgcctgaagattctgtgaatgaggtgtacctgacccccagcgtgcaccatgatgtgtctgactgccaccagccctacagcagcaccctgagcagcctggaggaccagctggcctgcagcgccctggatgtggccagccccacagaggccgcctgcccccagggcacctggagcggggacctgagccaccaccagagcgaggtgcaggtgtcccaggcccagctggagcccagcaccctggtgcccagctgcctgcggctgcagctggaccagggcttccactgtggaaatggcctggcccagaggggcctgagcagcaccacctgcagcttcagcgccaatgcctag

SEQ ID NO: 161596 - DNA, 372 bp, synthetic construct
  misc_feature 1..372: note = Description of Artificial Sequence: Synthetic coding sequence
  source 1..372: mol_type = other DNA
atggtggtgtctgctgaccccctgagcagcgagagagctgagatgaacatcctggagatcaaccaggagctgcggagccagctggccgagagcaaccagcagttccgggacctgaaggagaagttcctgatcacccaggccacagcctacagcctggccaaccagctgaagaagtacagctgcctgaagtacagaaaccacctgcccccagagcgctgccggcggctgaagaagaggaagagcctgcggacccactggagaaatgtgctgagcctggtgcagatcgtgaccaccctgctgacccccaccagcctgaccggggcccccaagagccacctgaggaacaccaagagcaccctgctgtggctgtag

SEQ ID NO: 161597 - DNA, 2004 bp, synthetic construct
  misc_feature 1..2004: note = Description of Artificial Sequence: Synthetic coding sequence
  source 1..2004: mol_type = other DNA
atggtggtgtctgctgaccccctgagcagcgagagagctgagatgaacatcctggagatcaaccaggagctgcggagccagctggccgagagcaaccagcagttccgggacctgaaggagaagttcctgatcacccaggccacagcctacagcctggccaaccagctgaagaagtacaagtgtgaggagtacaaggacatcatcgacagcgtgctgagagatgagctgcagagcatggagaagctggccgagaagctgcggcaggccgaggagctgcggcagtacaaggccctggtgcacagccaggccaaggagctgacccagctgcgggagaagctgcgggagggcagagatgccagccgctggctgaacaagcacctgaagaccctgctgaccccagatgatcctgacaagagccagggccaggacctgcgggagcagctggccgagggccaccggctggccgagcacctggtgcacaagctgagcccagaaaatgatgaagatgaagatgaagatgaagatgacaaggatgaggaggtggagaaggtgcaggagagccctgccccccgggaggtgcagaagacagaggagaaggaggtgccccaggacagcctggaggagtgtgctgtgacctgcagcaacagccacaaccccagcaacagcaaccagccccacaggagcaccaagatcaccttcaaggagcacgaggtggacagcgccctggtggtggagagcgagcacccccatgatgaggaggaggaggccctgaacatccccccagagaaccagaatgaccacgaggaggaggagggcaaggcccctgtgcccccaagaaaccggcagagcctggagcccggggagctgaccaacctgcgggacttcctgatcagccctgtggtgagccacgtggccaaccctggccaccacgacaagagcaacagctaccgccaccgggaggtgtccttcctggccctggatgagcagaaggtgtgcagcgcccaggatgtggcccgggactacagcaaccccaagtgggatgagaccagcctgggcttcctggagaagcagagcgacctggaggaggtgaagggccaggagaccgtggccccccggctgagccggggccccctgcgggtggacaagcatgagatcccccaggagagcctggatggctgctgcctgacccccagcatcctgcctgacctgacccccagctaccacccctactggagcaccctgtacagctttgaggacaagcaggtgtccctggccctggtggacaagatcaagaaggaccaggaggagattgaggaccagagccccccctgcccccggctgagccaggagctgcctgaggtgaaggagcaggaggtgcctgaagattctgtgaatgaggtgtacctgacccccagcgtgcaccatgatgtgtctgactgccaccagccctacagcagcaccctgagcagcctggaggaccagctggcctgcagcgccctggatgtggccagccccacagaggccgcctgcccccagggcacctggagcggggacctgagccaccacaggtctgaggtgcagatcagccaggcccagctggagcccagcaccctggtgcccagctgcctgcggctgcagctggaccagggcttccactgtggaaatggcctggcccagaggggcctgagcagcaccacctgcagcttcagcgccaatgctgacagcggcaaccagtggcccttccaggagctggtgctggagcccagcctgggcatgaagaaccccccccagctggaggatgatgccctggagggcagcgccagcaacacccagggccggcaggtgacaggccgcatccgggccagcctggtgctgatcctgaagaccatcagaagaaggctgcccttcagcaagtggaggctggccttccgctttgctggcccccacgccgagagcgctgagatccccaacacagctgagaggatgcagaggatgattggatag

SEQ ID NO: 161598 - DNA, 1722 bp, synthetic construct
  misc_feature 1..1722: note = Description of Artificial Sequence: Synthetic coding sequence
  source 1..1722: mol_type = other DNA
atggtggtgtctgctgaccccctgagcagcgagagagctgagatgaacatcctggagatcaaccaggagctgcggagccagctggccgagagcaaccagcagttccgggacctgaaggagaagttcctgatcacccaggccacagcctacagcctggccaaccagctgaagaagtacaagtgtgaggagtacaaggacatcatcgacagcgtgctgagagatgagctgcagagcatggagaagctggccgagaagctgcggcaggccgaggagctgcggcagtacaaggccctggtgcacagccaggccaaggagctgacccagctgcgggagaagctgcgggagggcagagatgccagccgctggctgaacaagcacctgaagaccctgctgaccccagatgatcctgacaagagccagggccaggacctgcgggagcagctggccgagggccaccggctggccgagcacctggtgcacaagctgagcccagaaaatgatgaagatgaagatgaagatgaagatgacaaggatgaggaggtggagaaggtgcaggagagccctgccccccgggaggtgcagaagacagaggagaaggaggtgccccaggacagcctggaggagtgtgctgtgacctgcagcaacagccacaaccccagcaacagcaaccagccccacaggagcaccaagatcaccttcaaggagcacgaggtggacagcgccctggtggtggagagcgagcacccccatgatgaggaggaggaggccctgaacatccccccagagaaccagaatgaccacgaggaggaggagggcaaggcccctgtgcccccaagaaaccggcagagcctggagcccggggagctgaccaacctgcgggacttcctgatcagccctgtggtgagccacgtggccaaccctggccaccacgacaagagcaacagctaccgccaccgggaggtgtccttcctggccctggatgagcagaaggtgtgcagcgcccaggatgtggcccgggactacagcaaccccaagtgggatgagaccagcctgggcttcctggagaagcagagcgacctggaggaggtgaagggccaggagaccgtggccccccggctgagccggggccccctgcgggtggacaagcatgagatcccccaggagagcctggatggctgctgcctgacccccagcatcctgcctgacctgacccccagctaccacccctactggagcaccctgtacagctttgaggacaagcaggtgtccctggccctggtggacaagatcaagaaggaccaggaggagattgaggaccagagccccccctgcccccggctgagccaggagctgcctgaggtgaaggagcaggaggtgcctgaagattctgtgaatgaggtgtacctgacccccagcgtgcaccatgatgtgtctgactgccaccagccctacagcagcaccctgagcagcctggaggaccagctggcctgcagcgccctggatgtggccagccccacagaggccgcctgcccccagggcacctggagcggggacctgagccaccacaggtctgaggtgcagatcagccaggcccagctggagcccagcaccctggtgcccagctgcctgcggctgcagctggaccagggcttccactgtggaaatggcctggcccagaggggcctgagcagcaccacctgcagcttcagcgccaatgcctag

SEQ ID NO: 161599 - DNA, 1917 bp, synthetic construct
  misc_feature 1..1917: note = Description of Artificial Sequence: Synthetic coding sequence
  source 1..1917: mol_type = other DNA
atggtggtgtctgctgaccccctgagcagcgagagagctgagatgaacatcctggagatcaaccaggagctgcggagccagctggccgagagcaaccagcagttccgggacctgaaggagaagttcctgatcacccaggccacagcctacagcctggccaaccagctgaagaagtacaagtgtgaggagtacaaggacatcatcgacagcgtgctgagagatgagctgcagagcatggagaagctggccgagaagctgcggcaggccgaggagctgcggcagtacaaggccctggtgcacagccaggccaaggagctgacccagctgcgggagaagctgcgggagggcagagatgccagccgctggctgaacaagcacctgaagaccctgctgaccccagatgatcctgacaagagccagggccaggacctgcgggagcagctggccgagggccaccggctggccgagcacctggtgcacaagctgagcccagaaaatgatgaagatgaagatgaagatgaagatgacaaggatgaggaggtggagaaggtgcaggagagccctgccccccgggaggtgcagaagacagaggagaaggaggtgccccaggacagcctggaggagtgtgctgtgacctgcagcaacagccacaaccccagcaacagcaaccagccccacaggagcaccaagatcaccttcaaggagcacgaggtggacagcgccctggtggtggagagcgagcacccccatgatgaggaggaggaggccctgaacatccccccagagaaccagaatgaccacgaggaggaggagggcaaggcccctgtgcccccaagacaccacgacaagagcaacagctaccgccaccgggaggtgtccttcctggccctggatgagcagaaggtgtgcagcgcccaggatgtggcccgggactacagcaaccccaagtgggatgagaccagcctgggcttcctggagaagcagagcgacctggaggaggtgaagggccaggagaccgtggccccccggctgagccggggccccctgcgggtggacaagcatgagatcccccaggagagcctggatggctgctgcctgacccccagcatcctgcctgacctgacccccagctaccacccctactggagcaccctgtacagctttgaggacaagcaggtgtccctggccctggtggacaagatcaagaaggaccaggaggagattgaggaccagagccccccctgcccccggctgagccaggagctgcctgaggtgaaggagcaggaggtgcctgaggacagcgtgaatgaggtgtacctgaccccatctgtgcaccatgatgtgtctgactgccaccagccctacagcagcaccctgagcagcctggaggaccagctggcctgcagcgccctggatgtggccagccccacagaagctgcctgcccccagggcacctggagcggggacctgagccaccacaggtctgaggtgcagatcagccaggcccagctggagcccagcaccctggtgcccagctgcctgcggctgcagctggaccagggcttccactgtggaaatggcctggcccagaggggcctgagcagcaccacctgcagcttcagcgccaatgctgacagcggcaaccagtggcccttccaggagctggtgctggagcccagcctgggcatgaagaaccccccccagctggaggatgatgccctggagggcagcgccagcaacacccagggccggcaggtgacaggccgcatccgggccagcctggtgctgatcctgaagaccatcagaagaaggctgcccttcagcaagtggaggctggccttccgctttgctggcccccatgctgagagcgctgagatccccaacacagctgagaggatgcagaggatgattggatag

SEQ ID NO: 161600 - DNA, 1917 bp, synthetic construct; identical to SEQ ID NO: 161599
  misc_feature 1..1917: note = Description of Artificial Sequence: Synthetic coding sequence
  source 1..1917: mol_type = other DNA

SEQ ID NO: 161601 - DNA, 624 bp, synthetic construct
  misc_feature 1..624: note = Description of Artificial Sequence: Synthetic coding sequence
  source 1..624: mol_type = other DNA
atgctggccagctacaagagctacagcagcaccttccacagcctggaggagcagcaggtgtgcatggctgtggacatcggccgccaccgctgggaccaggtgaagaaggaggaccaggaggccaccggcccccggctgagccgggagctgctggatgagaagggccctgaggtgctgcaggacagcctgtaccgctgctacagcaccccatctggctgcctggagctgacagacagctgccagccctacagaagtgccttctacgtgctggagcagcagagggtgggcctggccgtggacatggatgaaattgagaagtaccaggaggtggaggaggaccagggccgctgggaggaggaccagaaccccccctgcccccggctgaatggagtgctgatggaggtggaggagcctgaggtgctgcaggacagcctggatggctgctacagcacccccagcatgtactttgagctgcctgacagcttccagcactacagatctgtgttctacagctttgaggagcagcacatcagctttgccctgtatgtggacaaccgcttcttcaccctgactgtgaccagcctgcacctggtgttccagatggaggtgatcttcccccagtag

SEQ ID NO: 161602 - DNA, 1830 bp, synthetic construct
  misc_feature 1..1830: note = Description of Artificial Sequence: Synthetic coding sequence
  source 1..1830: mol_type = other DNA
cctgtgcccggccccaccagcagcgccaccaacgtgtccatggtggtgtctgctggccccctgagcagcgagaaggccgagatgaacatcctggagatcaatgagaagctgcggccccagctggccgagaagaagcagcagttcaggaacctgaaggagaagtgcttcctgacccagctgagcggcttcctggccaaccagcagaacaagtacaagtatgaggagtgcaaggacctgatcaagttcatgctgagaaatgaaaggcagttcaaggaggagaagctggccgagcagctgaagcaggccgaggagctgcggcagtacaaggtgctggtgcacgcccaggagcgggagctgacccagctgcgggagaagctgcgggagggcagagatgccagccgcagcctgaatgagcacctgcaggccctgctgaccccagatgagccagacaagagccagggccaggacctgcaggagcagctggccgagggctgccgcctggcccagcacctggtgcagaagctgagcccagaaaatgacaatgatgacaatgaagatgtgcaggtggaggtggccgagaaggtgcagaagagcagcgccccccgggagatgcagaaggccgaggagaaggaggtgcctgaggacagcctggaggagtgtgccatcacctacagcaacagccacggcccctatgacagcaaccagccccacaggaagaccaagatcacctttgaggaggacaaggtggacagcaccctcatcggcagcagcagccacgtggagagagaagatgctgtgcacatcatcccagaaaatgaaagtgatgatgaggaggaggaggagaagggccctgtgagccccaggaacctgcaggagagcgaggaggaggaggtgccccaggagagctgggatgagggctacagcacccccagcatccccccagagatgctggccagctacaagagctacagcagcaccttccacagcctggaggagcagcaggtgtgcatggctgtggacatcggccgccaccgctgggaccaggtgaagaaggaggaccaggaggccaccggcccccggctgagccgggagctgctggatgagaagggccctgaggtgctgcaggacagcctgtaccgctgctacagcacccccagcggctacctggagctgcctgacctgggccagccctacagcagcgctgtgtacagcctggaggagcagtacctgggcctggccctggacctggaccgcatcaagaaggaccaggaggaggaggaggaccagggccccccctgcccccggctgagccgggagctgctggaggtggtggagcctgaggtgctgcaggacagcctggaccgctgctacagcacccccagcagctgcctggagcagcctgacagctgccagccctacggcagcagcttctacgccctggaggagaagcacgtgggcttcagcctggatgtgggggagattgagaagaagggcaagggcaagaagagaagaggccgccgcagcaagaaggagaggagaagaggaaggaaggagggggaggaggaccagaaccccccctgcccccggctgaatggagtgctgatggaggtggaggagcctgaggtgctgcaggacagcctggatggctgctacagcacccccagcatgtactttgagctgcctgacagcttccagcactacagatctgtgttctacagctttgaggagcagcacatcagctttgccctgtatgtggacaaccgcttcttcaccctgactgtgaccagcctgcacctggtgttccagatggaggtgatcttcccccagtag

SEQ ID NO: 161603 - DNA, 2052 bp, synthetic construct
  misc_feature 1..2052: note = Description of Artificial Sequence: Synthetic coding sequence
  source 1..2052: mol_type = other DNA
tgaccaggccccaccagcagcgccaccaacgtgtccatggtggtgtctgctggccccctgagcagcgagaaggccgagatgaacatcctggagatcaatgagaagctgcggccccagctggccgagaagaagcagcagttcaggaacctgaaggagaagtgcttcctgacccagctgagcggcttcctggccaaccagcagaacaagtacaagtatgaggagtgcaaggacctgatcaagttcatgctgagaaatgaaaggcagttcaaggaggagaagctggccgagcagctgaagcaggccgaggagctgcggcagtacaaggtgctggtgcacgcccaggagcgggagctgacccagctgcgggagaagctgcgggagggcagagatgccagccgcagcctgaatgagcacctgcaggccctgctgaccccagatgagccagacaagagccagggccaggacctgcaggagcagctggccgagggctgccgcctggcccagcacctggtgcagaagctgagcccagaaaatgacaatgatgacaatgaagatgtgcaggtggaggtggccgagaaggtgcagaagagcagcgccccccgggagatgcagaaggccgaggagaaggaggtgcctgaggacagcctggaggagtgtgccatcacctacagcaacagccacggcccctatgacagcaaccagccccacaggaagaccaagatcacctttgaggaggacaaggtggacagcaccctgattggcagcagcagccacgtggagcgggaggatgctgtgcacatcatcccagaaaatgaaagtgatgatgaggaggaggaggagaagggccctgtgagccccaggaacctgcaggagagcgaggaggaggaggtgccccaggagagctgggatgagggctacagcacccccagcatccccccagagatgctggccagctacaagagctacagcagcaccttccacagcctggaggagcagcaggtgtgcatggctgtggacatcggccgccaccgctgggaccaggtgaagaaggaggaccaggaggccaccggcccccggctgagccgggagctgctggatgagaagggccctgaggtgctgcaggacagcctgtaccgctgctacagcaccccatctggctgcctggagctgacagacagctgccagccctacagaagtgccttctacgtgctggagcagcagagggtgggcctggccgtggacatggatgaaattgagaagtaccaggaggtggaggaggaccaggaccccagctgcccccggctgagccgggagctgctggatgagaaggagcctgaggtgctgcaggacagcctgggccgctggtacagcacccccagcggctacctggagctgcctgacctgggccagccctacagcagcgctgtgtacagcctggaggagcagtacctgggcctggccctggacctggaccgcatcaagaaggaccaggaggaggaggaggaccagggccccccctgcccccggctgagccgggagctgctggaggtggtggagcctgaggtgctgcaggacagcctggaccgctgctacagcacccccagcagctgcctggagcagcctgacagctgccagccctacggcagcagcttctacgccctggaggagaagcacgtgggcttcagcctggatgtgggggagattgagaagaagggcaagggcaagaagagaagaggccgccgcagcaagaaggagaggagaagaggaaggaaggagggggaggaggaccagaaccccccctgcccccggctgaatggagtgctgatggaggtggaggagcctgaggtgctgcaggacagcctggatggctgctacagcacccccagcatgtactttgagctgcctgacagcttccagcactacagatctgtgttctacagctttgaggagcagcacatcagctttgccctgtatgtggacaaccgcttcttcaccctgactgtgaccagcctgcacctggtgttccagatggaggtgatcttcccccagtag

SEQ ID NO: 161604 - DNA, 1824 bp, synthetic construct
  misc_feature 1..1824: note = Description of Artificial Sequence: Synthetic coding sequence
  source 1..1824: mol_type = other DNA
cctgtgcccggccccaccagcagcgccaccaacgtgtccatggtggtgtctgctggccccctgagcagcgagaaggccgagatgaacatcctggagatcaatgagaagctgcggccccagctggccgagaagaagcagcagttcaggaacctgaaggagaagtgcttcctgacccagctgagcggcttcctggccaaccagcagaacaagtacaagtatgaggagtgcaaggacctgatcaagttcatgctgagaaatgaaaggcagttcaaggaggagaagctggccgagcagctgaagcaggccgaggagctgcggcagtacaaggtgctggtgcacgcccaggagcgggagctgacccagctgcgggagaagctgcgggagggcagagatgccagccgcagcctgaatgagcacctgcaggccctgctgaccccagatgagccagacaagagccagggccaggacctgcaggagcagctggccgagggctgccgcctggcccagcacctggtgcagaagctgagcccagaaaatgacaatgatgacaatgaagatgtgcaggtggaggtggccgagaaggtgcagaagagcagcgccccccgggagatgcagaaggccgaggagaaggaggtgcctgaggacagcctggaggagtgtgccatcacctacagcaacagccacggcccctatgacagcaaccagccccacaggaagaccaagatcacctttgaggaggacaaggtggacagcaccctcatcggcagcagcagccacgtggagagagaagatgctgtgcacatcatcccagaaaatgaaagtgatgatgaggaggaggaggagaagggccctgtgagccccaggaacctgcaggagagcgaggaggaggaggtgccccaggagagctgggatgagggctacagcacccccagcatccccccagagatgctggccagctacaagagctacagcagcaccttccacagcctggaggagcagcaggtgtgcatggctgtggacatcggccgccaccgctgggaccaggtgaagaaggaggaccaggaggccaccggcccccggctgagccgggagctgctggatgagaagggccctgaggtgctgcaggacagcctgtaccgctgctacagcacccccagcggctgcctggagctgacagacagctgccagccctaccgcagcgccttctacgtgctggagcagcagagggtgggcctggccgtggacatggatgaaattgagaagtaccaggaggtggaggaggaccaggaccccagctgcccccggctgagccgggagctgctggatgagaaggagcctgaggtgctgcaggacagcctgggccgctggtacagcaccccatctggctacctggagctgcctgacctgggccagccctacagcagcgctgtgtacagcctggaggagcagtacctgggcctggccctggacctggaccgcatcaagaaggaccaggaggaggaggaggaccagggccccccctgcccccggctgagccgggagctgctggaggtggtggagcctgaggtgctgcaggacagcctggatgtgatccagctgctgcctgtggtgctgaacagcctgaccccagccagccccatggaggtgcccttcatgcactggaggaagaacatgctggccttcctgctgacctgggagaagctgaagaggcggggccggggcaggaaggagggggaggaggaccagaggaggaaggaggagggggaggagaagaagggcaagaagatcaagacccaccacgcccctggcagcacagcctgctag

SEQ ID NO: 161605 - DNA, 396 bp, synthetic construct
  misc_feature 1..396: note = Description of Artificial Sequence: Synthetic coding sequence
  source 1..396: mol_type = other DNA
atggctgatgtggtggtgggcaaggacaagggcggggagcagaggctcatcagcctgcccctgagccgcatccgggtcatcatgaagagcagccctgaggtgagcagcatcaaccaggaggccctggtgctgacagccaaggccacagagctgtttgtgcagtgcctggccacctacagctacagacatggcagcggcaaggagaagaaggtgctgacctacagcgacctggccaacacagcccagcagagcgagaccttccagttcctggccgacatcctgcccaagaagatcctggccagcaagtacctgaagatgctgaaggaggagaagcgggaggaggatgaagaaaatgacaatgacaatgaaagtgaccatgatgaagctgacagctag

SEQ ID NO: 161606 - DNA, 582 bp, synthetic construct; identical to SEQ ID NO: 154255
  misc_feature 1..582: note = Description of Artificial Sequence: Synthetic coding sequence
  source 1..582: mol_type = other DNA

SEQ ID NO: 161607 - DNA, 582 bp, synthetic construct; identical to SEQ ID NO: 154255
  misc_feature 1..582: note = Description of Artificial Sequence: Synthetic coding sequence
  source 1..582: mol_type = other DNA

SEQ ID NO: 161608 - DNA, 582 bp, synthetic construct; identical to SEQ ID NO: 154255
  misc_feature 1..582: note = Description of Artificial Sequence: Synthetic coding sequence
  source 1..582: mol_type = other DNA

SEQ ID NO: 161609 - DNA, 582 bp, synthetic construct; identical to SEQ ID NO: 154255
  misc_feature 1..582: note = Description of Artificial Sequence: Synthetic coding sequence
  source 1..582: mol_type = other DNA

SEQ ID NO: 161610 - DNA, 3966 bp, synthetic construct
  misc_feature 1..3966: note = Description of Artificial Sequence: Synthetic coding sequence
  source 1..3966: mol_type = other DNA
atgggcgccccctttgtgtgggccctgggcctgctgatgctgcagatgctgctgtttgtggccggggagcagggcacccaggacatcacagatgccagcgagcggggcctgcacatgcagaagctgggcagcggctctgtgcaggccgccctggccgagctggtggccctgccctgcctcttcaccctgcagccccggcccagcgctgccagagatgccccccgcatcaagtggaccaaggtgaggacagccagcggccagaggcaggacctgcccatcctggtggccaaggacaacgtggtgcgggtggccaagtcctggcagggccgggtgtccctgcccagctaccccaggagaagagccaatgccaccctgctgctgggccccctgcgggccagtgacagcggcctgtaccgctgccaggtggtgcggggcattgaagatgagcaggacctggtgcccctggaggtgactggagtggtgttccactaccgcagcgcccgggacagatatgccctgacctttgctgaggcccaggaggcctgccgcctgagcagcgccatcatcgccgcccccaggcacctgcaggccgcctttgaagatggctttgacaactgtgatgctggctggctgagtgacagaacagtgcgctaccccatcacccagagcaggcctggctgctacggggacaggagcagcctgcccggggtgcgctcctatggaagaagaaacccccaggagctgtatgatgtgtactgctttgcccgggagctgggcggggaggtgttctacgtgggccctgcccggcggctgaccctggccggggcccgggcccagtgccggcggcagggcgccgccctggcctctgtgggccagctgcacctggcctggcatgagggcctggaccagtgtgaccccggctggctggctgatggctctgtgcgctaccccatccagacccccaggagaagatgtggcggccctgcccctggggtgaggacagtgtacagatttgccaacagaacaggcttccccagccctgctgagagatttgatgcctactgcttccgggcccaccaccccaccagccagcacggggacctggagacccccagcagtggagatgaaggagagatcctgtctgctgagggcccccctgtgcgggagctggagcccaccctggaggaggaggaggtggtgaccccagacttccaggagcccctggtgtcctctggagaggaggagaccctcatcctggaggagaagcaggagagccagcagaccctgagccccacccctggggaccccatgctggcctcctggcccactggagaggtgtggctgagcacagtggcccccagccccagcgacatgggcgccggcacagctgccagcagccacacagaggtggcccccacagaccccatgcccaggagaagaggccgcttcaagggcctgaatggccgctacttccagcagcaggagcctgagcccggcctgcagggcggcatggaggccagcgcccagccccccaccagcgaggccgctgtgaaccagatggagccccccctggccatggctgtgacagagatgctgggcagcggccagagccgcagcccctgggccgacctgaccaatgaggtggacatgcctggagctggcagcgctgggggcaagagcagccctgagccctggctgtggccacccaccatggtgcccccatccatcagcggccacagccgggcccctgtgctggagctggagaaggccgagggccccagcgcccggcctgccaccccagacctcttctggagccccctggaggccaccgtgtctgcccccagccctgccccctgggaggccttccctgtggccaccagcccagacctgcccatgatggccatgctgcggggccccaaggagtggatgctgccccaccccacccccatcagcacagaggccaacagagtggaggcccacggggaggccacagccacagccccacccagccctgctgctgagaccaaggtgtacagcctgcccctgagcctgacccccaccggccagggcggggaggccatgcccaccaccccagagagccccagggctgacttccgggagaccggggagaccagccctgcccaggtgaacaaggccgagcacagcagcagcagcccctggcccagcgtgaacagaaatgtggccgtgggctttgtgcccacagaaacagccacagagcccaccggcctgcggggcatccctggcagcgagagcggcgtgtttgacacagctgagagccccaccagcggcctgcaggccaccgtggatgaggtgcaggacccctggcccagcgtgtacagcaagggcctggatgccagcagccccagcgcccccctgggcagccctggggtcttcctggtgcccaaggtgacccccaacctggagccctgggtggccacagatgagggccccaccgtgaaccccatggacagcacagtgaccccagcccccagtgatgccagcggcatctgggagcccggcagccaggtgtttgaggaggccgagagcaccaccctgagcccccaggtggccctggacaccagcatcgtgacccccctgaccaccctggagcagggcgacaaggtgggcgtgcctgccatgagcaccctgggcagcagcagcagccagccccaccctgagcctgaggaccaggtggagacccagggcaccagcggggcctctgtgcccccccaccagagcagccccctgggcaagccagctgtgcccccaggcacccccacagctgcctctgtgggggagagcgcctctgtgagcagcggggagcccaccgtgccctgggaccccagcagcaccctgctgcctgtgaccctgggcattgaagattttgagctggaggtgctggccggcagccctggggtggagagcttctgggaggaggtggccagcggggaggagcccgccctgcccggcacccccatgaatgctggagctgaggaggtgcacagcgacccctgtgagaacaacccctgcctgcatggaggcacctgcaatgccaacggcaccatgtatggctgcagctgtgaccagggctttgctggggagaactgtgaaattgatattgatgactgcctgtgcagcccctgtgaaaatggaggcacctgcattgatgaggtgaatggatttgtgtgcctgtgcctgcccagctatggaggcagcttctgtgagaaggacacagagggctgtgaccggggctggcacaagttccagggccactgctaccgctactttgcccaccggcgggcctgggaggatgctgagaaggactgcagaagaagaagtggccacctgacctctgtgcacagccctgaggagcacagcttcatcaacagctttggacatgagaacacctggattggcctgaatgacagaattgtggagcgggacttccagtggacagacaacacaggcctgcagtttgagaactggagggagaaccagcctgacaacttctttgctggaggagaggactgtgtggtgatggtggcccacgagagcggccgctggaatgatgtgccctgcaactacaacctgccctacgtgtgcaagaagggcaccgtgctgtgtggccccccacctgctgtggagaatgccagcctgattggagccaggaaggccaagtacaacgtgcacgccaccgtgcgctaccagtgcaatgaaggatttgcccagcaccacgtggccaccatccgctgccgcagcaatggcaagtgggaccggccccagatcgtgtgcaccaagcccaggaggagccacaggatgagaagacaccaccaccaccaccagcaccaccaccagcaccaccaccacaagagcaggaaggagaggaggaagcacaagaagcaccccacagaggactgggagaaggatgagggcaacttctgctag

SEQ ID NO: 161611 - DNA, 2319 bp, synthetic construct
  misc_feature 1..2319: note = Description of Artificial Sequence: Synthetic coding sequence
  source 1..2319: mol_type = other DNA
atgcctggggccggcagcgctgggggcaagagcagccctgagccctggctgtggccacccaccatggtgccccccagcatcagcggccacagccgggcccctgtgctggagctggagaaggccgagggccccagcgcccggcctgccaccccagacctcttctggagccccctggaggccaccgtgtctgcccccagccctgccccctgggaggccttccctgtggccaccagcccagacctgcccatgatggccatgctgcggggccccaaggagtggatgctgccccaccccacccccatcagcacagaggccaacagagtggaggcccatggagaggccacagccacagccccacccagccctgctgctgagaccaaggtgtacagcctgcccctgagcctgacccccaccggccagggcggggaggccatgcccaccaccccagagagccccagggctgacttccgggagactggagagaccagccctgcccaggtgaacaaggccgagcacagcagcagcagcccctggcccagcgtgaacagaaatgtggccgtgggctttgtgcccacagaaacagccacagagcccaccggcctgcggggcatccctggcagcgagagcggcgtgtttgacacagctgagagccccaccagcggcctgcaggccaccgtggatgaggtgcaggacccctggcccagcgtgtacagcaagggcctggatgccagcagccccagcgcccccctgggcagccctggggtcttcctggtgcccaaggtgacccccaacctggagccctgggtggccacagatgagggccccaccgtgaaccccatggacagcacagtgaccccagcccccagtgatgccagcggcatctgggagcccggcagccaggtgtttgaggaggccgagagcaccaccctgagcccccaggtggccctggacaccagcatcgtgacccccctgaccaccctggagcagggcgacaaggtgggcgtgcctgccatgagcaccctgggcagcagcagcagccagccccaccctgagcctgaggaccaggtggagacccagggcaccagcggggcctctgtgcccccccaccagagcagccccctgggcaagccagctgtgcccccaggcacccccacagctgcctctgtgggggagagcgcctctgtgtcctctggagagcccaccgtgccctgggaccccagcagcaccctgctgcctgtgaccctgggcatcgaggactttgagctggaggtgctggccggcagccctggggtggagagcttctgggaggaggtggccagcggggaggagcccgccctgcccggcacccccatgaatgctggagctgaggaggtgcacagcgacccctgtgagaacaacccctgcctgcacggcggcacctgcaatgccaacggcaccatgtatggctgcagctgtgaccagggctttgctggggagaactgtgaaattgatattgatgactgcctgtgcagcccctgtgaaaatggaggcacctgcattgatgaggtgaatggatttgtgtgcctgtgcctgcccagctatggaggcagcttctgtgagaaggacacagagggctgtgaccggggctggcacaagttccagggccactgctaccgctactttgcccacagaagagcctgggaggatgctgagaaggactgcagaagaagaagtggccacctgacctctgtgcacagccctgaggagcacagcttcatcaacagctttggacatgagaacacctggattggcctgaatgaccgcatcgtggagcgggacttccagtggacagacaacacaggcctgcagtttgagaactggagggagaaccagcctgacaacttctttgctggaggagaggactgtgtggtgatggtggcccatgaaagtggccgctggaatgatgtgccctgcaactacaacctgccctacgtgtgcaagaagggcaccgtgctgtgtggccccccacctgctgtggagaatgccagcctcatcggggccaggaaggccaagtacaacgtgcacgccaccgtgcgctaccagtgcaatgaaggatttgcccagcaccacgtggccaccatccgctgccgcagcaatggcaagtgggaccggccccagatcgtgtgcaccaagccccggcgcagccacaggatgaggaggcaccaccaccaccaccagcaccaccaccagcaccaccaccacaagagcaggaaggagaggaggaagcacaagaagcaccccacagaggactgggagaaggatgagggcaacttctgctag

SEQ ID NO: 161612 - DNA, 4008 bp, synthetic construct
  misc_feature 1..4008: note = Description of Artificial Sequence: Synthetic coding sequence
  source 1..4008: mol_type = other DNA
cggcccccaagagatgccagcgagctgggcgcccggagcaggatgggcgccccctttgtgtgggccctgggcctgctgatgctgcagatgctgctgtttgtggccggggagcagggcacccaggacatcacagatgccagcgagcggggcctgcacatgcagaagctgggcagcggctctgtgcaggccgccctggccgagctggtggccctgccctgcctcttcaccctgcagccccggcccagcgctgccagagatgccccccgcatcaagtggaccaaggtgaggacagccagcggccagaggcaggacctgcccatcctggtggccaaggacaacgtggtgcgggtggccaagtcctggcagggccgggtgtccctgcccagctaccccaggagaagagccaatgccaccctgctgctgggccccctgcgggccagtgacagcggcctgtaccgctgccaggtggtgcggggcattgaagatgagcaggacctggtgcccctggaggtgactggagtggtgttccactaccgcagcgcccgggacagatatgccctgacctttgctgaggcccaggaggcctgccgcctgagcagcgccatcatcgccgcccccaggcacctgcaggccgcctttgaagatggctttgacaactgtgatgctggctggctgagtgacagaacagtgcgctaccccatcacccagagcaggcctggctgctacggggacaggagcagcctgcccggggtgcgctcctatggaagaagaaacccccaggagctgtatgatgtgtactgctttgcccgggagctgggcggggaggtgttctacgtgggccctgcccggcggctgaccctggccggggcccgggcccagtgccggcggcagggcgccgccctggcctctgtgggccagctgcacctggcctggcatgagggcctggaccagtgtgaccccggctggctggctgatggctctgtgcgctaccccatccagacccccaggagaagatgtggcggccctgcccctggggtgaggacagtgtacagatttgccaacagaacaggcttccccagccctgctgagagatttgatgcctactgcttccgggcccaccaccccaccagccagcacggggacctggagacccccagcagtggagatgaaggagagatcctgtctgctgagggcccccctgtgcgggagctggagcccaccctggaggaggaggaggtggtgaccccagacttccaggagcccctggtgtcctctggagaggaggagaccctcatcctggaggagaagcaggagagccagcagaccctgagccccacccctggggaccccatgctggcctcctggcccactggagaggtgtggctgagcacagtggcccccagccccagcgacatgggcgccggcacagctgccagcagccacacagaggtggcccccacagaccccatgcccaggagaagaggccgcttcaagggcctgaatggccgctacttccagcagcaggagcctgagcccggcctgcagggcggcatggaggccagcgcccagccccccaccagcgaggccgctgtgaaccagatggagccccccctggccatggctgtgacagagatgctgggcagcggccagagccgcagcccctgggccgacctgaccaatgaggtggacatgcctggagctggcagcgctgggggcaagagcagccctgagccctggctgtggccacccaccatggtgcccccatccatcagcggccacagccgggcccctgtgctggagctggagaaggccgagggccccagcgcccggcctgccaccccagacctcttctggagccccctggaggccaccgtgtctgcccccagccctgccccctgggaggccttccctgtggccaccagcccagacctgcccatgatggccatgctgcggggccccaaggagtggatgctgccccaccccacccccatcagcacagaggccaacagagtggaggcccacggggaggccacagccacagccccacccagccctgctgctgagaccaaggtgtacagcctgcccctgagcctgacccccaccggccagggcggggaggccatgcccaccaccccagagagccccagggctgacttccgggagaccggggagaccagccctgcccaggtgaacaaggccgagcacagcagcagcagcccctggcccagcgtgaacagaaatgtggccgtgggctttgtgcccacagaaacagccacagagcccaccggcctgcggggcatccctggcagcgagagcggcgtgtttgacacagctgagagccccaccagcggcctgcaggccaccgtggatgaggtgcaggacccctggcccagcgtgtacagcaagggcctggatgccagcagccccagcgcccccctgggcagccctggggtcttcctggtgcccaaggtgacccccaacctggagccctgggtggccacagatgagggccccaccgtgaaccccatggacagcacagtgaccccagcccccagtgatgccagcggcatctgggagcccggcagccaggtgtttgaggaggccgagagcaccaccctgagcccccaggtggccctggacaccagcatcgtgacccccctgaccaccctggagcagggcgacaaggtgggcgtgcctgccatgagcaccctgggcagcagcagcagccagccccaccctgagcctgaggaccaggtggagacccagggcaccagcggggcctctgtgcccccccaccagagcagccccctgggcaagccagctgtgcccccaggcacccccacagctgcctctgtgggggagagcgcctctgtgagcagcggggagcccaccgtgccctgggaccccagcagcaccctgctgcctgtgaccctgggcattgaagattttgagctggaggtgctggccggcagccctggggtggagagcttctgggaggaggtggccagcggggaggagcccgccctgcccggcacccccatgaatgctggagctgaggaggtgcacagcgacccctgtgagaacaacccctgcctgcatggaggcacctgcaatgccaacggcaccatgtatggctgcagctgtgaccagggctttgctggggagaactgtgaaattgatattgatgactgcctgtgcagcccctgtgaaaatggaggcacctgcattgatgaggtgaatggatttgtgtgcctgtgcctgcccagctatggaggcagcttctgtgagaaggacacagagggctgtgaccggggctggcacaagttccagggccactgctaccgctactttgcccaccggcgggcctgggaggatgctgagaaggactgcagaagaagaagtggccacctgacctctgtgcacagccctgaggagcacagcttcatcaacagctttggacatgagaacacctggattggcctgaatgacagaattgtggagcgggacttccagtggacagacaacacaggcctgcagtttgagaactggagggagaaccagcctgacaacttctttgctggaggagaggactgtgtggtgatggtggcccacgagagcggccgctggaatgatgtgccctgcaactacaacctgccctacgtgtgcaagaagggcaccgtgctgtgtggccccccacctgctgtggagaatgccagcctgattggagccaggaaggccaagtacaacgtgcacgccaccgtgcgctaccagtgcaatgaaggatttgcccagcaccacgtggccaccatccgctgccgcagcaatggcaagtgggaccggccccagatcgtgtgcaccaagcccaggaggagccacaggatgagaagacaccaccaccaccaccagcaccaccaccagcaccaccaccacaagagcaggaaggagaggaggaagcacaagaagcaccccacagaggactgggagaaggatgagggcaacttctgctag

SEQ ID NO: 161613 - DNA, 2190 bp, synthetic construct
  misc_feature 1..2190: note = Description of Artificial Sequence: Synthetic coding sequence
  source 1..2190: mol_type = other DNA
atgagctgctgtgacctggccgctgctggccagctgggcaaggccagcatcatggccagtgactgtgagcccgccctgaaccaggccgagggcaggaaccccaccctggagcgctacctgggcgccctgcgggaggccaagaatgacagcgagcagtttgctgccctgctgctggtgaccaaggctgtgaaggccggggacattgatgccaagacccggcggcgcatctttgatgctgtgggcttcaccttccccaaccggctgctgaccaccaaggaggccccagatggctgcccagaccacgtgctgcgggccctgggcgtggccctgctggcctgcttctgcagcgaccctgagctggccgcccacccccaggtgctgaacaagatccccatcctgagcaccttcctgacagcccggggggaccctgatgatgctgcccggcgctccatgattgatgacacctaccagtgcctgacagctgtggccggcaccccccggggccccaggcacctgattgctgggggcaccgtgtctgccctgtgccaggcctacctgggccacggctacggctttgaccaggccctggccctgctggtgggcctgctggccgctgctgagacccagtgctggaaggaggccgagccagacctgctggccgtgctgcggggcctgtctgaggacttccagaaggcagaagatgccagcaagtttgagctgtgccagctgctgcccctcttcctgccccccaccaccgtgcccccagagtgctacagagacctgcaggccggcctggcccgcatcctgggcagcaagctgagctcctggcagaggaacccagccctgaagctggccgcccggctggcccacgcctgtggcagtgactggatcccagctggcagcagcggcagcaagttcctggccctgctggtgaacctggcctgtgtggaggtgcggctggccctggaggagactggaacagaggtgaaggaggatgtggtgacagcctgctacgccctgatggagctgggcatccaggagtgcacccgctgtgagcagagcctgctgaaggagccccagaaggtgcagctggtgtctgtgatgaaggaggccatcggggccgtcatccactacctgctgcaggtgggcagcgagaagcagaaggagccctttgtgtttgcctctgtgcgcatcctgggcgcctggctggccgaggagaccagcagcctgaggaaggaggtgtgccagctgctgcccttcctggtgcgctatgccaagaccctgtatgaggaggccgaggaggccaatgacctgagccagcaggtggccaacctggccatcagccccaccaccccaggccccacctggccaggagatgccctgcggctgctgctgcccggctggtgccacctgactgtggaggatggcccccgggagatcctgatcaaggagggcgcccccagcctgctgtgcaagtacttcctgcagcagtgggagctgaccagccctggccatgacacctctgtgctgcctgattctgtggagatcggcctgcagacctgctgccacatcttcctgaacctggtggtgacagcccctggcctcatcaagagagatgcctgcttcaccagcctgatgaacaccctgatgaccagcctgcctgccctggtgcagcagcagggccgcctgctgctggccgccaacgtggccaccctgggcctgctgatggcccggctgctgagcaccagccctgccctgcagggcaccccagccagccggggcttctttgctgctgccatcctcttcctgagccagagccacgtggcccgggccaccccaggcagtgaccaggccgtgctggccctgagcccagaatatgagggcatctgggccgacctgcaggagctgtggttcctgggcatgcaggccttcaccggctgtgtgcccctgctgccctggctggccccagctgccctgcggagccgctggccccaggagctgctgcagctgctgggctctgtgagccccaacagcgtgaagccagagatggtggccgcctaccagggcgtgctggtggagctggcccgggccaaccggctgtgccgggaggccatgaggctgcaggccggggaggagacagccagccactacaggatggccgccctggagcagtgcctgtctgagccctag

SEQ ID NO: 161614 - DNA, 2190 bp, synthetic construct; identical to SEQ ID NO: 161613
  misc_feature 1..2190: note = Description of Artificial Sequence: Synthetic coding sequence
  source 1..2190: mol_type = other DNA

SEQ ID NO: 161615 - DNA, 2139 bp, synthetic construct
  misc_feature 1..2139: note = Description of Artificial Sequence: Synthetic coding sequence
  source 1..2139: mol_type = other DNA
atggccagtgactgtgagcccgccctgaaccaggccgagggcaggaaccccaccctggagcgctacctgggcgccctgcgggaggccaagaatgattctgagcagtttgctgccctgctgctggtgaccaaggctgtgaaggccggggacattgatgccaagacccggcggcgcatctttgatgctgtgggcttcaccttccccaaccggctgctgaccaccaaggaggccccagatggctgcccagaccacgtgctgcgggccctgggcgtggccctgctggcctgcttctgcagcgaccctgagctggccgcccacccccaggtgctgaacaagatccccatcctgagcaccttcctgacagcccggggggaccctgatgatgctgcccggcgctccatgattgatgacacctaccagtgcctgacagctgtggccggcaccccccggggccccaggcacctgattgctgggggcaccgtgtctgccctgtgccaggcctacctgggccacggctacggctttgaccaggccctggccctgctggtgggcctgctggccgctgctgagacccagtgctggaaggaggccgagccagacctgctggccgtgctgcggggcctgtctgaggacttccagaaggccgaggatgccagcaagtttgagctgtgccagctgctgcccctcttcctgccccccaccaccgtgcccccagagtgctacagagacctgcaggccggcctggcccgcatcctgggcagcaagctgagctcctggcagagaaatcctgccctgaagctggccgcccggctggcccacgcctgtggcagtgactggatcccagctggcagcagcggcagcaagttcctggccctgctggtgaacctggcctgtgtggaggtgcggctggccctggaggagaccggcacagaggtgaaggaggatgtggtgacagcctgctacgccctgatggagctgggcatccaggagtgcacccgctgtgagcagagcctgctgaaggagccccagaaggtgcagctggtgtctgtgatgaaggaggccatcggggctgtgatccactacctgctgcaggtgggcagcgagaagcagaaggagccctttgtgtttgcctctgtgcgcatcctgggcgcctggctggccgaggagaccagcagcctgaggaaggaggtgtgccagctgctgcccttcctggtgcgctatgccaagaccctgtatgaggaggccgaggaggccaatgacctgagccagcaggtggccaacctggccatcagccccaccaccccaggccccacctggccaggagatgccctgcggctgctgctgcccggctggtgccacctgactgtggaggatggcccccgggagatcctgatcaaggagggcgcccccagcctgctgtgcaagtacttcctgcagcagtgggagctgaccagccctggccatgacacctctgtgctgcctgacagcgtggagatcggcctgcagacctgctgccacatcttcctgaacctggtggtgacagcccctggcctcatcaagagagatgcctgcttcaccagcctgatgaacaccctgatgaccagcctgcctgccctggtgcagcagcagggccgcctgctgctggccgccaacgtggccaccctgggcctgctgatggcccggctgctgagcaccagccctgccctgcagggcaccccagccagccggggcttctttgctgctgccatcctcttcctgagccagagccacgtggcccgggccaccccaggcagtgaccaggccgtgctggccctgagcccagaatatgagggcatctgggccgacctgcaggagctgtggttcctgggcatgcaggccttcaccggctgtgtgcccctgctgccctggctggccccagctgccctgcggagccgctggccccaggagctgctgcagctgctgggctctgtgagccccaacagcgtgaagccagagatggtggccgcctaccagggcgtgctggtggagctggcccgggccaaccggctgtgccgggaggccatgaggctgcaggccggggaggagacagccagccactacaggatggccgccctggagcagtgcctgtctgagccctag

SEQ ID NO: 161616 - DNA, 531 bp, synthetic construct
  misc_feature 1..531: note = Description of Artificial Sequence: Synthetic coding sequence
  source 1..531: mol_type = other DNA
atgccccacagcttccgctacctggccgccctgcagggcaccccagccagccggggcttctttgctgctgccatcctcttcctgagccagagccacgtggcccgggccaccccaggcagtgaccaggccgtgctggccctgagcccagaatatgagggcatctgggccgacctgcaggagctgtggttcctgggcatgcaggccttcaccggctgtgtgcccctgctgccctggctggccccagctgccctgcggagccgctggccccaggagctgctgcagctgctgggcagccagccccagctgtgccaggccagagatggcggccgcctgagcggctgccctggaggagctggggccggccagcctgctgtgcctgggggccatgaagctgctgggggcagaggagatggccagcccctgccccacggctgcctgggcgctgtgcctgtgcgggccctgcggggcgtgcaccggggccagacccagggccgggcagagcgggagggcggccgccgccacctgccctag

SEQ ID NO: 161617 - DNA, 582 bp, synthetic construct
  misc_feature 1..582: note = Description of Artificial Sequence: Synthetic coding sequence
  source 1..582: mol_type = other DNA
tgaagcagcctgaggaaggaggtgtgccagctgctgcccttcctggtgcgctatgccaagaccctgtatgaggaggccgaggaggccaatgacctgagccagcaggtggccaacctggccatcagccccaccaccccaggccccacctggccaggagatgccctgcggctgctgctgcccggctggtgccacctgactgtggaggatggcccccgggagatcctgatcaaggagggcgcccccagcctgctgtgcaagtacttcctgcagcagtgggagctgaccagccctggccatgacacctctgtgctgcctgattctgtggagatcggcctgcagacctgctgccacatcttcctgaacctggtggtgacagcccctggcctcatcaagagagatgcctgcttcaccagcctgatgaacaccctgatgaccagcctgcctgccctggtgcagcagcagggccgcctgctgctggccgccaacgtggccaccctgggcctgctgatggcccggctgctgagcaccagccctggcagcatcagcagccagctgcccggggctgagcacatgccctgctag

SEQ ID NO: 161618 - DNA, 735 bp, synthetic construct
  misc_feature 1..735: note = Description of Artificial Sequence: Synthetic coding sequence
  source 1..735: mol_type = other DNA
atggccagtgactgtgagcccgccctgaaccaggccgagggcaggaaccccaccctggagcgctacctgggcgccctgcgggaggccaagaatgattctgagcagtttgctgccctgctgctggtgaccaaggctgtgaaggccggggacattgatgccaagacccggcggcgcatctttgatgctgtgggcttcaccttccccaaccggctgctgaccaccaaggaggccccagatggctgcccagaccacgtgctgcgggccctgggcgtggccctgctggcctgcttctgcagcgaccctgagctggccgcccacccccaggtgctgaacaagatccccatcctgagcaccttcctgacagcccggggggaccctgatgatgctgcccggcgctccatgattgatgacacctaccagtgcctgacagctgtggccggcaccccccggggccccaggcacctgattgctgggggcaccgtgtctgccctgtgccaggcctacctgggccacggctacggctttgaccaggccctggccctgctggtgggcctgctggccgctgctgagacccagtgctggaaggaggccgagccagacctgctggccgtgctgcggggcctgtctgaggacttccagaaggccgaggatgccagcaagtttgagctgtgccagctgctgcccctcttcctgccccccaccaccgtgcccccagagtgctacagagacctgtag

SEQ ID NO: 161619 - DNA, 1791 bp, synthetic construct
  misc_feature 1..1791: note = Description of Artificial Sequence: Synthetic coding sequence
  source 1..1791: mol_type = other DNA
atggagcctgagctggccgcccagaagcagccccggcccaggagaagaagccggcgggccagcggcctgagcacagaaggagccaccggccccagcgctgacaccagcggcagcgagctggatggccgctgcagcctgcggcggggcagcagcttcaccttcctgaccccaggccccaactgggacttcaccctgaagaggaagagaagagagaaggatgatgatgtggtgtccctgagcagcctggacctgaaggagcccagcaacaagagggtgcggcccctggcccgggtgaccagcctggccaacctgatcagccctgtgagaaatggagctgtgcggcgcttcggccagaccatccagagcttcaccctgcggggggaccacaggagccctgccagcgcccagaagttcagcagccgcagcacagtgcccaccccagccaagaggaggagcagcgccctgtggagcgagatgctggacatcaccatgaaggagagcctgaccacccgggagatccggcggcaggaggccatctatgagatgagcagaggagagcaggacctgattgaggacctgaagctggccaggaaggcctaccatgaccccatgctgaagctgagcatcatgtctgaggaggagctgacccacatctttggagacctggacagctacatccccctgcacgaggacctgctgacccgcatcggggaggccaccaagccagatggcaccgtggagcagatcggccacatcctggtgtcctggctgccccggctgaatgcctaccggggctactgcagcaaccagctggccgccaaggccctgctggaccagaagaagcaggacccccgggtgcaggacttcctgcagcgctgcctggagagccccttcagcaggaagctggacctgtggagcttcctggacatccccaggagccggctggtgaagtaccccctgctgctgaaggagatcctgaagcacacccccaaggagcacccagatgtgcagctgctggaggatgccatcctgatcatccagggcgtgctgagtgacatcaacctgaagaagggggagagcgagtgccagtactacatcgacaagctggagtacctggatgagaagcagagggaccccagaattgaggccagcaaggtgctgctgtgccacggggagctgcggagcaagagcggccacaagctgtacatcttcctgttccaggacatcctggtgctgaccaggcctgtgaccagaaatgaaagacacagctaccaggtgtaccggcagcccatccctgtgcaggagctggtgctggaggacctgcaggatggagatgtgaggatgggcggcagcttccggggggccttcagcaacagcgagaaggccaagaacatcttccgcatccgcttccatgaccccagccctgcccagagccacaccctgcaggccaatgatgtgttccacaagcagcagtggttcaactgcatccgggccgccatcgcccccttccagagcgctggcagccccccagagctgcagggcctgcctgagctgcatgaagaatgtgagggcaaccaccccagcgccaggaagctgacagcccagaggcgggccagcacagtgtcctctgtgacccaggtggaggtggatgaaaatgcctaccgctgtggcagcggcatgcagatggccgaggacagcaagagcctgaagacccaccagacccagcccggcatcagaagagcccgggacaaggccctgagcggcggcaagaggaaggagaccctggtgtag

SEQ ID NO: 161620 - DNA, 483 bp, synthetic construct
  misc_feature 1..483: note = Description of Artificial Sequence: Synthetic coding sequence
  source 1..483: mol_type = other DNA
atggtggcccatgatgaaacaggaggcctgctgcccatcaagaggaccatccgggtgctggatgtgaacaaccagagcttccgggagcaggaggagctgacccacatctttggagacctggacagctacatccccctgcacgaggacctgctgacccgcatcggggaggccaccaagccagatggcaccgtggagcagatcggccacatcctggtgtcctggctgccccggctgaatgcctaccggggctactgcagcaaccagctggccgccaaggccctgctggaccagaagaagcaggacccccgggtgcaggacttcctgcagcgctgcctggagagccccttcagcaggaagctggacctgtggagcttcctggacatccccaggagccggctggtgaagtaccccctgctgctgaaggagatcctgaagcacacccccaaggagcacccagatgtgcagctgctggaggatgcctag

SEQ ID NO: 161621 - DNA, 1629 bp, synthetic construct
  misc_feature 1..1629: note = Description of Artificial Sequence: Synthetic coding sequence
  source 1..1629: mol_type = other DNA
atggtggcccatgatgaaacaggaggcctgctgcccatcaagaggaccatccgggtgctggatgtgaacaaccagagcttccgggagcaggaggagcccagcaacaagagggtgcggcccctggcccgggtgaccagcctggccaacctgatcagccctgtgagaaatggagctgtgcggcgcttcggccagaccatccagagcttcaccctgcggggggaccacaggagccctgccagcgcccagaagttcagcagccgcagcacagtgcccaccccagccaagaggaggagcagcgccctgtggagcgagatgctggacatcaccatgaaggagagcctgaccacccgggagatccggcggcaggaggccatctatgagatgagcagaggagagcaggacctgattgaggacctgaagctggccaggaaggcctaccatgaccccatgctgaagctgagcatcatgtctgaggaggagctgacccacatctttggagacctggacagctacatccccctgcacgaggacctgctgacccgcatcggggaggccaccaagccagatggcaccgtggagcagatcggccacatcctggtgtcctggctgccccggctgaatgcctaccggggctactgcagcaaccagctggccgccaaggccctgctggaccagaagaagcaggacccccgggtgcaggacttcctgcagcgctgcctggagagccccttcagcaggaagctggacctgtggagcttcctggacatccccaggagccggctggtgaagtaccccctgctgctgaaggagatcctgaagcacacccccaaggagcacccagatgtgcagctgctggaggatgccatcctgatcatccagggcgtgctgagtgacatcaacctgaagaagggggagagcgagtgccagtactacatcgacaagctggagtacctggatgagaagcagagggaccccagaattgaggccagcaaggtgctgctgtgccacggggagctgcggagcaagagcggccacaagctgtacatcttcctgttccaggacatcctggtgctgaccaggcctgtgaccagaaatgaaagacacagctaccaggtgtaccggcagcccatccctgtgcaggagctggtgctggaggacctgcaggatggagatgtgaggatgggcggcagcttccggggggccttcagcaacagcgagaaggccaagaacatcttccgcatccgcttccatgaccccagccctgcccagagccacaccctgcaggccaatgatgtgttccacaagcagcagtggttcaactgcatccgggccgccatcgcccccttccagagcgctggcagccccccagagctgcagggcctgcctgagctgcatgaagaatgtgagggcaaccaccccagcgccaggaagctgacagcccagaggcgggccagcacagtgtcctctgtgacccaggtggaggtggatgaaaatgcctaccgctgtggcagcggcatgcagatggccgaggacagcaagagcctgaagacccaccagacccagcccggcatcagaagagcccgggacaaggccctgagcggcggcaagaggaaggagaccctggtgtag

SEQ ID NO: 161622 - DNA, 483 bp, synthetic construct; identical to SEQ ID NO: 161620
  misc_feature 1..483: note = Description of Artificial Sequence: Synthetic coding sequence
  source 1..483: mol_type = other DNA

SEQ ID NO: 161623 - DNA, 1248 bp, synthetic construct
  misc_feature 1..1248: note = Description of Artificial Sequence: Synthetic coding sequence
  source 1..1248: mol_type = other DNA
atgagcagaggagagcaggacctgattgaggacctgaagctggccaggaaggcctaccatgaccccatgctgaagctgagcatcatgtctgaggaggagctgacccacatctttggagacctggacagctacatccccctgcacgaggacctgctgaccagaattggagaggccaccaagccagatggcaccgtggagcagatcggccacatcctggtgtcctggctgccccggctgaatgcctaccggggctactgcagcaaccagctggccgccaaggccctgctggaccagaagaagcaggacccccgggtgcaggacttcctgcagcgctgcctggagagccccttcagcaggaagctggacctgtggagcttcctggacatccccaggagccggctggtgaagtaccccctgctgctgaaggagatcctgaagcacacccccaaggagcacccagatgtgcagctgctggaggatgccatcctgatcatccagggcgtgctgagtgacatcaacctgaagaagggggagagcgagtgccagtactacatcgacaagctggagtacctggatgagaagcagagggacccccgcatcgaggccagcaaggtgctgctgtgccacggggagctgcggagcaagagcggccacaagctgtacatcttcctgttccaggacatcctggtgctgaccaggcctgtgaccagaaatgaaagacacagctaccaggtgtaccggcagcccatccctgtgcaggagctggtgctggaggacctgcaggatggagatgtgaggatgggcggcagcttccggggggccttcagcaacagcgagaaggccaagaacatcttccgcatccgcttccatgaccccagccctgcccagagccacaccctgcaggccaatgatgtgttccacaagcagcagtggttcaactgcatccgggccgccatcgcccccttccagagcgctggcagccccccagagctgcagggcctgcctgagctgcacgaggagtgtgagggcaaccaccccagcgccaggaagctgacagcccagaggcgggccagcacagtgtcctctgtgacccaggtggaggtggatgaaaatgcctaccgctgtggcagcggcatgcagatggccgaggacagcaagagcctgaagacccaccagacccagcccggcatccggcgggcccgggacaaggccctgagcggcggcaagaggaaggagaccctggtgtag

SEQ ID NO: 161624 - DNA, 3063 bp, synthetic construct
  misc_feature 1..3063: note = Description of Artificial Sequence: Synthetic coding sequence
  source 1..3063: mol_type = other DNA
atgatgagctttggaggagcagatgccctgctgggcgccccctttgcccccctgcatggaggcggcagcctgcactacgccctggccaggaaaggaggagctgggggcaccaggtctgctgctggcagcagcagcggcttccacagctggaccaggacctctgtgtcctctgtgtctgccagccccagccgcttccggggggccggggccgccagcagcacagacagcctggacaccctgagcaatggacctgagggctgcatggtggccgtggccaccagccgctctgagaaggagcagctgcaggccctgaatgacagatttgctggctacatcgacaaggtgcggcagctggaggcccacaacagaagcctggagggggaggccgccgccctgcggcagcagcaggccggccgcagcgccatgggagagctgtatgaaagagaggtgcgggagatgagaggagctgtgctgcggctgggcgccgcccggggccagctgcggctggagcaggagcacctgctggaggacatcgcccacgtgcggcagaggctggatgatgaggcccggcagcgggaggaggccgaggccgccgcccgggccctggccaggtttgcccaggaggccgaggccgcccgggtggacctgcagaagaaggcccaggccctgcaggaggagtgtggctacctgcggcggcaccaccaggaggaggtgggggagctgctgggccagatccagggcagcggggccgcccaggcccagatgcaggccgagaccagagatgccctgaagtgtgatgtgaccagcgccctgcgggagatccgggcccagctggagggccatgctgtgcagagcaccctgcagagcgaggagtggttccgggtgcggctggaccggctgtctgaggccgccaaggtgaacacagatgccatgaggtctgcccaggaggagatcacagagtaccgccggcagctgcaggcccggaccacagagctggaggccctgaagagcaccaaggacagcctggagcggcagaggtctgagctggaggacagacaccaggccgacatcgccagctaccaggaggccatccagcagctggatgctgagctgaggaacaccaagtgggagatggccgcccagctgcgggagtaccaggacctgctgaatgtgaagatggccctggacattgaaattgctgcctacaggaagctgctggagggggaggagtgcagaattggatttggccccatccccttcagcctgcctgagggcctgcccaagatccccagcgtgtccacccacatcaaggtgaagtctgaggagaagatcaaggtggtggagaagtctgagaaggagaccgtcatcgtggaggagcagacagaggagacccaggtgacagaggaggtgacagaggaggaggagaaggaggccaaggaggaggagggcaaggaggaggagggcggggaggaggaggaggccgagggcggggaggaggagaccaagagccccccagctgaggaggccgccagccctgagaaggaggccaagagccctgtgaaggaggaggccaagagccctgctgaggccaagagccctgagaaggaggaggccaagagccctgctgaggtgaagagccctgagaaggccaagagccctgccaaggaggaggccaagagccccccagaggccaagagccctgagaaggaggaggccaagagccctgctgaggtgaagagccctgagaaggccaagagccctgccaaggaggaggccaagagccctgctgaggccaagagccctgagaaggccaagagccctgtgaaggaggaggccaagagccctgctgaggccaagagccctgtgaaggaggaggccaagagccctgctgaggtgaagagccctgagaaggccaagagccccaccaaggaggaggccaagagccctgagaaggccaagagccctgagaaggaggaggccaagagccctgagaaggccaagagccctgtgaaggccgaggccaagagccctgagaaggccaagagccctgtgaaggccgaggccaagagccctgagaaggccaagagccctgtgaaggaggaggccaagagccctgagaaggccaagagccctgtgaaggaggaggccaagagccctgagaaggccaagagccctgtgaaggaggaggccaagaccccagagaaggccaagagccctgtgaaggaggaggccaagagccctgagaaggccaagagccctgagaaggccaagaccctggatgtgaagagccctgaggccaagaccccagccaaggaggaggcccggagccctgctgacaagtttcctgagaaggccaagagccctgtgaaggaggaggtgaagagccctgagaaggccaagagccccctgaaggaggatgccaaggcccctgagaaggagatccccaagaaggaggaggtgaagagccctgtgaaggaggaggagaagccccaggaggtgaaggtgaaggagccccccaagaaggccgaggaggagaaggccccagccacccccaagacagaggagaagaaggacagcaagaaggaggaggcccccaagaaggaggcccccaagcccaaggtggaggagaagaaggagcctgctgtggagaagcccaaggagagcaaggtggaggccaagaaggaggaggccgaggacaagaagaaggtgcccaccccagagaaggaggccccagccaaggtggaggtgaaggaggatgccaagcccaaggagaagacagaggtggccaagaaggagccagatgatgccaaggccaaggagcccagcaagccagctgagaagaaggaggccgcccctgagaagaaggacaccaaggaggagaaggccaagaagccagaggagaagcccaagacagaggccaaggccaaggaggatgacaagaccctgagcaaggagcccagcaagcccaaggccgagaaggccgagaagagcagcagcacagaccagaaggacagcaagcccccagagaaggccacagaggacaaggccgccaagggcaagtag

SEQ ID NO: 161625 - DNA, 2916 bp, synthetic construct
  misc_feature 1..2916: note = Description of Artificial Sequence: Synthetic coding sequence
  source 1..2916: mol_type = other DNA
atgatgagctttggaggagcagatgccctgctgggcgccccctttgcccccctgcatggaggcggcagcctgcactacgccctggccaggaaaggaggagctgggggcaccaggtctgctgctggcagcagcagcggcttccacagctggaccaggacctctgtgtcctctgtgtctgccagccccagccgcttccggggggccggggccgccagcagcacagacagcctggacaccctgagcaatggacctgagggctgcatggtggccgtggccaccagccgctctgagaaggagcagctgcaggccctgaatgacagatttgctggctacatcgacaaggtgcggcagctggaggcccacaacagaagcctggagggggaggccgccgccctgcggcagcagcaggccggccgcagcgccatgggagagctgtatgaaagagaggtgcgggagatgagaggagctgtgctgcggctgggcgccgcccggggccagctgcggctggagcaggagcacctgctggaggacatcgcccacgtgcggcagaggctggatgatgaggcccggcagcgggaggaggccgaggccgccgcccgggccctggccaggtttgcccaggaggccgaggccgcccgggtggacctgcagaagaaggcccaggccctgcaggaggagtgtggctacctgcggcggcaccaccaggaggaggtgggggagctgctgggccagatccagggcagcggggccgcccaggcccagatgcaggccgagaccagagatgccctgaagtgtgatgtgaccagcgccctgcgggagatccgggcccagctggagggccatgctgtgcagagcaccctgcagagcgaggagtggttccgggtgcggctggaccggctgtctgaggccgccaaggtgaacacagatgccatgaggtctgcccaggaggagatcacagagtaccgccggcagctgcaggcccggaccacagagctggaggccctgaagagcaccaaggacagcctggagcggcagaggtctgagctggaggacagacaccaggccgacatcgccagctaccaggaggccatccagcagctggatgctgagctgaggaacaccaagtgggagatggccgcccagctgcgggagtaccaggacctgctgaatgtgaagatggccctggacattgaaattgctgcctacaggaagctgctggagggggaggagtgcagaattggatttggccccatccccttcagcctgcctgagggcctgcccaagatccccagcgtgtccacccacatcaaggtgaagtctgaggagaagatcaaggtggtggagaagtctgagaaggagaccgtcatcgtggaggagcagacagaggagacccaggtgacagaggaggtgacagaggaggaggagaaggaggccaaggaggaggagggcaaggaggaggagggcggggaggaggaggaggccgagggcggggaggaggagaccaagagccccccagctgaggaggccgccagccctgagaaggaggccaagagccctgtgaaggaggaggccaagagccctgctgaggccaagagccctgagaaggaggaggccaagagccctgctgaggtgaagagccctgagaaggccaagagccctgccaaggaggaggccaagagccccccagaggccaagagccctgagaaggaggaggccaagagccctgctgaggtgaagagccctgagaaggccaagagccctgccaaggaggaggccaagagccctgctgaggccaagagccctgagaaggccaagagccctgtgaaggaggaggccaagagccctgctgaggccaagagccctgtgaaggaggaggccaagagccctgctgaggtgaagagccctgagaaggccaagagccccaccaaggaggaggccaagagccctgagaaggccaagagccctgagaaggaggaggccaagagccctgagaaggccaagagccctgtgaaggccgaggccaagagccctgagaaggccaagagccctgtgaaggccgaggccaagagccctgagaaggccaagagccctgtgaaggaggaggccaagagccctgagaaggccaagagccctgtgaaggaggaggccaagagccctgagaaggccaagagccctgtgaaggaggaggccaagaccccagagaaggccaagagccctgtgaaggaggaggccaagagccctgagaaggccaagagccccctgaaggaggatgccaaggcccctgagaaggagatccccaagaaggaggaggtgaagagccctgtgaaggaggaggagaagccccaggaggtgaaggtgaaggagccccccaagaaggccgaggaggagaaggccccagccacccccaagacagaggagaagaaggacagcaagaaggaggaggcccccaagaaggaggcccccaagcccaaggtggaggagaagaaggagcctgctgtggagaagcccaaggagagcaaggtggaggccaagaaggaggaggccgaggacaagaagaaggtgcccaccccagagaaggaggccccagccaaggtggaggtgaaggaggatgccaagcccaaggagaagacagaggtggccaagaaggagccagatgatgccaaggccaaggagcccagcaagccagctgagaagaaggaggccgcccctgagaagaaggacaccaaggaggagaaggccaagaagccagaggagaagcccaagacagaggccaaggccaaggaggatgacaagaccctgagcaaggagcccagcaagcccaaggccgagaaggccgagaagagcagcagcacagaccagaaggacagcaagcccccagagaaggccacagaggacaaggccgccaagggcaagtag

SEQ ID NO: 161626 - DNA, 930 bp, synthetic construct
  misc_feature 1..930: note = Description of Artificial Sequence: Synthetic coding sequence
  source 1..930: mol_type = other DNA
atggatgacaaggccttcaccaaggagctggaccagtgggtggagcagctgaatgaatgcaagcagctgaatgaaaaccaggtgaggaccctgtgtgagaaggccaaggagatcctgaccaaggagagcaatgtgcaggaggtgcgctgccctgtgacagtgtgtggagatgtgcacggccagttccatgacctgatggagctgttcagaattggaggcaagagcccagacaccaactacctgttcatgggagactatgtggaccggggctactacagcgtggagaccgtgaccctgctggtggccctgaaggtgcgctacccagagcgcatcaccatcctgcggggcaaccacgagagccggcagatcacccaggtgtatggcttctatgatgagtgcctgaggaaatatggaaatgccaacgtgtggaagtacttcacagacctgtttgactacctgcccctgacagccctggtggatggccagatcttctgcctgcatggaggcctgagccccagcattgacaccctggaccacatccgggccctggaccggctgcaggaggtgccccatgagggccccatgtgtgacctgctgtggagcgaccctgatgacagaggaggctggggcatcagccccaggggggccggctacaccttcggccaggacatcagcgagaccttcaaccacgccaacggcctgaccctggtgtcccgggcccaccagctggtgatggagggctacaactggtgccacgacagaaatgtggtgaccatcttcagcgcccccaactactgctaccgctgtggcaaccaggccgccatcatggagctggatgacaccctgaagtacagcttcctgcagtttgatcctgccccccggcggggggagccccacgtgaccaggaggaccccagactacttcctgtag

SEQ ID NO: 161627 - DNA, 1623 bp, synthetic construct
  misc_feature 1..1623: note = Description of Artificial Sequence: Synthetic coding sequence
  source 1..1623: mol_type = other DNA
atggcccggcacctgcgggagtaccaggacctgctgaatgtgaagatggccctggacatcgagattgctgcctacaggaagctgctggagggggaggagacccgcttcagcacctttgctggcagcatcaccggccccctgtacacccaccggccccccatcaccatcagcagcaagatccagaagcccaaggtggaggcccccaagctgaaggtgcagcacaagtttgtggaggagatcatcgaggagaccaaggtggaggatgagaagtctgagatggaggaggccctgacagccatcacagaggagctggccgtgtccatgaaggaggagaagaaggaggccgctgaggagaaggaggaggagcctgaggccgaggaggaggaggtggccgccaagaagagccctgtgaaggccacagcccctgaggtgaaggaggaggagggggagaaggaggaggaggagggccaggaggaggaggaggaggaggatgagggcgccaagagtgaccaggccgaggagggcggcagcgagaaggagggcagcagcgagaaggaggagggggagcaggaggagggggagacagaagctgaggccgagggggaggaggccgaggccaaggaggagaagaaggtggaggagaagtctgaggaggtggccaccaaggaggagctggtggctgatgccaaggtggagaagccagagaaggccaagagccctgtgcccaagagccctgtggaggagaagggcaagagccctgtgcccaagagccctgtggaggagaagggcaagagccctgtgcccaagagccctgtggaggagaagggcaagagccctgtgcccaagagccctgtggaggagaagggcaagagccctgtgtccaagagccctgtggaggagaaggccaagagccctgtgcccaagagccctgtggaggaggccaagagcaaggccgaggtgggcaagggggagcagaaggaggaggaggagaaggaggtgaaggaggcccccaaggaggagaaggtggagaagaaggaggagaagcccaaggatgtgcctgagaagaagaaggccgagagccctgtgaaggaggaggccgtggccgaggtggtgaccatcaccaagtctgtgaaggtgcacctggagaaggagaccaaggaggagggcaagcccctgcagcaggagaaggagaaggagaaggccggcggggagggcggcagcgaggaggagggcagtgacaagggggccaagggcagcaggaaggaggacattgctgtgaatggagaggtggagggcaaggaggaggtggagcaggagaccaaggagaagggcagcggccgggaggaggagaagggcgtggtgaccaacggcctggacctgagccctgcagatgagaagaagggcggggacaagtctgaggagaaggtggtggtgaccaagacagtggagaagatcaccagcgagggcggagatggagccaccaagtacatcaccaagtctgtgacagtgacccagaaggtggaggagcacgaggagacctttgaggagaagctggtgtccaccaagaaggtggagaaggtgaccagccacgccatcgtgaaggaggtgacccagagcgactag

SEQ ID NO: 161628 - DNA, 2634 bp, synthetic construct
  misc_feature 1..2634: note = Description of Artificial Sequence: Synthetic coding sequence
  source 1..2634: mol_type = other DNA
atgagctacaccctggacagcctgggcaaccccagcgcctacagaagagtgacagagaccaggagcagcttcagccgggtgtctggcagccccagcagcggcttccgcagccagagctggagccggggcagccccagcacagtgagcagcagctacaagaggtccatgctggccccccggctggcctacagcagcgccatgctgagcagcgctgagagcagcctggacttcagccagagcagcagcctgctgaatggaggcagcggccctggaggagactacaagctgagccgcagcaatgagaaggagcagctgcagggcctgaatgacagatttgctggctacatcgagaaggtgcactacctggagcagcagaacaaggagattgaagctgagatccaggccctgcggcagaagcaggccagccacgcccagctgggagatgcctatgaccaggagatccgggagctgcgggccaccctggagatggtgaaccacgagaaggcccaggtgcagctggacagcgaccacctggaggaggacatccaccggctgaaggagagatttgaggaggaggcccggctgagagatgacacagaagctgccatccgggccctgaggaaggacatcgaggaggccagcctggtgaaggtggagctggacaagaaggtgcagagcctgcaggatgaggtggccttcctgcggagcaaccacgaggaggaggtggccgacctgctggcccagatccaggccagccacatcaccgtggagaggaaggactacctgaagacagacatcagcacagccctgaaggagatccgcagccagctggagagccacagcgaccagaacatgcaccaggccgaggagtggttcaagtgccgctatgccaagctgacagaggccgctgagcagaacaaggaggccatccgcagcgccaaggaggagattgctgagtaccgccggcagctgcagagcaagagcattgagctggagagcgtgcggggcaccaaggagagcctggagcggcagctgagtgacatcgaggagcggcacaaccacgacctgagcagctaccaggacaccatccagcagctggagaatgagctgcggggcaccaagtgggagatggcccggcacctgcgggagtaccaggacctgctgaatgtgaagatggccctggacatcgagattgctgcctacaggaagctgctggagggggaggagacccgcttcagcacctttgctggcagcatcaccggccccctgtacacccaccggccccccatcaccatcagcagcaagatccagaagcccaaggtggaggcccccaagctgaaggtgcagcacaagtttgtggaggagatcatcgaggagaccaaggtggaggatgagaagtctgagatggaggaggccctgacagccatcacagaggagctggccgtgtccatgaaggaggagaagaaggaggccgctgaggagaaggaggaggagcctgaggccgaggaggaggaggtggccgccaagaagagccctgtgaaggccacagcccctgaggtgaaggaggaggagggggagaaggaggaggaggagggccaggaggaggaggaggaggaggatgagggcgccaagagtgaccaggccgaggagggcggcagcgagaaggagggcagcagcgagaaggaggagggggagcaggaggagggggagacagaagctgaggccgagggggaggaggccgaggccaaggaggagaagaaggtggaggagaagtctgaggaggtggccaccaaggaggagctggtggctgatgccaaggtggagaagccagagaaggccaagagccctgtgcccaagagccctgtggaggagaagggcaagagccctgtgtccaagagccctgtggaggagaaggccaagagccctgtgcccaagagccctgtggaggaggccaagagcaaggccgaggtgggcaaaggagagcagaaggaggaggaggagaaggaggtgaaggaggcccccaaggaggagaaggtggagaagaaggaggagaagcccaaggatgtgcctgagaagaagaaggccgagagccctgtgaaggaggaggccgtggccgaggtggtgaccatcaccaagtctgtgaaggtgcacctggagaaggagaccaaggaggagggcaagcccctgcagcaggagaaggagaaggagaaggccggcggggagggcggcagcgaggaggagggcagtgacaagggggccaagggcagcaggaaagaagatattgctgtgaatggagaggtggagggcaaggaggaggtggagcaggagaccaaggagaagggcagcggccgggaggaggagaagggcgtggtgaccaacggcctggacctgagccctgcagatgagaagaagggcggggacaagtctgaggagaaggtggtggtgaccaagacagtggagaagatcaccagcgagggcggagatggagccaccaagtacatcaccaagtctgtgacagtgacccagaaggtggaggagcacgaggagacctttgaggagaagctggtgtccaccaagaaggtggagaaggtgaccagccacgccatcgtgaaggaggtgacccagagcgactag

SEQ ID NO: 161629 - DNA, 1071 bp, synthetic construct
  misc_feature 1..1071: note = Description of Artificial Sequence: Synthetic coding sequence
  source 1..1071: mol_type = other DNA
atgaccaagagctacagcgagagcggcctgatgggagagccccagccccagggccccccatcctggacagatgaatgtctgagcagccaggatgaggagcacgaggccgacaagaaggaggatgacctggagaccatgaatgctgaggaggacagcctgagaaatggaggagaggaggaggatgaagatgaggacctggaggaggaggaggaggaggaggaggaggatgatgaccagaagcccaagagaagaggccccaagaagaagaagatgaccaaggcccggctggagcgcttcaagctgcggaggatgaaggccaatgcccgggagaggaacaggatgcacggcctgaatgctgccctggacaacctgaggaaggtggtgccctgctacagcaagacccagaagctgagcaagattgagaccctgcggctggccaagaactacatctgggccctgtctgagatcctgcggagcggcaagagcccagacctggtgtcctttgtgcagaccctgtgcaagggcctgagccagcccaccaccaacctggtggccggctgcctgcagctgaaccccaggaccttcctgcctgagcagaaccaggacatgccaccccacctgcccacagccagcgccagcttccctgtgcacccctacagctaccagagccctggcctgcccagccccccctacggcaccatggacagcagccacgtgttccacgtgaagcccccacctcatgcctacagcgctgccctggagcccttctttgagagccccctgacagactgcaccagccccagctttgatggccccctgagcccccccctgagcatcaatggaaacttctccttcaagcatgagcccagcgctgagtttgagaagaactatgccttcaccatgcactacccagctgccaccctggccggggcccagagccacggcagcatcttctctggaacagctgccccccgctgtgagatccccatcgacaacatcatgagctttgacagccacagccaccacgagcgggtgatgtctgcccagctgaatgccatcttccatgactag

SEQ ID NO: 161630 - DNA, 1149 bp, synthetic construct
  misc_feature 1..1149: note = Description of Artificial Sequence: Synthetic coding sequence
  source 1..1149: mol_type = other DNA
atgctgaccaggctcttcagcgagcccggcctgctgagtgatgtgcccaagtttgcctcctggggagatggagaagatgatgagcccaggagtgacaagggagatgcccctcctcctcctcctccagcccctggccctggggcccctggccctgcccgggccgccaagcctgtgcccctgcggggggaggagggcacagaggccaccctggccgaggtgaaggaggagggggagctgggcggggaggaggaggaggaggaggaggaggaggagggcctggatgaggccgagggggagcggcccaagaagaggggccccaagaagaggaagatgaccaaggcccggctggagaggagcaagctgcggcggcagaaggccaatgcccgggagaggaacaggatgcatgacctgaatgctgccctggacaacctgaggaaggtggtgccctgctacagcaagacccagaagctgagcaagattgagaccctgcggctggccaagaactacatctgggccctgtctgagatcctgcggagcggcaagaggccagacctggtgtcctatgtgcagaccctgtgcaagggcctgagccagcccaccaccaacctggtggccggctgcctgcagctgaacagcaggaacttcctgacagagcagggcgcagatggagctggccgcttccacggcagcggcggcccctttgccatgcacccctacccctacccctgcagccggctggccggggcccagtgccaggccgccggcggcctgggcggcggggccgcccacgccctgcggacccacggctactgtgccgcctatgagaccctgtatgctgctgctgggggcggcggggccagcccagactacaacagcagtgaatatgagggccccctgagcccccccctgtgcctgaatggaaacttcagcctgaagcaggacagcagcccagaccacgagaagagctaccactacagcatgcactacagcgccctgcccggcagccggcccaccggccacggcctggtgtttggcagcagcgctgtgcggggcggcgtgcacagcgagaacctgctgtcctatgacatgcacctgcaccacgaccggggccccatgtatgaggagctgaatgccttcttccacaactag

SEQ ID NO: 161631 - DNA, 996 bp, synthetic construct
  misc_feature 1..996: note = Description of Artificial Sequence: Synthetic coding sequence
  source 1..996: mol_type = other DNA
atgagcaagacctttgtgaagagcaaggagatgggagagctggtgaacacccccagctggatggacaagggcctgggcagccagaatgaggtgaaggaggaggagagccggcccggcacctacggcatgctgagcagcctgacagaggagcatgacagcattgaggaggaggaggaggaggaggaggatggagagaagcccaagagaagaggccccaagaagaagaagatgaccaaggcccggctggagcgcttccgggcccggcgggtgaaggccaatgcccgggagaggaccaggatgcacggcctgaatgatgccctggacaacctgcggcgggtgatgccctgctacagcaagacccagaagctgagcaagattgagaccctgcggctggccaggaactacatctgggccctgtctgaggtgctggagaccggccagaccccagagggcaagggctttgtggagatgctgtgcaagggcctgagccagcccaccagcaacctggtggccggctgcctgcagctgggcccccagagcgtgctgctggagaagcatgaggacaagagccccatctgtgacagcgccatctctgtgcacaacttcaactaccagagccctggcctgcccagccccccctacggccacatggagacccacctgctgcacctgaagccccaggtgttcaagagcctgggggagagcagctttggcagccacctgcctgactgcagcaccccaccctatgagggccccctgaccccacccctgagcatcagcggcaacttcagcctgaagcaggacggcagcccagacctggagaagagctacagcttcatgccccactaccccagcagcagcctgagcagcggccacgtgcacagcacccccttccaggccggcacccccaggtatgatgtgcccatcgacatgtcctatgacagctacccccaccacggcatcggcacccagctgaacacagtgttcacagaatag

SEQ ID NO: 161632 - DNA, 1014 bp, synthetic construct
  misc_feature 1..1014: note = Description of Artificial Sequence: Synthetic coding sequence
  source 1..1014: mol_type = other DNA
atgctgaccctgccctttgatgaatctgtggtgatgcctgagagccagatgtgcaggaagttcagccgggagtgtgaggaccagaagcagatcaagaagccagagagcttcagcaagcagatcgtgctgcggggcaagagcatcaagagggcccctggagaggagacagagaaggaggaggaggaggaggaccgggaggaggaggatgaaaatggcctgccccggcggcggggcctgaggaagaagaagaccaccaagctgcggctggagcgggtgaagttccggcggcaggaggccaatgcccgggagaggaacaggatgcacggcctgaatgatgccctggacaacctgaggaaggtggtgccctgctacagcaagacccagaagctgagcaagattgagaccctgcggctggccaagaactacatctgggccctgtctgagatcctgcgcatcggcaagaggccagacctgctgacctttgtgcagaacctgtgcaagggcctgagccagcccaccaccaacctggtggccggctgcctgcagctgaatgcccgctccttcctgatgggccagggcggggaggccgcccaccacaccaggagcccctacagcaccttctacccaccctaccacagccctgagctgaccaccccacctggccacggcaccctggacaacagcaagtccatgaagccctacaactactgcagcgcctatgagagcttctatgagagcaccagcccagaatgtgccagcccccagtttgagggccccctgagccccccacccatcaactacaacggcatcttcagcctgaagcaggaggagaccctggactatggcaagaactacaactacggcatgcactactgtgctgtgcccccccggggccccctgggccagggcgccatgttccggctgcccacagacagccacttcccctatgacctgcacctgcggagccagagcctgaccatgcaggatgagctgaatgctgtgttccacaactag

SEQ ID NO: 161633 - DNA, 714 bp, synthetic construct
  misc_feature 1..714: note = Description of Artificial Sequence: Synthetic coding sequence
  source 1..714: mol_type = other DNA
atgcctgcccggctggagacctgcatcagtgacctggactgtgccagcagcagcggcagtgacctgagcggcttcctgacagatgaggaggactgtgcccggctgcagcaggccgccagcgccagcggccccccagccccagccaggagaggagcccccaacatcagccgggccagcgaggtgcctggggcccaggatgatgagcaggagaggagaagaagaagaggaagaaccagggtgcgctctgaggccctgctgcacagcctgcggcgcagcagaagagtgaaggccaatgaccgggagaggaacaggatgcacaacctgaatgctgccctggatgccctgcggtctgtgctgcccagcttcccagatgacaccaagctgaccaagattgagaccctgcgctttgcctacaactacatctgggccctggccgagaccctgcggctggccgaccagggcctgcccggcggcggggcccgggagcggctgctgcccccccagtgtgtgccctgcctgcccggcccccccagccctgccagtgatgctgagagctggggcagcggggctgctgctgccagccccctgagtgaccccagcagccctgctgccagcgaggacttcacctacagacctggggaccctgtgttctccttccccagcctgcccaaggacctgctgcacaccaccccctgcttcatcccctaccactag

SEQ ID NO: 161634 - DNA, 645 bp, synthetic construct
  misc_feature 1..645: note = Description of Artificial Sequence: Synthetic coding sequence
  source 1..645: mol_type = other DNA
atgaccccccagcccagcggggcccccaccgtgcaggtgacccgggagacagagaggagcttcccccgggcctctgaagatgaggtgacctgccccaccagcgccccacccagccccaccaggacccggggcaactgtgccgaggccgaggagggcggctgccgcggggcccccaggaagctgcgggcccggcggggcggccgcagccggcccaagtctgagctggccctgagcaagcagaggaggagcaggaggaagaaggccaatgaccgggagaggaacaggatgcacaacctgaacagcgccctggatgccctgcggggcgtgctgcccaccttcccagatgatgccaagctgaccaagattgagaccctgcgctttgcccacaactacatctgggccctgacccagaccctgagaattgctgaccacagcctgtatgccctggagcccccagccccccactgtggggagctgggcagccctgggggcagccctggggactggggcagcctgtacagccctgtgtcccaggccggcagcctgagccctgctgccagcctggaggagcggcccggcctgctgggcgccaccttcagcgcctgcctgagccctggcagcctggccttcagtgacttcctgtag

SEQ ID NO: 161635 - DNA, 456 bp, synthetic construct
  misc_feature 1..456: note = Description of Artificial Sequence: Synthetic coding sequence
  source 1..456: mol_type = other DNA
atggagaggcctgagcctgagctgatccggcagagctggagggctgtgagccgcagccccctggagcacggcaccgtgctgtttgcccggctgtttgccctggagccagacctgctgcccctcttccagtacaactgccggcagttcagcagccctgaggactgcctgagcagccctgagttcctggaccacatcaggaaggtgatgctggtgattgatgctgctgtgaccaacgtggaggacctgagcagcctggaggagtacctggccagcctgggcaggaagcacagagctgtgggcgtgaagctgagcagcttcagcacagtgggggagagcctgctgtacatgctggagaagtgcctgggccctgccttcaccccagccaccagggctgcctggagccagctgtatggagctgtggtgcaggccatgagccggggctgggatggagagtag

SEQ ID NO: 161636 - DNA, 237 bp, synthetic construct
  misc_feature 1..237: note = Description of Artificial Sequence: Synthetic coding sequence
  source 1..237: mol_type = other DNA
atggactgctgcacagaaaatgcctgcagcaagccagatgatgacatcctggacatccccctggatgaccccggggccaatgctgctgctgccaagatccaggccagcttccggggccacatggccaggaagaagatcaagagcggggagcggggcaggaagggccctggccctgggggccctggaggagctggggtggcccggggcggggccggcggcggccccagcggggactag

SEQ ID NO: 161637 - DNA, 237 bp, synthetic construct; identical to SEQ ID NO: 161636
  misc_feature 1..237: note = Description of Artificial Sequence: Synthetic coding sequence
  source 1..237: mol_type = other DNA

SEQ ID NO: 161638 - DNA, 237 bp, synthetic construct; identical to SEQ ID NO: 161636
  misc_feature 1..237: note = Description of Artificial Sequence: Synthetic coding sequence
  source 1..237: mol_type = other DNA

SEQ ID NO: 161639 - DNA, 936 bp, synthetic construct
  misc_feature 1..936: note = Description of Artificial Sequence: Synthetic coding sequence
  source 1..936: mol_type = other DNA
atggccgccctgggcgtgctggagagtgacctgcccagcgctgtgaccctgctgaagaacctgcaggagcaggtgatggctgtgacagcccaggtgaagagcctgacccagaaggtgcaggccggggcctaccccacagagaagggcctgtccttcctggaggtgaaggaccagctgctgctgatgtacctgatggacctgacccacctgatcctggacaaggccagcggcggcagcctgcagggccatgatgctgtgctgcggctggtggagatcagaacagtgctggagaagctgcggcccctggaccagaagctgaagtaccagattgacaagctgatcaagacagctgtgacaggcagcctgtctgaaaatgaccccctgcgcttcaagccccaccccagcaacatgatgagcaagctgagcagtgaagatgaggaggaggatgaagcagaagatgaccagagcgaggccagcggcaagaagtctgtgaagggcgtgtccaagaagtatgtgcccccccggctggtgcctgtgcactatgatgaaacagaggccgagcgggagaagaagaggctggagcgggccaagaggcgggccctgagcagcagcgtcatccgggagctgaaggagcagtacagtgatgcccctgaggagatcagagatgcccggcacccccacgtgacccggcagagccaggaggaccagcaccgcatcaactatgaggagagcatgatggtgcggctgtctgtgtccaagcgggagaagggccgcaggaagagggccaacgtgatgagcagccagctgcacagcctgacccacttcagtgacatcagcgccctgaccggcggcaccgtgcacctggatgaggaccagaaccccatcaagaagaggaagaagatcccccagaagggcaggaagaagaagggccagtag

SEQ ID NO: 161640 - DNA, 948 bp, synthetic construct
  misc_feature 1..948: note = Description of Artificial Sequence: Synthetic coding sequence
  source 1..948: mol_type = other DNA
atggccgccctgggcgtgctggagagtgacctgcccagcgctgtgaccctgctgaagaacctgcaggagcaggtgatggctgtgacagcccaggtgaagagcctgacccagaaggtgcaggccggggcctaccccacagagaagggcctgtccttcctggaggtgaaggaccagctgctgctgatgtacctgatggacctgacccacctgatcctggacaaggccagcggcggcagcctgcagggccatgatgctgtgctgcggctggtggagatcagaacagtgctggagaagctgcggcccctggaccagaagctgaagtaccagattgacaagctgatcaagacagctgtgacaggcagcctgtctgaaaatgaccccctgcgcttcaagccccaccccagcaacatgatgagcaagctgagcagtgaagatgaggaggaggatgaagcagaagatgaccagagcgaggccagcggcaagaagtctgtgaagggcgtgtccaagaagtatgtgcccccccggctggtgcctgtgcactatgatgaaacagaggccgagcgggagaagaagaggctggagcgggccaagaggcgggccctgagcagcagcgtcatccgggagctgaaggagcagtacagtgatgcccctgaggagatcagagatgcccggcacccccacgtgacccggcagagccaggaggaccagcaccgcatcaactatgaggagagcatgatggtgcggctgtctgtgtccaagcgggagaagggccgcaggaagagggccaacgtgatgagcagccagctgcacagcctgacccacttcagtgacatcagcgccctgaccggcggcaccgtgcacctggatgaggaccagaaccccatcaagaagaggaagaagatcccccagaagggcaggaagaagaagggcttcagaagaagaagatag

SEQ ID NO: 161641 - DNA, 2472 bp, synthetic construct
  misc_feature 1..2472: note = Description of Artificial Sequence: Synthetic coding sequence
  source 1..2472: mol_type = other DNA
atggccctgccccgctgcacctggcccaactacgtgtggagggctgtgatggcctgcctggtgcaccggggcctgggcgcccccctgaccctgtgcatgctgggctgcctgctgcaggccggccacgtgctgagccagaagctggatgatgtggaccccctggtggccaccaactttgggaagatccggggcatcaagaaggagctgaacaatgagatcctgggccctgtgatccagttcctgggcgtgccctatgctgccccacccaccggggagcggcgcttccagcccccagagccccccagcccctggagcgacatcagaaatgccacccagtttgcccctgtgtgcccccagaacatcattgatggccgcctgcctgaggtgatgctgcctgtgtggttcaccaacaacctggatgtggtgagcagctatgtgcaggaccagagcgaggactgcctgtacctgaacatctacgtgcccacagaagatgacatccgggacagcggcggccccaagcctgtgatggtgtacatccacggcggcagctacatggagggcaccggcaacctgtatgatggctctgtgctggccagctatggaaatgtcatcgtcatcaccgtgaactaccgcctgggcgtgctgggcttcctgagcactggagaccaggccgccaagggcaactacggcctgctggacctgatccaggccctgcgctggaccagtgaaaatattggcttcttcggcggggaccccctgcgcatcaccgtgtttggcagcggggccggcggcagctgtgtgaacctgctgaccctgagccactacagcgagggcaaccgctggagcaacagcaccaagggcctcttccagagggccatcgcccagagcggcacagccctgagctcctgggccgtgtccttccagcctgccaagtatgccaggatgctggccaccaaggtgggctgcaatgtgtctgacacagtggagctggtggagtgcctgcagaagaagccctacaaggagctggtggaccaggacatccagcctgcccgctaccacatcgccttcggccctgtgattgatggagatgtgatcccagatgacccccagatcctgatggagcagggcgagttcctgaactatgacatcatgctgggcgtgaaccagggcgagggcctgaagtttgtggagaacatcgtggacagtgatgatggcatcagcgccagtgactttgattttgctgtgagcaactttgtggacaacctgtatggctacccagagggcaaggatgtgctgcgggagaccatcaagttcatgtacacagactgggccgacagacacaaccctgagaccaggaggaagaccctgctggccctcttcacagaccaccagtgggtggccccagctgtggccacagctgacctgcacagcaactttggcagccccacctacttctacgccttctaccaccactgccagacagaccaggtgcctgcctgggcagatgctgcccatggagatgaggtgccctacgtgctgggcatccccatgattggccccacagagctgttcccctgcaacttcagcaagaatgatgtgatgctgtctgctgtggtgatgacctactggaccaactttgccaagacaggagaccccaaccagcctgtgccccaggacaccaagttcatccacaccaagcccaacagatttgaggaggtggcctggacccgctacagccagaaggaccagctgtacctgcacatcggcctgaagccccgggtgaaggagcactaccgggccaacaaggtgaacctgtggctggagctggtgccccacctgcacaacctgaatgacatcagccagtacaccagcaccaccaccaaggtgcccagcacagacatcaccttccggcccaccaggaagaacagcgtgcctgtgaccagcgccttccccacagccaagcaggatgaccccaagcagcagcccagccccttctctgtggaccagagggactacagcacagagctgtctgtgaccatcgctgtgggcgccagcctgctcttcctgaacatcctggcctttgctgccctgtactacaagaaggacaagagaagacatgatgtgcaccggcgctgcagcccccagaggaccaccaccaatgacctgacccacgcccaggaggaggagatcatgagcctgcagatgaagcacacagacctggaccatgaatgtgagagcatccacccccatgaggtggtgctgaggacagcctgccccccagactacaccctggccatgagaagaagcccagatgatgtgcccctgatgacccccaacaccatcaccatgatccccaacaccatccctggcatccagcccctgcacaccttcaacaccttcaccggcggccagaacaacaccctgccccacccccacccccacccccacagccacagcaccaccagggtgtag

SEQ ID NO: 161642 - DNA, 2592 bp, synthetic construct
  misc_feature 1..2592: note = Description of Artificial Sequence: Synthetic coding sequence
  source 1..2592: mol_type = other DNA
atggccctgccccgctgcacctggcccaactacgtgtggagggctgtgatggcctgcctggtgcaccggggcctgggcgcccccctgaccctgtgcatgctgggctgcctgctgcaggccggccacgtgctgagccagaagctggatgatgtggaccccctggtggccaccaactttgggaagatccggggcatcaagaaggagctgaacaatgagatcctgggccctgtgatccagttcctgggcgtgccctatgctgccccacccaccggggagcggcgcttccagcccccagagccccccagcccctggagcgacatcagaaatgccacccagtttgcccctgtgtgcccccagaacatcattgatggccgcctgcctgaggtgatgctgcctgtgtggttcaccaacaacctggatgtggtgagcagctatgtgcaggaccagagcgaggactgcctgtacctgaacatctacgtgcccacagaagatgtgaagaggatcagcaaagaatgtgccaggaagccaggcaagaagatctgcaggaaaggaggccccctgaccaagaagcagacagatgacctgggggacaatgatggagcagaagatgaggacatccgggacagcggcggccccaagcctgtgatggtgtacatccacggcggcagctacatggagggcaccggcaacctgtatgatggctctgtgctggccagctatggaaatgtcatcgtcatcaccgtgaactaccgcctgggcgtgctgggcttcctgagcactggagaccaggccgccaagggcaactacggcctgctggacctgatccaggccctgcgctggaccagtgaaaatattggcttcttcggcggggaccccctgcgcatcaccgtgtttggcagcggggccggcggcagctgtgtgaacctgctgaccctgagccactacagcgagggcaaccgctggagcaacagcaccaagggcctcttccagagggccatcgcccagagcggcacagccctgagctcctgggccgtgtccttccagcctgccaagtatgccaggatgctggccaccaaggtgggctgcaatgtgtctgacacagtggagctggtggagtgcctgcagaagaagccctacaaggagctggtggaccaggacatccagcctgcccgctaccacatcgccttcggccctgtgattgatggagatgtgatcccagatgacccccagatcctgatggagcagggcgagttcctgaactatgacatcatgctgggcgtgaaccagggcgagggcctgaagtttgtggagaacatcgtggacagtgatgatggcatcagcgccagtgactttgattttgctgtgagcaactttgtggacaacctgtatggctacccagagggcaaggatgtgctgcgggagaccatcaagttcatgtacacagactgggccgacagacacaaccctgagaccaggaggaagaccctgctggccctcttcacagaccaccagtgggtggccccagctgtggccacagctgacctgcacagcaactttggcagccccacctacttctacgccttctaccaccactgccagacagaccaggtgcctgcctgggcagatgctgcccatggagatgaggtgccctacgtgctgggcatccccatgattggccccacagagctgttcccctgcaacttcagcaagaatgatgtgatgctgtctgctgtggtgatgacctactggaccaactttgccaagacaggagaccccaaccagcctgtgccccaggacaccaagttcatccacaccaagcccaacagatttgaggaggtggcctggacccgctacagccagaaggaccagctgtacctgcacatcggcctgaagccccgggtgaaggagcactaccgggccaacaaggtgaacctgtggctggagctggtgccccacctgcacaacctgaatgacatcagccagtacaccagcaccaccaccaaggtgcccagcacagacatcaccttccggcccaccaggaagaacagcgtgcctgtgaccagcgccttccccacagccaagcaggatgaccccaagcagcagcccagccccttctctgtggaccagagggactacagcacagagctgtctgtgaccatcgctgtgggcgccagcctgctcttcctgaacatcctggcctttgctgccctgtactacaagaaggacaagagaagacatgatgtgcaccggcgctgcagcccccagaggaccaccaccaatgacctgacccacgcccaggaggaggagatcatgagcctgcagatgaagcacacagacctggaccatgaatgtgagagcatccacccccatgaggtggtgctgaggacagcctgccccccagactacaccctggccatgagaagaagcccagatgatgtgcccctgatgacccccaacaccatcaccatgatccccaacaccatccctggcatccagcccctgcacaccttcaacaccttcaccggcggccagaacaacaccctgccccacccccacccccacccccacagccacagcaccaccagggtgtag

SEQ ID NO: 161643 - DNA, 33 bp, synthetic construct
  misc_feature 1..33: note = Description of Artificial Sequence: Synthetic coding sequence
  source 1..33: mol_type = other DNA
atggccctgccccgctgcacctggcccaactag

SEQ ID NO: 161644 - DNA, 42 bp, synthetic construct
  misc_feature 1..42: note = Description of Artificial Sequence: Synthetic coding sequence
  source 1..42: mol_type = other DNA
atggccctgccccgctgcacctggcccaactacgtgtggtag

SEQ ID NO: 161645 - DNA, 2472 bp, synthetic construct; identical to SEQ ID NO: 161641
  misc_feature 1..2472: note = Description of Artificial Sequence: Synthetic coding sequence
  source 1..2472: mol_type = other DNA

SEQ ID NO: 161646 - DNA, 2472 bp, synthetic construct; identical to SEQ ID NO: 161641
  misc_feature 1..2472: note = Description of Artificial Sequence: Synthetic coding sequence
  source 1..2472: mol_type = other DNA

SEQ ID NO: 161647 - DNA, 2508 bp, synthetic construct
  misc_feature 1..2508: note = Description of Artificial Sequence: Synthetic coding sequence
  source 1..2508: mol_type = other DNA
atgtggctgctggccctgtgcctggtgggcctggccggggcccagagaggaggcggcggccctgggggcggggcccctgggggccctggcctgggcctgggcagcctgggggaggagcgcttccctgtggtgaacacagcctacggccgggtgcggggcgtgagaagagagctgaacaatgagatcctgggccctgtggtgcagttcctgggcgtgccctatgccaccccacccctgggcgcccggcgcttccagcccccagaggccccagcctcctggccaggagtgagaaatgccaccaccctgcccccagcctgcccccagaacctgcatggagccctgcctgccatcatgctgcctgtgtggttcacagacaacctggaggccgccgccacctacgtgcagaaccagagcgaggactgcctgtacctgaacctgtatgtgcccacagaagatggccccctgaccaagaagagagatgaggccaccctgaaccccccagacacagacatccgggaccccgggaagaagcctgtgatgctgttcctgcacggcggcagctacatggagggcaccggcaacatgtttgatggctctgtgctggccgcctatggaaatgtcatcgtggccaccctgaactaccgcctgggcgtgctgggcttcctgagcactggagaccaggccgccaagggcaactacggcctgctggaccagatccaggccctgcgctggctgtctgaaaatattgcccactttggaggagaccctgagcgcatcaccatcttcggcagcggggccggggccagctgtgtgaacctgctgatcctgagccaccacagcgagggcctcttccagaaggccatcgcccagagcggcacagccatcagctcctggagcgtgaactaccagcccctgaagtacacccggctgctggccgccaaggtgggctgtgaccgggaggacagcgctgaggccgtggagtgcctgcggaggaagcccagccgggagctggtggaccaggatgtgcagcctgcccgctaccacatcgcctttggacctgtggtggatggagatgtggtgcctgatgatcctgagatcctgatgcagcagggcgagttcctgaactatgacatgctgattggagtgaaccagggcgagggcctgaagtttgtggaggacagcgctgagagtgaagatggagtgtctgccagcgcctttgacttcaccgtgagcaactttgtggacaacctgtatggctacccagagggcaaggatgtgctgcgggagaccatcaagttcatgtacacagactgggccgaccgggacaatggagagatgaggaggaagaccctgctggccctcttcacagaccaccagtgggtggccccagctgtggccacagccaagctgcacgccgactaccagagccctgtgtacttctacaccttctaccaccactgccaggccgagggccggcctgagtgggcagatgctgcccatggagatgagctgccctacgtgtttggagtgcccatggtgggcgccacagacctcttcccctgcaacttcagcaagaatgatgtgatgctgtctgctgtggtgatgacctactggaccaactttgccaagacaggagaccccaaccagcctgtgccccaggacaccaagttcatccacaccaagcccaacagatttgaggaggtggtgtggagcaagttcaacagcaaggagaagcagtacctgcacatcggcctgaagccccgggtgcgggacaactaccgggccaacaaggtggccttctggctggagctggtgccccacctgcacaacctgcacacagagctgttcaccaccaccacccggctgcccccctatgccacccgctggccacccaggcctcctgctggggcccctggcaccaggaggcctcctcctccagccaccctgcccccagagcctgagcctgagcccggcccccgggcctatgaccgcttccctggggacagccgggactacagcacagagctgtctgtgacagtggccgtgggcgccagcctgctcttcctgaacatcctggcctttgctgccctgtactacaagagggaccggcggcaggagctgcgctgccggcggctgagccccccaggcggcagcggcagcggcgtgcctgggggcggccccctgctgcctgctgctggccgggagctgcccccagaggaggagctggtgtccctgcagctgaagaggggcggcggcgtgggcgctgaccctgctgaggccctgcggcctgcctgccccccagactacaccctggccctgcggcgggccccagatgatgtgcccctgctggcccctggggccctgaccctgctgcccagcggcctgggccccccacctcctcctcctccacccagcctgcaccccttcggccccttccccccacctccacccacagccaccagccacaacaacaccctgccccacccccacagcaccaccagggtgtag

SEQ ID NO: 161648 - DNA, 2547 bp, synthetic construct
  misc_feature 1..2547: note = Description of Artificial Sequence: Synthetic coding sequence
  source 1..2547: mol_type = other DNA
atgtggctgcggctgggcccccccagcctgagcctgagccccaagcccaccgtgggccgcagcctgtgcctgaccctgtggttcctgagcctggccctgcgggccagcacccaggccccagcccccaccgtgaacacccactttgggaagctgcggggggcccgggtgcccctgcccagcgagatcctgggccctgtggaccagtacctgggcgtgccctatgctgccccacccatcggggagaagcgcttcctgcccccagagcccccacccagctggagcggcatcagaaatgccacccacttcccccctgtgtgcccccagaacatccacacagctgtgcctgaggtgatgctgcctgtgtggttcaccgccaacctggacatcgtggccacctacatccaggagcccaatgaagactgcctgtacctgaatgtgtatgtgcccacagaagatgtgaagaggatcagcaaagaatgtgccaggaagcccaacaagaagatctgcaggaaaggaggcagcggggccaagaagcagggcgaggacctggccgacaatgatggagatgaagatgaggacatccgggacagcggggccaagcctgtgatggtgtacatccatggaggcagctacatggagggcactggaaacatgattgatggcagcatcctggccagctatggaaatgtgattgtcatcaccctgaactacagagtgggcgtgctgggcttcctgagcactggagaccaggccgccaagggcaactacggcctgctggaccagatccaggccctgcgctgggtgtctgagaacatcgccttctttggaggagacccccggcgcatcaccgtgtttggaagtggcattggagccagctgtgtgtccctgctgaccctgagccaccacagcgagggcctcttccagagggccatcatccagagcggcagcgccctgagctcctgggccgtgaactaccagcctgtgaagtacaccagcctgctggccgacaaggtgggctgcaatgtgctggacacagtggacatggtggactgcctgcggcagaagagcgccaaggagctggtggagcaggacatccagcctgcccgctaccacgtggccttcggccctgtgattgatggagatgtgatcccagatgatcctgagatcctgatggagcagggcgagttcctgaactatgacatcatgctgggcgtgaaccagggcgagggcctgaagtttgtggagggcgtggtggaccctgaagatggagtgtctggaacagactttgactacagcgtgagcaactttgtggacaacctgtatggctacccagagggcaaggacaccctgcgggagaccatcaagttcatgtacacagactgggccgaccgggacaaccctgagaccaggaggaagaccctggtggccctcttcacagaccaccagtgggtggagcccagcgtggtgacagctgacctgcacgcccgctatggcagccccacctacttctacgccttctaccaccactgccagagcctgatgaagccagcctggagcgatgctgcccatggagatgaggtgccctacgtgtttggagtgcccatggtgggccccacagacctcttcccctgcaacttcagcaagaatgatgtgatgctgtctgctgtggtgatgacctactggaccaactttgccaagacaggagaccccaacaagcctgtgccccaggacaccaagttcatccacaccaaggccaacagatttgaggaggtggcctggagcaagtacaacccccgggaccagctgtacctgcacatcggcctgaagccccgggtgcgggaccactaccgggccaccaaggtggccttctggaagcacctggtgccccacctgtacaacctgcatgacatgttccactacaccagcaccaccaccaaggtgcccccaccagacaccacccacagcagccacatcacccggcggcccaacgggaagacctggagcaccaagaggcctgccatcagccctgcctacagcaatgaaaatgcccagggctcctggaatggagaccaggatgctggccccctgctggtggagaacccccgggactacagcacagagctgtctgtgaccatcgctgtgggcgccagcctgctcttcctgaatgtgctggcctttgctgccctgtactacaggaaggacaagaggcggcaggagcccctgcggcagcccagcccccagagaggagctggggcccctgagctgggcgccgcccctgaggaggagctggccgccctgcagctgggccccacccaccatgaatgtgaggccggcccccctcatgacaccctgcggctgacagccctgcctgactacaccctgaccctgcggcgcagcccagatgacatccccctgatgacccccaacaccatcaccatgatccccaacagcctggtgggcctgcagaccctgcacccctacaacacctttgctgctggcttcaacagcacaggcctgccccacagccacagcaccaccagggtgtag

SEQ ID NO: 161649 - DNA, 2487 bp, synthetic construct
  misc_feature 1..2487: note = Description of Artificial Sequence: Synthetic coding sequence
  source 1..2487: mol_type = other DNA
atgtggctgcggctgggcccccccagcctgagcctgagccccaagcccaccgtgggccgcagcctgtgcctgaccctgtggttcctgagcctggccctgcgggccagcacccaggccccagcccccaccgtgaacacccactttgggaagctgcggggggcccgggtgcccctgcccagcgagatcctgggccctgtggaccagtacctgggcgtgccctatgctgccccacccatcggggagaagcgcttcctgcccccagagcccccacccagctggagcggcatcagaaatgccacccacttcccccctgtgtgcccccagaacatccacacagctgtgcctgaggtgatgctgcctgtgtggttcaccgccaacctggacatcgtggccacctacatccaggagcccaatgaagactgcctgtacctgaatgtgtatgtgcccacagaagatggcagcggggccaagaagcagggcgaggacctggccgacaatgatggagatgaagatgaggacatccgggacagcggggccaagcctgtgatggtgtacatccatggaggcagctacatggagggcactggaaacatgattgatggcagcatcctggccagctatggaaatgtgattgtcatcaccctgaactacagagtgggcgtgctgggcttcctgagcactggagaccaggccgccaagggcaactacggcctgctggaccagatccaggccctgcgctgggtgtctgagaacatcgccttctttggaggagacccccggcgcatcaccgtgtttggaagtggcattggagccagctgtgtgtccctgctgaccctgagccaccacagcgagggcctcttccagagggccatcatccagagcggcagcgccctgagctcctgggccgtgaactaccagcctgtgaagtacaccagcctgctggccgacaaggtgggctgcaatgtgctggacacagtggacatggtggactgcctgcggcagaagagcgccaaggagctggtggagcaggacatccagcctgcccgctaccacgtggccttcggccctgtgattgatggagatgtgatcccagatgatcctgagatcctgatggagcagggcgagttcctgaactatgacatcatgctgggcgtgaaccagggcgagggcctgaagtttgtggagggcgtggtggaccctgaagatggagtgtctggaacagactttgactacagcgtgagcaactttgtggacaacctgtatggctacccagagggcaaggacaccctgcgggagaccatcaagttcatgtacacagactgggccgaccgggacaaccctgagaccaggaggaagaccctggtggccctcttcacagaccaccagtgggtggagcccagcgtggtgacagctgacctgcacgcccgctatggcagccccacctacttctacgccttctaccaccactgccagagcctgatgaagccagcctggagcgatgctgcccatggagatgaggtgccctacgtgtttggagtgcccatggtgggccccacagacctcttcccctgcaacttcagcaagaatgatgtgatgctgtctgctgtggtgatgacctactggaccaactttgccaagacaggagaccccaacaagcctgtgccccaggacaccaagttcatccacaccaaggccaacagatttgaggaggtggcctggagcaagtacaacccccgggaccagctgtacctgcacatcggcctgaagccccgggtgcgggaccactaccgggccaccaaggtggccttctggaagcacctggtgccccacctgtacaacctgcatgacatgttccactacaccagcaccaccaccaaggtgcccccaccagacaccacccacagcagccacatcacccggcggcccaacgggaagacctggagcaccaagaggcctgccatcagccctgcctacagcaatgaaaatgcccagggctcctggaatggagaccaggatgctggccccctgctggtggagaacccccgggactacagcacagagctgtctgtgaccatcgctgtgggcgccagcctgctcttcctgaatgtgctggcctttgctgccctgtactacaggaaggacaagaggcggcaggagcccctgcggcagcccagcccccagagaggagctggggcccctgagctgggcgccgcccctgaggaggagctggccgccctgcagctgggccccacccaccatgaatgtgaggccggcccccctcatgacaccctgcggctgacagccctgcctgactacaccctgaccctgcggcgcagcccagatgacatccccctgatgacccccaacaccatcaccatgatccccaacagcctggtgggcctgcagaccctgcacccctacaacacctttgctgctggcttcaacagcacaggcctgccccacagccacagcaccaccagggtgtag

SEQ ID NO: 161650 - DNA, 1542 bp, synthetic construct
  misc_feature 1..1542: note = Description of Artificial Sequence: Synthetic coding sequence
  source 1..1542: mol_type = other DNA
atgtggctgcggctgggcccccccagcctgagcctgagccccaagcccaccgtgggccgcagcctgtgcctgaccctgtggttcctgagcctggccctgcgggccagcacccaggccccagcccccaccgtgaacacccactttgggaagctgcggggggcccgggtgcccctgcccagcgagatcctgggccctgtggaccagtacctgggcgtgccctatgctgccccacccatcggggagaagcgcttcctgcccccagagcccccacccagctggagcggcatcagaaatgccacccacttcccccctgtgtgcccccagaacatccacacagctgtgcctgaggtgatgctgcctgtgtggttcaccgccaacctggacatcgtggccacctacatccaggagcccaatgaagactgcctgtacctgaatgtgtatgtgcccacagaagatgacatccgggacagcggggccaagcctgtgatggtgtacatccatggaggcagctacatggagggcactggaaacatgattgatggcagcatcctggccagctatggaaatgtgattgtcatcaccctgaactacagagtgggcgtgctgggcttcctgagcactggagaccaggccgccaagggcaactacggcctgctggaccagatccaggccctgcgctgggtgtctgagaacatcgccttctttggaggagacccccggcgcatcaccgtgtttggaagtggcattggagccagctgtgtgtccctgctgaccctgagccaccacagcgagggcctcttccagagggccatcatccagagcggcagcgccctgagctcctgggccgtgaactaccagcctgtgaagtacaccagcctgctggccgacaaggtgggctgcaatgtgctggacacagtggacatggtggactgcctgcggcagaagagcgccaaggagctggtggagcaggacatccagcctgcccgctaccacgtggccttcggccctgtgattgatggagatgtgatcccagatgatcctgagatcctgatggagcagggcgagttcctgaactatgacatcatgctgggcgtgaaccagggcgagggcctgaagtttgtggagggcgtggtggaccctgaagatggagtgtctggaacagactttgactacagcgtgagcaactttgtggacaacctgtatggctacccagagggcaaggacaccctgcgggagaccatcaagttcatgtacacagactgggccgaccgggacaaccctgagaccaggaggaagaccctggtggccctcttcacagaccaccagtgggtggagcccagcgtggtgacagctgacctgcacgcccgctatggcagccccacctacttctacgccttctaccaccactgccagagcctgatgaagccagcctggagcgatgctgcccatggagatgaggtgccctacgtgtttggagtgcccatggtgggccccacagacctcttcccctgcaacttcagcaagaatgatgtgatgctgtag

SEQ ID NO: 161651 - DNA, 2427 bp, synthetic construct
  misc_feature 1..2427: note = Description of Artificial Sequence: Synthetic coding sequence
  source 1..2427: mol_type = other DNA
atgtggctgcggctgggcccccccagcctgagcctgagccccaagcccaccgtgggccgcagcctgtgcctgaccctgtggttcctgagcctggccctgcgggccagcacccaggccccagcccccaccgtgaacacccactttgggaagctgcggggggcccgggtgcccctgcccagcgagatcctgggccctgtggaccagtacctgggcgtgccctatgctgccccacccatcggggagaagcgcttcctgcccccagagcccccacccagctggagcggcatcagaaatgccacccacttcccccctgtgtgcccccagaacatccacacagctgtgcctgaggtgatgctgcctgtgtggttcaccgccaacctggacatcgtggccacctacatccaggagcccaatgaagactgcctgtacctgaatgtgtatgtgcccacagaagatgacatccgggacagcggggccaagcctgtgatggtgtacatccatggaggcagctacatggagggcactggaaacatgattgatggcagcatcctggccagctatggaaatgtgattgtcatcaccctgaactacagagtgggcgtgctgggcttcctgagcactggagaccaggccgccaagggcaactacggcctgctggaccagatccaggccctgcgctgggtgtctgagaacatcgccttctttggaggagacccccggcgcatcaccgtgtttggaagtggcattggagccagctgtgtgtccctgctgaccctgagccaccacagcgagggcctcttccagagggccatcatccagagcggcagcgccctgagctcctgggccgtgaactaccagcctgtgaagtacaccagcctgctggccgacaaggtgggctgcaatgtgctggacacagtggacatggtggactgcctgcggcagaagagcgccaaggagctggtggagcaggacatccagcctgcccgctaccacgtggccttcggccctgtgattgatggagatgtgatcccagatgatcctgagatcctgatggagcagggcgagttcctgaactatgacatcatgctgggcgtgaaccagggcgagggcctgaagtttgtggagggcgtggtggaccctgaagatggagtgtctggaacagactttgactacagcgtgagcaactttgtggacaacctgtatggctacccagagggcaaggacaccctgcgggagaccatcaagttcatgtacacagactgggccgaccgggacaaccctgagaccaggaggaagaccctggtggccctcttcacagaccaccagtgggtggagcccagcgtggtgacagctgacctgcacgcccgctatggcagccccacctacttctacgccttctaccaccactgccagagcctgatgaagccagcctggagcgatgctgcccatggagatgaggtgccctacgtgtttggagtgcccatggtgggccccacagacctcttcccctgcaacttcagcaagaatgatgtgatgctgtctgctgtggtgatgacctactggaccaactttgccaagacaggagaccccaacaagcctgtgccccaggacaccaagttcatccacaccaaggccaacagatttgaggaggtggcctggagcaagtacaacccccgggaccagctgtacctgcacatcggcctgaagccccgggtgcgggaccactaccgggccaccaaggtggccttctggaagcacctggtgccccacctgtacaacctgcatgacatgttccactacaccagcaccaccaccaaggtgcccccaccagacaccacccacagcagccacatcacccggcggcccaacgggaagacctggagcaccaagaggcctgccatcagccctgcctacagcaatgaaaatgcccagggctcctggaatggagaccaggatgctggccccctgctggtggagaacccccgggactacagcacagagctgtctgtgaccatcgctgtgggcgccagcctgctcttcctgaatgtgctggcctttgctgccctgtactacaggaaggacaagaggcggcaggagcccctgcggcagcccagcccccagagaggagctggggcccctgagctgggcgccgcccctgaggaggagctggccgccctgcagctgggccccacccaccatgaatgtgaggccggcccccctcatgacaccctgcggctgacagccctgcctgactacaccctgaccctgcggcgcagcccagatgacatccccctgatgacccccaacaccatcaccatgatccccaacagcctggtgggcctgcagaccctgcacccctacaacacctttgctgctggcttcaacagcacaggcctgccccacagccacagcaccaccagggtgtag

SEQ ID NO: 161652 - DNA, 1056 bp, synthetic construct
  misc_feature 1..1056: note = Description of Artificial Sequence: Synthetic coding sequence
  source 1..1056: mol_type = other DNA
atgctgcctgtgtggttcaccgccaacctggacatcgtggccacctacatccaggagcccaatgaagactgcctgtacctgaatgtgtatgtgcccacagaagatggcagcggggccaagaagcagggcgaggacctggccgacaatgatggagatgaagatgaggacatccgggacagcggggccaagcctgtgatggtgtacatccacggcggcagctacatggagggcaccggcaacatgattgatggcagcatcctggccagctatggaaatgtcatcgtcatcaccctgaactacagagtgggcgtgctgggcttcctgagcactggagaccaggccgccaagggcaactacggcctgctggaccagatccaggccctgcgctgggtgtctgaaaatattgccttcttcggcggggacccccggcgcatcaccgtgtttggcagcggcatcggggccagctgtgtgtccctgctgaccctgagccaccacagcgagggcctcttccagagggccatcatccagagcggcagcgccctgagctcctgggccgtgaactaccagcctgtgaagtacaccagcctgctggccgacaaggtgggctgcaatgtgctggacacagtggacatggtggactgcctgcggcagaagagcgccaaggagctggtggagcaggacatccagcctgcccgctaccacgtggcctttggacctgtgattgatggagatgtgatcccagatgatcctgagatcctgatggagcagggcgagttcctgaactatgacatcatgctgggcgtgaaccagggcgagggcctgaagtttgtggagggcgtggtggaccctgaagatggagtgtctggaacagactttgactacagcgtgtccatcctgtggaccatctgcatggccatcctgcgggtgaggaccccctgtgagcggcccagcagcagctgcatccagacaggccagacagtgaccaccctgcggcctgctgtgaagcactggtggcacagcagcctgaccaccagcggctggagcccccagtggtag

SEQ ID NO: 161653 - DNA, 771 bp, synthetic construct
  misc_feature 1..771: note = Description of Artificial Sequence: Synthetic coding sequence
  source 1..771: mol_type = other DNA
atgctgcggccccagggcctgctgtggctgcccctgctcttcacctctgtgtgtgtgatgctgaacagcaatgtgctgctgtggatcacagccctggccatcaagttcaccctgattgacagccaggcccagtaccctgtggtgaacaccaactacggcaagatccagggcctgcggacccccctgcccagcgagatcctgggccctgtggagcagtacctgggcgtgccctatgccagccccccaactggagagcggcgcttccagcccccagagagccccagctcctggacaggcatcagaaatgccacccagttctctgctgtgtgcccccagcacctggatgagcgcttcctgctgcatgacatgctgcccatctggttcaccaccagcctggacaccctgatgacctacgtgcaggaccagaatgaagactgcctgtacctgaacatctacgtgcccatggaggatggcaccaacatcaagagaaatgctgatgacatcaccagcaatgaccatggagaggacaaggacatccacgagcagaacagcaagaagcctgtgatggtgtacatccatggaggcagctacatggagggcactggaaacatgattgatggcagcatcctggccagctatggaaatgtgattgtcatcaccatcaactaccgcctgggcatcctgggcatgcaggaggcccggctgtgtggcagcagcaagatgttcaactacttcaagagccccttcaccaacctgatcaacttcttctag

SEQ ID NO: 161654 - DNA, 2451 bp, synthetic construct
  misc_feature 1..2451: note = Description of Artificial Sequence: Synthetic coding sequence
  source 1..2451: mol_type = other DNA
atgctgcggccccagggcctgctgtggctgcccctgctcttcacctctgtgtgtgtgatgctgaacagcaatgtgctgctgtggatcacagccctggccatcaagttcaccctgattgacagccaggcccagtaccctgtggtgaacaccaactacggcaagatccagggcctgcggacccccctgcccagcgagatcctgggccctgtggagcagtacctgggcgtgccctatgccagccccccaactggagagcggcgcttccagcccccagagagccccagctcctggacaggcatcagaaatgccacccagttctctgctgtgtgcccccagcacctggatgagcgcttcctgctgcatgacatgctgcccatctggttcaccaccagcctggacaccctgatgacctacgtgcaggaccagaatgaagactgcctgtacctgaacatctacgtgcccatggaggatgacatccacgagcagaacagcaagaagcctgtgatggtgtacatccatggaggcagctacatggagggcactggaaacatgattgatggcagcatcctggccagctatggaaatgtgattgtcatcaccatcaactaccgcctgggcatcctgggcttcctgagcactggagaccaggccgccaagggcaactacggcctgctggaccagatccaggccctgcgctggattgaggagaatgtgggcgcctttggaggagaccccaagagggtgaccatctttggaagtggagctggggccagctgtgtgtccctgctgaccctgagccactacagcgagggcctcttccagaaggccatcatccagagcggcacagccctgagctcctgggccgtgaactaccagcctgccaagtacacccgcatcctggccgacaaggtgggctgcaacatgctggacaccacagacatggtggagtgcctgaagaacaagaactacaaggagctgatccagcagaccatcaccccagccacctaccacatcgccttcggccctgtgattgatggagatgtgatcccagatgacccccagatcctgatggagcagggcgagttcctgaactatgacatcatgctgggcgtgaaccagggcgagggcctgaagtttgtggatggcatcgtggacaatgaagatggagtgaccccaaatgactttgacttctctgtgagcaactttgtggacaacctgtatggctacccagagggcaaggacaccctgcgggagaccatcaagttcatgtacacagactgggccgacaaggaaaatcctgagaccaggaggaagaccctggtggccctcttcacagaccaccagtgggtggccccagctgtggccacagctgacctgcacgcccagtatggcagccccacctacttctacgccttctaccaccactgccagagcgagatgaagcccagctgggccgacagcgcccatggagatgaggtgccctacgtgtttggcatccccatgattggccccacagagctgttcagctgcaacttcagcaagaatgatgtgatgctgtctgctgtggtgatgacctactggaccaactttgccaagacaggagaccccaaccagcctgtgccccaggacaccaagttcatccacaccaagcccaacagatttgaggaggtggcctggagcaagtacaaccccaaggaccagctgtacctgcacatcggcctgaagccccgggtgcgggaccactaccgggccaccaaggtggccttctggctggagctggtgccccacctgcacaacctgaatgagatcttccagtatgtgtccaccaccaccaaggtgcccccaccagacatgaccagcttcccctacggcacccggcgcagccctgccaagatctggcccaccaccaagaggcctgccatcaccccagccaacaaccccaagcacagcaaggacccccacaagacaggccctgaggacaccaccgtgctgattgagaccaagagggactacagcacagagctgtctgtgaccatcgctgtgggcgccagcctgctcttcctgaacatcctggcctttgctgccctgtactacaagaaggacaagagaagacatgagacccaccgccaccccagcccccagaggaacaccaccaatgacatcacccacatccagaatgaggagatcatgagcctgcagatgaagcagctggagcatgaccatgaatgtgagagcctgcaggcccatgacaccctgcggctgacctgccccccagactacaccctgaccctgcggcgcagcccagatgacatccccttcatgacccccaacaccatcaccatgatccccaacaccctgatgggcatgcagcccctgcacaccttcaagaccttcagcggcggccagaacagcaccaacctgccccacggccacagcaccaccagggtgtag

SEQ ID NO: 161655 - DNA, 2451 bp, synthetic construct; identical to SEQ ID NO: 161654
  misc_feature 1..2451: note = Description of Artificial Sequence: Synthetic coding sequence
  source 1..2451: mol_type = other DNA

SEQ ID NO: 161656 - DNA, 2622 bp, synthetic construct
  misc_feature 1..2622: note = Description of Artificial Sequence: Synthetic coding sequence
  source 1..2622: mol_type = other DNA
atgctgcggccccagggcctgctgtggctgcccctgctcttcacctctgtgtgtgtgatgctgaacagcaatgtgctgctgtggatcacagccctggccatcaagttcaccctgattgacagccaggcccagtaccctgtggtgaacaccaactacggcaagatccagggcctgcggacccccctgcccagcgagatcctgggccctgtggagcagtacctgggcgtgccctatgccagccccccaactggagagcggcgcttccagcccccagagagccccagctcctggacaggcatcagaaatgccacccagttctctgctgtgtgcccccagcacctggatgagcgcttcctgctgcatgacatgctgcccatctggttcaccaccagcctggacaccctgatgacctacgtgcaggaccagaatgaagactgcctgtacctgaacatctacgtgcccatggaggatggcaccaacatcaagagaaatgctgatgacatcaccagcaatgaccatggagaggacaaggacatccacgagcagaacagcaagaagcctgtgatggtgtacatccatggaggcagctacatggagggcactggaaacatgattgatggcagcatcctggccagctatggaaatgtgattgtcatcaccatcaactaccgcctgggcatcctggcccagaacaccctggcccacggcaactgcaagcaccgctgccagctgcacctgcaggccccccgggactgcaagagcgcctaccccttcagaaatgaagatgagatccggggcttcctgagcactggagaccaggccgccaagggcaactacggcctgctggaccagatccaggccctgcgctggattgaagaaaatgtgggcgccttcggcggggaccccaagagggtgaccatcttcggcagcggggccggggccagctgtgtgtccctgctgaccctgagccactacagcgagggcctcttccagaaggccatcatccagagcggcacagccctgagctcctgggccgtgaactaccagcctgccaagtacacccgcatcctggccgacaaggtgggctgcaacatgctggacaccacagacatggtggagtgcctgaagaacaagaactacaaggagctgatccagcagaccatcaccccagccacctaccacatcgcctttggacctgtgattgatggagatgtgatcccagatgacccccagatcctgatggagcagggcgagttcctgaactatgacatcatgctgggcgtgaaccagggcgagggcctgaagtttgtggatggcatcgtggacaatgaagatggagtgaccccaaatgactttgacttctctgtgagcaactttgtggacaacctgtatggctacccagagggcaaggacaccctgcgggagaccatcaagttcatgtacacagactgggccgacaaggagaaccctgagaccaggaggaagaccctggtggccctcttcacagaccaccagtgggtggccccagctgtggccacagctgacctgcacgcccagtatggcagccccacctacttctacgccttctaccaccactgccagagcgagatgaagcccagctgggccgacagcgcccatggagatgaggtgccctacgtgtttggcatccccatgattggccccacagagctgttcagctgcaacttcagcaagaatgatgtgatgctgtctgctgtggtgatgacctactggaccaactttgccaagacaggagaccccaaccagcctgtgccccaggacaccaagttcatccacaccaagcccaacagatttgaggaggtggcctggagcaagtacaaccccaaggaccagctgtacctgcacatcggcctgaagccccgggtgcgggaccactaccgggccaccaaggtggccttctggctggagctggtgccccacctgcacaacctgaatgagatcttccagtatgtgtccaccaccaccaaggtgcccccaccagacatgaccagcttcccctacggcaccaggaggagccctgccaagatctggcccaccaccaagaggcctgccatcaccccagccaacaaccccaagcacagcaaggacccccacaagacaggccctgaggacaccaccgtgctgattgagaccaagagggactacagcacagagctgtctgtgaccatcgctgtgggcgccagcctgctcttcctgaacatcctggcctttgctgccctgtactacaagaaggacaagagaagacatgagacccaccgccaccccagcccccagaggaacaccaccaatgacatcacccacatccagaatgaggagatcatgagcctgcagatgaagcagctggagcatgaccatgaatgtgagagcctgcaggcccatgacaccctgcggctgacctgccccccagactacaccctgaccctgcggcgcagcccagatgacatccccttcatgacccccaacaccatcaccatgatccccaacaccctgatgggcatgcagcccctgcacaccttcaagaccttcagcggcggccagaacagcaccaacctgccccacggccacagcaccaccagggtgtag

SEQ ID NO: 161657 - DNA, 1947 bp, synthetic construct
  misc_feature 1..1947: note = Description of Artificial Sequence: Synthetic coding sequence
  source 1..1947: mol_type = other DNA
atggtgtacatccatggaggcagctacatggagggcactggaaacatgattgatggcagcatcctggccagctatggaaatgtgattgtcatcaccatcaactaccgcctgggcatcctgggcttcctgagcactggagaccaggccgccaagggcaactacggcctgctggaccagatccaggccctgcgctggattgaggagaatgtgggcgcctttggaggagaccccaagagggtgaccatctttggaagtggagctggggccagctgtgtgtccctgctgaccctgagccactacagcgagggcctcttccagaaggccatcatccagagcggcacagccctgagctcctgggccgtgaactaccagcctgccaagtacacccgcatcctggccgacaaggtgggctgcaacatgctggacaccacagacatggtggagtgcctgaagaacaagaactacaaggagctgatccagcagaccatcaccccagccacctaccacatcgccttcggccctgtgattgatggagatgtgatcccagatgacccccagatcctgatggagcagggcgagttcctgaactatgacatcatgctgggcgtgaaccagggcgagggcctgaagtttgtggatggcatcgtggacaatgaagatggagtgaccccaaatgactttgacttctctgtgagcaactttgtggacaacctgtatggctacccagagggcaaggacaccctgcgggagaccatcaagttcatgtacacagactgggccgacaaggaaaatcctgagaccaggaggaagaccctggtggccctcttcacagaccaccagtgggtggccccagctgtggccacagctgacctgcacgcccagtatggcagccccacctacttctacgccttctaccaccactgccagagcgagatgaagcccagctgggccgacagcgcccatggagatgaggtgccctacgtgtttggcatccccatgattggccccacagagctgttcagctgcaacttcagcaagaatgatgtgatgctgtctgctgtggtgatgacctactggaccaactttgccaagacaggagaccccaaccagcctgtgccccaggacaccaagttcatccacaccaagcccaacagatttgaggaggtggcctggagcaagtacaaccccaaggaccagctgtacctgcacatcggcctgaagccccgggtgcgggaccactaccgggccaccaaggtggccttctggctggagctggtgccccacctgcacaacctgaatgagatcttccagtatgtgtccaccaccaccaaggtgcccccaccagacatgaccagcttcccctacggcacccggcgcagccctgccaagatctggcccaccaccaagaggcctgccatcaccccagccaacaaccccaagcacagcaaggacccccacaagacaggccctgaggacaccaccgtgctgattgagaccaagagggactacagcacagagctgtctgtgaccatcgctgtgggcgccagcctgctcttcctgaacatcctggcctttgctgccctgtactacaagaaggacaagagaagacatgagacccaccgccaccccagcccccagaggaacaccaccaatgacatcacccacatccagaatgaggagatcatgagcctgcagatgaagcagctggagcatgaccatgaatgtgagagcctgcaggcccatgacaccctgcggctgacctgccccccagactacaccctgaccctgcggcgcagcccagatgacatccccttcatgacccccaacaccatcaccatgatccccaacaccctgatgggcatgcagcccctgcacaccttcaagaccttcagcggcggccagaacagcaccaacctgccccacggccacagcaccaccagggtgtag

SEQ ID NO: 161658 - DNA, 711 bp, synthetic construct
  misc_feature 1..711: note = Description of Artificial Sequence: Synthetic coding sequence
  source 1..711: mol_type = other DNA
tgaaacagcaatgtgctgctgtggatcacagccctggccatcaagttcaccctgattgacagccaggcccagtaccctgtggtgaacaccaactacggcaagatccagggcctgcggacccccctgcccagcgagatcctgggccctgtggagcagtacctgggcgtgccctatgccagccccccaactggagagcggcgcttccagcccccagagagccccagctcctggacaggcatcagaaatgccacccagttctctgctgtgtgcccccagcacctggatgagcgcttcctgctgcatgacatgctgcccatctggttcaccaccagcctggacaccctgatgacctacgtgcaggaccagaatgaagactgcctgtacctgaacatctacgtgcccatggaggatggcaccaacatcaagagaaatgctgatgacatcaccagcaatgaccatggagaggacaaggacatccacgagcagaacagcaagaagcctgtgatggtgtacatccatggaggcagctacatggagggcactggaaacatgattgatggcagcatcctggccagctatggaaatgtgattgtcatcaccatcaactaccgcctgggcatcctgggcatgcaggaggcccggctgtgtggcagcagcaagatgttcaactacttcaagagccccttcaccaacctgatcaacttcttctag

SEQ ID NO: 161659 - DNA, 2511 bp, synthetic construct
  misc_feature 1..2511: note = Description of Artificial Sequence: Synthetic coding sequence
  source 1..2511: mol_type = other DNA
atgctgcggccccagggcctgctgtggctgcccctgctcttcacctctgtgtgtgtgatgctgaacagcaatgtgctgctgtggatcacagccctggccatcaagttcaccctgattgacagccaggcccagtaccctgtggtgaacaccaactacggcaagatccagggcctgcggacccccctgcccagcgagatcctgggccctgtggagcagtacctgggcgtgccctatgccagccccccaactggagagcggcgcttccagcccccagagagccccagctcctggacaggcatcagaaatgccacccagttctctgctgtgtgcccccagcacctggatgagcgcttcctgctgcatgacatgctgcccatctggttcaccaccagcctggacaccctgatgacctacgtgcaggaccagaatgaagactgcctgtacctgaacatctacgtgcccatggaggatggcaccaacatcaagagaaatgctgatgacatcaccagcaatgaccatggagaggacaaggacatccacgagcagaacagcaagaagcctgtgatggtgtacatccatggaggcagctacatggagggcactggaaacatgattgatggcagcatcctggccagctatggaaatgtgattgtcatcaccatcaactaccgcctgggcatcctgggcttcctgagcactggagaccaggccgccaagggcaactacggcctgctggaccagatccaggccctgcgctggattgaggagaatgtgggcgcctttggaggagaccccaagagggtgaccatctttggaagtggagctggggccagctgtgtgtccctgctgaccctgagccactacagcgagggcctcttccagaaggccatcatccagagcggcacagccctgagctcctgggccgtgaactaccagcctgccaagtacacccgcatcctggccgacaaggtgggctgcaacatgctggacaccacagacatggtggagtgcctgaagaacaagaactacaaggagctgatccagcagaccatcaccccagccacctaccacatcgccttcggccctgtgattgatggagatgtgatcccagatgacccccagatcctgatggagcagggcgagttcctgaactatgacatcatgctgggcgtgaaccagggcgagggcctgaagtttgtggatggcatcgtggacaatgaagatggagtgaccccaaatgactttgacttctctgtgagcaactttgtggacaacctgtatggctacccagagggcaaggacaccctgcgggagaccatcaagttcatgtacacagactgggccgacaaggaaaatcctgagaccaggaggaagaccctggtggccctcttcacagaccaccagtgggtggccccagctgtggccacagctgacctgcacgcccagtatggcagccccacctacttctacgccttctaccaccactgccagagcgagatgaagcccagctgggccgacagcgcccatggagatgaggtgccctacgtgtttggcatccccatgattggccccacagagctgttcagctgcaacttcagcaagaatgatgtgatgctgtctgctgtggtgatgacctactggaccaactttgccaagacaggagaccccaaccagcctgtgccccaggacaccaagttcatccacaccaagcccaacagatttgaggaggtggcctggagcaagtacaaccccaaggaccagctgtacctgcacatcggcctgaagccccgggtgcgggaccactaccgggccaccaaggtggccttctggctggagctggtgccccacctgcacaacctgaatgagatcttccagtatgtgtccaccaccaccaaggtgcccccaccagacatgaccagcttcccctacggcacccggcgcagccctgccaagatctggcccaccaccaagaggcctgccatcaccccagccaacaaccccaagcacagcaaggacccccacaagacaggccctgaggacaccaccgtgctgattgagaccaagagggactacagcacagagctgtctgtgaccatcgctgtgggcgccagcctgctcttcctgaacatcctggcctttgctgccctgtactacaagaaggacaagagaagacatgagacccaccgccaccccagcccccagaggaacaccaccaatgacatcacccacatccagaatgaggagatcatgagcctgcagatgaagcagctggagcatgaccatgaatgtgagagcctgcaggcccatgacaccctgcggctgacctgccccccagactacaccctgaccctgcggcgcagcccagatgacatccccttcatgacccccaacaccatcaccatgatccccaacaccctgatgggcatgcagcccctgcacaccttcaagaccttcagcggcggccagaacagcaccaacctgccccacggccacagcaccaccagggtgtag

SEQ ID NO: 161660 - DNA, 1824 bp, synthetic construct
  misc_feature 1..1824: note = Description of Artificial Sequence: Synthetic coding sequence
  source 1..1824: mol_type = other DNA
atgattgcccgctgcctgctggccgtgcgcagcctgcggcgggtgggcggcagccgcatcctgctgaggatgaccctgggccgggaggtgatgagccccctgcaggccatgagcagctacacagtggccggcagaaatgtgctgcgctgggacctgagccctgagcagatcaagaccaggacagaggagctgattgtgcagaccaagcaggtgtatgatgctgtgggcatgctgggcatcgaggaggtgacctatgagaactgcctgcaggccctggctgatgtggaggtgaagtacatcgtggagaggaccatgctggacttcccccagcacgtgtccagtgacaaggaggtgcgggccgccagcacagaagctgacaagaggctgagcagatttgacatcgagatgtccatgagaggagacatctttgagcgcatcgtgcacctgcaggagacctgtgacctgggcaagatcaagccagaggcccggcgctacctggagaagagcatcaagatgggcaagagaaatggcctgcacctgcctgagcaggtgcagaatgagatcaagtccatgaagaagaggatgtctgagctgtgcatcgacttcaacaagaacctgaatgaagatgacaccttcctggtgttcagcaaggccgagctgggcgccctgcctgatgacttcatcgacagcctggagaagacagatgatgacaagtacaagatcaccctgaagtacccccactacttccctgtgatgaagaagtgctgcatccctgagaccaggaggaggatggagatggccttcaacacccgctgcaaggaggagaacaccatcatcctgcagcagctgctgcccctgcggaccaaggtggccaagctgctgggctacagcacccacgccgactttgtgctggagatgaacacagccaagagcaccagccgggtgacagccttcctggatgacctgagccagaagctgaagcccctgggggaggccgagcgggagttcatcctgaacctgaagaagaaggagtgcaaggaccggggctttgaatatgatggcaagatcaatgcctgggacctgtactactacatgacccagacagaggagctgaagtacagcattgaccaggagttcctgaaggagtacttccccatcgaggtggtgacagagggcctgctgaacacctaccaggagctgctgggcctgagctttgagcagatgacagatgcccacgtgtggaacaagtctgtgaccctgtacacagtgaaggacaaggccaccggggaggtgctgggccagttctacctggacctgtacccccgggagggcaagtacaaccacgccgcctgcttcggcctgcagcccggctgcctgctgcctgatggcagcaggatgatggctgtggccgccctggtggtgaacttcagccagcctgtggccggccggcccagcctgctgcggcatgatgaggtgaggacctacttccatgaatttggacatgtgatgcaccagatctgtgcccagacagactttgcccgcttcagcggcaccaacgtggagacagactttgtggaggtgcccagccagatgctggagaactgggtgtgggatgtggacagcctgcggcggctgagcaagcactacaaggatggcagccccatcgcagatgacctgctggagaagctggtggccagccggctggtgaacacaggcctgctgaccctgcggcagatcgtgctgagcaaggtggaccagagcctgcacaccaacaccagcctggatgctgccagcaacatgcccaacacagcccagaagtactag

SEQ ID NO: 161661 - DNA, 2115 bp, synthetic construct
  misc_feature 1..2115: note = Description of Artificial Sequence: Synthetic coding sequence
  source 1..2115: mol_type = other DNA
atgattgcccgctgcctgctggccgtgcgcagcctgcggcgggtgggcggcagccgcatcctgctgaggatgaccctgggccgggaggtgatgagccccctgcaggccatgagcagctacacagtggccggcagaaatgtgctgcgctgggacctgagccctgagcagatcaagaccaggacagaggagctgattgtgcagaccaagcaggtgtatgatgctgtgggcatgctgggcatcgaggaggtgacctatgagaactgcctgcaggccctggctgatgtggaggtgaagtacatcgtggagaggaccatgctggacttcccccagcacgtgtccagtgacaaggaggtgcgggccgccagcacagaagctgacaagaggctgagcagatttgacatcgagatgtccatgagaggagacatctttgagcgcatcgtgcacctgcaggagacctgtgacctgggcaagatcaagccagaggcccggcgctacctggagaagagcatcaagatgggcaagagaaatggcctgcacctgcctgagcaggtgcagaatgagatcaagtccatgaagaagaggatgtctgagctgtgcatcgacttcaacaagaacctgaatgaagatgacaccttcctggtgttcagcaaggccgagctgggcgccctgcctgatgacttcatcgacagcctggagaagacagatgatgacaagtacaagatcaccctgaagtacccccactacttccctgtgatgaagaagtgctgcatccctgagaccaggaggaggatggagatggccttcaacacccgctgcaaggaggagaacaccatcatcctgcagcagctgctgcccctgcggaccaaggtggccaagctgctgggctacagcacccacgccgactttgtgctggagatgaacacagccaagagcaccagccgggtgacagccttcctggatgacctgagccagaagctgaagcccctgggggaggccgagcgggagttcatcctgaacctgaagaagaaggagtgcaaggaccggggctttgaatatgatggcaagatcaatgcctgggacctgtactactacatgacccagacagaggagctgaagtacagcattgaccaggagttcctgaaggagtacttccccatcgaggtggtgacagagggcctgctgaacacctaccaggagctgctgggcctgagctttgagcagatgacagatgcccacgtgtggaacaagtctgtgaccctgtacacagtgaaggacaaggccaccggggaggtgctgggccagttctacctggacctgtacccccgggagggcaagtacaaccacgccgcctgcttcggcctgcagcccggctgcctgctgcctgatggcagcaggatgatggctgtggccgccctggtggtgaacttcagccagcctgtggccggccggcccagcctgctgcggcatgatgaggtgaggacctacttccatgaatttggacatgtgatgcaccagatctgtgcccagacagactttgcccgcttcagcggcaccaacgtggagacagactttgtggaggtgcccagccagatgctggagaactgggtgtgggatgtggacagcctgcggcggctgagcaagcactacaaggatggcagccccatcgcagatgacctgctggagaagctggtggccagccggctggtgaacacaggcctgctgaccctgcggcagatcgtgctgagcaaggtggaccagagcctgcacaccaacaccagcctggatgctgcctctgaatatgccaagtactgcagcgagatcctgggcgtggccgccaccccaggcaccaacatgcctgccaccttcggccacctggccggcggctatgatggccagtactacggctacctgtggagcgaggtgttctccatggacatgttctacagctgcttcaagaaggagggcatcatgaaccctgaggtgggcatgaagtacagaaacctgatcctgaagccaggcggcagcctggatggcatggacatgctgcacaacttcctgaagcgggagcccaaccagaaggccttcctgatgagccggggcctgcacgccccctag

SEQ ID NO: 161662 - DNA, 1803 bp, synthetic construct
  misc_feature 1..1803: note = Description of Artificial Sequence: Synthetic coding sequence
  source 1..1803: mol_type = other DNA
atgctggacttcccccagcacgtgtccagtgacaaggaggtgcgggccgccagcacagaagctgacaagaggctgagcagatttgacatcgagatgtccatgagaggagacatctttgagcgcatcgtgcacctgcaggagacctgtgacctgggcaagatcaagccagaggcccggcgctacctggagaagagcatcaagatgggcaagagaaatggcctgcacctgcctgagcaggtgcagaatgagatcaagtccatgaagaagaggatgtctgagctgtgcatcgacttcaacaagaacctgaatgaagatgacaccttcctggtgttcagcaaggccgagctgggcgccctgcctgatgacttcatcgacagcctggagaagacagatgatgacaagtacaagatcaccctgaagtacccccactacttccctgtgatgaagaagtgctgcatccctgagaccaggaggaggatggagatggccttcaacacccgctgcaaggaggagaacaccatcatcctgcagcagctgctgcccctgcggaccaaggtggccaagctgctgggctacagcacccacgccgactttgtgctggagatgaacacagccaagagcaccagccgggtgacagccttcctggatgacctgagccagaagctgaagcccctgggggaggccgagcgggagttcatcctgaacctgaagaagaaggagtgcaaggaccggggctttgaatatgatggcaagatcaatgcctgggacctgtactactacatgacccagacagaggagctgaagtacagcattgaccaggagttcctgaaggagtacttccccatcgaggtggtgacagagggcctgctgaacacctaccaggagctgctgggcctgagctttgagcagatgacagatgcccacgtgtggaacaagtctgtgaccctgtacacagtgaaggacaaggccaccggggaggtgctgggccagttctacctggacctgtacccccgggagggcaagtacaaccacgccgcctgcttcggcctgcagcccggctgcctgctgcctgatggcagcaggatgatggctgtggccgccctggtggtgaacttcagccagcctgtggccggccggcccagcctgctgcggcatgatgaggtgaggacctacttccatgaatttggacatgtgatgcaccagatctgtgcccagacagactttgcccgcttcagcggcaccaacgtggagacagactttgtggaggtgcccagccagatgctggagaactgggtgtgggatgtggacagcctgcggcggctgagcaagcactacaaggatggcagccccatcgcagatgacctgctggagaagctggtggccagccggctggtgaacacaggcctgctgaccctgcggcagatcgtgctgagcaaggtggaccagagcctgcacaccaacaccagcctggatgctgcctctgaatatgccaagtactgcagcgagatcctgggcgtggccgccaccccaggcaccaacatgcctgccaccttcggccacctggccggcggctatgatggccagtactacggctacctgtggagcgaggtgttctccatggacatgttctacagctgcttcaagaaggagggcatcatgaaccctgaggtgggcatgaagtacagaaacctgatcctgaagccaggcggcagcctggatggcatggacatgctgcacaacttcctgaagcgggagcccaaccagaaggccttcctgatgagccggggcctgcacgccccctag

SEQ ID NO: 161663 - DNA, 366 bp, synthetic construct
  misc_feature 1..366: note = Description of Artificial Sequence: Synthetic coding sequence
  source 1..366: mol_type = other DNA
atggccaggagagctggaggagccaggatgtttggcagcctgctgctgtttgccctgctggccgccggcgtggcccccctgtcctgggacctgcctgagcccaggagccgggccagcaagatccgggtgcacagccggggcaacctgtgggccaccggccacttcatgggcaagaagagcctggagcccagcagccccagccccctgggcacagccccccacaccagcctgcgggaccagaggctgcagctgagccatgacctgctgggcatcctgctgctgaagaaggccctgggcgtgtccctgagcaggcctgccccccagatccagtaccgccgcctgctggtgcagatcctgcagaagtag

SEQ ID NO: 161664 - DNA, 465 bp, synthetic construct
  misc_feature 1..465: note = Description of Artificial Sequence: Synthetic coding sequence
  source 1..465: mol_type = other DNA
atggccaggagagctggaggagccaggatgtttggcagcctgctgctgtttgccctgctggccgccggcgtggcccccctgtcctgggacctgcctgagcccaggagccgggccagcaagatccgggtgcacagccggggcaacctgtgggccaccggccacttcatgggcaagaagagcctggagcccagcagccccagccccctgggcacagccccccacaccagcctgcgggaccagaggctgcagctgagccatgacctgctgggcatcctgctgctgaagaaggccctgggcgtgtccctgagcaggcctgccccccagatccaggaggccgccggcaccaacacagctgagatgacccccatcatgggccagacccagcagaggggcctggactgtgcccaccctgggaaggtgctgaatggcaccctgctgatggcccccagcggctgcaagagctag

SEQ ID NO: 161665 - DNA, 1173 bp, synthetic construct
  misc_feature 1..1173: note = Description of Artificial Sequence: Synthetic coding sequence
  source 1..1173: mol_type = other DNA
atgcccagcaagagcctgagcaacctgtctgtgaccactggagccaatgaaagtggctctgtgcctgagggctgggagcgggacttcctgcctgccagtgatggcaccaccacagagctggtgatccgctgcgtcatccccagcctgtacctgctgatcatcaccgtgggcctgctgggcaacatcatgctggtgaagatcttcatcaccaacagcgccatgaggtctgtgcccaacatcttcatcagcaacctggccgccggggacctgctgctgctgctgacctgtgtgcctgtggatgccagccgctacttctttgatgagtggatgtttgggaaggtgggctgcaagctgatccctgtgatccagctgacctctgtgggcgtgtctgtgttcaccctgacagccctgtctgctgaccgctaccgggccatcgtgaaccccatggacatgcagaccagcggggccctgctgcggacctgtgtgaaggccatgggcatctgggtggtgtctgtgctgctggccgtgcctgaggccgtgttcagcgaggtggcccgcatcagcagcctggacaacagcagcttcaccgcctgcatcccctacccccagacagatgagctgcaccccaagatccacagcgtgctgatcttcctggtgtacttcctgatccccctggccatcatcagcatctactactaccacatcgccaagaccctcatcaagagcgcccacaacctgcctggagagtacaatgagcacaccaagaagcagatggagaccaggaagaggctggccaagatcgtgctggtgtttgtgggctgcttcatcttctgctggttccccaaccacatcctgtacatgtaccgctccttcaactacaatgaaattgaccccagcctgggccacatgattgtgaccctggtggcccgggtgctgagctttggaaacagctgtgtgaacccctttgccctgtacctgctgtctgagagcttccgccgccacttcaacagccagctgtgctgcggcaggaagagctaccaggagcggggcaccagctacctgctgagcagcagcgctgtgaggatgaccagcctgaagagcaatgccaagaacatggtgaccaacagcgtgctgctgaatggccacagcatgaagcaggagatggccctgtag

SEQ ID NO: 161666 - DNA, 1281 bp, synthetic construct
  misc_feature 1..1281: note = Description of Artificial Sequence: Synthetic coding sequence
  source 1..1281: mol_type = other DNA
atgacccccctgtgcctgaactgcagcgtgctgcccggggacctgtacccaggaggagccaggaaccccatggcctgcaatggatctgctgcccggggccactttgatcctgaggacctgaacctgacagatgaggccctgcggctgaagtacctgggcccccagcagacagagctgttcatgcccatctgtgccacctacctgctgatctttgtggtgggcgctgtgggcaatggcctgacctgcctggtgatcctgcggcacaaggccatgaggacccccaccaactactacctgttcagcctggccgtgtctgacctgctggtgctgctggtgggcctgcccctggagctgtatgagatgtggcacaactaccccttcctgctgggcgtgggcggctgctacttccgcaccctgctgtttgagatggtgtgcctggcctctgtgctgaatgtgacagccctgtctgtggagcgctacgtggccgtggtgcaccccctgcaggcccgctccatggtgacccgggcccacgtgagaagagtgctgggcgctgtgtggggcctggccatgctgtgcagcctgcccaacaccagcctgcacggcatccggcagctgcacgtgccctgccggggccctgtgcctgacagcgctgtgtgcatgctggtgcggccccgggccctgtacaacatggtggtgcagaccacagccctgctcttcttctgcctgcccatggccatcatgtctgtgctgtacctgctgattggcctgcggctgcggcgggagcggctgctgctgatgcaggaggccaagggccggggcagcgctgctgcccggagccgctacacctgccgcctgcagcagcacgaccggggccggcggcaggtgaccaagatgctgtttgtgctggtggtggtgtttggcatctgctgggcccccttccacgccgacagagtgatgtggagcgtggtgtcccagtggacagatggcctgcacctggccttccagcacgtgcacgtgatcagcggcatcttcttctacctgggcagcgctgccaaccctgtgctgtacagcctgatgagcagccgcttccgggagaccttccaggaggccctgtgcctgggcgcctgctgccaccggctgcggcccaggcacagcagccacagcctgagcaggatgaccaccggcagcaccctgtgtgatgtgggcagcctgggctcctgggtgcaccccctggccggaaatgatggccctgaggcccagcaggagacagaccccagctag

SEQ ID NO: 161667 - DNA, 1248 bp, synthetic construct
  misc_feature 1..1248: note = Description of Artificial Sequence: Synthetic coding sequence
  source 1..1248: mol_type = other DNA
atgagcggcatggagaagctgcagaatgcctcctggatctaccagcagaagctggaggaccccttccagaagcacctgaacagcacagaggagtacctggccttcctgtgtggcccccggcgcagccacttcttcctgcctgtgtctgtggtgtatgtgcccatctttgtggtgggcgtgattggaaatgtgctggtgtgcctggtgatcctgcagcaccaggccatgaagacccccaccaactactacctgttcagcctggccgtgtctgacctgctggtgctgctgctgggcatgcccctggaggtgtatgagatgtggaggaactaccccttcctgtttggacctgtgggctgctacttcaagacagccctgtttgagaccgtgtgctttgccagcatcctgagcatcaccaccgtgtctgtggagagatatgtggccatcctgcaccccttccgggccaagctgcagagcaccaggagaagagccctgcgcatcctgggcatcgtgtggggcttctctgtgctcttcagcctgcccaacaccagcatccacggcatcaagttccactacttccccaacggcagcctggtgcccggcagcgccacctgcaccgtcatcaagcccatgtggatctacaacttcatcatccaggtgaccagcttcctgttctacctgctgcccatgaccgtcatctctgtgctgtactacctgatggccctgcggctgaagaaggacaagagcctggaggctgatgagggcaatgccaacatccagaggccctgcaggaagtctgtgaacaagatgctgtttgtgctggtgctggtgtttgccatctgctgggcccccttccacatcgacaggctcttcttctcctttgtggaggagtggagcgagagcctggccgctgtgttcaacctggtgcacgtggtgtctggagtcttcttctacctgagcagcgctgtgaaccccatcatctacaacctgctgagccgccgcttccaggccgccttccagaatgtcatcagcagcttccacaagcagtggcacagccagcacgacccccagctgcccccagcccagaggaacatcttcctgacagagtgccactttgtggagctgacagaggacatcggcccccagttcccctgccagagctccatgcacaacagccacctgcctgctgccctgagcagcgagcagatgagcaggaccaactaccagagcttccacttcaacaagacctag

SEQ ID NO: 161668 - DNA, 5625 bp, synthetic construct
  misc_feature 1..5625: note = Description of Artificial Sequence: Synthetic coding sequence
  source 1..5625: mol_type = other DNA
atgctgggcagctctgtgaagtctgtgcagcctgaggtggagctgagcagcggcggcggagatgaaggagcagatgagcccaggggggccggcaggaaggctgctgctgctgatggccggggcatgctgcccaagagggccaaggcccctgggggcggcggcggcatggccaaggccagcgctgctgagctgaaggtgttcaagagcggctctgtggacagccgggtgcctgggggccccccagccagcaacctgaggaagcagaagagcctgaccaacctgtccttcctgacagacagcgagaagaagctgcagctgtatgagcctgagtggagcgatgacatggccaaggcccccaagggcctgggcaaggtgggcagcaagggccgggaggcccccctgatgagcaagaccctgagcaagtctgagcacagcctcttccaggccaagggcagccctgctgggggcgccaagacccccctggcccccctggcccccaacctgggcaagcccagccgcatcccccggggcccctatgcagaggtgaagcccctgagcaaggcccctgaggccgctgtgtctgaagatggcaagagtgatgatgagctgctgagcagcaaggccaaggcccagaagagcagcggccctgtgcccagcgccaagggccaggaggagcgggccttcctgaaggtggaccctgagctggtggtgacagtgctgggggacctggagcagctgctcttcagccagatgctggaccctgagagccagaggaagaggacagtgcagaatgtgctggacctgcggcagaacctggaggagaccatgagcagcctgcggggcagccaggtgacccacagcagcctggagatgacctgctatgacagtgatgatgccaaccccaggtctgtgagcagcctgagcaacagaagcagccccctgtcctggaggtatggccagagcagcccccggctgcaggccggagatgcccccagcgtgggcggcagctgccgctctgagggcaccccagcctggtacatgcacggggagcgggcccactacagccacaccatgcccatgaggagccccagcaagctgagccacatcagccggctggagctggtggagagcctggacagtgatgaggtggacctgaagagcggctacatgtctgacagcgacctgatgggcaagaccatgacagaagatgatgacatcaccaccggctgggatgagagcagcagcatcagcagcggcctgagtgatgccagtgacaacctgagcagcgaggagttcaatgccagcagcagcctgaacagcctgcccagcacccccacagccagcagaagaaacagcaccatcgtgctgaggacagacagcgagaagaggagcctggccgagagcggcctgtcctggttcagcgagagcgaggagaaggcccccaagaagctggagtatgacagcggcagcctgaagatggagcccggcaccagcaagtggaggcgggagaggcctgagagctgtgatgacagcagcaaaggaggagagctgaagaagcccatcagcctgggccaccctggcagcctgaagaagggcaagaccccacctgtggccgtgaccagccccatcacccacacagcccagagcgccctgaaggtggccggcaagccagagggcaaggccacagacaagggcaagctggccgtgaagaacacaggcctgcagaggagcagcagtgatgctggccgggaccggctgagtgatgccaagaagccacccagcggcatcgcccggcccagcaccagcggcagctttggctacaagaagcccccaccagccaccggcacagccaccgtgatgcagacaggaggcagcgccaccctgagcaagatccagaagagcagcggcatccctgtgaagcctgtgaatggaaggaagaccagcctggatgtgagcaacagcgctgagcccggcttcctggcccctggggcccggagcaacatccagtaccgcagcctgcccaggcctgccaagagcagctccatgtctgtgactggaggccggggcggccccaggcctgtgagcagcagcattgaccccagcctgctgagcaccaagcagggcggcctgacccccagccggctgaaggagcccaccaaggtggccagcggccgcaccaccccagcccctgtgaaccagacagaccgggagaaggagaaggccaaggccaaggctgtggccctggacagcgacaacatcagcctgaagagcatcggcagccctgagagcacccccaagaaccaggccagccaccccacagccaccaagctggccgagctgccccccacccccctgcgggccacagccaagagctttgtgaagccacccagcctggccaacctggacaaggtgaacagcaacagcctggacctgcccagcagcagtgacaccacccacgccagcaaggtgcctgacctgcacgccaccagcagcgccagcggcggccccctgcccagctgcttcacccccagccctgcccccatcctgaacatcaacagcgccagcttcagccagggcctggagctgatgagcggcttctctgtgcccaaggagaccaggatgtaccccaagctgagcggcctgcaccgctccatggagagcctgcagatgcccatgagcctgcccagcgccttccccagcagcacccctgtgcccaccccaccagcccccccagctgcccccacagaggaggagacagaggagctgacctggagcggcagcccccgggccggccagctggacagcaaccagagggacaggaacaccctgcccaagaagggcctgcgctaccagctgcagagccaggaggagaccaaggagaggaggcacagccacaccatcggcggcctgcctgagagtgatgaccagagcgagctgcccagccccccagccctgcccatgagcctgagcgccaagggccagctgaccaacatcgtgagccccacagctgccaccaccccccgcatcaccaggagcaacagcatccccacccatgaggccgcctttgagctgtacagcggcagccagatgggcagcaccctgagcctggccgagcggcccaagggcatgatccgcagcggcagcttccgggaccccacagatgatgtgcacggctctgtgctgagcctggccagcagcgccagcagcacctacagcagcgctgaggagaggatgcagagcgagcagatcaggaagctgcggcgggagctggagagcagccaggagaaggtggccaccctgaccagccagctgagcgccaatgccaacctggtggccgcctttgagcagagcctggtgaacatgaccagccggctgcggcacctggccgagacagctgaggagaaggacacagagctgctggacctgcgggagaccatcgacttcctgaagaagaagaacagcgaggcccaggccgtcatccagggcgccctgaatgccagcgagaccacccccaaggagctgcgcatcaagaggcagaacagcagtgacagcatcagcagcctgaacagcatcaccagccacagcagcatcggcagcagcaaggatgctgatgccaagaagaagaagaagaagtcctggctgcggagcagcttcaacaaggccttcagcatcaagaagggccccaagagcgccagcagctacagcgacatcgaggagatcgccaccccagacagcagcgcccccagcagccccaagctgcagcacggcagcacagaaacagccagccccagcatcaagagcagcaccagcagctctgtgggcacagatgtgacagagggccctgcccacccagccccccacaccaggctcttccacgccaatgaggaggaggagcctgagaagaaggaggtgtctgagctgcggtctgagctgtgggagaaggagatgaagctgacagacatccggctggaggccctgaacagcgcccaccagctggaccagctgcgggagaccatgcacaacatgcagctggaggtggacctgctgaaggccgagaatgaccggctgaaggtggcccctggccccagcagcggcagcaccccaggccaggtgcccggcagcagcgccctgagcagccccaggaggagcctgggcctggccctgacccacagctttggccccagcctggccgacacagacctgagccccatggatggcatcagcacctgtggccccaaggaggaggtgaccctgcgggtggtggtgaggatgccaccccagcacatcatcaagggggacctgaagcagcaggagttcttcctgggctgcagcaaggtgtctgggaaggtggactggaagatgctggatgaggccgtgttccaggtgttcaaggactacatcagcaagatggaccctgccagcaccctgggcctgagcacagagagcatccacggctacagcatcagccacgtgaagagggtgctggatgctgagcccccagagatgccaccctgccggcggggcgtgaacaacatctctgtgtccctgaagggcctgaaggagaagtgtgtggacagcctggtgtttgagaccctcatccccaagcccatgatgcagcactacatcagcctgctgctgaagcaccggcggctggtgctgagcggccccagcggcaccgggaagacctacctgaccaaccggctggccgagtacctggtggagaggagcggccgggaggtgacagagggcatcgtgtccaccttcaacatgcaccagcagagctgcaaggacctgcagctgtacctgagcaacctggccaaccagattgaccgggagactggaattggagatgtgcccctggtgatcctgctggatgacctgtctgaggccggcagcatcagcgagctggtgaatggagccctgacctgcaagtaccacaagtgcccctacatcatcggcaccaccaaccagcctgtgaagatgacccccaaccacggcctgcacctgtccttcaggatgctgaccttcagcaacaacgtggagcccgccaacggcttcctggtgcgctacctgcggaggaagctggtggagagtgacagcgacatcaatgccaacaaggaggagctgctgcgggtgctggactgggtgcccaagctgtggtaccacctgcacaccttcctggagaagcacagcaccagtgacttcctgattggcccctgcttcttcctgagctgccccatcggcatcgaggacttccgcacctggttcatcgacctgtggaacaacagcatcatcccctacctgcaggagggcgccaaggatggcatcaaggtgcacggccagaaggccgcctgggaggaccctgtggagtgggtgcgggacaccctgccctggcccagcgcccagcaggaccagagcaagctgtaccacctgcccccacccaccgtgggcccccacagcatcgccagccccccagaggacagaacagtgaaggacagcacccccagcagcctggacagcgaccccctgatggccatgctgctgaagctgcaggaggccgccaactacatcgagagcccagaccgggagaccatcctggaccccaacctgcaggccaccctgtag

SEQ ID NO: 161669 - DNA, 5634 bp, synthetic construct
  misc_feature 1..5634: note = Description of Artificial Sequence: Synthetic coding sequence
  source 1..5634: mol_type = other DNA
atgctgggcagctctgtgaagtctgtgcagcctgaggtggagctgagcagcggcggcggagatgaaggagcagatgagcccaggggggccggcaggaaggctgctgctgctgatggccggggcatgctgcccaagagggccaaggcccctgggggcggcggcggcatggccaaggccagcgctgctgagctgaaggtgttcaagagcggctctgtggacagccgggtgcctgggggccccccagccagcaacctgaggaagcagaagagcctgaccaacctgtccttcctgacagacagcgagaagaagctgcagctgtatgagcctgagtggagcgatgacatggccaaggcccccaagggcctgggcaaggtgggcagcaagggccgggaggcccccctgatgagcaagaccctgagcaagtctgagcacagcctcttccaggccaagggcagccctgctgggggcgccaagacccccctggcccccctggcccccaacctgggcaagcccagccgcatcccccggggcccctatgcagaggtgaagcccctgagcaaggcccctgaggccgctgtgtctgaagatggcaagagtgatgatgagctgctgagcagcaaggccaaggcccagaagagcagcggccctgtgcccagcgccaagggccaggaggagcgggccttcctgaaggtggaccctgagctggtggtgacagtgctgggggacctggagcagctgctcttcagccagatgctggaccctgagagccagaggaagaggacagtgcagaatgtgctggacctgcggcagaacctggaggagaccatgagcagcctgcggggcagccaggtgacccacagcagcctggagatgacctgctatgacagtgatgatgccaaccccaggtctgtgagcagcctgagcaacagaagcagccccctgtcctggaggtatggccagagcagcccccggctgcaggccggagatgcccccagcgtgggcggcagctgccgctctgagggcaccccagcctggtacatgcacggggagcgggcccactacagccacaccatgcccatgaggagccccagcaagctgagccacatcagccggctggagctggtggagagcctggacagtgatgaggtggacctgaagagcggctacatgtctgacagcgacctgatgggcaagaccatgacagaagatgatgacatcaccaccggctgggatgagagcagcagcatcagcagcggcctgagtgatgccagtgacaacctgagcagcgaggagttcaatgccagcagcagcctgaacagcctgcccagcacccccacagccagcagaagaaacagcaccatcgtgctgaggacagacagcgagaagaggagcctggccgagagcggcctgtcctggttcagcgagagcgaggagaaggcccccaagaagctggagtatgacagcggcagcctgaagatggagcccggcaccagcaagtggaggcgggagaggcctgagagctgtgatgacagcagcaaaggaggagagctgaagaagcccatcagcctgggccaccctggcagcctgaagaagggcaagaccccacctgtggccgtgaccagccccatcacccacacagcccagagcgccctgaaggtggccggcaagccagagggcaaggccacagacaagggcaagctggccgtgaagaacacaggcctgcagaggagcagcagtgatgctggccgggaccggctgagtgatgccaagaagccacccagcggcatcgcccggcccagcaccagcggcagctttggctacaagaagcccccaccagccaccggcacagccaccgtgatgcagacaggaggcagcgccaccctgagcaagatccagaagagcagcggcatccctgtgaagcctgtgaatggaaggaagaccagcctggatgtgagcaacagcgctgagcccggcttcctggcccctggggcccggagcaacatccagtaccgcagcctgcccaggcctgccaagagcagctccatgtctgtgactggaggccggggcggccccaggcctgtgagcagcagcattgaccccagcctgctgagcaccaagcagggcggcctgacccccagccggctgaaggagcccaccaaggtggccagcggccgcaccaccccagcccctgtgaaccagacagaccgggagaaggagaaggccaaggccaaggctgtggccctggacagcgacaacatcagcctgaagagcatcggcagccctgagagcacccccaagaaccaggccagccaccccacagccaccaagctggccgagctgccccccacccccctgcgggccacagccaagagctttgtgaagccacccagcctggccaacctggacaaggtgaacagcaacagcctggacctgcccagcagcagtgacaccacccacgccagcaaggtgcctgacctgcacgccaccagcagcgccagcggcggccccctgcccagctgcttcacccccagccctgcccccatcctgaacatcaacagcgccagcttcagccagggcctggagctgatgagcggcttctctgtgcccaaggagaccaggatgtaccccaagctgagcggcctgcaccgctccatggagagcctgcagatgcccatgagcctgcccagcgccttccccagcagcacccctgtgcccaccccaccagcccccccagctgcccccacagaggaggagacagaggagctgacctggagcggcagcccccgggccggccagctggacagcaaccagagggacaggaacaccctgcccaagaagggcctgcgctaccagctgcagagccaggaggagaccaaggagaggaggcacagccacaccatcggcggcctgcctgagagtgatgaccagagcgagctgcccagccccccagccctgcccatgagcctgagcgccaagggccagctgaccaacatcgtgagccccacagctgccaccaccccccgcatcaccaggagcaacagcatccccacccatgaggccgcctttgagctgtacagcggcagccagatgggcagcaccctgagcctggccgagcggcccaagggcatgatccgcagcggcagcttccgggaccccacagatgatgtgcacggctctgtgctgagcctggccagcagcgccagcagcacctacagcagcgctgaggagaggatgcagagcgagcagatcaggaagctgcggcgggagctggagagcagccaggagaaggtggccaccctgaccagccagctgagcgccaatgccaacctggtggccgcctttgagcagagcctggtgaacatgaccagccggctgcggcacctggccgagacagctgaggagaaggacacagagctgctggacctgcgggagaccatcgacttcctgaagaagaagaacagcgaggcccaggccgtcatccagggcgccctgaatgccagcgagaccacccccaaggagctgcgcatcaagaggcagaacagcagtgacagcatcagcagcctgaacagcatcaccagccacagcagcatcggcagcagcaaggatgctgatgccaagaagaagaagaagaagtcctgggtgtatgagctgcggagcagcttcaacaaggccttcagcatcaagaagggccccaagagcgccagcagctacagcgacatcgaggagatcgccaccccagacagcagcgcccccagcagccccaagctgcagcacggcagcacagaaacagccagccccagcatcaagagcagcaccagcagctctgtgggcacagatgtgacagagggccctgcccacccagccccccacaccaggctcttccacgccaatgaggaggaggagcctgagaagaaggaggtgtctgagctgcggtctgagctgtgggagaaggagatgaagctgacagacatccggctggaggccctgaacagcgcccaccagctggaccagctgcgggagaccatgcacaacatgcagctggaggtggacctgctgaaggcagaaaatgaccggctgaaggtggcccctggccccagcagcggcagcaccccaggccaggtgcccggcagcagcgccctgagcagcccccggcgcagcctgggcctggccctgacccacagctttggccccagcctggccgacacagacctgagccccatggatggcatcagcacctgtggccccaaggaggaggtgaccctgcgggtggtggtgaggatgccaccccagcacatcatcaagggggacctgaagcagcaggagttcttcctgggctgcagcaaggtgtctgggaaggtggactggaagatgctggatgaagctgtgttccaggtgttcaaggactacatcagcaagatggaccctgccagcaccctgggcctgagcacagagagcatccacggctacagcatcagccacgtgaagagggtgctggatgctgagcccccagagatgccaccctgcagaagaggagtgaacaacatctctgtgtccctgaagggcctgaaggagaagtgtgtggacagcctggtgtttgagaccctcatccccaagcccatgatgcagcactacatcagcctgctgctgaagcaccggcggctggtgctgagcggccccagcggcaccgggaagacctacctgaccaaccggctggccgagtacctggtggagaggagcggccgggaggtgacagagggcatcgtgtccaccttcaacatgcaccagcagagctgcaaggacctgcagctgtacctgagcaacctggccaaccagattgaccgggagaccggcattggagatgtgcccctggtgatcctgctggatgacctgtctgaggccggcagcatcagcgagctggtgaatggagccctgacctgcaagtaccacaagtgcccctacatcatcggcaccaccaaccagcctgtgaagatgacccccaaccacggcctgcacctgtccttcaggatgctgaccttcagcaacaacgtggagcccgccaacggcttcctggtgcgctacctgcggaggaagctggtggagagtgacagcgacatcaatgccaacaaggaggagctgctgcgggtgctggactgggtgcccaagctgtggtaccacctgcacaccttcctggagaagcacagcaccagtgacttcctgattggcccctgcttcttcctgagctgccccatcggcatcgaggacttccgcacctggttcatcgacctgtggaacaacagcatcatcccctacctgcaggagggcgccaaggatggcatcaaggtgcacggccagaaggccgcctgggaggaccctgtggagtgggtgcgggacaccctgccctggcccagcgcccagcaggaccagagcaagctgtaccacctgcccccacccaccgtgggcccccacagcatcgccagccccccagaggacagaacagtgaaggacagcacccccagcagcctggacagcgaccccctgatggccatgctgctgaagctgcaggaggccgccaactacatcgagagcccagaccgggagaccatcctggaccccaacctgcaggccaccctgtag

SEQ ID NO: 161670 - DNA, 5610 bp, synthetic construct
  misc_feature 1..5610: note = Description of Artificial Sequence: Synthetic coding sequence
  source 1..5610: mol_type = other DNA
atgctgggcagctctgtgaagtctgtgcagcctgaggtggagctgagcagcggcggcggagatgaaggagcagatgagcccaggggggccggcaggaaggctgctgctgctgatggccggggcatgctgcccaagagggccaaggcccctgggggcggcggcggcatggccaaggccagcgctgctgagctgaaggtgttcaagagcggctctgtggacagccgggtgcctgggggccccccagccagcaacctgaggaagcagaagagcctgaccaacctgtccttcctgacagacagcgagaagaagctgcagctgtatgagcctgagtggagcgatgacatggccaaggcccccaagggcctgggcaaggtgggcagcaagggccgggaggcccccctgatgagcaagaccctgagcaagtctgagcacagcctcttccaggccaagggcagccctgctgggggcgccaagacccccctggcccccctggcccccaacctgggcaagcccagccgcatcccccggggcccctatgcagaggtgaagcccctgagcaaggcccctgaggccgctgtgtctgaagatggcaagagtgatgatgagctgctgagcagcaaggccaaggcccagaagagcagcggccctgtgcccagcgccaagggccaggaggagcgggccttcctgaaggtggaccctgagctggtggtgacagtgctgggggacctggagcagctgctcttcagccagatgctggaccctgagagccagaggaagaggacagtgcagaatgtgctggacctgcggcagaacctggaggagaccatgagcagcctgcggggcagccaggtgacccacagcagcctggagatgacctgctatgacagtgatgatgccaaccccaggtctgtgagcagcctgagcaacagaagcagccccctgtcctggaggtatggccagagcagcccccggctgcaggccggagatgcccccagcgtgggcggcagctgccgctctgagggcaccccagcctggtacatgcacggggagcgggcccactacagccacaccatgcccatgaggagccccagcaagctgagccacatcagccggctggagctggtggagagcctggacagtgatgaggtggacctgaagagcggctacatgtctgacagcgacctgatgggcaagaccatgacagaagatgatgacatcaccaccggctgggatgagagcagcagcatcagcagcggcctgagtgatgccagtgacaacctgagcagcgaggagttcaatgccagcagcagcctgaacagcctgcccagcacccccacagccagcagaagaaacagcaccatcgtgctgaggacagacagcgagaagaggagcctggccgagagcggcctgtcctggttcagcgagagcgaggagaaggcccccaagaagctggagtatgacagcggcagcctgaagatggagcccggcaccagcaagtggaggcgggagaggcctgagagctgtgatgacagcagcaaaggaggagagctgaagaagcccatcagcctgggccaccctggcagcctgaagaagggcaagaccccacctgtggccgtgaccagccccatcacccacacagcccagagcgccctgaaggtggccggcaagccagagggcaaggccacagacaagggcaagctggccgtgaagaacacaggcctgcagaggagcagcagtgatgctggccgggaccggctgagtgatgccaagaagccacccagcggcatcgcccggcccagcaccagcggcagctttggctacaagaagcccccaccagccaccggcacagccaccgtgatgcagacaggaggcagcgccaccctgagcaagatccagaagagcagcggcatccctgtgaagcctgtgaatggaaggaagaccagcctggatgtgagcaacagcgctgagcccggcttcctggcccctggggcccggagcaacatccagtaccgcagcctgcccaggcctgccaagagcagctccatgtctgtgactggaggccggggcggccccaggcctgtgagcagcagcattgaccccagcctgctgagcaccaagcagggcggcctgacccccagccggctgaaggagcccaccaaggtggccagcggccgcaccaccccagcccctgtgaaccagacagaccgggagaaggagaaggccaaggccaaggctgtggccctggacagcgacaacatcagcctgaagagcatcggcagccctgagagcacccccaagaaccaggccagccaccccacagccaccaagctggccgagctgccccccacccccctgcgggccacagccaagagctttgtgaagccacccagcctggccaacctggacaaggtgaacagcaacagcctggacctgcccagcagcagtgacaccacccacgccagcaaggtgcctgacctgcacgccaccagcagcgccagcggcggccccctgcccagctgcttcacccccagccctgcccccatcctgaacatcaacagcgccagcttcagccagggcctggagctgatgagcggcttctctgtgcccaaggagaccaggatgtaccccaagctgagcggcctgcaccgctccatggagagcctgcagatgcccatgagcctgcccagcgccttccccagcagcacccctgtgcccaccccaccagcccccccagctgcccccacagaggaggagacagaggagctgacctggagcggcagcccccgggccggccagctggacagcaaccagagggacaggaacaccctgcccaagaagggcctgcgctaccagctgcagagccaggaggagaccaaggagaggaggcacagccacaccatcggcggcctgcctgagagtgatgaccagagcgagctgcccagccccccagccctgcccatgagcctgagcgccaagggccagctgaccaacatcgtgagccccacagctgccaccaccccccgcatcaccaggagcaacagcatccccacccatgaggccgcctttgagctgtacagcggcagccagatgggcagcaccctgagcctggccgagcggcccaagggcatgatccgcagcggcagcttccgggaccccacagatgatgtgcacggctctgtgctgagcctggccagcagcgccagcagcacctacagcagccagatcaggaagctgcggcgggagctggagagcagccaggagaaggtggccaccctgaccagccagctgagcgccaatgccaacctggtggccgcctttgagcagagcctggtgaacatgaccagccggctgcggcacctggccgagacagctgaggagaaggacacagagctgctggacctgcgggagaccatcgacttcctgaagaagaagaacagcgaggcccaggccgtcatccagggcgccctgaatgccagcgagaccacccccaaggagctgcgcatcaagaggcagaacagcagtgacagcatcagcagcctgaacagcatcaccagccacagcagcatcggcagcagcaaggatgctgatgccaagaagaagaagaagaagtcctgggtgtatgagctgcggagcagcttcaacaaggccttcagcatcaagaagggccccaagagcgccagcagctacagcgacatcgaggagatcgccaccccagacagcagcgcccccagcagccccaagctgcagcacggcagcacagaaacagccagccccagcatcaagagcagcaccagcagctctgtgggcacagatgtgacagagggccctgcccacccagccccccacaccaggctcttccacgccaatgaggaggaggagcctgagaagaaggaggtgtctgagctgcggtctgagctgtgggagaaggagatgaagctgacagacatccggctggaggccctgaacagcgcccaccagctggaccagctgcgggagaccatgcacaacatgcagctggaggtggacctgctgaaggcagaaaatgaccggctgaaggtggcccctggccccagcagcggcagcaccccaggccaggtgcccggcagcagcgccctgagcagcccccggcgcagcctgggcctggccctgacccacagctttggccccagcctggccgacacagacctgagccccatggatggcatcagcacctgtggccccaaggaggaggtgaccctgcgggtggtggtgaggatgccaccccagcacatcatcaagggggacctgaagcagcaggagttcttcctgggctgcagcaaggtgtctgggaaggtggactggaagatgctggatgaagctgtgttccaggtgttcaaggactacatcagcaagatggaccctgccagcaccctgggcctgagcacagagagcatccacggctacagcatcagccacgtgaagagggtgctggatgctgagcccccagagatgccaccctgcagaagaggagtgaacaacatctctgtgtccctgaagggcctgaaggagaagtgtgtggacagcctggtgtttgagaccctcatccccaagcccatgatgcagcactacatcagcctgctgctgaagcaccggcggctggtgctgagcggccccagcggcaccgggaagacctacctgaccaaccggctggccgagtacctggtggagaggagcggccgggaggtgacagagggcatcgtgtccaccttcaacatgcaccagcagagctgcaaggacctgcagctgtacctgagcaacctggccaaccagattgaccgggagaccggcattggagatgtgcccctggtgatcctgctggatgacctgtctgaggccggcagcatcagcgagctggtgaatggagccctgacctgcaagtaccacaagtgcccctacatcatcggcaccaccaaccagcctgtgaagatgacccccaaccacggcctgcacctgtccttcaggatgctgaccttcagcaacaacgtggagcccgccaacggcttcctggtgcgctacctgcggaggaagctggtggagagtgacagcgacatcaatgccaacaaggaggagctgctgcgggtgctggactgggtgcccaagctgtggtaccacctgcacaccttcctggagaagcacagcaccagtgacttcctgattggcccctgcttcttcctgagctgccccatcggcatcgaggacttccgcacctggttcatcgacctgtggaacaacagcatcatcccctacctgcaggagggcgccaaggatggcatcaaggtgcacggccagaaggccgcctgggaggaccctgtggagtgggtgcgggacaccctgccctggcccagcgcccagcaggaccagagcaagctgtaccacctgcccccacccaccgtgggcccccacagcatcgccagccccccagaggacagaacagtgaaggacagcacccccagcagcctggacagcgaccccctgatggccatgctgctgaagctgcaggaggccgccaactacatcgagagcccagaccgggagaccatcctggaccccaacctgcaggccaccctgtag

SEQ ID NO: 161671 - DNA, 5454 bp, synthetic construct
  misc_feature 1..5454: note = Description of Artificial Sequence: Synthetic coding sequence
  source 1..5454: mol_type = other DNA
atgctgggcagctctgtgaagtctgtgcagcctgaggtggagctgagcagcggcggcggagatgaaggagcagatgagcccaggggggccggcaggaaggctgctgctgctgatggccggggcatgctgcccaagagggccaaggcccctgggggcggcggcggcatggccaaggccagcgctgctgagctgaaggtgttcaagagcggctctgtggacagccgggtgcctgggggccccccagccagcaacctgaggaagcagaagagcctgaccaacctgtccttcctgacagacagcgagaagaagctgcagctgtatgagcctgagtggagcgatgacatggccaaggcccccaagggcctgggcaaggtgggcagcaagggccgggaggcccccctgatgagcaagaccctgagcaagtctgagcacagcctcttccaggccaagggcagccctgctgggggcgccaagacccccctggcccccctggcccccaacctgggcaagcccagccgcatcccccggggcccctatgcagaggtgaagcccctgagcaaggcccctgaggccgctgtgtctgaagatggcaagagtgatgatgagctgctgagcagcaaggccaaggcccagaagagcagcggccctgtgcccagcgccaagggccaggaggagcgggccttcctgaaggtggaccctgagctggtggtgacagtgctgggggacctggagcagctgctcttcagccagatgctggaccctgagagccagaggaagaggacagtgcagaatgtgctggacctgcggcagaacctggaggagaccatgagcagcctgcggggcagccaggtgacccacagcagcctggagatgacctgctatgacagtgatgatgccaaccccaggtctgtgagcagcctgagcaacagaagcagccccctgtcctggaggtatggccagagcagcccccggctgcaggccggagatgcccccagcgtgggcggcagctgccgctctgagggcaccccagcctggtacatgcacggggagcgggcccactacagccacaccatgcccatgaggagccccagcaagctgagccacatcagccggctggagctggtggagagcctggacagtgatgaggtggacctgaagagcggctacatgtctgacagcgacctgatgggcaagaccatgacagaagatgatgacatcaccaccggctgggatgagagcagcagcatcagcagcggcctgagtgatgccagtgacaacctgagcagcgaggagttcaatgccagcagcagcctgaacagcctgcccagcacccccacagccagcagaagaaacagcaccatcgtgctgaggacagacagcgagaagaggagcctggccgagagcggcctgtcctggttcagcgagagcgaggagaaggcccccaagaagctggagtatgacagcggcagcctgaagatggagcccggcaccagcaagtggaggcgggagaggcctgagagctgtgatgacagcagcaaaggaggagagctgaagaagcccatcagcctgggccaccctggcagcctgaagaagggcaagaccccacctgtggccgtgaccagccccatcacccacacagcccagagcgccctgaaggtggccggcaagccagagggcaaggccacagacaagggcaagctggccgtgaagaacacaggcctgcagaggagcagcagtgatgctggccgggaccggctgagtgatgccaagaagccacccagcggcatcgcccggcccagcaccagcggcagctttggctacaagaagcccccaccagccaccggcacagccaccgtgatgcagacaggaggcagcgccaccctgagcaagatccagaagagcagcggcatccctgtgaagcctgtgaatggaaggaagaccagcctggatgtgagcaacagcgctgagcccggcttcctggcccctggggcccggagcaacatccagtaccgcagcctgcccaggcctgccaagagcagctccatgtctgtgactggaggccggggcggccccaggcctgtgagcagcagcattgaccccagcctgctgagcaccaagcagggcggcctgacccccagccggctgaaggagcccaccaaggtggccagcggccgcaccaccccagcccctgtgaaccagacagaccgggagaaggagaaggccaaggccaaggctgtggccctggacagcgacaacatcagcctgaagagcatcggcagccctgagagcacccccaagaaccaggccagccaccccacagccaccaagctggccgagctgccccccacccccctgcgggccacagccaagagctttgtgaagccacccagcctggccaacctggacaaggtgaacagcaacagcctggacctgcccagcagcagtgacaccacccacgccagcaaggtgcctgacctgcacgccaccagcagcgccagcggcggccccctgcccagctgcttcacccccagccctgcccccatcctgaacatcaacagcgccagcttcagccagggcctggagctgatgagcggcttctctgtgcccaaggagaccaggatgtaccccaagctgagcggcctgcaccgctccatggagagcctgcagatgcccatgagcctgcccagcgccttccccagcagcacccctgtgcccaccccaccagcccccccagctgcccccacagaggaggagacagaggagctgacctggagcggcagcccccgggccggccagctggacagcaaccagagggacaggaacaccctgcccaagaagggcctgcgctaccagctgcagagccaggaggagaccaaggagaggaggcacagccacaccatcggcggcctgcctgagagtgatgaccagagcgagctgcccagccccccagccctgcccatgagcctgagcgccaagggccagctgaccaacatcgtgcacggctctgtgctgagcctggccagcagcgccagcagcacctacagcagcgctgaggagaggatgcagagcgagcagatcaggaagctgcggcgggagctggagagcagccaggagaaggtggccaccctgaccagccagctgagcgccaatgccaacctggtggccgcctttgagcagagcctggtgaacatgaccagccggctgcggcacctggccgagacagctgaggagaaggacacagagctgctggacctgcgggagaccatcgacttcctgaagaagaagaacagcgaggcccaggccgtcatccagggcgccctgaatgccagcgagaccacccccaaggagctgcgcatcaagaggcagaacagcagtgacagcatcagcagcctgaacagcatcaccagccacagcagcatcggcagcagcaaggatgctgatgccaagaagaagaagaagaagtcctggctgcggagcagcttcaacaaggccttcagcatcaagaagggccccaagagcgccagcagctacagcgacatcgaggagatcgccaccccagacagcagcgcccccagcagccccaagctgcagcacggcagcacagaaacagccagccccagcatcaagagcagcaccagcagctctgtgggcacagatgtgacagagggccctgcccacccagccccccacaccaggctcttccacgccaatgaggaggaggagcctgagaagaaggaggtgtctgagctgcggtctgagctgtgggagaaggagatgaagctgacagacatccggctggaggccctgaacagcgcccaccagctggaccagctgcgggagaccatgcacaacatgcagctggaggtggacctgctgaaggcagaaaatgaccggctgaaggtggcccctggccccagcagcggcagcaccccaggccaggtgcccggcagcagcgccctgagcagcccccggcgcagcctgggcctggccctgacccacagctttggccccagcctggccgacacagacctgagccccatggatggcatcagcacctgtggccccaaggaggaggtgaccctgcgggtggtggtgaggatgccaccccagcacatcatcaagggggacctgaagcagcaggagttcttcctgggctgcagcaaggtgtctgggaaggtggactggaagatgctggatgaagctgtgttccaggtgttcaaggactacatcagcaagatggaccctgccagcaccctgggcctgagcacagagagcatccacggctacagcatcagccacgtgaagagggtgctggatgctgagcccccagagatgccaccctgcagaagaggagtgaacaacatctctgtgtccctgaagggcctgaaggagaagtgtgtggacagcctggtgtttgagaccctcatccccaagcccatgatgcagcactacatcagcctgctgctgaagcaccggcggctggtgctgagcggccccagcggcaccgggaagacctacctgaccaaccggctggccgagtacctggtggagaggagcggccgggaggtgacagagggcatcgtgtccaccttcaacatgcaccagcagagctgcaaggacctgcagctgtacctgagcaacctggccaaccagattgaccgggagaccggcattggagatgtgcccctggtgatcctgctggatgacctgtctgaggccggcagcatcagcgagctggtgaatggagccctgacctgcaagtaccacaagtgcccctacatcatcggcaccaccaaccagcctgtgaagatgacccccaaccacggcctgcacctgtccttcaggatgctgaccttcagcaacaacgtggagcccgccaacggcttcctggtgcgctacctgcggaggaagctggtggagagtgacagcgacatcaatgccaacaaggaggagctgctgcgggtgctggactgggtgcccaagctgtggtaccacctgcacaccttcctggagaagcacagcaccagtgacttcctgattggcccctgcttcttcctgagctgccccatcggcatcgaggacttccgcacctggttcatcgacctgtggaacaacagcatcatcccctacctgcaggagggcgccaaggatggcatcaaggtgcacggccagaaggccgcctgggaggaccctgtggagtgggtgcgggacaccctgccctggcccagcgcccagcaggaccagagcaagctgtaccacctgcccccacccaccgtgggcccccacagcatcgccagccccccagaggacagaacagtgaaggacagcacccccagcagcctggacagcgaccccctgatggccatgctgctgaagctgcaggaggccgccaactacatcgagagcccagaccgggagaccatcctggaccccaacctgcaggccaccctgtag

SEQ ID NO: 161672 - DNA, 783 bp, synthetic construct
  misc_feature 1..783: note = Description of Artificial Sequence: Synthetic coding sequence
  source 1..783: mol_type = other DNA
atgcaccagcagagctgcaaggacctgcagctgtacctgagcaacctggccaaccagattgaccgggagaccggcattggagatgtgcccctggtgatcctgctggatgacctgtctgaggccggcagcatcagcgagctggtgaatggagccctgacctgcaagtaccacaagtgcccctacatcatcggcaccaccaaccagcctgtgaagatgacccccaaccacggcctgcacctgtccttcagcaggatgctgaccttcagcaacaacgtggagcccgccaacggcttcctggtgcgctacctgcggaggaagctggtggagagtgacagcgacatcaatgccaacaaggaggagctgctgcgggtgctggactgggtgcccaagctgtggtaccacctgcacaccttcctggagaagcacagcaccagtgacttcctgattggcagcccctgcttcttcctgagctgccccatcggcatcgaggacttccgcacctggttcatcgacctgtggaacaacagcatcatcccctacctgcaggagggcgccaaggatggcatcaaggtgcacggccagaaggccgcctgggaggaccctgtggagtgggtgcgggacaccctgccctggcccagcgcccagcaggatgacagcacccccagcagcctggacagcgaccccctgatggccatgctgctgaagctgcaggaggccgccaactacatcgagagcccagaccgggagaccatcctggaccccaacctgcaggccaccctgtag

SEQ ID NO: 161673 - DNA, 2193 bp, synthetic construct
  misc_feature 1..2193: note = Description of Artificial Sequence: Synthetic coding sequence
  source 1..2193: mol_type = other DNA
atggagcccggcaccagcaagtggaggcgggagaggcctgagagctgtgatgacagcagcaaaggaggagagctgaagaagcccatcagcctgggccaccctggcagcctgaagaagggcaagaccccacctgtggccgtgaccagccccatcacccacacagcccagagcgccctgaaggtggccggcaagccagagggcaaggccacagacaagggcaagctggccgtgaagaacacaggcctgcagaggagcagcagtgatgctggccgggaccggctgagtgatgccaagaagccacccagcggcatcgcccggcccagcaccagcggcagctttggctacaagaagcccccaccagccaccggcacagccaccgtgatgcagacaggaggcagcgccaccctgagcaagatccagaagagcagcggcatccctgtgaagcctgtgaatggaaggaagaccagcctggatgtgagcaacagcgctgagcccggcttcctggcccctggggcccggagcaacatccagtaccgcagcctgcccaggcctgccaagagcagctccatgtctgtgactggaggccggggcggccccaggcctgtgagcagcagcattgaccccagcctgctgagcaccaagcagggcggcctgacccccagccggctgaaggagcccaccaaggtggccagcggccgcaccaccccagcccctgtgaaccagacagaccgggagaaggagaaggccaaggccaaggctgtggccctggacagcgacaacatcagcctgaagagcatcggcagccctgagagcacccccaagaaccaggccagccaccccacagccaccaagctggccgagctgccccccacccccctgcgggccacagccaagagctttgtgaagccacccagcctggccaacctggacaaggtgaacagcaacagcctggacctgcccagcagcagtgacaccacccacgccagcaaggtgcctgacctgcacgccaccagcagcgccagcggcggccccctgcccagctgcttcacccccagccctgcccccatcctgaacatcaacagcgccagcttcagccagggcctggagctgatgagcggcttctctgtgcccaaggagaccaggatgtaccccaagctgagcggcctgcaccgctccatggagagcctgcagatgcccatgagcctgcccagcgccttccccagcagcacccctgtgcccaccccaccagcccccccagctgcccccacagaggaggagacagaggagctgacctggagcggcagcccccgggccggccagctggacagcaaccagagggacaggaacaccctgcccaagaagggcctgcgctaccagctgcagagccaggaggagaccaaggagaggaggcacagccacaccatcggcggcctgcctgagagtgatgaccagagcgagctgcccagccccccagccctgcccatgagcctgagcgccaagggccagctgaccaacatcgtgagccccacagctgccaccaccccccgcatcaccaggagcaacagcatccccacccatgaggccgcctttgagctgtacagcggcagccagatgggcagcaccctgagcctggccgagcggcccaagggcatgatccgcagcggcagcttccgggaccccacagatgatgtgcacggctctgtgctgagcctggccagcagcgccagcagcacctacagcagccagatcaggaagctgcggcgggagctggagagcagccaggagaaggtggccaccctgaccagccagctgagcgccaatgccaacctggtggccgcctttgagcagagcctggtgaacatgaccagccggctgcggcacctggccgagacagctgaggagaagatggagttccgcagctgccaccctggctggagcgccctggcccgctcctggctgacagccaacagcgccagccaggacacagagctgctggacctgcgggagaccatcgacttcctgaagaagaagaacagcgaggcccaggccgtcatccagggcgccctgaatgccagcgagaccacccccaaggagctgcgcatcaagaggcagaacagcagtgacagcatcagcagcctgaacagcatcaccagccacagcagcatcggcagcagcaaggatgctgatgcctag

SEQ ID NO: 161674 - DNA, 4452 bp, synthetic construct
  misc_feature 1..4452: note = Description of Artificial Sequence: Synthetic coding sequence
  source 1..4452: mol_type = other DNA
atgctgcacctgcccctgcccaggagcggccgcacagtgaacttccccaggtcctgggatgagagcagcagcatcagcagcggcctgagtgatgccagtgacaacctgagcagcgaggagttcaatgccagcagcagcctgaacagcctgcccagcacccccacagccagcagaagaaacagcaccatcgtgctgaggacagattctgagaagaggagcctggccgagagcggcctgtcctggttcagcgagagcgaggagaaggcccccaagaagctggagtatgattctggcagcctgaagatggagcccggcaccagcaagtggaggcgggagaggcctgagagctgtgatgacagcagcaagggcggggagctgaagaagcccatcagcctgggccaccctggcagcctgaagaagggcaagaccccacctgtggccgtgaccagccccatcacccacacagcccagagcgccctgaaggtggccggcaagccagagggcaaggccacagacaagggcaagctggccgtgaagaacacaggcctgcagaggagcagcagtgatgctggccgggaccggctgagtgatgccaagaagcccccatctggaattgcccggcccagcaccagcggcagctttggctacaagaagcccccaccagccactggaacagccaccgtgatgcagacaggaggcagcgccaccctgagcaagatccagaagagcagcggcatccctgtgaagcctgtgaatggaaggaagaccagcctggatgtgagcaacagcgctgagcccggcttcctggcccctggggcccggagcaacatccagtaccgcagcctgcccaggcctgccaagagcagctccatgtctgtgactggaggccggggcggccccaggcctgtgagcagcagcattgaccccagcctgctgagcaccaagcagggcggcctgacccccagccggctgaaggagcccaccaaggtggccagcggccgcaccaccccagcccctgtgaaccagacagaccgggagaaggagaaggccaaggccaaggctgtggccctggacagcgacaacatcagcctgaagagcatcggcagccctgagagcacccccaagaaccaggccagccaccccacagccaccaagctggccgagctgccccccacccccctgcgggccacagccaagagctttgtgaagccacccagcctggccaacctggacaaggtgaacagcaacagcctggacctgcccagcagcagtgacaccacccacgccagcaaggtgcctgacctgcacgccaccagcagcgccagcggcggccccctgcccagctgcttcacccccagccctgcccccatcctgaacatcaacagcgccagcttcagccagggcctggagctgatgagcggcttctctgtgcccaaggagaccaggatgtaccccaagctgagcggcctgcaccgctccatggagagcctgcagatgcccatgagcctgcccagcgccttccccagcagcacccctgtgcccaccccaccagcccctcctgctgcccccacagaggaggagacagaggagctgacctggagcggcagccccagggctggccagctggacagcaaccagagggacaggaacaccctgcccaagaagggcctgcgctaccagctgcagagccaggaggagaccaaggagcggcggcacagccacaccatcggcggcctgcctgagagtgatgaccagagcgagctgcccagccccccagccctgcccatgagcctgagcgccaagggccagctgaccaacatcgtgagccccacagctgccaccaccccccgcatcaccaggagcaacagcatccccacccatgaagctgcctttgagctgtacagcggcagccagatgggcagcaccctgagcctggccgagcggcccaagggcatgatccgcagcggcagcttccgggaccccacagatgatgtgcacggctctgtgctgagcctggccagcagcgccagcagcacctacagcagcgctgaggagaggatgcagagcgagcagatcaggaagctgcggcgggagctggagagcagccaggagaaggtggccaccctgaccagccagctgagcgccaatgccaacctggtggccgcctttgagcagagcctggtgaacatgaccagccggctgcggcacctggccgagacagctgaggagaaggacacagagctgctggacctgcgggagaccatcgacttcctgaagaagaagaacagcgaggcccaggccgtcatccagggcgccctgaatgccagcgagaccacccccaaggagctgcgcatcaagaggcagaacagcagtgacagcatcagcagcctgaacagcatcaccagccacagcagcatcggcagcagcaaggatgctgatgccaagaagaagaagaagaagtcctggctgcggagcagcttcaacaaggccttcagcatcaagaagggccccaagagcgccagcagctacagcgacatcgaggagatcgccaccccagacagcagcgcccccagcagccccaagctgcagcacggcagcacagaaacagccagccccagcatcaagagcagcaccagcagctctgtgggcacagatgtgacagagggccctgcccacccagccccccacaccaggctcttccacgccaatgaggaggaggagcctgagaagaaggaggtgtctgagctgcggtctgagctgtgggagaaggagatgaagctgacagacatccggctggaggccctgaacagcgcccaccagctggaccagctgcgggagaccatgcacaacatgcagctggaggtggacctgctgaaggcagaaaatgaccggctgaaggtggcccctggccccagcagcggcagcaccccaggccaggtgcccggcagcagcgccctgagcagcccccggcgcagcctgggcctggccctgacccacagctttggccccagcctggccgacacagacctgagccccatggatggcatcagcacctgtggccccaaggaggaggtgaccctgcgggtggtggtgaggatgccaccccagcacatcatcaagggggacctgaagcagcaggagttcttcctgggctgcagcaaggtgtctgggaaggtggactggaagatgctggatgaagctgtgttccaggtgttcaaggactacatcagcaagatggaccctgccagcaccctgggcctgagcacagagagcatccacggctacagcatcagccacgtgaagagggtgctggatgctgagcccccagagatgccaccctgcagaagaggagtgaacaacatctctgtgtccctgaagggcctgaaggagaagtgtgtggacagcctggtgtttgagaccctcatccccaagcccatgatgcagcactacatcagcctgctgctgaagcaccggcggctggtgctgagcggccccagcggcaccgggaagacctacctgaccaaccggctggccgagtacctggtggagaggagcggccgggaggtgacagagggcatcgtgtccaccttcaacatgcaccagcagagctgcaaggacctgcagctgtacctgagcaacctggccaaccagattgaccgggagaccggcattggagatgtgcccctggtgatcctgctggatgacctgtctgaggccggcagcatcagcgagctggtgaatggagccctgacctgcaagtaccacaagtgcccctacatcatcggcaccaccaaccagcctgtgaagatgacccccaaccacggcctgcacctgtccttcaggatgctgaccttcagcaacaacgtggagcccgccaacggcttcctggtgcgctacctgcggaggaagctggtggagagtgacagcgacatcaatgccaacaaggaggagctgctgcgggtgctggactgggtgcccaagctgtggtaccacctgcacaccttcctggagaagcacagcaccagtgacttcctgattggcccctgcttcttcctgagctgccccatcggcatcgaggacttccgcacctggttcatcgacctgtggaacaacagcatcatcccctacctgcaggagggcgccaaggatggcatcaaggtgcacggccagaaggccgcctgggaggaccctgtggagtgggtgcgggacaccctgccctggcccagcgcccagcaggaccagagcaagctgtaccacctgcccccacccaccgtgggcccccacagcatcgccagccccccagaggacagaacagtgaaggacagcacccccagcagcctggacagcgaccccctgatggccatgctgctgaagctgcaggaggccgccaactacatcgagagcccagaccgggagaccatcctggaccccaacctgcaggccaccctgtag

SEQ ID NO: 161675 - DNA, 4482 bp, synthetic construct
  misc_feature 1..4482: note = Description of Artificial Sequence: Synthetic coding sequence
  source 1..4482: mol_type = other DNA
atgctgtggcccaggaacctgacctcctgggatgacagcagctctgtgagcagcggcatcagtgacaccatcgacaacctgagcacagatgacatcaacaccagcagcagcatcagcagctatgccaacaccccagccagcagcaggaagaacctggatgtgcagacagatgctgagaagcacagccaggtggagaggaacagcctgtggagcggagatgatgtgaagaagagtgatggcggcagtgacagcggcatcaagatggagcccggcagcaagtggaggaggaaccccagtgatgtgtctgatgaaagtgacaagagcaccagcggcaagaagaaccctgtgatcagccagacaggctcctggaggcggggcatgacagcccaggtgggcatcaccatgcccaggaccaagcccagcgccccagctggggccctgaagaccccaggcaccgggaagacagatgatgccaaggtgtctgagaagggccgcctgagccccaaggccagccaggtgaagaggagccccagtgatgctggccgcagcagtggagatgagagcaagaagcccctgcccagcagcagcaggacccccacagccaatgccaacagctttggcttcaagaagcagagcggcagcgctgctggcctggccatgatcacagccagcggcgtgacagtgaccagccgcagcgccaccctgggcaagatccccaagagcagcgccctggtgagccgctctgctggcaggaagagctccatggatggagcccagaaccaggatgatggctacctggccctgagcagcaggaccaacctgcagtaccgcagcctgccccggcccagcaagagcaacagcagaaatggagctggcaacagaagcagcaccagcagcattgacagcaacatcagcagcaagtctgctggcctgcctgtgcccaagctgcgggagcccagcaagacagccctgggcagcagcctgcccggcctggtgaaccagacagacaaggagaagggcatcagcagtgacaatgaatctgtggccagctgcaacagcgtgaaggtgaacccagctgcccagcctgtgagcagccctgcccagaccagcctgcagcccggggccaagtacccagatgtggccagccccaccctgcggcggctgtttggaggcaagcccaccaagcaggtgcccatcgccacagctgagaacatgaagaacagcgtggtgatcagcaacccccacgccaccatgacccagcagggcaacctggacagccccagcggcagcggcgtgctgagcagcggcagcagcagccccctgtacagcaagaatgtggacctgaaccagagccccctggccagcagccccagcagcgcccacagcgcccccagcaacagcctgacctggggcaccaatgccagcagcagcagcgctgtgtccaaggatggcctgggcttccagagcgtgagcagcctgcacaccagctgtgagagcattgacatcagcctgagcagcggcggcgtgcccagccacaacagcagcacaggcctgattgccagcagcaaggatgacagcctgaccccatttgtgaggaccaacagcgtgaagaccaccctgtctgagagtgacccccacctggacaggaacaccctgcccaagaagggcctgcgctacacccccaccagccagctgcggacccaggaggatgccaaggagtggctgcggagccacagcgctgggggcctgcaggacacagctgccaacagccccttcagcagcggcagctctgtgaccagccccagcggcacccgcttcaacttcagccagctggccagccccaccaccgtgacccagatgagcctgagcaaccccaccatgctgcggacccacagcctgagcaatgctgatggccagtatgacccctacacagacagccgcttcaggaacagctccatgagcctggatgagaagagcaggaccatgagccgcagcggcagcttcagagatggctttgaggaggtgcacggcagcagcctgagcctggtgagcagcaccagctctgtgtacagcaccccagaggagaagtgccagagcgagatcaggaagctgcggcgggagctggatgccagccaggagaaggtgtctgccctgaccacccagctgacagccaatgcccacctggtggccgcctttgagcagagcctgggcaacatgaccatccggctgcagagcctgaccatgacagctgagcagaaggacagcgagctgaatgagctgaggaagaccatcgagctgctgaagaagcagaatgctgctgcccaggccgccatcaatggagtcatcaacaccccagagctgaactgcaagggaaatggaacagcccagagcgctgacctgcgcatccggcggcagcacagcagtgacagcgtgagcagcatcaacagcgccaccagccacagctctgtgggcagcaacattgaaagtgacagcaagaagaagaagaggaagaactggctgcggagcagcttcaagcaggccttcggcaagaagaagagccccaagagcgccagcagccacagcgacatcgaggagatgacagacagcagcctgcccagcagccccaagctgccccacaacggcagcacaggcagcacccccctgctgaggaacagccacagcaacagcctcatcagcgagtgcatggacagcgaggccgagaccgtgatgcagctgagaaatgagctgcgggacaaggagatgaagctgacagacatccggctggaggccctgagcagcgcccaccagctggaccagctgcgggaggccatgaacaggatgcagagcgagattgagaagctgaaggcagaaaatgaccggctgaagtctgagagccagggcagcggctgcagccgggcccccagccaggtgtccatcagcgccagcccccggcagagcatgggcctgagccagcacagcctgaacctgacagagagcaccagcctggacatgctgctggatgacacaggagaatgttctgccaggaaggagggcggcagacatgtgaagatcgtggtgtccttccaggaggagatgaagtggaaggaggacagccggccccacctgttcctgattggctgcatcggcgtgtctgggaagaccaagtgggatgtgctggatggagtggtgcggcggctcttcaaggagtacatcatccacgtggaccctgtgtcccagctgggcctgaacagcgacagcgtgctgggctacagcatcggggagatcaagaggagcaacaccagcgagaccccagagctgctgccctgtggctacctggtgggggagaacaccaccatctctgtgacagtgaagggcctggccgagaacagcctggacagcctggtgtttgagagcctcatccccaagcccatcctgcagcgctacgtgtccctgctgattgagcaccggcgcatcatcctgagcggccccagcggcaccgggaagacctacctggccaaccggctgtctgagtacatcgtgctgcgggagggccgggagctgacagatggagtcatcgccaccttcaacgtggaccacaagagcagcaaggagctgcggcagtacctgagcaacctggccgaccagtgcaacagtgaaaataatgctgtggacatgcccctggtgatcatcctggacaacctgcaccacgtgagcagcctgggggagatcttcaacggcctgctgaactgcaagtaccacaagtgcccctacatcatcggcaccatgaaccaggccaccagcagcacccccaacctgcagctgcaccacaacttccgctgggtgctgtgtgccaaccacacagagcctgtgaagggcttcctgggccgcttcctgcggaggaagctgatggagacagagatcagcggccgggtgaggaacatggagctggtgaagatcatcgactggatccccaaggtgtggcaccacctgaaccgcttcctggaggcccacagcagcagtgatgtgaccatcggccccaggctcttcctgagctgccccattgatgtggatggcagccgggtgtggttcacagacctgtggaactacagcatcatcccctacctgctggaggccgtgcgggagggcctgcagctgtatggccggcgggccccctgggaggaccctgccaagtgggtgatggacacctacccctgggccgccagcccccagcagcacgagtggccacccctgctgcagctgcggccagaagatgtgggctttgatggctacagcatgccccgggagggcagcaccagcaagcagatgcccccatctgatgctgagggggaccccctgatgaacatgctgatgaggctgcaggaggccgccaactacagcagcccccagagctatgacagcgacagcaacagcaacagccaccatgatgacatcctggacagcagcctggagagcaccctgtag

SEQ ID NO: 161676 - DNA, 7290 bp, synthetic construct
  misc_feature 1..7290: note = Description of Artificial Sequence: Synthetic coding sequence
  source 1..7290: mol_type = other DNA
atgcctgccatcctggtggccagcaagatgaagagcggcctgcccaagcctgtgcacagcgctgcccccatcctgcacgtgcccccagcccgggccggcccccagccctgctacctgaagctgggcagcaaggtggaggtgtccaagaccacctaccccagccagatccccctgaagagccaggtgctgcagggcctgcaggagcctgctggggagggcctgcccctgaggaagagcggctctgtggagaatggatttgacacccagatctacacagactgggccaaccactacctggccaagagcggccacaagaggctcatccgggacctgcagcaggatgtgacagatggagtgctgctggcccagatcatccaggtggtggccaatgagaagattgaggacatcaatggctgccccaagaacagaagccagatgattgagaacattgatgcctgcctgaacttcctggccgccaagggcatcaacatccagggcctgtctgctgaggagatcagaaatggaaacctgaaggccatcctgggcctcttcttcagcctgagccgctacaagcagcagcagcagcagccccagaagcagcacctgagcagccccctgcccccagctgtgtcccaggtggccggggcccccagccagtgccaggccggcaccccccagcagcaggtgcctgtgaccccccaggccccctgccagccccaccagcctgccccccaccagcagagcaaggcccaggccgagatgcagagccggctgcccggccccacagcccgggtgtctgctgctggcagcgaggccaagacccggggcggcagcaccacagccaacaacagaagaagccagagcttcaacaactatgacaagagcaagcctgtgaccagccccccacctccacccagcagccatgagaaggagcccctggccagcagcgccagcagccaccctggcatgtctgacaatgccccagccagcctggagagcggcagcagcagcacccccaccaactgcagcaccagcagcgccatcccccagcctggagctgccaccaagccctggaggagcaagagcctgtctgtgaagcacagcgccaccgtgtccatgctgtctgtgaagcccccaggccctgaggccccccggcccaccccagaggccatgaagccagcccccaacaaccagaagtccatgctggagaagctgaagctgttcaacagcaaaggaggcagcaaggccggggagggccctggcagccgggacaccagctgtgagcggctggagaccctgcccagctttgaggagagcgaggagctggaggccgccagcaggatgctgaccaccgtgggccctgccagcagcagccccaagatcgccctgaagggcatcgcccagaggaccttcagccgggccctgaccaacaagaagagcagcctgaagggaaatgagaaggagaaggagaagcagcagcgggagaaggacaaggagaagagcaaggacctggccaagagggcctctgtgacagagcggctggacctgaaggaggagcccaaggaggaccccagcggggctgctgtgcctgagatgcccaagaagagcagcaagatcgccagcttcatccccaagggcggcaagctgaacagcgccaagaaggagcccatggcccccagccacagcggcatccccaagccaggcatgaagtccatgcctgggaagagccccagcgccccagcccccagcaaggagggggagaggagccgcagcggcaagctgagcagcggcctgccccagcagaagccccagctggatggccgccacagcagcagcagcagcagcctggccagcagcgagggcaagggccctgggggcaccaccctgaaccacagcatcagcagccagacagtgtctggctctgtgggcaccacccagaccaccggcagcaacacagtgtctgtgcagctgccccagccccagcagcagtacaaccaccccaacacagccaccgtggcccccttcctgtaccgcagccagacagacacagagggcaatgtgacagctgagagcagcagcactggagtgtctgtggagcccagccacttcaccaagacaggccagcctgccctggaggagctgactggagaagatcctgaggcccggcggctgaggacagtgaagaacattgctgacctgcggcagaacctggaggagaccatgagcagcctgcggggcacccaggtgacccacagcaccctggagaccacctttgacaccaacgtgaccacagagatgagcggccgcagcatcctgagcctgaccggccggcccacccccctgtcctggaggctgggccagagcagcccccggctgcaggccggagatgcccccagcatgggaaatggctacccaccccgggccaatgccagccgcttcatcaacacagagagcggccgctacgtgtacagcgcccccctgcggcggcagctggccagccggggcagctctgtgtgccacgtggatgtgtctgacaaggctggagatgagatggacctggagggcatctccatggatgcccctggctacatgtctgatggagatgtgctgagcaagaacatcagaacagatgacatcaccagcggctacatgacagatggcggcctgggcctgtacacccggcggctgaaccggctgcctgatggcatggctgtggtgcgggagaccctgcagaggaacaccagcctgggcctgggagatgctgacagctgggatgacagcagctctgtgagcagcggcatcagtgacaccatcgacaacctgagcacagatgacatcaacaccagcagcagcatcagcagctatgccaacaccccagccagcagcaggaagaacctggatgtgcagacagatgctgagaagcacagccaggtggagaggaacagcctgtggagcggagatgatgtgaagaagagtgatggcggcagtgacagcggcatcaagatggagcccggcagcaagtggaggaggaaccccagtgatgtgtctgatgaaagtgacaagagcaccagcggcaagaagaaccctgtgatcagccagacaggctcctggaggcggggcatgacagcccaggtgggcatcaccatgcccaggaccaagcccagcgccccagctggggccctgaagaccccaggcaccgggaagacagatgatgccaaggtgtctgagaagggccgcctgagccccaaggccagccaggtgaagaggagccccagtgatgctggccgcagcagtggagatgagagcaagaagcccctgcccagcagcagcaggacccccacagccaatgccaacagctttggcttcaagaagcagagcggcagcgctgctggcctggccatgatcacagccagcggcgtgacagtgaccagccgcagcgccaccctgggcaagatccccaagagcagcgccctggtgagccgctctgctggcaggaagagctccatggatggagcccagaaccaggatgatggctacctggccctgagcagcaggaccaacctgcagtaccgcagcctgccccggcccagcaagagcaacagcagaaatggagctggcaacagaagcagcaccagcagcattgacagcaacatcagcagcaagtctgctggcctgcctgtgcccaagctgcgggagcccagcaagacagccctgggcagcagcctgcccggcctggtgaaccagacagacaaggagaagggcatcagcagtgacaatgaatctgtggccagctgcaacagcgtgaaggtgaacccagctgcccagcctgtgagcagccctgcccagaccagcctgcagcccggggccaagtacccagatgtggccagccccaccctgcggcggctgtttggaggcaagcccaccaagcaggtgcccatcgccacagctgagaacatgaagaacagcgtggtgatcagcaacccccacgccaccatgacccagcagggcaacctggacagccccagcggcagcggcgtgctgagcagcggcagcagcagccccctgtacagcaagaatgtggacctgaaccagagccccctggccagcagccccagcagcgcccacagcgcccccagcaacagcctgacctggggcaccaatgccagcagcagcagcgctgtgtccaaggatggcctgggcttccagagcgtgagcagcctgcacaccagctgtgagagcattgacatcagcctgagcagcggcggcgtgcccagccacaacagcagcacaggcctgattgccagcagcaaggatgacagcctgaccccatttgtgaggaccaacagcgtgaagaccaccctgtctgagagccccctgagcagccctgctgccagccccaagttctgccgcagcaccctgcccaggaagcaggacagcgacccccacctggacaggaacaccctgcccaagaagggcctgcgctacacccccaccagccagctgcggacccaggaggatgccaaggagtggctgcggagccacagcgctgggggcctgcaggacacagctgccaacagccccttcagcagcggcagctctgtgaccagccccagcggcacccgcttcaacttcagccagctggccagccccaccaccgtgacccagatgagcctgagcaaccccaccatgctgcggacccacagcctgagcaatgctgatggccagtatgacccctacacagacagccgcttcaggaacagctccatgagcctggatgagaagagcaggaccatgagccgcagcggcagcttcagagatggctttgaggaggtgcacggcagcagcctgagcctggtgagcagcaccagctctgtgtacagcaccccagaggagaagtgccagagcgagatcaggaagctgcggcgggagctggatgccagccaggagaaggtgtctgccctgaccacccagctgacagccaatgcccacctggtggccgcctttgagcagagcctgggcaacatgaccatccggctgcagagcctgaccatgacagctgagcagaaggacagcgagctgaatgagctgaggaagaccatcgagctgctgaagaagcagaatgctgctgcccaggccgccatcaatggagtcatcaacaccccagagctgaactgcaagggaaatggaacagcccagagcgctgacctgcgcatccggcggcagcacagcagtgacagcgtgagcagcatcaacagcgccaccagccacagctctgtgggcagcaacattgaaagtgacagcaagaagaagaagaggaagaactggctgcggagcagcttcaagcaggccttcggcaagaagaagagccccaagagcgccagcagccacagcgacatcgaggagatgacagacagcagcctgcccagcagccccaagctgccccacaacggcagcacaggcagcacccccctgctgaggaacagccacagcaacagcctcatcagcgagtgcatggacagcgaggccgagaccgtgatgcagctgagaaatgagctgcgggacaaggagatgaagctgacagacatccggctggaggccctgagcagcgcccaccagctggaccagctgcgggaggccatgaacaggatgcagagcgagattgagaagctgaaggcagaaaatgaccggctgaagtctgagagccagggcagcggctgcagccgggcccccagccaggtgtccatcagcgccagcccccggcagagcatgggcctgagccagcacagcctgaacctgacagagagcaccagcctggacatgctgctggatgacacaggagaatgttctgccaggaaggagggcggcagacatgtgaagatcgtggtgtccttccaggaggagatgaagtggaaggaggacagccggccccacctgttcctgattggctgcatcggcgtgtctgggaagaccaagtgggatgtgctggatggagtggtgcggcggctcttcaaggagtacatcatccacgtggaccctgtgtcccagctgggcctgaacagcgacagcgtgctgggctacagcatcggggagatcaagaggagcaacaccagcgagaccccagagctgctgccctgtggctacctggtgggggagaacaccaccatctctgtgacagtgaagggcctggccgagaacagcctggacagcctggtgtttgagagcctcatccccaagcccatcctgcagcgctacgtgtccctgctgattgagcaccggcgcatcatcctgagcggccccagcggcaccgggaagacctacctggccaaccggctgtctgagtacatcgtgctgcgggagggccgggagctgacagatggagtcatcgccaccttcaacgtggaccacaagagcagcaaggagctgcggcagtacctgagcaacctggccgaccagtgcaacagtgaaaataatgctgtggacatgcccctggtgatcatcctggacaacctgcaccacgtgagcagcctgggggagatcttcaacggcctgctgaactgcaagtaccacaagtgcccctacatcatcggcaccatgaaccaggccaccagcagcacccccaacctgcagctgcaccacaacttccgctgggtgctgtgtgccaaccacacagagcctgtgaagggcttcctgggccgcttcctgcggaggaagctgatggagacagagatcagcggccgggtgaggaacatggagctggtgaagatcatcgactggatccccaaggtgtggcaccacctgaaccgcttcctggaggcccacagcagcagtgatgtgaccatcggccccaggctcttcctgagctgccccattgatgtggatggcagccgggtgtggttcacagacctgtggaactacagcatcatcccctacctgctggaggccgtgcgggagggcctgcagctgtatggccggcgggccccctgggaggaccctgccaagtgggtgatggacacctacccctgggccgccagcccccagcagcacgagtggccacccctgctgcagctgcggccagaagatgtgggctttgatggctacagcatgccccgggagggcagcaccagcaagcagatgcccccatctgatgctgagggggaccccctgatgaacatgctgatgaggctgcaggaggccgccaactacagcagcccccagagctatgacagcgacagcaacagcaacagccaccatgatgacatcctggacagcagcctggagagcaccctgtag

SEQ ID NO: 161677 - DNA, 7299 bp, synthetic construct
  misc_feature 1..7299: note = Description of Artificial Sequence: Synthetic coding sequence
  source 1..7299: mol_type = other DNA
atgcctgccatcctggtggccagcaagatgaagagcggcctgcccaagcctgtgcacagcgctgcccccatcctgcacgtgcccccagcccgggccggcccccagccctgctacctgaagctgggcagcaaggtggaggtgtccaagaccacctaccccagccagatccccctgaagagccaggtgctgcagggcctgcaggagcctgctggggagggcctgcccctgaggaagagcggctctgtggagaatggatttgacacccagatctacacagactgggccaaccactacctggccaagagcggccacaagaggctcatccgggacctgcagcaggatgtgacagatggagtgctgctggcccagatcatccaggtggtggccaatgagaagattgaggacatcaatggctgccccaagaacagaagccagatgattgagaacattgatgcctgcctgaacttcctggccgccaagggcatcaacatccagggcctgtctgctgaggagatcagaaatggaaacctgaaggccatcctgggcctcttcttcagcctgagccgctacaagcagcagcagcagcagccccagaagcagcacctgagcagccccctgcccccagctgtgtcccaggtggccggggcccccagccagtgccaggccggcaccccccagcagcaggtgcctgtgaccccccaggccccctgccagccccaccagcctgccccccaccagcagagcaaggcccaggccgagatgcagagccggctgcccggccccacagcccgggtgtctgctgctggcagcgaggccaagacccggggcggcagcaccacagccaacaacagaagaagccagagcttcaacaactatgacaagagcaagcctgtgaccagccccccacctccacccagcagccatgagaaggagcccctggccagcagcgccagcagccaccctggcatgtctgacaatgccccagccagcctggagagcggcagcagcagcacccccaccaactgcagcaccagcagcgccatcccccagcctggagctgccaccaagccctggaggagcaagagcctgtctgtgaagcacagcgccaccgtgtccatgctgtctgtgaagcccccaggccctgaggccccccggcccaccccagaggccatgaagccagcccccaacaaccagaagtccatgctggagaagctgaagctgttcaacagcaaaggaggcagcaaggccggggagggccctggcagccgggacaccagctgtgagcggctggagaccctgcccagctttgaggagagcgaggagctggaggccgccagcaggatgctgaccaccgtgggccctgccagcagcagccccaagatcgccctgaagggcatcgcccagaggaccttcagccgggccctgaccaacaagaagagcagcctgaagggaaatgagaaggagaaggagaagcagcagcgggagaaggacaaggagaagagcaaggacctggccaagagggcctctgtgacagagcggctggacctgaaggaggagcccaaggaggaccccagcggggctgctgtgcctgagatgcccaagaagagcagcaagatcgccagcttcatccccaagggcggcaagctgaacagcgccaagaaggagcccatggcccccagccacagcggcatccccaagccaggcatgaagtccatgcctgggaagagccccagcgccccagcccccagcaaggagggggagaggagccgcagcggcaagctgagcagcggcctgccccagcagaagccccagctggatggccgccacagcagcagcagcagcagcctggccagcagcgagggcaagggccctgggggcaccaccctgaaccacagcatcagcagccagacagtgtctggctctgtgggcaccacccagaccaccggcagcaacacagtgtctgtgcagctgccccagccccagcagcagtacaaccaccccaacacagccaccgtggcccccttcctgtaccgcagccagacagacacagagggcaatgtgacagctgagagcagcagcactggagtgtctgtggagcccagccacttcaccaagacaggccagcctgccctggaggagctgactggagaagatcctgaggcccggcggctgaggacagtgaagaacattgctgacctgcggcagaacctggaggagaccatgagcagcctgcggggcacccaggtgacccacagcaccctggagaccacctttgacaccaacgtgaccacagagatgagcggccgcagcatcctgagcctgaccggccggcccacccccctgtcctggaggctgggccagagcagcccccggctgcaggccggagatgcccccagcatgggaaatggctacccaccccgggccaatgccagccgcttcatcaacacagagagcggccgctacgtgtacagcgcccccctgcggcggcagctggccagccggggcagctctgtgtgccacgtggatgtgtctgacaaggctggagatgagatggacctggagggcatctccatggatgcccctggctacatgtctgatggagatgtgctgagcaagaacatcagaacagatgacatcaccagcggctacatgacagatggcggcctgggcctgtacacccggcggctgaaccggctgcctgatggcatggctgtggtgcgggagaccctgcagaggaacaccagcctgggcctgggagatgctgacagctgggatgacagcagctctgtgagcagcggcatcagtgacaccatcgacaacctgagcacagatgacatcaacaccagcagcagcatcagcagctatgccaacaccccagccagcagcaggaagaacctggatgtgcagacagatgctgagaagcacagccaggtggagaggaacagcctgtggagcggagatgatgtgaagaagagtgatggcggcagtgacagcggcatcaagatggagcccggcagcaagtggaggaggaaccccagtgatgtgtctgatgaaagtgacaagagcaccagcggcaagaagaaccctgtgatcagccagacaggctcctggaggcggggcatgacagcccaggtgggcatcaccatgcccaggaccaagcccagcgccccagctggggccctgaagaccccaggcaccgggaagacagatgatgccaaggtgtctgagaagggccgcctgagccccaaggccagccaggtgaagaggagccccagtgatgctggccgcagcagtggagatgagagcaagaagcccctgcccagcagcagcaggacccccacagccaatgccaacagctttggcttcaagaagcagagcggcagcgctgctggcctggccatgatcacagccagcggcgtgacagtgaccagccgcagcgccaccctgggcaagatccccaagagcagcgccctggtgagccgctctgctggcaggaagagctccatggatggagcccagaaccaggatgatggctacctggccctgagcagcaggaccaacctgcagtaccgcagcctgccccggcccagcaagagcaacagcagaaatggagctggcaacagaagcagcaccagcagcattgacagcaacatcagcagcaagtctgctggcctgcctgtgcccaagctgcgggagcccagcaagacagccctgggcagcagcctgcccggcctggtgaaccagacagacaaggagaagggcatcagcagtgacaatgaatctgtggccagctgcaacagcgtgaaggtgaacccagctgcccagcctgtgagcagccctgcccagaccagcctgcagcccggggccaagtacccagatgtggccagccccaccctgcggcggctgtttggaggcaagcccaccaagcaggtgcccatcgccacagctgagaacatgaagaacagcgtggtgatcagcaacccccacgccaccatgacccagcagggcaacctggacagccccagcggcagcggcgtgctgagcagcggcagcagcagccccctgtacagcaagaatgtggacctgaaccagagccccctggccagcagccccagcagcgcccacagcgcccccagcaacagcctgacctggggcaccaatgccagcagcagcagcgctgtgtccaaggatggcctgggcttccagagcgtgagcagcctgcacaccagctgtgagagcattgacatcagcctgagcagcggcggcgtgcccagccacaacagcagcacaggcctgattgccagcagcaaggatgacagcctgaccccatttgtgaggaccaacagcgtgaagaccaccctgtctgagagccccctgagcagccctgctgccagccccaagttctgccgcagcaccctgcccaggaagcaggacagcgacccccacctggacaggaacaccctgcccaagaagggcctgcgctacacccccaccagccagctgcggacccaggaggatgccaaggagtggctgcggagccacagcgctgggggcctgcaggacacagctgccaacagccccttcagcagcggcagctctgtgaccagccccagcggcacccgcttcaacttcagccagctggccagccccaccaccgtgacccagatgagcctgagcaaccccaccatgctgcggacccacagcctgagcaatgctgatggccagtatgacccctacacagacagccgcttcaggaacagctccatgagcctggatgagaagagcaggaccatgagccgcagcggcagcttcagagatggctttgaggaggtgcacggcagcagcctgagcctggtgagcagcaccagctctgtgtacagcaccccagaggagaagtgccagagcgagatcaggaagctgcggcgggagctggatgccagccaggagaaggtgtctgccctgaccacccagctgacagccaatgcccacctggtggccgcctttgagcagagcctgggcaacatgaccatccggctgcagagcctgaccatgacagctgagcagaaggacagcgagctgaatgagctgaggaagaccatcgagctgctgaagaagcagaatgctgctgcccaggccgccatcaatggagtcatcaacaccccagagctgaactgcaagggaaatggaacagcccagagcgctgacctgcgcatccggcggcagcacagcagtgacagcgtgagcagcatcaacagcgccaccagccacagctctgtgggcagcaacattgaaagtgacagcaagaagaagaagaggaagaactgggtgaatgagctgcggagcagcttcaagcaggccttcggcaagaagaagagccccaagagcgccagcagccacagcgacatcgaggagatgacagacagcagcctgcccagcagccccaagctgccccacaacggcagcacaggcagcacccccctgctgaggaacagccacagcaacagcctcatcagcgagtgcatggattctgaggccgagaccgtgatgcagctgagaaatgagctgcgggacaaggagatgaagctgacagacatccggctggaggccctgagcagcgcccaccagctggaccagctgcgggaggccatgaacaggatgcagagcgagattgagaagctgaaggccgagaatgaccggctgaagtctgagagccagggcagcggctgcagccgggcccccagccaggtgtccatcagcgccagcccccggcagagcatgggcctgagccagcacagcctgaacctgacagagagcaccagcctggacatgctgctggatgacaccggggagtgcagcgccaggaaggagggcggccgccacgtgaagatcgtggtgtccttccaggaggagatgaagtggaaggaggacagccggccccacctgttcctgattggctgcattggagtgtctgggaagaccaagtgggatgtgctggatggagtggtgagaagactcttcaaggagtacatcatccacgtggaccctgtgtcccagctgggcctgaacagcgacagcgtgctgggctacagcattggagagatcaagaggagcaacaccagcgagaccccagagctgctgccctgtggctacctggtgggggagaacaccaccatctctgtgacagtgaagggcctggccgagaacagcctggacagcctggtgtttgagagcctcatccccaagcccatcctgcagagatatgtgtccctgctgattgagcaccggcgcatcatcctgagcggccccagcggcaccgggaagacctacctggccaaccggctgtctgagtacatcgtgctgcgggagggccgggagctgacagatggagtgattgccaccttcaacgtggaccacaagagcagcaaggagctgcggcagtacctgagcaacctggccgaccagtgcaacagcgagaacaatgctgtggacatgcccctggtgatcatcctggacaacctgcaccacgtgagcagcctgggggagatcttcaacggcctgctgaactgcaagtaccacaagtgcccctacatcatcggcaccatgaaccaggccaccagcagcacccccaacctgcagctgcaccacaacttccgctgggtgctgtgtgccaaccacacagagcctgtgaagggcttcctgggccgcttcctgcggaggaagctgatggagacagagatcagcggccgggtgaggaacatggagctggtgaagatcatcgactggatccccaaggtgtggcaccacctgaaccgcttcctggaggcccacagcagcagtgatgtgaccatcggccccaggctcttcctgagctgccccattgatgtggatggcagccgggtgtggttcacagacctgtggaactacagcatcatcccctacctgctggaggccgtgcgggagggcctgcagctgtatggaagaagagccccctgggaggaccctgccaagtgggtgatggacacctacccctgggccgccagcccccagcagcacgagtggccacccctgctgcagctgcggccagaagatgtgggctttgatggctacagcatgccccgggagggcagcaccagcaagcagatgccacccagtgatgctgagggggaccccctgatgaacatgctgatgaggctgcaggaggccgccaactacagcagcccccagagctatgacagcgacagcaacagcaacagccaccatgatgacatcctggacagcagcctggagagcaccctgtag

SEQ ID NO: 161678 - DNA, 7467 bp, synthetic construct
  misc_feature 1..7467: note = Description of Artificial Sequence: Synthetic coding sequence
  source 1..7467: mol_type = other DNA
atgcctgccatcctggtggccagcaagatgaagagcggcctgcccaagcctgtgcacagcgctgcccccatcctgcacgtgcccccagcccgggccggcccccagccctgctacctgaagctgggcagcaaggtggaggtgtccaagaccacctaccccagccagatccccctgaagagccaggtgctgcagggcctgcaggagcctgctggggagggcctgcccctgaggaagagcggctctgtggagaatggatttgacacccagatctacacagactgggccaaccactacctggccaagagcggccacaagaggctcatccgggacctgcagcaggatgtgacagatggagtgctgctggcccagatcatccaggtggtggccaatgagaagattgaggacatcaatggctgccccaagaacagaagccagatgattgagaacattgatgcctgcctgaacttcctggccgccaagggcatcaacatccagggcctgtctgctgaggagatcagaaatggaaacctgaaggccatcctgggcctcttcttcagcctgagccgctacaagcagcagcagcagcagccccagaagcagcacctgagcagccccctgcccccagctgtgtcccaggtggccggggcccccagccagtgccaggccggcaccccccagcagcaggtgcctgtgaccccccaggccccctgccagccccaccagcctgccccccaccagcagagcaaggcccaggccgagatgcagagcagcgccagcagcaaggacagcagccagagcaagatcatccgcttcaccctgggccagaagaagatcagccggctgcccggccccacagcccgggtgtctgctgctggcagcgaggccaagacccggggcggcagcaccacagccaacaacagaagaagccagagcttcaacaactatgacaagagcaagcctgtgaccagccccccacctccacccagcagccatgagaaggagcccctggccagcagcgccagcagccaccctggcatgtctgacaatgccccagccagcctggagagcggcagcagcagcacccccaccaactgcagcaccagcagcgccatcccccagcccggggccgccaccaagccctggaggagcaagagcctgtctgtgaagcacagcgccaccgtgtccatgctgtctgtgaagcccccaggccctgaggccccccggcccaccccagaggccatgaagccagcccccaacaaccagaagtccatgctggagaagctgaagctgttcaacagcaagggcggcagcaaggccggggagggccctggcagccgggacaccagctgtgagcggctggagaccctgcccagctttgaggagagcgaggagctggaggccgccagcaggatgctgaccaccgtgggccctgccagcagcagccccaagatcgccctgaagggcatcgcccagaggaccttcagccgggccctgaccaacaagaagagcagcctgaagggaaatgagaaggagaaggagaagcagcagcgggagaaggacaaggagaagagcaaggacctggccaagagggcctctgtgacagagcggctggacctgaaggaggagcccaaggaggaccccagcggggctgctgtgcctgagatgcccaagaagagcagcaagatcgccagcttcatccccaagggcggcaagctgaacagcgccaagaaggagcccatggcccccagccacagcggcatccccaagccaggcatgaagtccatgcctgggaagagccccagcgccccagcccccagcaaggagggggagaggagccgcagcggcaagctgagcagcggcctgccccagcagaagccccagctggatggccgccacagcagcagcagcagcagcctggccagcagcgagggcaaaggacctgggggcaccaccctgaaccacagcatcagcagccagacagtgtctggctctgtgggcaccacccagaccaccggcagcaacacagtgtctgtgcagctgccccagccccagcagcagtacaaccaccccaacacagccaccgtggcccccttcctgtaccgcagccagacagacacagagggcaatgtgacagctgagagcagcagcactggagtgtctgtggagcccagccacttcaccaagacaggccagcctgccctggaggagctgaccggggaggaccctgaggcccggcggctgaggacagtgaagaacattgctgacctgcggcagaacctggaggagaccatgagcagcctgcggggcacccaggtgacccacagcaccctggagaccacctttgacaccaacgtgaccacagagatgagcggccgcagcatcctgagcctgaccggccggcccacccccctgtcctggaggctgggccagagcagcccccggctgcaggccggagatgcccccagcatgggaaatggctacccaccccgggccaatgccagccgcttcatcaacacagaaagtggccgctacgtgtacagcgcccccctgcggcggcagctggccagccggggcagctctgtgtgccacgtggatgtgtctgacaaggctggagatgagatggacctggagggcatctccatggatgcccctggctacatgtctgatggagatgtgctgagcaagaacatcagaacagatgacatcaccagcggctacatgacagatggcggcctgggcctgtacacccggcggctgaaccggctgcctgatggcatggctgtggtgcgggagaccctgcagaggaacaccagcctgggcctgggagatgctgacagctgggatgacagcagctctgtgagcagcggcatcagtgacaccatcgacaacctgagcacagatgacatcaacaccagcagcagcatcagcagctatgccaacaccccagccagcagcaggaagaacctggatgtgcagacagatgctgagaagcacagccaggtggagaggaacagcctgtggagcggagatgatgtgaagaagagtgatggcggcagtgacagcggcatcaagatggagcccggcagcaagtggaggaggaaccccagtgatgtgtctgatgaaagtgacaagagcaccagcggcaagaagaaccctgtgatcagccagacaggctcctggaggcggggcatgacagcccaggtgggcatcaccatgcccaggaccaagcccagcgccccagctggggccctgaagaccccaggcaccgggaagacagatgatgccaaggtgtctgagaagggccgcctgagccccaaggccagccaggtgaagaggagccccagtgatgctggccgcagcagtggagatgagagcaagaagcccctgcccagcagcagcaggacccccacagccaatgccaacagctttggcttcaagaagcagagcggcagcgctgctggcctggccatgatcacagccagcggcgtgacagtgaccagccgcagcgccaccctgggcaagatccccaagagcagcgccctggtgagccgctctgctggcaggaagagctccatggatggagcccagaaccaggatgatggctacctggccctgagcagcaggaccaacctgcagtaccgcagcctgccccggcccagcaagagcaacagcagaaatggagctggcaacagaagcagcaccagcagcattgacagcaacatcagcagcaagtctgctggcctgcctgtgcccaagctgcgggagcccagcaagacagccctgggcagcagcctgcccggcctggtgaaccagacagacaaggagaagggcatcagcagtgacaatgaatctgtggccagctgcaacagcgtgaaggtgaacccagctgcccagcctgtgagcagccctgcccagaccagcctgcagcccggggccaagtacccagatgtggccagccccaccctgcggcggctgtttggaggcaagcccaccaagcaggtgcccatcgccacagctgagaacatgaagaacagcgtggtgatcagcaacccccacgccaccatgacccagcagggcaacctggacagccccagcggcagcggcgtgctgagcagcggcagcagcagccccctgtacagcaagaatgtggacctgaaccagagccccctggccagcagccccagcagcgcccacagcgcccccagcaacagcctgacctggggcaccaatgccagcagcagcagcgctgtgtccaaggatggcctgggcttccagagcgtgagcagcctgcacaccagctgtgagagcattgacatcagcctgagcagtggaggagtgcccagccacaacagcagcacaggcctcatcgccagcagcaaggatgacagcctgaccccatttgtgaggaccaacagcgtgaagaccaccctgtctgagagccccctgagcagccctgctgccagccccaagttctgccgcagcaccctgcccaggaagcaggacagcgacccccacctggacaggaacaccctgcccaagaagggcctgcgctacacccccaccagccagctgcggacccaggaggatgccaaggagtggctgcggagccacagcgctgggggcctgcaggacacagctgccaacagccccttcagcagcggcagctctgtgaccagccccagcggcacccgcttcaacttcagccagctggccagccccaccaccgtgacccagatgagcctgagcaaccccaccatgctgcggacccacagcctgagcaatgctgatggccagtatgacccctacacagacagccgcttcaggaacagctccatgagcctggatgagaagagcaggaccatgagccgcagcggcagcttcagagatggctttgaggaggagagctgggagaagagctctgtggacaactttgtgtcccggctgcacagcagcctgcacttcagcctgcccctcttccaccacgcccgctatgagctggtgcacggcagcagcctgagcctggtgagcagcaccagctctgtgtacagcaccccagaggagaagtgccagagcgagatcaggaagctgcggcgggagctggatgccagccaggagaaggtgtctgccctgaccacccagctgacagccaatgcccacctggtggccgcctttgagcagagcctgggcaacatgaccatccggctgcagagcctgaccatgacagctgagcagaaggacagcgagctgaatgagctgaggaagaccatcgagctgctgaagaagcagaatgctgctgcccaggccgccatcaatggagtcatcaacaccccagagctgaactgcaagggaaatggaacagcccagagcgctgacctgcgcatccggcggcagcacagcagtgacagcgtgagcagcatcaacagcgccaccagccacagctctgtgggcagcaacattgaaagtgacagcaagaagaagaagaggaagaactgggtgaatgagctgcggagcagcttcaagcaggccttcggcaagaagaagagccccaagagcgccagcagccacagcgacatcgaggagatgacagacagcagcctgcccagcagccccaagctgccccacaacggcagcacaggcagcacccccctgctgaggaacagccacagcaacagcctcatcagcgagtgcatggattctgaggccgagaccgtgatgcagctgagaaatgagctgcgggacaaggagatgaagctgacagacatccggctggaggccctgagcagcgcccaccagctggaccagctgcgggaggccatgaacaggatgcagagcgagattgagaagctgaaggccgagaatgaccggctgaagtctgagagccagggcagcggctgcagccgggcccccagccaggtgtccatcagcgccagcccccggcagagcatgggcctgagccagcacagcctgaacctgacagagagcaccagcctggacatgctgctggatgacaccggggagtgcagcgccaggaaggagggcggccgccacgtgaagatcgtggtgtccttccaggaggagatgaagtggaaggaggacagccggccccacctgttcctgattggctgcattggagtgtctgggaagaccaagtgggatgtgctggatggagtggtgagaagactcttcaaggagtacatcatccacgtggaccctgtgtcccagctgggcctgaacagcgacagcgtgctgggctacagcattggagagatcaagaggagcaacaccagcgagaccccagagctgctgccctgtggctacctggtgggggagaacaccaccatctctgtgacagtgaagggcctggccgagaacagcctggacagcctggtgtttgagagcctcatccccaagcccatcctgcagagatatgtgtccctgctgattgagcaccggcgcatcatcctgagcggccccagcggcaccgggaagacctacctggccaaccggctgtctgagtacatcgtgctgcgggagggccgggagctgacagatggagtgattgccaccttcaacgtggaccacaagagcagcaaggagctgcggcagtacctgagcaacctggccgaccagtgcaacagcgagaacaatgctgtggacatgcccctggtgatcatcctggacaacctgcaccacgtgagcagcctgggggagatcttcaacggcctgctgaactgcaagtaccacaagtgcccctacatcatcggcaccatgaaccaggccaccagcagcacccccaacctgcagctgcaccacaacttccgctgggtgctgtgtgccaaccacacagagcctgtgaagggcttcctgggccgcttcctgcggaggaagctgatggagacagagatcagcggccgggtgaggaacatggagctggtgaagatcatcgactggatccccaaggtgtggcaccacctgaaccgcttcctggaggcccacagcagcagtgatgtgaccatcggccccaggctcttcctgagctgccccattgatgtggatggcagccgggtgtggttcacagacctgtggaactacagcatcatcccctacctgctggaggccgtgcgggagggcctgcagctgtatggaagaagagccccctgggaggaccctgccaagtgggtgatggacacctacccctgggccgccagcccccagcagcacgagtggccacccctgctgcagctgcggccagaagatgtgggctttgatggctacagcatgccccgggagggcagcaccagcaagcagatgccacccagtgatgctgagggggaccccctgatgaacatgctgatgaggctgcaggaggccgccaactacagcagcccccagagctatgacagcgacagcaacagcaacagccaccatgatgacatcctggacagcagcctggagagcaccctgtag

SEQ ID NO: 161679 - DNA, 7254 bp, synthetic construct
  misc_feature 1..7254: note = Description of Artificial Sequence: Synthetic coding sequence
  source 1..7254: mol_type = other DNA
atgtctgtgatgctgtggcgctgggagcagaacaacaccaccatgaagctgcagatctacacagactgggccaaccactacctggccaagagcggccacaagaggctcatccgggacctgcagcaggatgtgacagatggagtgctgctggcccagatcatccaggtggtggccaatgagaagattgaggacatcaatggctgccccaagaacagaagccagatgattgaaaatattgatgcctgcctgaacttcctggccgccaagggcatcaacatccagggcctgtctgctgaggagatcagaaatggaaacctgaaggccatcctgggcctcttcttcagcctgagccgctacaagcagcagcagcagcagccccagaagcagcacctgagcagccccctgcccccagctgtgtcccaggtggccggggcccccagccagtgccaggccggcaccccccagcagcaggtgcctgtgaccccccaggccccctgccagccccaccagcctgccccccaccagcagagcaaggcccaggccgagatgcagagcagcgccagcagcaaggacagcagccagagcaagatcatccgcttcaccctgggccagaagaagatcagccggctgcccggccccacagcccgggtgtctgctgctggcagcgaggccaagacccggggcggcagcaccacagccaacaacagaagaagccagagcttcaacaactatgacaagagcaagcctgtgaccagccccccacctccacccagcagccatgagaaggagcccctggccagcagcgccagcagccaccctggcatgtctgacaatgccccagccagcctggagagcggcagcagcagcacccccaccaactgcagcaccagcagcgccatcccccagcctggagctgccaccaagccctggaggagcaagagcctgtctgtgaagcacagcgccaccgtgtccatgctgtctgtgaagcccccaggccctgaggccccccggcccaccccagaggccatgaagccagcccccaacaaccagaagtccatgctggagaagctgaagctgttcaacagcaaaggaggcagcaaggccggggagggccctggcagccgggacaccagctgtgagcggctggagaccctgcccagctttgaggagagcgaggagctggaggccgccagcaggatgctgaccaccgtgggccctgccagcagcagccccaagatcgccctgaagggcatcgcccagaggaccttcagccgggccctgaccaacaagaagagcagcctgaagggaaatgagaaggagaaggagaagcagcagcgggagaaggacaaggagaagagcaaggacctggccaagagggcctctgtgacagagcggctggacctgaaggaggagcccaaggaggaccccagcggggctgctgtgcctgagatgcccaagaagagcagcaagatcgccagcttcatccccaagggcggcaagctgaacagcgccaagaaggagcccatggcccccagccacagcggcatccccaagccaggcatgaagtccatgcctgggaagagccccagcgccccagcccccagcaaggagggggagaggagccgcagcggcaagctgagcagcggcctgccccagcagaagccccagctggatggccgccacagcagcagcagcagcagcctggccagcagcgagggcaagggccctgggggcaccaccctgaaccacagcatcagcagccagacagtgtctggctctgtgggcaccacccagaccaccggcagcaacacagtgtctgtgcagctgccccagccccagcagcagtacaaccaccccaacacagccaccgtggcccccttcctgtaccgcagccagacagacacagagggcaatgtgacagctgagagcagcagcactggagtgtctgtggagcccagccacttcaccaagacaggccagcctgccctggaggagctgactggagaagatcctgaggcccggcggctgaggacagtgaagaacattgctgacctgcggcagaacctggaggagaccatgagcagcctgcggggcacccaggtgacccacagcaccctggagaccacctttgacaccaacgtgaccacagagatgagcggccgcagcatcctgagcctgaccggccggcccacccccctgtcctggaggctgggccagagcagcccccggctgcaggccggagatgcccccagcatgggaaatggctacccaccccgggccaatgccagccgcttcatcaacacagagagcggccgctacgtgtacagcgcccccctgcggcggcagctggccagccggggcagctctgtgtgccacgtggatgtgtctgacaaggctggagatgagatggacctggagggcatctccatggatgcccctggctacatgtctgatggagatgtgctgagcaagaacatcagaacagatgacatcaccagcggctacatgacagatggcggcctgggcctgtacacccggcggctgaaccggctgcctgatggcatggctgtggtgcgggagaccctgcagaggaacaccagcctgggcctgggagatgctgacagctgggatgacagcagctctgtgagcagcggcatcagtgacaccatcgacaacctgagcacagatgacatcaacaccagcagcagcatcagcagctatgccaacaccccagccagcagcaggaagaacctggatgtgcagacagatgctgagaagcacagccaggtggagaggaacagcctgtggagcggagatgatgtgaagaagagtgatggcggcagtgacagcggcatcaagatggagcccggcagcaagtggaggaggaaccccagtgatgtgtctgatgaaagtgacaagagcaccagcggcaagaagaaccctgtgatcagccagacaggctcctggaggcggggcatgacagcccaggtgggcatcaccatgcccaggaccaagcccagcgccccagctggggccctgaagaccccaggcaccgggaagacagatgatgccaaggtgtctgagaagggccgcctgagccccaaggccagccaggtgaagaggagccccagtgatgctggccgcagcagtggagatgagagcaagaagcccctgcccagcagcagcaggacccccacagccaatgccaacagctttggcttcaagaagcagagcggcagcgctgctggcctggccatgatcacagccagcggcgtgacagtgaccagccgcagcgccaccctgggcaagatccccaagagcagcgccctggtgagccgctctgctggcaggaagagctccatggatggagcccagaaccaggatgatggctacctggccctgagcagcaggaccaacctgcagtaccgcagcctgccccggcccagcaagagcaacagcagaaatggagctggcaacagaagcagcaccagcagcattgacagcaacatcagcagcaagtctgctggcctgcctgtgcccaagctgcgggagcccagcaagacagccctgggcagcagcctgcccggcctggtgaaccagacagacaaggagaagggcatcagcagtgacaatgaatctgtggccagctgcaacagcgtgaaggtgaacccagctgcccagcctgtgagcagccctgcccagaccagcctgcagcccggggccaagtacccagatgtggccagccccaccctgcggcggctgtttggaggcaagcccaccaagcaggtgcccatcgccacagctgagaacatgaagaacagcgtggtgatcagcaacccccacgccaccatgacccagcagggcaacctggacagccccagcggcagcggcgtgctgagcagcggcagcagcagccccctgtacagcaagaatgtggacctgaaccagagccccctggccagcagccccagcagcgcccacagcgcccccagcaacagcctgacctggggcaccaatgccagcagcagcagcgctgtgtccaaggatggcctgggcttccagagcgtgagcagcctgcacaccagctgtgagagcattgacatcagcctgagcagcggcggcgtgcccagccacaacagcagcacaggcctgattgccagcagcaaggatgacagcctgaccccatttgtgaggaccaacagcgtgaagaccaccctgtctgagagccccctgagcagccctgctgccagccccaagttctgccgcagcaccctgcccaggaagcaggacagcgacccccacctggacaggaacaccctgcccaagaagggcctgcgctacacccccaccagccagctgcggacccaggaggatgccaaggagtggctgcggagccacagcgctgggggcctgcaggacacagctgccaacagccccttcagcagcggcagctctgtgaccagccccagcggcacccgcttcaacttcagccagctggccagccccaccaccgtgacccagatgagcctgagcaaccccaccatgctgcggacccacagcctgagcaatgctgatggccagtatgacccctacacagacagccgcttcaggaacagctccatgagcctggatgagaagagcaggaccatgagccgcagcggcagcttcagagatggctttgaggaggagagctgggagaagagctctgtggacaactttgtgtcccggctgcacagcagcctgcacttcagcctgcccctcttccaccacgcccgctatgagctggtgcacggcagcagcctgagcctggtgagcagcaccagctctgtgtacagcaccccagaggagaagtgccagagcgagatcaggaagctgcggcgggagctggatgccagccaggagaaggtgtctgccctgaccacccagctgacagccaatgcccacctggtggccgcctttgagcagagcctgggcaacatgaccatccggctgcagagcctgaccatgacagctgagcagaaggacagcgagctgaatgagctgaggaagaccatcgagctgctgaagaagcagaatgctgctgcccaggccgccatcaacggggtcatcaacaccccagagctgaactgcaagggaaatggaacagcccagagcgctgacctgcgcatccggcggcagcacagcagtgacagcgtgagcagcatcaacagcgccaccagccacagctctgtgggcagcaacatcgagagtgacagcaagaagaagaagaggaagaactgggtgaatgagctgcggagcagcttcaagcaggccttcggcaagaagaagagccccaagagcgccagcagccacagcgacatcgaggagatgacagacagcagcctgcccagcagccccaagctgccccacaacggcagcacaggcagcacccccctgctgaggaacagccacagcaacagcctcatcagcgagtgcatggacagcgaggccgagaccgtgatgcagctgagaaatgagctgcgggacaaggagatgaagctgacagacatccggctggaggccctgagcagcgcccaccagctggaccagctgcgggaggccatgaacaggatgcagagcgagattgagaagctgaaggcagaaaatgaccggctgaagtctgagagccagggcagcggctgcagccgggcccccagccaggtgtccatcagcgccagcccccggcagagcatgggcctgagccagcacagcctgaacctgacagagagcaccagcctggacatgctgctggatgacacaggagaatgttctgccaggaaggagggcggcagacatgtgaagatcgtggtgtccttccaggaggagatgaagtggaaggaggacagccggccccacctgttcctgattggctgcatcggcgtgtctgggaagaccaagtgggatgtgctggatggagtggtgcggcggctcttcaaggagtacatcatccacgtggaccctgtgtcccagctgggcctgaacagcgacagcgtgctgggctacagcatcggggagatcaagaggagcaacaccagcgagaccccagagctgctgccctgtggctacctggtgggggagaacaccaccatctctgtgacagtgaagggcctggccgagaacagcctggacagcctggtgtttgagagcctcatccccaagcccatcctgcagcgctacgtgtccctgctgattgagcaccggcgcatcatcctgagcggccccagcggcaccgggaagacctacctggccaaccggctgtctgagtacatcgtgctgcgggagggccgggagctgacagatggagtcatcgccaccttcaacgtggaccacaagagcagcaaggagctgcggcagtacctgagcaacctggccgaccagtgcaacagtgaaaataatgctgtggacatgcccctggtgatcatcctggacaacctgcaccacgtgagcagcctgggggagatcttcaacggcctgctgaactgcaagtaccacaagtgcccctacatcatcggcaccatgaaccaggccaccagcagcacccccaacctgcagctgcaccacaacttccgctgggtgctgtgtgccaaccacacagagcctgtgaagggcttcctgggccgcttcctgcggaggaagctgatggagacagagatcagcggccgggtgaggaacatggagctggtgaagatcatcgactggatccccaaggtgtggcaccacctgaaccgcttcctggaggcccacagcagcagtgatgtgaccatcggccccaggctcttcctgagctgccccattgatgtggatggcagccgggtgtggttcacagacctgtggaactacagcatcatcccctacctgctggaggccgtgcgggagggcctgcagctgtatggccggcgggccccctgggaggaccctgccaagtgggtgatggacacctacccctgggccgccagcccccagcagcacgagtggccacccctgctgcagctgcggccagaagatgtgggctttgatggctacagcatgccccgggagggcagcaccagcaagcagatgcccccatctgatgctgagggggaccccctgatgaacatgctgatgaggctgcaggaggccgccaactacagcagcccccagagctatgacagcgacagcaacagcaacagccaccatgatgacatcctggacagcagcctggagagcaccctgtag

SEQ ID NO: 161680 - DNA, 4482 bp, synthetic construct; identical to SEQ ID NO: 161675
  misc_feature 1..4482: note = Description of Artificial Sequence: Synthetic coding sequence
  source 1..4482: mol_type = other DNA

SEQ ID NO: 161681 - DNA, 2451 bp, synthetic construct
  misc_feature 1..2451: note = Description of Artificial Sequence: Synthetic coding sequence
  source 1..2451: mol_type = other DNA
atgctgtggcccaggaacctgacctcctgggatgacagcagctctgtgagcagcggcatcagtgacaccatcgacaacctgagcacagatgacatcaacaccagcagcagcatcagcagctatgccaacaccccagccagcagcaggaagaacctggatgtgcagacagatgctgagaagcacagccaggtggagaggaacagcctgtggagcggagatgatgtgaagaagagtgatggcggcagtgacagcggcatcaagatggagcccggcagcaagtggaggaggaaccccagtgatgtgtctgatgaaagtgacaagagcaccagcggcaagaagaaccctgtgatcagccagacaggctcctggaggcggggcatgacagcccaggtgggcatcaccatgcccaggaccaagcccagcgccccagctggggccctgaagaccccaggcaccgggaagacagatgatgccaaggtgtctgagaagggccgcctgagccccaaggccagccaggtgaagaggagccccagtgatgctggccgcagcagtggagatgagagcaagaagcccctgcccagcagcagcaggacccccacagccaatgccaacagctttggcttcaagaagcagagcggcagcgctgctggcctggccatgatcacagccagcggcgtgacagtgaccagccgcagcgccaccctgggcaagatccccaagagcagcgccctggtgagccgctctgctggcaggaagagctccatggatggagcccagaaccaggatgatggctacctggccctgagcagcaggaccaacctgcagtaccgcagcctgccccggcccagcaagagcaacagcagaaatggagctggcaacagaagcagcaccagcagcattgacagcaacatcagcagcaagtctgctggcctgcctgtgcccaagctgcgggagcccagcaagacagccctgggcagcagcctgcccggcctggtgaaccagacagacaaggagaagggcatcagcagtgacaatgaatctgtggccagctgcaacagcgtgaaggtgaacccagctgcccagcctgtgagcagccctgcccagaccagcctgcagcccggggccaagtacccagatgtggccagccccaccctgcggcggctgtttggaggcaagcccaccaagcaggtgcccatcgccacagctgagaacatgaagaacagcgtggtgatcagcaacccccacgccaccatgacccagcagggcaacctggacagccccagcggcagcggcgtgctgagcagcggcagcagcagccccctgtacagcaagaatgtggacctgaaccagagccccctggccagcagccccagcagcgcccacagcgcccccagcaacagcctgacctggggcaccaatgccagcagcagcagcgctgtgtccaaggatggcctgggcttccagagcgtgagcagcctgcacaccagctgtgagagcattgacatcagcctgagcagcggcggcgtgcccagccacaacagcagcacaggcctgattgccagcagcaaggatgacagcctgaccccatttgtgaggaccaacagcgtgaagaccaccctgtctgagcgctacacccccaccagccagctgcggacccaggaggatgccaaggagtggctgcggagccacagcgctgggggcctgcaggacacagctgccaacagccccttcagcagcggcagctctgtgaccagccccagcggcacccgcttcaacttcagccagctggccagccccaccaccgtgacccagatgagcctgagcaaccccaccatgctgcggacccacagcctgagcaatgctgatggccagtatgacccctacacagacagccgcttcaggaacagctccatgagcctggatgagaagagcaggaccatgagccgcagcggcagcttcagagatggctttgaggaggtgcacggcagcagcctgagcctggtgagcagcaccagctctgtgtacagcaccccagaggagaagtgccagagcgagatcaggaagctgcggcgggagctggatgccagccaggagaaggtgtctgccctgaccacccagctgacagccaatgcccacctggtggccgcctttgagcagagcctgggcaacatgaccatccggctgcagagcctgaccatgacagctgagcagaaggacagcgagctgaatgagctgaggaagaccatcgagctgctgaagaagcagaatgctgctgcccaggccgccatcaacggggtcatcaacaccccagagctgaactgcaagggaaatggaacagcccagagcgctgacctgcgcatccggcggcagcacagcagtgacagcgtgagcagcatcaacagcgccaccagccacagctctgtgggcagcaacatcgagagtgacagctag

SEQ ID NO: 161682 - DNA, 7260 bp, synthetic construct
  misc_feature 1..7260: note = Description of Artificial Sequence: Synthetic coding sequence
  source 1..7260: mol_type = other DNA
atggccatcgacctgtactgcggcctggcctgcctgtggggcatccacgagccccggcagatctacacagactgggccaaccactacctggccaagagcggccacaagaggctcatccgggacctgcagcaggatgtgacagatggagtgctgctggcccagatcatccaggtggtggccaatgagaagattgaggacatcaatggctgccccaagaacagaagccagatgattgaaaatattgatgcctgcctgaacttcctggccgccaagggcatcaacatccagggcctgtctgctgaggagatcagaaatggaaacctgaaggccatcctgggcctcttcttcagcctgagccgctacaagcagcagcagcagcagccccagaagcagcacctgagcagccccctgcccccagctgtgtcccaggtggccggggcccccagccagtgccaggccggcaccccccagcagcaggtgcctgtgaccccccaggccccctgccagccccaccagcctgccccccaccagcagagcaaggcccaggccgagatgcagagcagcgccagcagcaaggacagcagccagagcaagatcatccgcttcaccctgggccagaagaagatcagccggctgcccggccccacagcccgggtgtctgctgctggcagcgaggccaagacccggggcggcagcaccacagccaacaacagaagaagccagagcttcaacaactatgacaagagcaagcctgtgaccagccccccacctccacccagcagccatgagaaggagcccctggccagcagcgccagcagccaccctggcatgtctgacaatgccccagccagcctggagagcggcagcagcagcacccccaccaactgcagcaccagcagcgccatcccccagcctggagctgccaccaagccctggaggagcaagagcctgtctgtgaagcacagcgccaccgtgtccatgctgtctgtgaagcccccaggccctgaggccccccggcccaccccagaggccatgaagccagcccccaacaaccagaagtccatgctggagaagctgaagctgttcaacagcaaaggaggcagcaaggccggggagggccctggcagccgggacaccagctgtgagcggctggagaccctgcccagctttgaggagagcgaggagctggaggccgccagcaggatgctgaccaccgtgggccctgccagcagcagccccaagatcgccctgaagggcatcgcccagaggaccttcagccgggccctgaccaacaagaagagcagcctgaagggaaatgagaaggagaaggagaagcagcagcgggagaaggacaaggagaagagcaaggacctggccaagagggcctctgtgacagagcggctggacctgaaggaggagcccaaggaggaccccagcggggctgctgtgcctgagatgcccaagaagagcagcaagatcgccagcttcatccccaagggcggcaagctgaacagcgccaagaaggagcccatggcccccagccacagcggcatccccaagccaggcatgaagtccatgcctgggaagagccccagcgccccagcccccagcaaggagggggagaggagccgcagcggcaagctgagcagcggcctgccccagcagaagccccagctggatggccgccacagcagcagcagcagcagcctggccagcagcgagggcaagggccctgggggcaccaccctgaaccacagcatcagcagccagacagtgtctggctctgtgggcaccacccagaccaccggcagcaacacagtgtctgtgcagctgccccagccccagcagcagtacaaccaccccaacacagccaccgtggcccccttcctgtaccgcagccagacagacacagagggcaatgtgacagctgagagcagcagcactggagtgtctgtggagcccagccacttcaccaagacaggccagcctgccctggaggagctgactggagaagatcctgaggcccggcggctgaggacagtgaagaacattgctgacctgcggcagaacctggaggagaccatgagcagcctgcggggcacccaggtgacccacagcaccctggagaccacctttgacaccaacgtgaccacagagatgagcggccgcagcatcctgagcctgaccggccggcccacccccctgtcctggaggctgggccagagcagcccccggctgcaggccggagatgcccccagcatgggaaatggctacccaccccgggccaatgccagccgcttcatcaacacagagagcggccgctacgtgtacagcgcccccctgcggcggcagctggccagccggggcagctctgtgtgccacgtggatgtgtctgacaaggctggagatgagatggacctggagggcatctccatggatgcccctggctacatgtctgatggagatgtgctgagcaagaacatcagaacagatgacatcaccagcggctacatgacagatggcggcctgggcctgtacacccggcggctgaaccggctgcctgatggcatggctgtggtgcgggagaccctgcagaggaacaccagcctgggcctgggagatgctgacagctgggatgacagcagctctgtgagcagcggcatcagtgacaccatcgacaacctgagcacagatgacatcaacaccagcagcagcatcagcagctatgccaacaccccagccagcagcaggaagaacctggatgtgcagacagatgctgagaagcacagccaggtggagaggaacagcctgtggagcggagatgatgtgaagaagagtgatggcggcagtgacagcggcatcaagatggagcccggcagcaagtggaggaggaaccccagtgatgtgtctgatgaaagtgacaagagcaccagcggcaagaagaaccctgtgatcagccagacaggctcctggaggcggggcatgacagcccaggtgggcatcaccatgcccaggaccaagcccagcgccccagctggggccctgaagaccccaggcaccgggaagacagatgatgccaaggtgtctgagaagggccgcctgagccccaaggccagccaggtgaagaggagccccagtgatgctggccgcagcagtggagatgagagcaagaagcccctgcccagcagcagcaggacccccacagccaatgccaacagctttggcttcaagaagcagagcggcagcgctgctggcctggccatgatcacagccagcggcgtgacagtgaccagccgcagcgccaccctgggcaagatccccaagagcagcgccctggtgagccgctctgctggcaggaagagctccatggatggagcccagaaccaggatgatggctacctggccctgagcagcaggaccaacctgcagtaccgcagcctgccccggcccagcaagagcaacagcagaaatggagctggcaacagaagcagcaccagcagcattgacagcaacatcagcagcaagtctgctggcctgcctgtgcccaagctgcgggagcccagcaagacagccctgggcagcagcctgcccggcctggtgaaccagacagacaaggagaagggcatcagcagtgacaatgaatctgtggccagctgcaacagcgtgaaggtgaacccagctgcccagcctgtgagcagccctgcccagaccagcctgcagcccggggccaagtacccagatgtggccagccccaccctgcggcggctgtttggaggcaagcccaccaagcaggtgcccatcgccacagctgagaacatgaagaacagcgtggtgatcagcaacccccacgccaccatgacccagcagggcaacctggacagccccagcggcagcggcgtgctgagcagcggcagcagcagccccctgtacagcaagaatgtggacctgaaccagagccccctggccagcagccccagcagcgcccacagcgcccccagcaacagcctgacctggggcaccaatgccagcagcagcagcgctgtgtccaaggatggcctgggcttccagagcgtgagcagcctgcacaccagctgtgagagcattgacatcagcctgagcagcggcggcgtgcccagccacaacagcagcacaggcctgattgccagcagcaaggatgacagcctgaccccatttgtgaggaccaacagcgtgaagaccaccctgtctgagagccccctgagcagccctgctgccagccccaagttctgccgcagcaccctgcccaggaagcaggacagcgacccccacctggacaggaacaccctgcccaagaagggcctgcgctacacccccaccagccagctgcggacccaggaggatgccaaggagtggctgcggagccacagcgctgggggcctgcaggacacagctgccaacagccccttcagcagcggcagctctgtgaccagccccagcggcacccgcttcaacttcagccagctggccagccccaccaccgtgacccagatgagcctgagcaaccccaccatgctgcggacccacagcctgagcaatgctgatggccagtatgacccctacacagacagccgcttcaggaacagctccatgagcctggatgagaagagcaggaccatgagccgcagcggcagcttcagagatggctttgaggaggagagctgggagaagagctctgtggacaactttgtgtcccggctgcacagcagcctgcacttcagcctgcccctcttccaccacgcccgctatgagctggtgcacggcagcagcctgagcctggtgagcagcaccagctctgtgtacagcaccccagaggagaagtgccagagcgagatcaggaagctgcggcgggagctggatgccagccaggagaaggtgtctgccctgaccacccagctgacagccaatgcccacctggtggccgcctttgagcagagcctgggcaacatgaccatccggctgcagagcctgaccatgacagctgagcagaaggacagcgagctgaatgagctgaggaagaccatcgagctgctgaagaagcagaatgctgctgcccaggccgccatcaacggggtcatcaacaccccagagctgaactgcaagggaaatggaacagcccagagcgctgacctgcgcatccggcggcagcacagcagtgacagcgtgagcagcatcaacagcgccaccagccacagctctgtgggcagcaacatcgagagtgacagcaagaagaagaagaggaagaactgggtgaatgagctgcggagcagcttcaagcaggccttcggcaagaagaagagccccaagagcgccagcagccacagcgacatcgaggagatgacagacagcagcctgcccagcagccccaagctgccccacaacggcagcacaggcagcacccccctgctgaggaacagccacagcaacagcctcatcagcgagtgcatggacagcgaggccgagaccgtgatgcagctgagaaatgagctgcgggacaaggagatgaagctgacagacatccggctggaggccctgagcagcgcccaccagctggaccagctgcgggaggccatgaacaggatgcagagcgagattgagaagctgaaggcagaaaatgaccggctgaagtctgagagccagggcagcggctgcagccgggcccccagccaggtgtccatcagcgccagcccccggcagagcatgggcctgagccagcacagcctgaacctgacagagagcaccagcctggacatgctgctggatgacacaggagaatgttctgccaggaaggagggcggcagacatgtgaagatcgtggtgtccttccaggaggagatgaagtggaaggaggacagccggccccacctgttcctgattggctgcatcggcgtgtctgggaagaccaagtgggatgtgctggatggagtggtgcggcggctcttcaaggagtacatcatccacgtggaccctgtgtcccagctgggcctgaacagcgacagcgtgctgggctacagcatcggggagatcaagaggagcaacaccagcgagaccccagagctgctgccctgtggctacctggtgggggagaacaccaccatctctgtgacagtgaagggcctggccgagaacagcctggacagcctggtgtttgagagcctcatccccaagcccatcctgcagcgctacgtgtccctgctgattgagcaccggcgcatcatcctgagcggccccagcggcaccgggaagacctacctggccaaccggctgtctgagtacatcgtgctgcgggagggccgggagctgacagatggagtcatcgccaccttcaacgtggaccacaagagcagcaaggagctgcggcagtacctgagcaacctggccgaccagtgcaacagtgaaaataatgctgtggacatgcccctggtgatcatcctggacaacctgcaccacgtgagcagcctgggggagatcttcaacggcctgctgaactgcaagtaccacaagtgcccctacatcatcggcaccatgaaccaggccaccagcagcacccccaacctgcagctgcaccacaacttccgctgggtgctgtgtgccaaccacacagagcctgtgaagggcttcctgggccgcttcctgcggaggaagctgatggagacagagatcagcggccgggtgaggaacatggagctggtgaagatcatcgactggatccccaaggtgtggcaccacctgaaccgcttcctggaggcccacagcagcagtgatgtgaccatcggccccaggctcttcctgagctgccccattgatgtggatggcagccgggtgtggttcacagacctgtggaactacagcatcatcccctacctgctggaggccgtgcgggagggcctgcagctgtatggccggcgggccccctgggaggaccctgccaagtgggtgatggacacctacccctgggccgccagcccccagcagcacgagtggccacccctgctgcagctgcggccagaagatgtgggctttgatggctacagcatgccccgggagggcagcaccagcaagcagatgcccccatctgatgctgagggggaccccctgatgaacatgctgatgaggctgcaggaggccgccaactacagcagcccccagagctatgacagcgacagcaacagcaacagccaccatgatgacatcctggacagcagcctggagagcaccctgtag

SEQ ID NO: 161683 - DNA, 7098 bp, synthetic construct
  misc_feature 1..7098: note = Description of Artificial Sequence: Synthetic coding sequence
  source 1..7098: mol_type = other DNA
atggagagcgtgtctgagagcagccagcagcagaagaggaagcctgtgatccacggcctggaggaccagaagaggatctacacagactgggccaaccactacctggccaagagcggccacaagaggctcatccgggacctgcagcaggatgtgacagatggagtgctgctggcccagatcatccaggtggtggccaatgagaagattgaggacatcaatggctgccccaagaacagaagccagatgattgagaacattgatgcctgcctgaacttcctggccgccaagggcatcaacatccagggcctgtctgctgaggagatcagaaatggaaacctgaaggccatcctgggcctcttcttcagcctgagccgctacaagcagcagcagcagcagccccagaagcagcacctgagcagccccctgcccccagctgtgtcccaggtggccggggcccccagccagtgccaggccggcaccccccagcagcaggtgcctgtgaccccccaggccccctgccagccccaccagcctgccccccaccagcagagcaaggcccaggccgagatgcagagccggctgcccggccccacagcccgggtgtctgctgctggcagcgaggccaagacccggggcggcagcaccacagccaacaacagaagaagccagagcttcaacaactatgacaagagcaagcctgtgaccagccccccacctccacccagcagccatgagaaggagcccctggccagcagcgccagcagccaccctggcatgtctgacaatgccccagccagcctggagagcggcagcagcagcacccccaccaactgcagcaccagcagcgccatcccccagcctggagctgccaccaagccctggaggagcaagagcctgtctgtgaagcacagcgccaccgtgtccatgctgtctgtgaagcccccaggccctgaggccccccggcccaccccagaggccatgaagccagcccccaacaaccagaagtccatgctggagaagctgaagctgttcaacagcaaaggaggcagcaaggccggggagggccctggcagccgggacaccagctgtgagcggctggagaccctgcccagctttgaggagagcgaggagctggaggccgccagcaggatgctgaccaccgtgggccctgccagcagcagccccaagatcgccctgaagggcatcgcccagaggaccttcagccgggccctgaccaacaagaagagcagcctgaagggaaatgagaaggagaaggagaagcagcagcgggagaaggacaaggagaagagcaaggacctggccaagagggcctctgtgacagagcggctggacctgaaggaggagcccaaggaggaccccagcggggctgctgtgcctgagatgcccaagaagagcagcaagatcgccagcttcatccccaagggcggcaagctgaacagcgccaagaaggagcccatggcccccagccacagcggcatccccaagccaggcatgaagtccatgcctgggaagagccccagcgccccagcccccagcaaggagggggagaggagccgcagcggcaagctgagcagcggcctgccccagcagaagccccagctggatggccgccacagcagcagcagcagcagcctggccagcagcgagggcaagggccctgggggcaccaccctgaaccacagcatcagcagccagacagtgtctggctctgtgggcaccacccagaccaccggcagcaacacagtgtctgtgcagctgccccagccccagcagcagtacaaccaccccaacacagccaccgtggcccccttcctgtaccgcagccagacagacacagagggcaatgtgacagctgagagcagcagcactggagtgtctgtggagcccagccacttcaccaagacaggccagcctgccctggaggagctgactggagaagatcctgaggcccggcggctgaggacagtgaagaacattgctgacctgcggcagaacctggaggagaccatgagcagcctgcggggcacccaggtgacccacagcaccctggagaccacctttgacaccaacgtgaccacagagatgagcggccgcagcatcctgagcctgaccggccggcccacccccctgtcctggaggctgggccagagcagcccccggctgcaggccggagatgcccccagcatgggaaatggctacccaccccgggccaatgccagccgcttcatcaacacagagagcggccgctacgtgtacagcgcccccctgcggcggcagctggccagccggggcagctctgtgtgccacgtggatgtgtctgacaaggctggagatgagatggacctggagggcatctccatggatgcccctggctacatgtctgatggagatgtgctgagcaagaacatcagaacagatgacatcaccagcggctacatgacagatggcggcctgggcctgtacacccggcggctgaaccggctgcctgatggcatggctgtggtgcgggagaccctgcagaggaacaccagcctgggcctgggagatgctgacagctgggatgacagcagctctgtgagcagcggcatcagtgacaccatcgacaacctgagcacagatgacatcaacaccagcagcagcatcagcagctatgccaacaccccagccagcagcaggaagaacctggatgtgcagacagatgctgagaagcacagccaggtggagaggaacagcctgtggagcggagatgatgtgaagaagagtgatggcggcagtgacagcggcatcaagatggagcccggcagcaagtggaggaggaaccccagtgatgtgtctgatgaaagtgacaagagcaccagcggcaagaagaaccctgtgatcagccagacaggctcctggaggcggggcatgacagcccaggtgggcatcaccatgcccaggaccaagcccagcgccccagctggggccctgaagaccccaggcaccgggaagacagatgatgccaaggtgtctgagaagggccgcctgagccccaaggccagccaggtgaagaggagccccagtgatgctggccgcagcagtggagatgagagcaagaagcccctgcccagcagcagcaggacccccacagccaatgccaacagctttggcttcaagaagcagagcggcagcgctgctggcctggccatgatcacagccagcggcgtgacagtgaccagccgcagcgccaccctgggcaagatccccaagagcagcgccctggtgagccgctctgctggcaggaagagctccatggatggagcccagaaccaggatgatggctacctggccctgagcagcaggaccaacctgcagtaccgcagcctgccccggcccagcaagagcaacagcagaaatggagctggcaacagaagcagcaccagcagcattgacagcaacatcagcagcaagtctgctggcctgcctgtgcccaagctgcgggagcccagcaagacagccctgggcagcagcctgcccggcctggtgaaccagacagacaaggagaagggcatcagcagtgacaatgaatctgtggccagctgcaacagcgtgaaggtgaacccagctgcccagcctgtgagcagccctgcccagaccagcctgcagcccggggccaagtacccagatgtggccagccccaccctgcggcggctgtttggaggcaagcccaccaagcaggtgcccatcgccacagctgagaacatgaagaacagcgtggtgatcagcaacccccacgccaccatgacccagcagggcaacctggacagccccagcggcagcggcgtgctgagcagcggcagcagcagccccctgtacagcaagaatgtggacctgaaccagagccccctggccagcagccccagcagcgcccacagcgcccccagcaacagcctgacctggggcaccaatgccagcagcagcagcgctgtgtccaaggatggcctgggcttccagagcgtgagcagcctgcacaccagctgtgagagcattgacatcagcctgagcagcggcggcgtgcccagccacaacagcagcacaggcctgattgccagcagcaaggatgacagcctgaccccatttgtgaggaccaacagcgtgaagaccaccctgtctgagagccccctgagcagccctgctgccagccccaagttctgccgcagcaccctgcccaggaagcaggacagcgacccccacctggacaggaacaccctgcccaagaagggcctgcgctacacccccaccagccagctgcggacccaggaggatgccaaggagtggctgcggagccacagcgctgggggcctgcaggacacagctgccaacagccccttcagcagcggcagctctgtgaccagccccagcggcacccgcttcaacttcagccagctggccagccccaccaccgtgacccagatgagcctgagcaaccccaccatgctgcggacccacagcctgagcaatgctgatggccagtatgacccctacacagacagccgcttcaggaacagctccatgagcctggatgagaagagcaggaccatgagccgcagcggcagcttcagagatggctttgaggaggtgcacggcagcagcctgagcctggtgagcagcaccagctctgtgtacagcaccccagaggagaagtgccagagcgagatcaggaagctgcggcgggagctggatgccagccaggagaaggtgtctgccctgaccacccagctgacagccaatgcccacctggtggccgcctttgagcagagcctgggcaacatgaccatccggctgcagagcctgaccatgacagctgagcagaaggacagcgagctgaatgagctgaggaagaccatcgagctgctgaagaagcagaatgctgctgcccaggccgccatcaatggagtcatcaacaccccagagctgaactgcaagggaaatggaacagcccagagcgctgacctgcgcatccggcggcagcacagcagtgacagcgtgagcagcatcaacagcgccaccagccacagctctgtgggcagcaacattgaaagtgacagcaagaagaagaagaggaagaactggctgcggagcagcttcaagcaggccttcggcaagaagaagagccccaagagcgccagcagccacagcgacatcgaggagatgacagacagcagcctgcccagcagccccaagctgccccacaacggcagcacaggcagcacccccctgctgaggaacagccacagcaacagcctcatcagcgagtgcatggacagcgaggccgagaccgtgatgcagctgagaaatgagctgcgggacaaggagatgaagctgacagacatccggctggaggccctgagcagcgcccaccagctggaccagctgcgggaggccatgaacaggatgcagagcgagattgagaagctgaaggcagaaaatgaccggctgaagtctgagagccagggcagcggctgcagccgggcccccagccaggtgtccatcagcgccagcccccggcagagcatgggcctgagccagcacagcctgaacctgacagagagcaccagcctggacatgctgctggatgacacaggagaatgttctgccaggaaggagggcggcagacatgtgaagatcgtggtgtccttccaggaggagatgaagtggaaggaggacagccggccccacctgttcctgattggctgcatcggcgtgtctgggaagaccaagtgggatgtgctggatggagtggtgcggcggctcttcaaggagtacatcatccacgtggaccctgtgtcccagctgggcctgaacagcgacagcgtgctgggctacagcatcggggagatcaagaggagcaacaccagcgagaccccagagctgctgccctgtggctacctggtgggggagaacaccaccatctctgtgacagtgaagggcctggccgagaacagcctggacagcctggtgtttgagagcctcatccccaagcccatcctgcagcgctacgtgtccctgctgattgagcaccggcgcatcatcctgagcggccccagcggcaccgggaagacctacctggccaaccggctgtctgagtacatcgtgctgcgggagggccgggagctgacagatggagtcatcgccaccttcaacgtggaccacaagagcagcaaggagctgcggcagtacctgagcaacctggccgaccagtgcaacagtgaaaataatgctgtggacatgcccctggtgatcatcctggacaacctgcaccacgtgagcagcctgggggagatcttcaacggcctgctgaactgcaagtaccacaagtgcccctacatcatcggcaccatgaaccaggccaccagcagcacccccaacctgcagctgcaccacaacttccgctgggtgctgtgtgccaaccacacagagcctgtgaagggcttcctgggccgcttcctgcggaggaagctgatggagacagagatcagcggccgggtgaggaacatggagctggtgaagatcatcgactggatccccaaggtgtggcaccacctgaaccgcttcctggaggcccacagcagcagtgatgtgaccatcggccccaggctcttcctgagctgccccattgatgtggatggcagccgggtgtggttcacagacctgtggaactacagcatcatcccctacctgctggaggccgtgcgggagggcctgcagctgtatggccggcgggccccctgggaggaccctgccaagtgggtgatggacacctacccctgggccgccagcccccagcagcacgagtggccacccctgctgcagctgcggccagaagatgtgggctttgatggctacagcatgccccgggagggcagcaccagcaagcagatgcccccatctgatgctgagggggaccccctgatgaacatgctgatgaggctgcaggaggccgccaactacagcagcccccagagctatgacagcgacagcaacagcaacagccaccatgatgacatcctggacagcagcctggagagcaccctgtag

SEQ ID NO: 161684 - DNA, 1089 bp, synthetic construct
  misc_feature 1..1089: note = Description of Artificial Sequence: Synthetic coding sequence
  source 1..1089: mol_type = other DNA
atgttcagctctgtggcccacctggcccgggccaaccccttcaacaccccccacctgcagctggtgcatgatggcctgggggacctgcggagcagcagccctggccccaccggccagccccggcggcccaggaacctggccgctgctgctgtggaggagcagtacagctgtgactatggcagcggccgcttcttcatcctgtgtggcctgggcggcatcatcagctgtggcaccacccacacagccctggtgcccctggacctggtgaagtgcaggatgcaggtggacccccagaagtacaagggcatcttcaacggcttctctgtgaccctgaaggaggatggagtgcggggcctggccaagggctgggcccccaccttcctgggctacagcatgcagggcctgtgcaagtttggcttctatgaggtgttcaaggtgctgtacagcaacatgctgggggaggagaacacctacctgtggaggaccagcctgtacctggccgccagcgccagcgctgagttctttgctgacatcgccctggcccccatggaggccgccaaggtgcgcatccagacccagcccggctacgccaacaccctgagagatgctgcccccaagatgtacaaggaggagggcctgaaggccttctacaagggcgtggcccccctgtggatgaggcagatcccctacaccatgatgaagtttgcctgctttgagaggacagtggaggccctgtacaagtttgtggtgcccaagcccaggtctgagtgcagcaagccagagcagctggtggtgacctttgtggccggctacatcgccggggtcttctgtgccatcgtgagccaccctgctgacagcgtggtgtctgtgctgaacaaggagaagggcagcagcgccagcctggtgctgaagaggctgggcttcaagggcgtgtggaagggcctgtttgcccgcatcatcatgattggcaccctgacagccctgcagtggttcatctatgattctgtgaaggtgtacttccggctgcccaggcctcctcctcctgagatgcctgagagcctgaagaagaagctgggcctgacccagtag

SEQ ID NO: 161685 - DNA, 6561 bp, synthetic construct
  misc_feature 1..6561: note = Description of Artificial Sequence: Synthetic coding sequence
  source 1..6561: mol_type = other DNA
atgcctgtgctgggcgtggccagcaagctgcggcagcctgctgtgggcagcaagcctgtgcacacagccctgcccatccccaacctgggcaccaccggcagccagcactgcagcagccggcccctggagctgacagaaacagagagctccatgctgagctgccagctggccctgaagagcacctgtgaatttggagagaagaagcccctgcagggcaaggccaaggagaaggaggacagcaagatctacacagactgggccaaccactacctggccaagagcggccacaagaggctcatcaaggacctgcagcaggacattgctgatggagtgctgctggccgagatcatccagatcatcgccaatgagaaggtggaggacatcaatggctgccccaggagccagagccagatgattgaaaatgtggatgtgtgcctgtccttcctggccgcccggggcgtgaatgtgcagggcctgtctgctgaggagatcagaaatggaaacctgaaggccatcctgggcctcttcttcagcctgagccgctacaagcagcagcagcaccaccagcagcagtactaccagagcctggtggagctgcagcagagggtgacccacgccagcccccccagcgaggccagccaggccaagacccagcaggacatgcagagcagcctggccgcccgctatgccacccagagcaaccacagcggcatcgccaccagccagaagaagcccacccggctgcccggccccagccgggtgcctgctgctggcagcagcagcaaggtgcagggcgccagcaacctgaacagaagaagccagagcttcaacagcattgacaagaacaagccacccaactatgccaatggaaatgagaaggacagcagcaagggcccccagagcagcagtggagtgaatggaaatgtgcagccccccagcacagctggccagcccccagccagcgccatccccagccccagcgccagcaagccctggaggagcaagtccatgaatgtgaagcacagcgccaccagcaccatgctgactgtgaagcagagcagcacagccaccagccccacccccagcagtgaccggctgaagccccctgtgtctgaaggagtgaagacagcccccagcggccagaagtccatgctggagaagttcaagctggtgaatgccaggacagccctgcggcccccccagccccccagcagcggccccagtgatggcggcaaggatgatgatgccttcagcgagagcggggagatggagggcttcaacagcggcctgaacagcggcggcagcaccaacagcagccccaaggtgagccccaagctggccccacccaaggccggcagcaagaacctgagcaacaagaagagcctgctgcagcccaaggagaaggaggagaagaacagagacaagaacaaggtgtgcacagagaagcctgtgaaggaggagaaggaccaggtgacagagatggcccccaagaagaccagcaagatcgccagcctcatccccaagggcagcaagaccacagctgccaagaaggagagcctcatccccagcagcagcggcatccccaagccaggcagcaaggtgcccaccgtgaagcagaccatcagccctggcagcacagccagcaaggagagcgagaagttccgcaccaccaagggcagccccagccagagcctgagcaagcccatcaccatggagaaggccagcgccagcagctgcccagcccccctggagggccgggaggccggccaggccagccccagcggcagctgcaccatgacagtggcccagagcagcggccagagcactggaaatggagctgtgcagctgccccagcagcagcagcacagccaccccaacacagccaccgtggcccccttcatctaccgggcccacagtgaaaatgaaggaacagccctgcccagcgctgacagctgcaccagccccaccaagatggacctgagctacagcaagacagccaagcagtgcctggaggagatcagcggggaggaccctgagaccaggaggatgaggacagtgaagaacattgctgacctgcggcagaacctggaggagaccatgagcagcctgcggggcacccagatcagccacagcaccctggagaccacctttgacagcacagtgaccacagaggtgaatggccgcaccatccccaacctgaccagccggcccacccccatgacctggaggctgggccaggcctgcccccggctgcaggccggagatgcccccagcctgggcgccggctaccccaggagcggcaccagccgcttcatccacacagaccccagccgcttcatgtacaccacccccctgcggcgggctgctgtgtcccggctgggcaacatgagccagattgacatgtctgagaaggccagcagtgacctggacatgagcagcgaggtggatgtgggcggctacatgtctgatggagacatcctgggcaagagcctgaggacagatgacatcaacagcggctacatgacagatggcggcctgaacctgtacaccaggagcctgaaccgcatcccagacacagccaccagccgggacatcatccagaggggcgtgcatgatgtgacagtggatgctgacagctgggatgacagcagctctgtgagcagcggcctgagtgacaccctggacaacatcagcacagatgacctgaacaccaccagctctgtgagcagctacagcaacatcaccgtgcccagcaggaagaacacccagctgaggacagacagcgagaagaggagcaccacagatgagacctgggacagccctgaggagctgaagaagccagaagaagattttgacagccatggagatgctgggggcaagtggaagacagtgagcagcggcctgcctgaggaccctgagaaggccggccagaaggccagcctgtctgtgtcccagacaggctcctggaggcggggcatgtctgcccagggcggggcccccagccggcagaaggccggcaccagcgccctgaagaccccaggcaagacagatgatgccaaggccagcgagaagggcaaggcccccctgaagggcagcagcctgcagaggagccccagtgatgctgggaagagcagtggagatgagggcaagaagccacccagcggcatcggccgcagcacagccaccagcagctttggcttcaagaagcccagcggcgtgggcagcagcgccatgatcaccagcagcggggccaccatcaccagcggcagcgccaccctgggcaagatccccaagtctgctgccatcggcggcaagagcaatgccggcaggaagaccagcctggatggcagccagaaccaggatgatgtggtgctgcacgtgagcagcaagaccaccctgcagtaccgcagcctgccccggcccagcaagagcagcaccagcggcatccctggccggggcggccacaggagcagcaccagcagcattgacagcaatgtgagcagcaagtctgctggggccaccaccagcaagctgcgggagcccaccaagattggcagcggccgcagcagccctgtgacagtgaaccagacagacaaggagaaggagaaggtggccgtgtctgattctgagagcgtgtccctgagcggcagccccaagagcagccccaccagcgccagcgcctgtggggcccagggcctgcggcagcccggcagcaagtacccagacatcgccagccccaccttccgccgctacacccccagcagccggcaggccaaccaggaggagggcaaggagtggctgcggagccacagcactggaggcctgcaggacaccggcaaccagagccccctggtgagccccagcgccatgagcagcagcgctgctgggaagtaccacttcagcaacctggtgagccccaccaacctgagccagttcaacctgcccggccccagcatgatgaggagcaacagcatcccagcccaggacagcagctttgacctgtatgatgacagccagctgtgtggcagcgccaccagcctggaggagcggccccgggccatcagccacagcggcagcttccgggacagcatggaggaggtgcacggcagcagcctgagcctggtgagcagcaccagcagcctgtacagcacagctgaggccggcggcagcctggagcagatccacaagctgcggcgggagctggtggccagccaggagaaggtggccaccctgaccagccagctgagcgccaatgcccacctggtggccgcctttgagaagagcctgggcaacatgacaggccgcctgcagagcctgaccatgacagctgagcagaaggagagcgagctgattgagctgcgggagaccatcgagatgctgaaggcccagaacagcgctgcccaggccgccatccagggcgccctgaatggaccagaccacccccccaaggacctgcgcatccggcggcagcacagcagcgagagcgtgagcagcatcaacagcgccaccagccacagcagcatcggcagcggaaatgatgctgacagcaagaagaagaagaagaagaactgggtgaacagccggggcagcgagctgcggagcagcttcaagcaggccttcggcaagaagaagagcaccaagccacccagcagccacagcgacatcgaggagctgacagacagcagcctgcctgccagccccaagctgccccacaatgctggggactgtggcagcgcctccatgaagcccagccagagcgccagcgccatctgtgagtgcacagaggccgaggccgagatcatcctgcagctgaagtctgagctgcgggagaaggagctgaagctgacagacatccggctggaggccctgagcagcgcccaccacctggaccagatccgggaggccatgaacaggatgcagaatgaaattgagatcctgaaggcagaaaatgaccggctgaaggccgagactggaaacacagccaagcccacccggccccccagcgagagcagcagcagcaccagcagcagcagcagccggcagagcctgggcctgagcctgaacaacctgaacatcacagaagctgtgtccagtgacatcctgctggatgatgctggagatgccaccggccacaaggatggccgctctgtgaagatcatcgtgtccatcagcaagggctacggccgggccaaggaccagaagagccaggcctacctgattggcagcattggagtgtctgggaagaccaagtgggatgtgctggatggagtcatcagaagactcttcaaggagtatgtgttcagaattgacaccagcaccagcctgggcctgagcagtgactgcatcgccagctactgcattggagacctgatccgcagccacaacctggaggtgcctgagctgctgccctgtggctacctggtgggggacaacaacatcatcaccgtgaacctgaagggcgtggaggagaacagcctggacagctttgtgtttgacaccctcatccccaagcccatcacccagcgctacttcaacctgctgatggagcaccaccgcatcatcctgagcggccccagcggcaccgggaagacctacctggccaacaagctggccgagtatgtgatcaccaagagcggcaggaagaagacagaagatgccatcgccaccttcaacgtggaccacaagagcagcaaggagctgcagcagtacctggccaacctggccgagcagtgcagcgctgacaacaacggggtggagctgcctgtggtgatcatcctggacaacctgcaccacgtgggcagcctgagtgacatcttcaacggcttcctgaactgcaagtacaacaagtgcccctacatcatcggcaccatgaaccagggcgtgagcagcagccccaacctggagctgcaccacaacttccgctgggtgctgtgtgccaaccacacagagcctgtgaagggcttcctgggccgctacctgcggaggaagctgattgaaattgaaattgaaagaaacatcagaaataatgacctggtgaagatcatcgactggatccccaagacctggcaccacctgaacagcttcctggagacccacagcagcagtgatgtgaccatcggccccaggctcttcctgccctgccccatggatgtggagggcagccgggtgtggttcatggacctgtggaactacagcctggtgccctacatcctggaggccgtgcgggagggcctgcagatgtatggcaagaggaccccctgggaggaccccagcaagtgggtgctggacacctacccctggagcagcgccaccctgccccaggagagccctgccctgctgcagctgcggccagaagatgtgggctatgagagctgcaccagcaccaaggaggccaccaccagcaagcacatcccccagacagacacagaaggagaccccctgatgaacatgctgatgaagctgcaggaggccgccaactacagcagcacccagagctgtgacagcgagagcaccagccaccacgaggacatcctggacagcagcctggagagcaccctgtag

SEQ ID NO: 161686 - DNA, 2376 bp, synthetic construct
  misc_feature 1..2376: note = Description of Artificial Sequence: Synthetic coding sequence
  source 1..2376: mol_type = other DNA
atgaccagcctgcacaccagcagcgagagcattgacctgcccctgagccaccacggcagcctgagcggcctgaccaccggcacccatgaggtgcagagcctgctgatgaggacaggctctgtgcgcagcaccctgtctgagcgctacacccccagcagccggcaggccaaccaggaggagggcaaggagtggctgcggagccacagcactggaggcctgcaggacaccggcaaccagagccccctggtgagccccagcgccatgagcagcagcgctgctgggaagtaccacttcagcaacctggtgagccccaccaacctgagccagttcaacctgcccggccccagcatgatgaggagcaacagcatcccagcccaggacagcagctttgacctgtatgatgacagccagctgtgtggcagcgccaccagcctggaggagcggccccgggccatcagccacagcggcagcttccgggacagcatggaggaggtgcacggcagcagcctgagcctggtgagcagcaccagcagcctgtacagcacagccatccagaagcccaacatccagcagatccacaagctgcggcgggagctggtggccagccaggagaaggtggccaccctgaccagccagctgagcgccaatgcccacctggtggccgcctttgagaagagcctgggcaacatgacaggccgcctgcagagcctgaccatgacagctgagcagaaggagagcgagctgattgagctgcgggagaccatcgagatgctgaaggcccagaacagcgctgcccaggccgccatccagggcgccctgaatggaccagaccacccccccaaggacctgcgcatccggcggcagcacagcagcgagagcgtgagcagcatcaacagcgccaccagccacagcagcatcggcagcggaaatgatgctgacagcaagaagaagaagaagaagaactggctgcggagcagcttcaagcaggccttcggcaagaagaagagcaccaagccacccagcagccacagcgacatcgaggagctgacagacagcagcctgcctgccagccccaagctgccccacaatgctggggactgtggcagcgcctccatgaagcccagccagagcgccagcgccatctgtgaatgtacagaagctgaggccgagatcatcctgcagctgaagtctgagctgcgggagaaggagctgaagctgacagacatccggctggaggccctgagcagcgcccaccacctggaccagatccgggaggccatgaacaggatgcagaatgaaattgagatcctgaaggccgagaatgaccggctgaaggccgagaccggcaacacagccaagcccaccaggcctccttctgagagcagcagcagcaccagcagcagcagcagccggcagagcctgggcctgagcctgaacaacctgaacatcacagaggccgtgtccagtgacatcctgctggatgatgctggagatgccaccggccacaaggatggccgctctgtgaagatcatcgtgtccatcagcaagggctacggccgggccaaggaccagaagagccaggcctacctgattggcagcattggagtgtctgggaagaccaagtgggatgtgctggatggagtcatccggcggctcttcaaggagtatgtgttcagaattgacaccagcaccagcctgggcctgagcagtgactgcatcgccagctactgcatcggggacctgatccgcagccacaacctggaggtgcctgagctgctgccctgtggctacctggtgggggacaacaacatcatcaccgtgaacctgaagggcgtggaggagaacagcctggacagctttgtgtttgacaccctcatccccaagcccatcacccagcgctacttcaacctgctgatggagcaccaccgcatcatcctgagcggccccagcggcaccgggaagacctacctggccaacaagctggccgagtatgtgatcaccaagagcggcaggaagaagacagaagatgccatcgccaccttcaacgtggaccacaagagcagcaaggagctgcagcagtacctggccaacctggccgagcagtgcagcgctgacaacaatggagtggagctgcctgtggtgatcatcctggacaacctgcaccacgtgggcagcctgagtgacatcttcaacggcttcctgaactgcaagtacaacaagtgcccctacatcatcggcaccatgaaccagggcgtgagcagcagccccaacctggagctgcaccacaacttccgctgggtgctgtgtgccaaccacacagagcctgtgaagggcttcctgggccgctacctgcggaggaagctgattgagatctag

SEQ ID NO: 161687 - DNA, 7158 bp, synthetic construct
  misc_feature 1..7158: note = Description of Artificial Sequence: Synthetic coding sequence
  source 1..7158: mol_type = other DNA
atgcctgtgctgggcgtggccagcaagctgcggcagcctgctgtgggcagcaagcctgtgcacacagccctgcccatccccaacctgggcaccaccggcagccagcactgcagcagccggcccctggagctgacagaaacagagagctccatgctgagctgccagctggccctgaagagcacctgtgaatttggagagaagaagcccctgcagggcaaggccaaggagaaggaggacagcaagatctacacagactgggccaaccactacctggccaagagcggccacaagaggctcatcaaggacctgcagcaggacattgctgatggagtgctgctggccgagatcatccagatcatcgccaatgagaaggtggaggacatcaatggctgccccaggagccagagccagatgattgaaaatgtggatgtgtgcctgtccttcctggccgcccggggcgtgaatgtgcagggcctgtctgctgaggagatcagaaatggaaacctgaaggccatcctgggcctcttcttcagcctgagccgctacaagcagcagcagcaccaccagcagcagtactaccagagcctggtggagctgcagcagagggtgacccacgccagcccccccagcgaggccagccaggccaagacccagcaggacatgcagagcagcctggccgcccgctatgccacccagagcaaccacagcggcatcgccaccagccagaagaagcccacccggctgcccggccccagccgggtgcctgctgctggcagcagcagcaaggtgcagggcgccagcaacctgaacagaagaagccagagcttcaacagcattgacaagaacaagccacccaactatgccaatggaaatgagaaggacagcagcaagggcccccagagcagcagtggagtgaatggaaatgtgcagccccccagcacagctggccagcccccagccagcgccatccccagccccagcgccagcaagccctggaggagcaagtccatgaatgtgaagcacagcgccaccagcaccatgctgactgtgaagcagagcagcacagccaccagccccacccccagcagtgaccggctgaagccccctgtgtctgaaggagtgaagacagcccccagcggccagaagtccatgctggagaagttcaagctggtgaatgccaggacagccctgcggcccccccagccccccagcagcggccccagtgatggcggcaaggatgatgatgccttcagcgagagcggggagatggagggcttcaacagcggcctgaacagcggcggcagcaccaacagcagccccaaggtgagccccaagctggccccacccaaggccggcagcaagaacctgagcaacaagaagagcctgctgcagcccaaggagaaggaggagaagaacagagacaagaacaaggtgtgcacagagaagcctgtgaaggaggagaaggaccaggtgacagagatggcccccaagaagaccagcaagatcgccagcctcatccccaagggcagcaagaccacagctgccaagaaggagagcctcatccccagcagcagcggcatccccaagccaggcagcaaggtgcccaccgtgaagcagaccatcagccctggcagcacagccagcaaggagagcgagaagttccgcaccaccaagggcagccccagccagagcctgagcaagcccatcaccatggagaaggccagcgccagcagctgcccagcccccctggagggccgggaggccggccaggccagccccagcggcagctgcaccatgacagtggcccagagcagcggccagagcactggaaatggagctgtgcagctgccccagcagcagcagcacagccaccccaacacagccaccgtggcccccttcatctaccgggcccacagtgaaaatgaaggaacagccctgcccagcgctgacagctgcaccagccccaccaagatggacctgagctacagcaagacagccaagcagtgcctggaggagatcagcggggaggaccctgagaccaggaggatgaggacagtgaagaacattgctgacctgcggcagaacctggaggagaccatgagcagcctgcggggcacccagatcagccacagcaccctggagaccacctttgacagcacagtgaccacagaggtgaatggccgcaccatccccaacctgaccagccggcccacccccatgacctggaggctgggccaggcctgcccccggctgcaggccggagatgcccccagcctgggcgccggctaccccaggagcggcaccagccgcttcatccacacagaccccagccgcttcatgtacaccacccccctgcggcgggctgctgtgtcccggctgggcaacatgagccagattgacatgtctgagaaggccagcagtgacctggacatgagcagcgaggtggatgtgggcggctacatgtctgatggagacatcctgggcaagagcctgaggacagatgacatcaacagcggctacatgacagatggcggcctgaacctgtacaccaggagcctgaaccgcatcccagacacagccaccagccgggacatcatccagaggggcgtgcatgatgtgacagtggatgctgacagctgggatgacagcagctctgtgagcagcggcctgagtgacaccctggacaacatcagcacagatgacctgaacaccaccagctctgtgagcagctacagcaacatcaccgtgcccagcaggaagaacacccagctgaggacagacagcgagaagaggagcaccacagatgagacctgggacagccctgaggagctgaagaagccagaagaagattttgacagccatggagatgctgggggcaagtggaagacagtgagcagcggcctgcctgaggaccctgagaaggccggccagaaggccagcctgtctgtgtcccagacaggctcctggaggcggggcatgtctgcccagggcggggcccccagccggcagaaggccggcaccagcgccctgaagaccccaggcaagacagatgatgccaaggccagcgagaagggcaaggcccccctgaagggcagcagcctgcagaggagccccagtgatgctgggaagagcagtggagatgagggcaagaagccacccagcggcatcggccgcagcacagccaccagcagctttggcttcaagaagcccagcggcgtgggcagcagcgccatgatcaccagcagcggggccaccatcaccagcggcagcgccaccctgggcaagatccccaagtctgctgccatcggcggcaagagcaatgccggcaggaagaccagcctggatggcagccagaaccaggatgatgtggtgctgcacgtgagcagcaagaccaccctgcagtaccgcagcctgccccggcccagcaagagcagcaccagcggcatccctggccggggcggccacaggagcagcaccagcagcattgacagcaatgtgagcagcaagtctgctggggccaccaccagcaagctgcgggagcccaccaagattggcagcggccgcagcagccctgtgacagtgaaccagacagacaaggagaaggagaaggtggccgtgtctgattctgagagcgtgtccctgagcggcagccccaagagcagccccaccagcgccagcgcctgtggggcccagggcctgcggcagcccggcagcaagtacccagacatcgccagccccaccttcagaagactctttggagccaaggccggcggcaagagcgccagcgcccccaacacagagggcgtgaagagcagctctgtgatgcccagccccagcaccaccctggcccggcagggcagcctggagagccccagcagcggcaccggctccatgggcagcgctgggggcctgagcggcagcagcagccccctcttcaacaagcccagcgacctgaccacagatgtgatcagcctgagccacagcctggccagcagccctgcctctgtgcacagcttcaccagcggcggcctggtgtgggccgccaacatgagcagcagcagcgctggcagcaaggacacccccagctaccagagcatgaccagcctgcacaccagcagcgagagcattgacctgcccctgagccaccacggcagcctgagcggcctgaccaccggcacccatgaggtgcagagcctgctgatgaggactggatctgtgcgcagcaccctgtctgagagcatgcagctggacaggaacaccctgcccaagaagggcctgcgctacacccccagcagccggcaggccaaccaggaggagggcaaggagtggctgcggagccacagcactggaggcctgcaggacaccggcaaccagagccccctggtgagccccagcgccatgagcagcagcgctgctgggaagtaccacttcagcaacctggtgagccccaccaacctgagccagttcaacctgcccggccccagcatgatgaggagcaacagcatcccagcccaggacagcagctttgacctgtatgatgacagccagctgtgtggcagcgccaccagcctggaggagcggccccgggccatcagccacagcggcagcttccgggacagcatggaggaggtgcacggcagcagcctgagcctggtgagcagcaccagcagcctgtacagcacagctgaggagaaggcccacagcgagcagatccacaagctgcggcgggagctggtggccagccaggagaaggtggccaccctgaccagccagctgagcgccaatgcccacctggtggccgcctttgagaagagcctgggcaacatgacaggccgcctgcagagcctgaccatgacagctgagcagaaggagagcgagctgattgagctgcgggagaccatcgagatgctgaaggcccagaacagcgctgcccaggccgccatccagggcgccctgaatggaccagaccacccccccaaggacctgcgcatccggcggcagcacagcagcgagagcgtgagcagcatcaacagcgccaccagccacagcagcatcggcagcggaaatgatgctgacagcaagaagaagaagaagaagaactgggtgaacagccggggcagcgagctgcggagcagcttcaagcaggccttcggcaagaagaagagcaccaagccacccagcagccacagcgacatcgaggagctgacagacagcagcctgcctgccagccccaagctgccccacaatgctggggactgtggcagcgcctccatgaagcccagccagagcgccagcgccagccccctggtgtggccacccaagaagaggcagaatggacctgtgatctacaagcacaggagccgcatctgtgaatgtacagaagctgaggccgagatcatcctgcagctgaagtctgagctgcgggagaaggagctgaagctgacagacatccggctggaggccctgagcagcgcccaccacctggaccagatccgggaggccatgaacaggatgcagaatgaaattgagatcctgaaggccgagaatgaccggctgaaggccgagaccggcaacacagccaagcccaccaggcctccttctgagagcagcagcagcaccagcagcagcagcagccggcagagcctgggcctgagcctgaacaacctgaacatcacagaggccgtgtccagtgacatcctgctggatgatgctggagatgccaccggccacaaggatggccgctctgtgaagatcatcgtgtccatcagcaagggctacggccgggccaaggaccagaagagccaggcctacctgattggcagcattggagtgtctgggaagaccaagtgggatgtgctggatggagtcatccggcggctcttcaaggagtatgtgttcagaattgacaccagcaccagcctgggcctgagcagtgactgcatcgccagctactgcatcggggacctgatccgcagccacaacctggaggtgcctgagctgctgccctgtggctacctggtgggggacaacaacatcatcaccgtgaacctgaagggcgtggaggagaacagcctggacagctttgtgtttgacaccctcatccccaagcccatcacccagcgctacttcaacctgctgatggagcaccaccgcatcatcctgagcggccccagcggcaccgggaagacctacctggccaacaagctggccgagtatgtgatcaccaagagcggcaggaagaagacagaagatgccatcgccaccttcaacgtggaccacaagagcagcaaggagctgcagcagtacctggccaacctggccgagcagtgcagcgctgacaacaatggagtggagctgcctgtggtgatcatcctggacaacctgcaccacgtgggcagcctgagtgacatcttcaacggcttcctgaactgcaagtacaacaagtgcccctacatcatcggcaccatgaaccagggcgtgagcagcagccccaacctggagctgcaccacaacttccgctgggtgctgtgtgccaaccacacagagcctgtgaagggcttcctgggccgctacctgcggaggaagctgattgaaattgaaattgaaagaaacatccggaacaatgacctggtgaagatcatcgactggatccccaagacctggcaccacctgaacagcttcctggagacccacagcagcagtgatgtgaccatcggccccaggctcttcctgccctgccccatggatgtggagggcagccgggtgtggttcatggacctgtggaactacagcctggtgccctacatcctggaggccgtgcgggagggcctgcagatgtatggcaagaggaccccctgggaggaccccagcaagtgggtgctggacacctacccctggagcagcgccaccctgccccaggagagccctgccctgctgcagctgcggccagaagatgtgggctatgagagctgcaccagcaccaaggaggccaccaccagcaagcacatcccccagacagacacagaaggagaccccctgatgaacatgctgatgaagctgcaggaggccgccaactacagcagcacccagagctgtgacagcgagagcaccagccaccacgaggacatcctggacagcagcctggagagcaccctgtag

SEQ ID NO: 161688 - DNA, 7092 bp, synthetic construct
  misc_feature 1..7092: note = Description of Artificial Sequence: Synthetic coding sequence
  source 1..7092: mol_type = other DNA
atgcctgtgctgggcgtggccagcaagctgcggcagcctgctgtgggcagcaagcctgtgcacacagccctgcccatccccaacctgggcaccaccggcagccagcactgcagcagccggcccctggagctgacagaaacagagagctccatgctgagctgccagctggccctgaagagcacctgtgaatttggagagaagaagcccctgcagggcaaggccaaggagaaggaggacagcaagatctacacagactgggccaaccactacctggccaagagcggccacaagaggctcatcaaggacctgcagcaggacattgctgatggagtgctgctggccgagatcatccagatcatcgccaatgagaaggtggaggacatcaatggctgccccaggagccagagccagatgattgaaaatgtggatgtgtgcctgtccttcctggccgcccggggcgtgaatgtgcagggcctgtctgctgaggagatcagaaatggaaacctgaaggccatcctgggcctcttcttcagcctgagccgctacaagcagcagcagcaccaccagcagcagtactaccagagcctggtggagctgcagcagagggtgacccacgccagcccccccagcgaggccagccaggccaagacccagcaggacatgcagagcagcctggccgcccgctatgccacccagagcaaccacagcggcatcgccaccagccagaagaagcccacccggctgcccggccccagccgggtgcctgctgctggcagcagcagcaaggtgcagggcgccagcaacctgaacagaagaagccagagcttcaacagcattgacaagaacaagccacccaactatgccaatggaaatgagaaggacagcagcaagggcccccagagcagcagtggagtgaatggaaatgtgcagccccccagcacagctggccagcccccagccagcgccatccccagccccagcgccagcaagccctggaggagcaagtccatgaatgtgaagcacagcgccaccagcaccatgctgactgtgaagcagagcagcacagccaccagccccacccccagcagtgaccggctgaagccccctgtgtctgaaggagtgaagacagcccccagcggccagaagtccatgctggagaagttcaagctggtgaatgccaggacagccctgcggcccccccagccccccagcagcggccccagtgatggcggcaaggatgatgatgccttcagcgagagcggggagatggagggcttcaacagcggcctgaacagcggcggcagcaccaacagcagccccaaggtgagccccaagctggccccacccaaggccggcagcaagaacctgagcaacaagaagagcctgctgcagcccaaggagaaggaggagaagaacagagacaagaacaaggtgtgcacagagaagcctgtgaaggaggagaaggaccaggtgacagagatggcccccaagaagaccagcaagatcgccagcctcatccccaagggcagcaagaccacagctgccaagaaggagagcctcatccccagcagcagcggcatccccaagccaggcagcaaggtgcccaccgtgaagcagaccatcagccctggcagcacagccagcaaggagagcgagaagttccgcaccaccaagggcagccccagccagagcctgagcaagcccatcaccatggagaaggccagcgccagcagctgcccagcccccctggagggccgggaggccggccaggccagccccagcggcagctgcaccatgacagtggcccagagcagcggccagagcactggaaatggagctgtgcagctgccccagcagcagcagcacagccaccccaacacagccaccgtggcccccttcatctaccgggcccacagtgaaaatgaaggaacagccctgcccagcgctgacagctgcaccagccccaccaagatggacctgagctacagcaagacagccaagcagtgcctggaggagatcagcggggaggaccctgagaccaggaggatgaggacagtgaagaacattgctgacctgcggcagaacctggaggagaccatgagcagcctgcggggcacccagatcagccacagcaccctggagaccacctttgacagcacagtgaccacagaggtgaatggccgcaccatccccaacctgaccagccggcccacccccatgacctggaggctgggccaggcctgcccccggctgcaggccggagatgcccccagcctgggcgccggctaccccaggagcggcaccagccgcttcatccacacagaccccagccgcttcatgtacaccacccccctgcggcgggctgctgtgtcccggctgggcaacatgagccagattgacatgtctgagaaggccagcagtgacctggacatgagcagcgaggtggatgtgggcggctacatgtctgatggagacatcctgggcaagagcctgaggacagatgacatcaacagcggctacatgacagatggcggcctgaacctgtacaccaggagcctgaaccgcatcccagacacagccaccagccgggacatcatccagaggggcgtgcatgatgtgacagtggatgctgacagctgggatgacagcagctctgtgagcagcggcctgagtgacaccctggacaacatcagcacagatgacctgaacaccaccagctctgtgagcagctacagcaacatcaccgtgcccagcaggaagaacacccagctgaggacagacagcgagaagaggagcaccacagatgagacctgggacagccctgaggagctgaagaagccagaagaagattttgacagccatggagatgctgggggcaagtggaagacagtgagcagcggcctgcctgaggaccctgagaaggccggccagaaggccagcctgtctgtgtcccagacaggctcctggaggcggggcatgtctgcccagggcggggcccccagccggcagaaggccggcaccagcgccctgaagaccccaggcaagacagatgatgccaaggccagcgagaagggcaaggcccccctgaagggcagcagcctgcagaggagccccagtgatgctgggaagagcagtggagatgagggcaagaagccacccagcggcatcggccgcagcacagccaccagcagctttggcttcaagaagcccagcggcgtgggcagcagcgccatgatcaccagcagcggggccaccatcaccagcggcagcgccaccctgggcaagatccccaagtctgctgccatcggcggcaagagcaatgccggcaggaagaccagcctggatggcagccagaaccaggatgatgtggtgctgcacgtgagcagcaagaccaccctgcagtaccgcagcctgccccggcccagcaagagcagcaccagcggcatccctggccggggcggccacaggagcagcaccagcagcattgacagcaatgtgagcagcaagtctgctggggccaccaccagcaagctgcgggagcccaccaagattggcagcggccgcagcagccctgtgacagtgaaccagacagacaaggagaaggagaaggtggccgtgtctgattctgagagcgtgtccctgagcggcagccccaagagcagccccaccagcgccagcgcctgtggggcccagggcctgcggcagcccggcagcaagtacccagacatcgccagccccaccttcagaagactctttggagccaaggccggcggcaagagcgccagcgcccccaacacagagggcgtgaagagcagctctgtgatgcccagccccagcaccaccctggcccggcagggcagcctggagagccccagcagcggcaccggctccatgggcagcgctgggggcctgagcggcagcagcagccccctcttcaacaagcccagcgacctgaccacagatgtgatcagcctgagccacagcctggccagcagccctgcctctgtgcacagcttcaccagcggcggcctggtgtgggccgccaacatgagcagcagcagcgctggcagcaaggacacccccagctaccagagcatgaccagcctgcacaccagcagcgagagcattgacctgcccctgagccaccacggcagcctgagcggcctgaccaccggcacccatgaggtgcagagcctgctgatgaggactggatctgtgcgcagcaccctgtctgagagcatgcagctggacaggaacaccctgcccaagaagggcctgcgctacacccccagcagccggcaggccaaccaggaggagggcaaggagtggctgcggagccacagcactggaggcctgcaggacaccggcaaccagagccccctggtgagccccagcgccatgagcagcagcgctgctgggaagtaccacttcagcaacctggtgagccccaccaacctgagccagttcaacctgcccggccccagcatgatgaggagcaacagcatcccagcccaggacagcagctttgacctgtatgatgacagccagctgtgtggcagcgccaccagcctggaggagcggccccgggccatcagccacagcggcagcttccgggacagcatggaggaggtgcacggcagcagcctgagcctggtgagcagcaccagcagcctgtacagcacagctgaggagaaggcccacagcgagcagatccacaagctgcggcgggagctggtggccagccaggagaaggtggccaccctgaccagccagctgagcgccaatgcccacctggtggccgcctttgagaagagcctgggcaacatgacaggccgcctgcagagcctgaccatgacagctgagcagaaggagagcgagctgattgagctgcgggagaccatcgagatgctgaaggcccagaacagcgctgcccaggccgccatccagggcgccctgaatggaccagaccacccccccaaggacctgcgcatccggcggcagcacagcagcgagagcgtgagcagcatcaacagcgccaccagccacagcagcatcggcagcggaaatgatgctgacagcaagaagaagaagaagaagaactgggtgaacagccggggcagcgagctgcggagcagcttcaagcaggccttcggcaagaagaagagcaccaagccacccagcagccacagcgacatcgaggagctgacagacagcagcctgcctgccagccccaagctgccccacaatgctggggactgtggcagcgcctccatgaagcccagccagagcgccagcgccatctgtgaatgtacagaagctgaggccgagatcatcctgcagctgaagtctgagctgcgggagaaggagctgaagctgacagacatccggctggaggccctgagcagcgcccaccacctggaccagatccgggaggccatgaacaggatgcagaatgaaattgagatcctgaaggccgagaatgaccggctgaaggccgagaccggcaacacagccaagcccaccaggcctccttctgagagcagcagcagcaccagcagcagcagcagccggcagagcctgggcctgagcctgaacaacctgaacatcacagaggccgtgtccagtgacatcctgctggatgatgctggagatgccaccggccacaaggatggccgctctgtgaagatcatcgtgtccatcagcaagggctacggccgggccaaggaccagaagagccaggcctacctgattggcagcattggagtgtctgggaagaccaagtgggatgtgctggatggagtcatccggcggctcttcaaggagtatgtgttcagaattgacaccagcaccagcctgggcctgagcagtgactgcatcgccagctactgcatcggggacctgatccgcagccacaacctggaggtgcctgagctgctgccctgtggctacctggtgggggacaacaacatcatcaccgtgaacctgaagggcgtggaggagaacagcctggacagctttgtgtttgacaccctcatccccaagcccatcacccagcgctacttcaacctgctgatggagcaccaccgcatcatcctgagcggccccagcggcaccgggaagacctacctggccaacaagctggccgagtatgtgatcaccaagagcggcaggaagaagacagaagatgccatcgccaccttcaacgtggaccacaagagcagcaaggagctgcagcagtacctggccaacctggccgagcagtgcagcgctgacaacaatggagtggagctgcctgtggtgatcatcctggacaacctgcaccacgtgggcagcctgagtgacatcttcaacggcttcctgaactgcaagtacaacaagtgcccctacatcatcggcaccatgaaccagggcgtgagcagcagccccaacctggagctgcaccacaacttccgctgggtgctgtgtgccaaccacacagagcctgtgaagggcttcctgggccgctacctgcggaggaagctgattgaaattgaaattgaaagaaacatccggaacaatgacctggtgaagatcatcgactggatccccaagacctggcaccacctgaacagcttcctggagacccacagcagcagtgatgtgaccatcggccccaggctcttcctgccctgccccatggatgtggagggcagccgggtgtggttcatggacctgtggaactacagcctggtgccctacatcctggaggccgtgcgggagggcctgcagatgtatggcaagaggaccccctgggaggaccccagcaagtgggtgctggacacctacccctggagcagcgccaccctgccccaggagagccctgccctgctgcagctgcggccagaagatgtgggctatgagagctgcaccagcaccaaggaggccaccaccagcaagcacatcccccagacagacacagaaggagaccccctgatgaacatgctgatgaagctgcaggaggccgccaactacagcagcacccagagctgtgacagcgagagcaccagccaccacgaggacatcctggacagcagcctggagagcaccctgtag

SEQ ID NO: 161689 - DNA, 648 bp, synthetic construct
  misc_feature 1..648: note = Description of Artificial Sequence: Synthetic coding sequence
  source 1..648: mol_type = other DNA
atgaagcgctgggtgctgtgtgccaaccacacagagcctgtgaagggcttcctgggccgctacctgcggaggaagctgattgaaattgaaattgaaagaaacatccggaacaatgacctggtgaagatcatcgactggatccccaagacctggcaccacctgaacagcttcctggagacccacagcagcagtgatgtgaccatcggccccaggctcttcctgccctgccccatggatgtggagggcagccgggtgtggttcatggacctgtggaactacagcctggtgccctacatcctggaggccgtgcgggagggcctgcagatgtatggcaagaggaccccctgggaggaccccagcaagtgggtgctggacacctacccctggagcagcgccaccctgccccaggagagccctgccctgctgcagctgcggccagaagatgtgggctatgagagctgcaccagcaccaaggaggccaccaccagcaagcacatcccccagacagacacagaaggagaccccctgatgaacatgctgatgaagctgcaggaggccgccaactacagcagcacccagagctgtgacagcgagagcaccagccaccacgaggacatcctggacagcagcctggagagcaccctgtag

SEQ ID NO: 161690 - DNA, 573 bp, synthetic construct
  misc_feature 1..573: note = Description of Artificial Sequence: Synthetic coding sequence
  source 1..573: mol_type = other DNA
atgggcaagagcaacagcaagctgaagccagaggtggtggaggagctgaccaggaagacctacttcacagagaaggaggtgcagcagtggtacaagggcttcatcaaggactgccccagcggccagctggatgctgctggcttccagaagatctacaagcagttcttcccctttggagaccccaccaagtttgccacctttgtgttcaacgtgtttgatgagaacaaggatggccgcatcgagttcagcgagttcatccaggccctgtctgtgaccagccggggcaccctggatgagaagctgcgctgggccttcaagctgtatgacctggacaatgatggctacatcaccagaaatgagatgctggacatcgtggatgccatctaccagatggtgggcaacacagtggagctgcctgaggaggagaacaccccagagaagagggtggaccgcatctttgccatgatggacaagaatgctgatggcaagctgaccctgcaggagttccaggagggcagcaaggctgaccccagcatcgtgcaggccctgagcctgtatgatggcctggtgtag

SEQ ID NO: 161691 - DNA, 519 bp, synthetic construct
  misc_feature 1..519: note = Description of Artificial Sequence: Synthetic coding sequence
  source 1..519: mol_type = other DNA
atggccaccatcacagagaaggaggtgcagcagtggtacaagggcttcatcaaggactgccccagcggccagctggatgctgctggcttccagaagatctacaagcagttcttcccctttggagaccccaccaagtttgccacctttgtgttcaacgtgtttgatgagaacaaggatggccgcatcgagttcagcgagttcatccaggccctgtctgtgaccagccggggcaccctggatgagaagctgcgctgggccttcaagctgtatgacctggacaatgatggctacatcaccagaaatgagatgctggacatcgtggatgccatctaccagatggtgggcaacacagtggagctgcctgaggaggagaacaccccagagaagagggtggaccgcatctttgccatgatggacaagaatgctgatggcaagctgaccctgcaggagttccaggagggcagcaaggctgaccccagcatcgtgcaggccctgagcctgtatgatggcctggtgtag

SEQ ID NO: 161692 - DNA, 3552 bp, synthetic construct
  misc_feature 1..3552: note = Description of Artificial Sequence: Synthetic coding sequence
  source 1..3552: mol_type = other DNA
atgcagctgaagatcatgcccaagaagaagaggctgtctgctggccgggtgcccctcatcctcttcctgtgccagatgatcagcgccctggaggtgcccctggacctggtgcagccccccaccatcacccagcagagccccaaggactacatcatcgacccccgggagaacatcgtcatccagtgtgaggccaagggcaagcccccacccagcttctcctggaccagaaatggcacccactttgatattgacaaggaccccctggtgaccatgaagccaggcaccggcaccctcatcatcaacatcatgtctgagggcaaggccgagacctatgaaggagtgtaccagtgcacagccagaaatgaaagaggagctgctgtgagcaacaacatcgtggtgcggcccagccgcagccccctgtggaccaaggagaagctggagcccatcaccctgcagagcggccagagcctggtgctgccctgcaggcctcccatcggcctgcccccacccatcatcttctggatggacaacagcttccagaggctgccccagagcgagcgggtgtcccagggcctgaatggagacctgtacttcagcaatgtgctgcctgaggacacccgggaggactacatctgctacgcccgcttcaaccacacccagaccatccagcagaagcagcccatctctgtgaaggtgatctctgtggatgagctgaatgacaccatcgccgccaacctgagtgacacagagttctacggggccaagagcagccgggagaggcctcccaccttcctgaccccagagggcaatgccagcaacaaggaggagctgcggggaaatgtgctgagcctggagtgcatcgccgagggcctgcccacccccatcatctactgggccaaggaggatggcatgctgcccaagaacagaacagtgtacaagaactttgagaagaccctgcagatcatccacgtgtctgaggccgacagcggcaactaccagtgcatcgccaagaatgccctgggcgccatccaccacaccatctctgtgcgggtgaaggccgccccctactggatcacagccccccagaacctggtgctgagccctggagaagatggcaccctcatctgccgggccaatggaaaccccaagccccgcatctcctggctgaccaatggagtgcccattgaaattgccccagatgaccccagcaggaagattgatggagacaccatcatcttcagcaatgtgcaggagaggagcagcgctgtgtaccagtgcaatgccagcaatgaatatggctacctgctggccaatgcctttgtgaatgtgctggccgagcccccacgcatcctgaccccagccaacaccctgtaccaggtgattgccaacagacctgccctgctggactgtgccttcttcggcagccccctgcccaccatcgagtggttcaagggggccaagggcagcgccctgcacgaggacatctacgtgctgcatgaaaatggcaccctggagatccctgtggcccagaaggacagcacaggcacctacacctgtgtggccaggaacaagctgggcatggccaagaatgaggtgcacctggagatcaaggaccccacctggatcgtgaagcagccagaatatgctgtggtgcagaggggctccatggtgtcctttgagtgcaaggtgaagcatgaccacaccctgagcctgactgtgctgtggctgaaggacaaccgggagctgcccagtgatgagcgcttcaccgtggacaaggaccacctggtggtggctgatgtgtctgatgatgattctggcacctacacctgtgtggccaacaccaccctggacagcgtgtctgccagcgctgtgctgtctgtggtggatgtgcccaaccccccatttgacctggagctgacagaccagctggacaagtctgtgcagctgtcctggaccccaggagatgacaacaacagccccatcaccaagttcatcatcgagtatgaagatgccatgcacaagccaggcctgtggcaccaccagacagaggtgtctggcacccagaccacagcccagctgaagctgagcccctacgtgaactacagcttccgggtgatggctgtgaacagcatcggcaagagcctgcccagcgaggccagcgagcagtacctgaccaaggccagcgagccagacaagaaccccacagctgtggagggcctgggcagcgagccagacaacctggtgatcacctggaagcccctgaatggatttgagagcaatggacctggcctgcagtacaaggtgtcctggaggcagaaggatggagatgatgagtggacctctgtggtggtggccaacgtgtccaagtacatcgtgtctggcacccccacctttgtgccctacctgatcaaggtgcaggccctgaatgacatgggctttgcccctgagcctgctgtggtgatgggccacagcggggaggacctgcccatggtggcccctggaaatgtgcgggtgaatgtggtgaacagcaccctggccgaggtgcactgggaccctgtgcccctgaagagcatccggggccacctgcagggctaccgcatctactactggaagacccagagcagcagcaagaggaacagaagacacatcgagaagaagatcctgaccttccagggcagcaagacccacggcatgctgcccggcctggagcccttcagccactacaccctgaatgtgcgggtggtgaatggcaagggggagggccctgccagcccagacagagtcttcaacaccccagagggcgtgcccagcgcccccagcagcctgaagatcgtgaaccccaccctggacagcctgaccctggagtgggacccccccagccaccccaacggcatcctgacagagtacaccctgaagtaccagcccatcaacagcacccatgagctgggccccctggtggacctgaagatcccagccaacaagacccgctggaccctgaagaacctgaacttcagcacccgctacaagttctacttctacgcccagaccagcgctggcagcggcagccagatcacagaggaggccgtgaccaccgtggatgaggccatggccagccggcaggtggacatcgccacccagggctggttcatcggcctgatgtgtgctgtggccctgctgatcctgatcctgctgattgtgtgcttcatcagaagaaataaaggaggcaagtaccctgtgaaggagaaggaggatgcccatgctgaccctgagatccagcccatgaaggaggatgatggcacctttggagagtacagtgatgctgaggaccacaagcccctgaagaagggcagcaggacccccagcgacagaacagtgaagaaggaggacagtgatgacagcctggtggactatggagagggcgtgaatggccagttcaatgaagatggcagcttcatcggccagtacagcggcaagaaggagaaggagcctgctgagggcaatgaaagcagcgaggcccccagccctgtgaatgccatgaacagctttgtgtag

SEQ ID NO: 161693 - DNA, 3711 bp, synthetic construct
  misc_feature 1..3711: note = Description of Artificial Sequence: Synthetic coding sequence
  source 1..3711: mol_type = other DNA
atgcagctgaagatcatgcccaagaagaagaggctgtctgctggccgggtgcccctcatcctcttcctgtgccagatgatcagcgccctggaggtgcccctggaccagaagagcacagaggtgatggtgcagccccccaccatcacccagcagagccccaaggactacatcatcgacccccgggagaacatcgtcatccagtgtgaggccaagggcaagcccccacccagcttctcctggaccagaaatggcacccactttgatattgacaaggaccccctggtgaccatgaagccaggcaccggcaccctcatcatcaacatcatgtctgagggcaaggccgagacctatgaaggagtgtaccagtgcacagccagaaatgaaagaggagctgctgtgagcaacaacatcgtggtgcggcccagccgcagccccctgtggaccaaggagaagctggagcccatcaccctgcagagcggccagagcctggtgctgccctgcaggcctcccatcggcctgcccccacccatcatcttctggatggacaacagcttccagaggctgccccagagcgagcgggtgtcccagggcctgaatggagacctgtacttcagcaatgtgctgcctgaggacacccgggaggactacatctgctacgcccgcttcaaccacacccagaccatccagcagaagcagcccatctctgtgaaggtgatctctgtggatgagctgaatgacaccatcgccgccaacctgagtgacacagagttctacggggccaagagcagccgggagaggcctcccaccttcctgaccccagagggcaatgccagcaacaaggaggagctgcggggaaatgtgctgagcctggagtgcatcgccgagggcctgcccacccccatcatctactgggccaaggaggatggcatgctgcccaagaacagaacagtgtacaagaactttgagaagaccctgcagatcatccacgtgtctgaggccgacagcggcaactaccagtgcatcgccaagaatgccctgggcgccatccaccacaccatctctgtgcgggtgaaggccgccccctactggatcacagccccccagaacctggtgctgagccctggagaagatggcaccctcatctgccgggccaatggaaaccccaagccccgcatctcctggctgaccaatggagtgcccattgaaattgccccagatgaccccagcaggaagattgatggagacaccatcatcttcagcaatgtgcaggagaggagcagcgctgtgtaccagtgcaatgccagcaatgaatatggctacctgctggccaatgcctttgtgaatgtgctggccgagcccccacgcatcctgaccccagccaacaccctgtaccaggtgattgccaacagacctgccctgctggactgtgccttcttcggcagccccctgcccaccatcgagtggttcaagggggccaagggcagcgccctgcacgaggacatctacgtgctgcatgaaaatggcaccctggagatccctgtggcccagaaggacagcacaggcacctacacctgtgtggccaggaacaagctgggcatggccaagaatgaggtgcacctggagatcaaggaccccacctggatcgtgaagcagccagaatatgctgtggtgcagaggggctccatggtgtcctttgagtgcaaggtgaagcatgaccacaccctgagcctgactgtgctgtggctgaaggacaaccgggagctgcccagtgatgagcgcttcaccgtggacaaggaccacctggtggtggctgatgtgtctgatgatgattctggcacctacacctgtgtggccaacaccaccctggacagcgtgtctgccagcgctgtgctgtctgtggtggcccccacccccaccccagcccctgtgtatgatgtgcccaaccccccatttgacctggagctgacagaccagctggacaagtctgtgcagctgtcctggaccccaggagatgacaacaacagccccatcaccaagttcatcatcgagtatgaagatgccatgcacaagccaggcctgtggcaccaccagacagaggtgtctggcacccagaccacagcccagctgaagctgagcccctacgtgaactacagcttccgggtgatggctgtgaacagcatcggcaagagcctgcccagcgaggccagcgagcagtacctgaccaaggccagcgagccagacaagaaccccacagctgtggagggcctgggcagcgagccagacaacctggtgatcacctggaagcccctgaatggatttgagagcaatggacctggcctgcagtacaaggtgtcctggaggcagaaggatggagatgatgagtggacctctgtggtggtggccaacgtgtccaagtacatcgtgtctggcacccccacctttgtgccctacctgatcaaggtgcaggccctgaatgacatgggctttgcccctgagcctgctgtggtgatgggccacagcggggaggacctgcccatggtggcccctggaaatgtgcgggtgaatgtggtgaacagcaccctggccgaggtgcactgggaccctgtgcccctgaagagcatccggggccacctgcagggctaccgcatctactactggaagacccagagcagcagcaagaggaacagaagacacatcgagaagaagatcctgaccttccagggcagcaagacccacggcatgctgcccggcctggagcccttcagccactacaccctgaatgtgcgggtggtgaatggcaagggggagggccctgccagcccagacagagtcttcaacaccccagagggcgtgcccagcgcccccagcagcctgaagatcgtgaaccccaccctggacagcctgaccctggagtgggacccccccagccaccccaacggcatcctgacagagtacaccctgaagtaccagcccatcaacagcacccatgagctgggccccctggtggacctgaagatcccagccaacaagacccgctggaccctgaagaacctgaacttcagcacccgctacaagttctacttctacgcccagaccagcgctggcagcggcagccagatcacagaggaggccgtgaccaccgtggatgaagctggcatcctgcccccagatgtgggcgctgggaaggtgcaggccgtgaacccccgcatcagcaacctgacagctgctgctgctgagacctacgccaacatctcctgggagtatgagggccctgagcacgtgaacttctacgtggagtatggagtggccggcagcaaggaggagtggaggaaggagatcgtgaatggcagccgctccttcttcggcctgaagggcctgatgcctggaacagcctacaaggtgcgggtgggcgctgtgggggacagcggctttgtgtccagtgaagatgtgtttgaaacaggccctgccatggccagccggcaggtggacatcgccacccagggctggttcatcggcctgatgtgtgctgtggccctgctgatcctgatcctgctgattgtgtgcttcatcagaagaaacaagggcggcaagtaccctgtgaaggagaaggaggatgcccacgccgaccctgagatccagcccatgaaggaggatgatggcaccttcggggagtaccgcctcttctcctttgtgtcctctgccagcttctag

SEQ ID NO: 161694 - DNA, 3579 bp, synthetic construct
  misc_feature 1..3579: note = Description of Artificial Sequence: Synthetic coding sequence
  source 1..3579: mol_type = other DNA
atgcagctgaagatcatgcccaagaagaagaggctgtctgctggccgggtgcccctcatcctcttcctgtgccagatgatcagcgccctggaggtgcccctggaccccaagctgctggaggacctggtgcagccccccaccatcacccagcagagccccaaggactacatcatcgacccccgggagaacatcgtcatccagtgtgaggccaagggcaagcccccacccagcttctcctggaccagaaatggcacccactttgatattgacaaggaccccctggtgaccatgaagccaggcaccggcaccctcatcatcaacatcatgtctgagggcaaggccgagacctatgaaggagtgtaccagtgcacagccagaaatgaaagaggagctgctgtgagcaacaacatcgtggtgcggcccagccgcagccccctgtggaccaaggagaagctggagcccatcaccctgcagagcggccagagcctggtgctgccctgcaggcctcccatcggcctgcccccacccatcatcttctggatggacaacagcttccagaggctgccccagagcgagcgggtgtcccagggcctgaatggagacctgtacttcagcaatgtgctgcctgaggacacccgggaggactacatctgctacgcccgcttcaaccacacccagaccatccagcagaagcagcccatctctgtgaaggtgatcagcgccaagagcagccgggagcggccccccaccttcctgaccccagagggcaatgccagcaacaaggaggagctgcggggaaatgtgctgagcctggagtgcatcgccgagggcctgcccacccccatcatctactgggccaaggaggatggcatgctgcccaagaacagaacagtgtacaagaactttgagaagaccctgcagatcatccacgtgtctgaggccgacagcggcaactaccagtgcatcgccaagaatgccctgggcgccatccaccacaccatctctgtgcgggtgaaggccgccccctactggatcacagccccccagaacctggtgctgagccctggagaagatggcaccctcatctgccgggccaacggcaaccccaagccccgcatctcctggctgaccaacggggtgcccatcgagatcgccccagatgaccccagcaggaagattgatggagacaccatcatcttcagcaatgtgcaggagaggagcagcgctgtgtaccagtgcaatgccagcaatgaatatggctacctgctggccaatgcctttgtgaatgtgctggccgagcccccacgcatcctgaccccagccaacaccctgtaccaggtgattgccaacagacctgccctgctggactgtgccttcttcggcagccccctgcccaccatcgagtggttcaagggggccaagggcagcgccctgcacgaggacatctacgtgctgcatgaaaatggcaccctggagatccctgtggcccagaaggacagcacaggcacctacacctgtgtggccaggaacaagctgggcatggccaagaatgaggtgcacctggagatcaaggaccccacctggatcgtgaagcagccagaatatgctgtggtgcagaggggctccatggtgtcctttgagtgcaaggtgaagcatgaccacaccctgagcctgactgtgctgtggctgaaggacaaccgggagctgcccagtgatgagcgcttcaccgtggacaaggaccacctggtggtggctgatgtgtctgatgatgacagcggcacctacacctgtgtggccaacaccaccctggacagcgtgtctgccagcgctgtgctgtctgtggtggcccccacccccaccccagcccctgtgtatgatgtgcccaaccccccatttgacctggagctgacagaccagctggacaagtctgtgcagctgtcctggaccccaggagatgacaacaacagccccatcaccaagttcatcattgaatatgaagatgccatgcacaagccaggcctgtggcaccaccagacagaggtgtctggcacccagaccacagcccagctgaagctgagcccctacgtgaactacagcttccgggtgatggctgtgaacagcatcggcaagagcctgcccagcgaggccagcgagcagtacctgaccaaggccagcgagccagacaagaaccccacagctgtggagggcctgggcagcgagccagacaacctggtgatcacctggaagcccctgaatggatttgagagcaatggacctggcctgcagtacaaggtgtcctggaggcagaaggatggagatgatgagtggacctctgtggtggtggccaacgtgtccaagtacatcgtgtctggcacccccacctttgtgccctacctgatcaaggtgcaggccctgaatgacatgggctttgcccctgagcctgctgtggtgatgggccacagcggggaggacctgcccatggtggcccctggaaatgtgcgggtgaatgtggtgaacagcaccctggccgaggtgcactgggaccctgtgcccctgaagagcatccggggccacctgcagggctaccgcatctactactggaagacccagagcagcagcaagaggaacagaagacacatcgagaagaagatcctgaccttccagggcagcaagacccacggcatgctgcccggcctggagcccttcagccactacaccctgaatgtgcgggtggtgaatggaaaaggagagggccctgccagcccagacagagtcttcaacaccccagagggcgtgcccagcgcccccagcagcctgaagatcgtgaaccccaccctggacagcctgaccctggagtgggacccccccagccaccccaacggcatcctgacagagtacaccctgaagtaccagcccatcaacagcacccatgagctgggccccctggtggacctgaagatcccagccaacaagacccgctggaccctgaagaacctgaacttcagcacccgctacaagttctacttctacgcccagaccagcgctggcagcggcagccagatcacagaggaggccgtgaccaccgtggatgaggccggcatcctgcccccagatgtgggcgccggcaaggccatggccagccggcaggtggacatcgccacccagggctggttcatcggcctgatgtgtgctgtggccctgctgatcctgatcctgctgattgtgtgcttcatcagaagaaacaagggcggcaagtaccctgtgaaggagaaggaggatgcccacgccgaccctgagatccagcccatgaaggaggatgatggcaccttcggggagtacagtgatgctgaggaccacaagcccctgaagaagggcagcaggacccccagcgacagaacagtgaagaaggaggacagtgatgacagcctggtggactatggagaaggagtgaatggccagttcaatgaagatggcagcttcatcggccagtacagcggcaagaaggagaaggagcctgctgagggcaatgaatcttctgaggcccccagccctgtgaatgccatgaacagctttgtgtag

SEQ ID NO: 161695 - DNA, 3915 bp, synthetic construct
  misc_feature 1..3915: note = Description of Artificial Sequence: Synthetic coding sequence
  source 1..3915: mol_type = other DNA
atgcagctgaagatcatgcccaagaagaagaggctgtctgctggccgggtgcccctcatcctcttcctgtgccagatgatcagcgccctggaggtgcccctggaccccaagctgctggaggacctggtgcagccccccaccatcacccagcagagccccaaggactacatcatcgacccccgggagaacatcgtcatccagtgtgaggccaagggcaagcccccacccagcttctcctggaccagaaatggcacccactttgatattgacaaggaccccctggtgaccatgaagccaggcaccggcaccctcatcatcaacatcatgtctgagggcaaggccgagacctatgaaggagtgtaccagtgcacagccagaaatgaaagaggagctgctgtgagcaacaacatcgtggtgcggcccagccgcagccccctgtggaccaaggagaagctggagcccatcaccctgcagagcggccagagcctggtgctgccctgcaggcctcccatcggcctgcccccacccatcatcttctggatggacaacagcttccagaggctgccccagagcgagcgggtgtcccagggcctgaatggagacctgtacttcagcaatgtgctgcctgaggacacccgggaggactacatctgctacgcccgcttcaaccacacccagaccatccagcagaagcagcccatctctgtgaaggtgatctctgtggatgagctgaatgacaccatcgccgccaacctgagtgacacagagttctacggggccaagagcagccgggagaggcctcccaccttcctgaccccagagggcaatgccagcaacaaggaggagctgcggggaaatgtgctgagcctggagtgcatcgccgagggcctgcccacccccatcatctactgggccaaggaggatggcatgctgcccaagaacagaacagtgtacaagaactttgagaagaccctgcagatcatccacgtgtctgaggccgacagcggcaactaccagtgcatcgccaagaatgccctgggcgccatccaccacaccatctctgtgcgggtgaaggccgccccctactggatcacagccccccagaacctggtgctgagccctggagaagatggcaccctcatctgccgggccaatggaaaccccaagccccgcatctcctggctgaccaatggagtgcccattgaaattgccccagatgaccccagcaggaagattgatggagacaccatcatcttcagcaatgtgcaggagaggagcagcgctgtgtaccagtgcaatgccagcaatgaatatggctacctgctggccaatgcctttgtgaatgtgctggccgagcccccacgcatcctgaccccagccaacaccctgtaccaggtgattgccaacagacctgccctgctggactgtgccttcttcggcagccccctgcccaccatcgagtggttcaagggggccaagggcagcgccctgcacgaggacatctacgtgctgcatgaaaatggcaccctggagatccctgtggcccagaaggacagcacaggcacctacacctgtgtggccaggaacaagctgggcatggccaagaatgaggtgcacctggagatcaaggaccccacctggatcgtgaagcagccagaatatgctgtggtgcagaggggctccatggtgtcctttgagtgcaaggtgaagcatgaccacaccctgagcctgactgtgctgtggctgaaggacaaccgggagctgcccagtgatgagcgcttcaccgtggacaaggaccacctggtggtggctgatgtgtctgatgatgattctggcacctacacctgtgtggccaacaccaccctggacagcgtgtctgccagcgctgtgctgtctgtggtggcccccacccccaccccagcccctgtgtatgatgtgcccaaccccccatttgacctggagctgacagaccagctggacaagtctgtgcagctgtcctggaccccaggagatgacaacaacagccccatcaccaagttcatcatcgagtatgaagatgccatgcacaagccaggcctgtggcaccaccagacagaggtgtctggcacccagaccacagcccagctgaagctgagcccctacgtgaactacagcttccgggtgatggctgtgaacagcatcggcaagagcctgcccagcgaggccagcgagcagtacctgaccaaggccagcgagccagacaagaaccccacagctgtggagggcctgggcagcgagccagacaacctggtgatcacctggaagcccctgaatggatttgagagcaatggacctggcctgcagtacaaggtgtcctggaggcagaaggatggagatgatgagtggacctctgtggtggtggccaacgtgtccaagtacatcgtgtctggcacccccacctttgtgccctacctgatcaaggtgcaggccctgaatgacatgggctttgcccctgagcctgctgtggtgatgggccacagcggggaggacctgcccatggtggcccctggaaatgtgcgggtgaatgtggtgaacagcaccctggccgaggtgcactgggaccctgtgcccctgaagagcatccggggccacctgcagggctaccgcatctactactggaagacccagagcagcagcaagaggaacagaagacacatcgagaagaagatcctgaccttccagggcagcaagacccacggcatgctgcccggcctggagcccttcagccactacaccctgaatgtgcgggtggtgaatggcaagggggagggccctgccagcccagacagagtcttcaacaccccagagggcgtgcccagcgcccccagcagcctgaagatcgtgaaccccaccctggacagcctgaccctggagtgggacccccccagccaccccaacggcatcctgacagagtacaccctgaagtaccagcccatcaacagcacccatgagctgggccccctggtggacctgaagatcccagccaacaagacccgctggaccctgaagaacctgaacttcagcacccgctacaagttctacttctacgcccagaccagcgctggcagcggcagccagatcacagaggaggccgtgaccaccgtggatgaagctggcatcctgcccccagatgtgggcgctgggaaggtgcaggccgtgaacccccgcatcagcaacctgacagctgctgctgctgagacctacgccaacatctcctgggagtatgagggccctgagcacgtgaacttctacgtggagtatggagtggccggcagcaaggaggagtggaggaaggagatcgtgaatggcagccgctccttcttcggcctgaagggcctgatgcctggaacagcctacaaggtgcgggtgggcgctgtgggggacagcggctttgtgtccagtgaagatgtgtttgaaacaggccctgccatggccagccggcaggtggacatcgccacccagggctggttcatcggcctgatgtgtgctgtggccctgctgatcctgatcctgctgattgtgtgcttcatcagaagaaacaagggcggcaagtaccctgtgaaggagaaggaggatgcccacgccgaccctgagatccagcccatgaaggaggatgatggcaccttcggggagtacagtgatgctgaggaccacaagcccctgaagaagggcagcaggacccccagcgacagaacagtgaagaaggaggacagtgatgacagcctggtggactatggagaaggagtgaatggccagttcaatgaagatggcagcttcatcggccagtacagcggcaagaaggagaaggagcctgctgagggcaatgaatcttctgaggcccccagccctgtgaatgccatgaacagctttgtgtag

SEQ ID NO: 161696 - DNA, 3927 bp, synthetic construct
  misc_feature 1..3927: note = Description of Artificial Sequence: Synthetic coding sequence
  source 1..3927: mol_type = other DNA
atgcagctgaagatcatgcccaagaagaagaggctgtctgctggccgggtgcccctcatcctcttcctgtgccagatgatcagcgccctggaggtgcccctggaccagaagagcacagaggtgatggtgcagccccccaccatcacccagcagagccccaaggactacatcatcgacccccgggagaacatcgtcatccagtgtgaggccaagggcaagcccccacccagcttctcctggaccagaaatggcacccactttgatattgacaaggaccccctggtgaccatgaagccaggcaccggcaccctcatcatcaacatcatgtctgagggcaaggccgagacctatgaaggagtgtaccagtgcacagccagaaatgaaagaggagctgctgtgagcaacaacatcgtggtgcggcccagccgcagccccctgtggaccaaggagaagctggagcccatcaccctgcagagcggccagagcctggtgctgccctgcaggcctcccatcggcctgcccccacccatcatcttctggatggacaacagcttccagaggctgccccagagcgagcgggtgtcccagggcctgaatggagacctgtacttcagcaatgtgctgcctgaggacacccgggaggactacatctgctacgcccgcttcaaccacacccagaccatccagcagaagcagcccatctctgtgaaggtgatctctgtggatgagctgaatgacaccatcgccgccaacctgagtgacacagagttctacggggccaagagcagccgggagaggcctcccaccttcctgaccccagagggcaatgccagcaacaaggaggagctgcggggaaatgtgctgagcctggagtgcatcgccgagggcctgcccacccccatcatctactgggccaaggaggatggcatgctgcccaagaacagaacagtgtacaagaactttgagaagaccctgcagatcatccacgtgtctgaggccgacagcggcaactaccagtgcatcgccaagaatgccctgggcgccatccaccacaccatctctgtgcgggtgaaggccgccccctactggatcacagccccccagaacctggtgctgagccctggagaagatggcaccctcatctgccgggccaatggaaaccccaagccccgcatctcctggctgaccaatggagtgcccattgaaattgccccagatgaccccagcaggaagattgatggagacaccatcatcttcagcaatgtgcaggagaggagcagcgctgtgtaccagtgcaatgccagcaatgaatatggctacctgctggccaatgcctttgtgaatgtgctggccgagcccccacgcatcctgaccccagccaacaccctgtaccaggtgattgccaacagacctgccctgctggactgtgccttcttcggcagccccctgcccaccatcgagtggttcaagggggccaagggcagcgccctgcacgaggacatctacgtgctgcatgaaaatggcaccctggagatccctgtggcccagaaggacagcacaggcacctacacctgtgtggccaggaacaagctgggcatggccaagaatgaggtgcacctggagatcaaggaccccacctggatcgtgaagcagccagaatatgctgtggtgcagaggggctccatggtgtcctttgagtgcaaggtgaagcatgaccacaccctgagcctgactgtgctgtggctgaaggacaaccgggagctgcccagtgatgagcgcttcaccgtggacaaggaccacctggtggtggctgatgtgtctgatgatgattctggcacctacacctgtgtggccaacaccaccctggacagcgtgtctgccagcgctgtgctgtctgtggtggcccccacccccaccccagcccctgtgtatgatgtgcccaaccccccatttgacctggagctgacagaccagctggacaagtctgtgcagctgtcctggaccccaggagatgacaacaacagccccatcaccaagttcatcatcgagtatgaagatgccatgcacaagccaggcctgtggcaccaccagacagaggtgtctggcacccagaccacagcccagctgaagctgagcccctacgtgaactacagcttccgggtgatggctgtgaacagcatcggcaagagcctgcccagcgaggccagcgagcagtacctgaccaaggccagcgagccagacaagaaccccacagctgtggagggcctgggcagcgagccagacaacctggtgatcacctggaagcccctgaatggatttgagagcaatggacctggcctgcagtacaaggtgtcctggaggcagaaggatggagatgatgagtggacctctgtggtggtggccaacgtgtccaagtacatcgtgtctggcacccccacctttgtgccctacctgatcaaggtgcaggccctgaatgacatgggctttgcccctgagcctgctgtggtgatgggccacagcggggaggacctgcccatggtggcccctggaaatgtgcgggtgaatgtggtgaacagcaccctggccgaggtgcactgggaccctgtgcccctgaagagcatccggggccacctgcagggctaccgcatctactactggaagacccagagcagcagcaagaggaacagaagacacatcgagaagaagatcctgaccttccagggcagcaagacccacggcatgctgcccggcctggagcccttcagccactacaccctgaatgtgcgggtggtgaatggcaagggggagggccctgccagcccagacagagtcttcaacaccccagagggcgtgcccagcgcccccagcagcctgaagatcgtgaaccccaccctggacagcctgaccctggagtgggacccccccagccaccccaacggcatcctgacagagtacaccctgaagtaccagcccatcaacagcacccatgagctgggccccctggtggacctgaagatcccagccaacaagacccgctggaccctgaagaacctgaacttcagcacccgctacaagttctacttctacgcccagaccagcgctggcagcggcagccagatcacagaggaggccgtgaccaccgtggatgaagctggcatcctgcccccagatgtgggcgctgggaaggtgcaggccgtgaacccccgcatcagcaacctgacagctgctgctgctgagacctacgccaacatctcctgggagtatgagggccctgagcacgtgaacttctacgtggagtatggagtggccggcagcaaggaggagtggaggaaggagatcgtgaatggcagccgctccttcttcggcctgaagggcctgatgcctggaacagcctacaaggtgcgggtgggcgctgtgggggacagcggctttgtgtccagtgaagatgtgtttgaaacaggccctgccatggccagccggcaggtggacatcgccacccagggctggttcatcggcctgatgtgtgctgtggccctgctgatcctgatcctgctgattgtgtgcttcatcagaagaaacaagggcggcaagtaccctgtgaaggagaaggaggatgcccacgccgaccctgagatccagcccatgaaggaggatgatggcaccttcggggagtacagcagcctgaagaatgatgctgaggaccacaagcccctgaagaagggcagcaggacccccagcgacagaacagtgaagaaggaggacagtgatgacagcctggtggactatggagaaggagtgaatggccagttcaatgaagatggcagcttcatcggccagtacagcggcaagaaggagaaggagcctgctgagggcaatgaatcttctgaggcccccagccctgtgaatgccatgaacagctttgtgtag

SEQ ID NO: 161697 - DNA, 3543 bp, synthetic construct
  misc_feature 1..3543: note = Description of Artificial Sequence: Synthetic coding sequence
  source 1..3543: mol_type = other DNA
atgcagctgaagatcatgcccaagaagaagaggctgtctgctggccgggtgcccctcatcctcttcctgtgccagatgatcagcgccctggaggtgcccctggaccagaagagcacagaggtgatggtgcagccccccaccatcacccagcagagccccaaggactacatcatcgacccccgggagaacatcgtcatccagtgtgaggccaagggcaagcccccacccagcttctcctggaccagaaatggcacccactttgatattgacaaggaccccctggtgaccatgaagccaggcaccggcaccctcatcatcaacatcatgtctgagggcaaggccgagacctatgaaggagtgtaccagtgcacagccagaaatgaaagaggagctgctgtgagcaacaacatcgtggtgcggcccagccgcagccccctgtggaccaaggagaagctggagcccatcaccctgcagagcggccagagcctggtgctgccctgcaggcctcccatcggcctgcccccacccatcatcttctggatggacaacagcttccagaggctgccccagagcgagcgggtgtcccagggcctgaatggagacctgtacttcagcaatgtgctgcctgaggacacccgggaggactacatctgctacgcccgcttcaaccacacccagaccatccagcagaagcagcccatctctgtgaaggtgatcagcgccaagagcagccgggagcggccccccaccttcctgaccccagagggcaatgccagcaacaaggaggagctgcggggaaatgtgctgagcctggagtgcatcgccgagggcctgcccacccccatcatctactgggccaaggaggatggcatgctgcccaagaacagaacagtgtacaagaactttgagaagaccctgcagatcatccacgtgtctgaggccgacagcggcaactaccagtgcatcgccaagaatgccctgggcgccatccaccacaccatctctgtgcgggtgaaggccgccccctactggatcacagccccccagaacctggtgctgagccctggagaagatggcaccctcatctgccgggccaacggcaaccccaagccccgcatctcctggctgaccaacggggtgcccatcgagatcgccccagatgaccccagcaggaagattgatggagacaccatcatcttcagcaatgtgcaggagaggagcagcgctgtgtaccagtgcaatgccagcaatgaatatggctacctgctggccaatgcctttgtgaatgtgctggccgagcccccacgcatcctgaccccagccaacaccctgtaccaggtgattgccaacagacctgccctgctggactgtgccttcttcggcagccccctgcccaccatcgagtggttcaagggggccaagggcagcgccctgcacgaggacatctacgtgctgcatgaaaatggcaccctggagatccctgtggcccagaaggacagcacaggcacctacacctgtgtggccaggaacaagctgggcatggccaagaatgaggtgcacctggagatcaaggaccccacctggatcgtgaagcagccagaatatgctgtggtgcagaggggctccatggtgtcctttgagtgcaaggtgaagcatgaccacaccctgagcctgactgtgctgtggctgaaggacaaccgggagctgcccagtgatgagcgcttcaccgtggacaaggaccacctggtggtggctgatgtgtctgatgatgacagcggcacctacacctgtgtggccaacaccaccctggacagcgtgtctgccagcgctgtgctgtctgtggtggcccccacccccaccccagcccctgtgtatgatgtgcccaaccccccatttgacctggagctgacagaccagctggacaagtctgtgcagctgtcctggaccccaggagatgacaacaacagccccatcaccaagttcatcattgaatatgaagatgccatgcacaagccaggcctgtggcaccaccagacagaggtgtctggcacccagaccacagcccagctgaagctgagcccctacgtgaactacagcttccgggtgatggctgtgaacagcatcggcaagagcctgcccagcgaggccagcgagcagtacctgaccaaggccagcgagccagacaagaaccccacagctgtggagggcctgggcagcgagccagacaacctggtgatcacctggaagcccctgaatggatttgagagcaatggacctggcctgcagtacaaggtgtcctggaggcagaaggatggagatgatgagtggacctctgtggtggtggccaacgtgtccaagtacatcgtgtctggcacccccacctttgtgccctacctgatcaaggtgcaggccctgaatgacatgggctttgcccctgagcctgctgtggtgatgggccacagcggggaggacctgcccatggtggcccctggaaatgtgcgggtgaatgtggtgaacagcaccctggccgaggtgcactgggaccctgtgcccctgaagagcatccggggccacctgcagggctaccgcatctactactggaagacccagagcagcagcaagaggaacagaagacacatcgagaagaagatcctgaccttccagggcagcaagacccacggcatgctgcccggcctggagcccttcagccactacaccctgaatgtgcgggtggtgaatggaaaaggagagggccctgccagcccagacagagtcttcaacaccccagagggcgtgcccagcgcccccagcagcctgaagatcgtgaaccccaccctggacagcctgaccctggagtgggacccccccagccaccccaacggcatcctgacagagtacaccctgaagtaccagcccatcaacagcacccatgagctgggccccctggtggacctgaagatcccagccaacaagacccgctggaccctgaagaacctgaacttcagcacccgctacaagttctacttctacgcccagaccagcgctggcagcggcagccagatcacagaggaggccgtgaccaccgtggatgaggccatggccagccggcaggtggacatcgccacccagggctggttcatcggcctgatgtgtgctgtggccctgctgatcctgatcctgctgattgtgtgcttcatcagaagaaacaagggcggcaagtaccctgtgaaggagaaggaggatgcccacgccgaccctgagatccagcccatgaaggaggatgatggcaccttcggggagtacagtgatgctgaggaccacaagcccctgaagaagggcagcaggacccccagcgacagaacagtgaagaaggaggacagtgatgacagcctggtggactatggagaaggagtgaatggccagttcaatgaagatggcagcttcatcggccagtacagcggcaagaaggagaaggagcctgctgagggcaatgaatcttctgaggcccccagccctgtgaatgccatgaacagctttgtgtag

SEQ ID NO: 161698 - DNA, 1296 bp, synthetic construct
  misc_feature 1..1296: note = Description of Artificial Sequence: Synthetic coding sequence
  source 1..1296: mol_type = other DNA
atgcagctgaagatcatgcccaagaagaagaggctgtctgctggccgggtgcccctcatcctcttcctgtgccagatgatcagcgccctggaggtgcccctggacctggtgcagccccccaccatcacccagcagagccccaaggactacatcatcgacccccgggagaacatcgtcatccagtgtgaggccaagggcaagcccccacccagcttctcctggaccagaaatggcacccactttgatattgacaaggaccccctggtgaccatgaagccaggcaccggcaccctcatcatcaacatcatgtctgagggcaaggccgagacctatgaaggagtgtaccagtgcacagccagaaatgaaagaggagctgctgtgagcaacaacatcgtggtgcggcccagccgcagccccctgtggaccaaggagaagctggagcccatcaccctgcagagcggccagagcctggtgctgccctgcaggcctcccatcggcctgcccccacccatcatcttctggatggacaacagcttccagaggctgccccagagcgagcgggtgtcccagggcctgaatggagacctgtacttcagcaatgtgctgcctgaggacacccgggaggactacatctgctacgcccgcttcaaccacacccagaccatccagcagaagcagcccatctctgtgaaggtgatctctgtggatgagctgaatgacaccatcgccgccaacctgagtgacacagagttctacggggccaagagcagccgggagaggcctcccaccttcctgaccccagagggcaatgccagcaacaaggaggagctgcggggaaatgtgctgagcctggagtgcatcgccgagggcctgcccacccccatcatctactgggccaaggaggatggcatgctgcccaagaacagaacagtgtacaagaactttgagaagaccctgcagatcatccacgtgtctgaggccgacagcggcaactaccagtgcatcgccaagaatgccctgggcgccatccaccacaccatctctgtgcgggtgaaggccgccccctactggatcacagccccccagaacctggtgctgagccctggagaagatggcaccctcatctgccgggccaatggaaaccccaagccccgcatctcctggctgaccaatggagtgcccattgaaattgccccagatgaccccagcaggaagattgatggagacaccatcatcttcagcaatgtgcaggagaggagcagcgctgtgtaccagtgcaatgccagcaatgaatag

SEQ ID NO: 161699 - DNA, 186 bp, synthetic construct
  misc_feature 1..186: note = Description of Artificial Sequence: Synthetic coding sequence
  source 1..186: mol_type = other DNA
atgcagctgaagatcatgcccaagaagaagaggctgtctgctggccgggtgcccctcatcctcttcctgtgccagatgatcagcgccctggaggtgcccctggaccccaagctgctggaggacctggtgcagccccccaccatcacccagcagagccccaaggactacatcatcgaccccaggtag

SEQ ID NO: 161700 - DNA, 321 bp, synthetic construct
  misc_feature 1..321: note = Description of Artificial Sequence: Synthetic coding sequence
  source 1..321: mol_type = other DNA
atgcagctgaagatcatgcccaagaagaagaggctgtctgctggccgggtgcccctcatcctcttcctgtgccagatgatcagcgccctggaggtgcccctggacctggtgcagccccccaccatcacccagcagagccccaaggactacatcatcgacccccgggagaacatcgtcatccagtgtgaggccaagggcaagcccccacccagcttctcctggaccagaaatggcacccactttgatattgacaaggaccccctggtgaccatgaagccaggcaccggcaccctcatcatcaacatcatgtctgagggctag

SEQ ID NO: 161701 - DNA, 3915 bp, synthetic construct; identical to SEQ ID NO: 161695
  misc_feature 1..3915: note = Description of Artificial Sequence: Synthetic coding sequence
  source 1..3915: mol_type = other DNA

SEQ ID NO: 161702 - DNA, 447 bp, synthetic construct
  misc_feature 1..447: note = Description of Artificial Sequence: Synthetic coding sequence
  source 1..447: mol_type = other DNA
atggccagccggcaggtggacatcgccacccagggctggttcatcggcctgatgtgtgctgtggccctgctgatcctgatcctgctgattgtgtgcttcatcagaagaaacaagggcggcaagtaccctgtgaaggagaaggaggatgcccacgccgaccctgagatccagcccatgaaggaggatgatggcaccttcggggagtacagtgatgctgaggaccacaagcccctgaagaagggcagcaggacccccagcgacagaacagtgaagaaggaggacagtgatgacagcctggtggactatggagaaggagtgaatggccagttcaatgaagatggcagcttcatcggccagtacagcggcaagaaggagaaggagcctgctgagggcaatgaatcttctgaggcccccagccctgtgaatgccatgaacagctttgtgtag

SEQ ID NO: 161703 - DNA, 357 bp, synthetic construct
  misc_feature 1..357: note = Description of Artificial Sequence: Synthetic coding sequence
  source 1..357: mol_type = other DNA
atgcagctgaagatcatgcccaagaagaagaggctgtctgctggccgggtgcccctcatcctcttcctgtgccagatgatcagcgccctggaggtgcccctggaccccaagctgctggaggacctggtgcagccccccaccatcacccagcagagccccaaggactacatcatcgacccccgggagaacatcgtcatccagtgtgaggccaagggcaagcccccacccagcttctcctggaccagaaatggcacccactttgatattgacaaggaccccctggtgaccatgaagccaggcaccggcaccctcatcatcaacatcatgtctgagggcaaggccgagacctatgaatag

SEQ ID NO: 161704 - DNA, 2316 bp, synthetic construct
  misc_feature 1..2316: note = Description of Artificial Sequence: Synthetic coding sequence
  source 1..2316: mol_type = other DNA
atgcagctgaagatcatgcccaagaagaagaggctgtctgctggccgggtgcccctcatcctcttcctgtgccagatgatcagcgccctggaggtgcccctggacctggtgcagccccccaccatcacccagcagagccccaaggactacatcatcgacccccgggagaacatcgtcatccagtgtgaggccaagggcaagcccccacccagcttctcctggaccagaaatggcacccactttgatattgacaaggaccccctggtgaccatgaagccaggcaccggcaccctcatcatcaacatcatgtctgagggcaaggccgagacctatgaaggagtgtaccagtgcacagccagaaatgaaagaggagctgctgtgagcaacaacatcgtggtgcggcccagccgcagccccctgtggaccaaggagaagctggagcccatcaccctgcagagcggccagagcctggtgctgccctgcaggcctcccatcggcctgcccccacccatcatcttctggatggacaacagcttccagaggctgccccagagcgagcgggtgtcccagggcctgaatggagacctgtacttcagcaatgtgctgcctgaggacacccgggaggactacatctgctacgcccgcttcaaccacacccagaccatccagcagaagcagcccatctctgtgaaggtgatctctgtggatgagctgaatgacaccatcgccgccaacctgagtgacacagagttctacggggccaagagcagccgggagaggcctcccaccttcctgaccccagagggcaatgccagcaacaaggaggagctgcggggaaatgtgctgagcctggagtgcatcgccgagggcctgcccacccccatcatctactgggccaaggaggatggcatgctgcccaagaacagaacagtgtacaagaactttgagaagaccctgcagatcatccacgtgtctgaggccgacagcggcaactaccagtgcatcgccaagaatgccctgggcgccatccaccacaccatctctgtgcgggtgaaggccgccccctactggatcacagccccccagaacctggtgctgagccctggagaagatggcaccctcatctgccgggccaatggaaaccccaagccccgcatctcctggctgaccaatggagtgcccattgaaattgccccagatgaccccagcaggaagattgatggagacaccatcatcttcagcaatgtgcaggagaggagcagcgctgtgtaccagtgcaatgccagcaatgaatatggctacctgctggccaatgcctttgtgaatgtgctggccgagcccccacgcatcctgaccccagccaacaccctgtaccaggtgattgccaacagacctgccctgctggactgtgccttcttcggcagccccctgcccaccatcgagtggttcaagggggccaagggcagcgccctgcacgaggacatctacgtgctgcatgaaaatggcaccctggagatccctgtggcccagaaggacagcacaggcacctacacctgtgtggccaggaacaagctgggcatggccaagaatgaggtgcacctggagatcaaggaccccacctggatcgtgaagcagccagaatatgctgtggtgcagaggggctccatggtgtcctttgagtgcaaggtgaagcatgaccacaccctgagcctgactgtgctgtggctgaaggacaaccgggagctgcccagtgatgagcgcttcaccgtggacaaggaccacctggtggtggctgatgtgtctgatgatgattctggcacctacacctgtgtggccaacaccaccctggacagcgtgtctgccagcgctgtgctgtctgtggtggatgtgcccaaccccccatttgacctggagctgacagaccagctggacaagtctgtgcagctgtcctggaccccaggagatgacaacaacagccccatcaccaagttcatcatcgagtatgaagatgccatgcacaagccaggcctgtggcaccaccagacagaggtgtctggcacccagaccacagcccagctgaagctgagcccctacgtgaactacagcttccgggtgatggctgtgaacagcatcggcaagagcctgcccagcgaggccagcgagcagtacctgaccaaggccagcgagccagacaagaaccccacagctgtggagggcctgggcagcgagccagacaacctggtgatcacctggaagcccctgaatggatttgagagcaatggacctggcctgcagaccagcacagccagcttctag

SEQ ID NO: 161705 - DNA, 321 bp, synthetic construct; identical to SEQ ID NO: 161700
  misc_feature 1..321: note = Description of Artificial Sequence: Synthetic coding sequence
  source 1..321: mol_type = other DNA

SEQ ID NO: 161706 - DNA, 3462 bp, synthetic construct
  misc_feature 1..3462: note = Description of Artificial Sequence: Synthetic coding sequence
  source 1..3462: mol_type = other DNA
atgcagctgaagatcatgcccaagaagaagaggctgtctgctggccgggtgcccctcatcctcttcctgtgccagatgatcagcgccctggaggtgcccctggaccagaagagcacagaggtgatggtgcagccccccaccatcacccagcagagccccaaggactacatcatcgacccccgggagaacatcgtcatccagtgtgaggccaagggcaagcccccacccagcttctcctggaccagaaatggcacccactttgatattgacaaggaccccctggtgaccatgaagccaggcaccggcaccctcatcatcaacatcatgtctgagggcaaggccgagacctatgaaggagtgtaccagtgcacagccagaaatgaaagaggagctgctgtgagcaacaacatcgtggtgcggcccagccgcagccccctgtggaccaaggagaagctggagcccatcaccctgcagagcggccagagcctggtgctgccctgcaggcctcccatcggcctgcccccacccatcatcttctggatggacaacagcttccagaggctgccccagagcgagcgggtgtcccagggcctgaatggagacctgtacttcagcaatgtgctgcctgaggacacccgggaggactacatctgctacgcccgcttcaaccacacccagaccatccagcagaagcagcccatctctgtgaaggtgatctctgtggatgagctgaatgacaccatcgccgccaacctgagtgacacagagttctacggggccaagagcagccgggagaggcctcccaccttcctgaccccagagggcaatgccagcaacaaggaggagctgcggggaaatgtgctgagcctggagtgcatcgccgagggcctgcccacccccatcatctactgggccaaggaggatggcatgctgcccaagaacagaacagtgtacaagaactttgagaagaccctgcagatcatccacgtgtctgaggccgacagcggcaactaccagtgcatcgccaagaatgccctgggcgccatccaccacaccatctctgtgcgggtgaaggccgccccctactggatcacagccccccagaacctggtgctgagccctggagaagatggcaccctcatctgccgggccaatggaaaccccaagccccgcatctcctggctgaccaatggagtgcccattgaaattgccccagatgaccccagcaggaagattgatggagacaccatcatcttcagcaatgtgcaggagaggagcagcgctgtgtaccagtgcaatgccagcaatgaatatggctacctgctggccaatgcctttgtgaatgtgctggccgagcccccacgcatcctgaccccagccaacaccctgtaccaggtgattgccaacagacctgccctgctggactgtgccttcttcggcagccccctgcccaccatcgagtggttcaagggggccaagggcagcgccctgcacgaggacatctacgtgctgcatgaaaatggcaccctggagatccctgtggcccagaaggacagcacaggcacctacacctgtgtggccaggaacaagctgggcatggccaagaatgaggtgcacctggagatcaaggaccccacctggatcgtgaagcagccagaatatgctgtggtgcagaggggctccatggtgtcctttgagtgcaaggtgaagcatgaccacaccctgagcctgactgtgctgtggctgaaggacaaccgggagctgcccagtgatgagcgcttcaccgtggacaaggaccacctggtggtggctgatgtgtctgatgatgattctggcacctacacctgtgtggccaacaccaccctggacagcgtgtctgccagcgctgtgctgtctgtggtggcccccacccccaccccagcccctgtgtatgatgtgcccaaccccccatttgacctggagctgacagaccagctggacaagtctgtgcagctgtcctggaccccaggagatgacaacaacagccccatcaccaagttcatcatcgagtatgaagatgccatgcacaagccaggcctgtggcaccaccagacagaggtgtctggcacccagaccacagcccagctgaagctgagcccctacgtgaactacagcttccgggtgatggctgtgaacagcatcggcaagagcctgcccagcgaggccagcgagcagtacctgaccaaggccagcgagccagacaagaaccccacagctgtggagggcctgggcagcgagccagacaacctggtgatcacctggaagcccctgaatggatttgagagcaatggacctggcctgcagtacaaggtgtcctggaggcagaaggatggagatgatgagtggacctctgtggtggtggccaacgtgtccaagtacatcgtgtctggcacccccacctttgtgccctacctgatcaaggtgcaggccctgaatgacatgggctttgcccctgagcctgctgtggtgatgggccacagcggggaggacctgcccatggtggcccctggaaatgtgcgggtgaatgtggtgaacagcaccctggccgaggtgcactgggaccctgtgcccctgaagagcatccggggccacctgcagggctaccgcatctactactggaagacccagagcagcagcaagaggaacagaagacacatcgagaagaagatcctgaccttccagggcagcaagacccacggcatgctgcccggcctggagcccttcagccactacaccctgaatgtgcgggtggtgaatggcaagggggagggccctgccagcccagacagagtcttcaacaccccagagggcgtgcccagcgcccccagcagcctgaagatcgtgaaccccaccctggacagcctgaccctggagtgggacccccccagccaccccaacggcatcctgacagagtacaccctgaagtaccagcccatcaacagcacccatgagctgggccccctggtggacctgaagatcccagccaacaagacccgctggaccctgaagaacctgaacttcagcacccgctacaagttctacttctacgcccagaccagcgctggcagcggcagccagatcacagaggaggccgtgaccaccgtggatgaagctggcatcctgcccccagatgtgggcgctgggaaggccatggccagccggcaggtggacatcgccacccagggctggttcatcggcctgatgtgtgctgtggccctgctgatcctgatcctgctgattgtgtgcttcatcagaagaaataaaggaggcaagtaccctgtgaaggagaaggaggatgcccatgctgaccctgagatccagcccatgaaggaggatgatggcacctttggagagtacagtgatgctgaggaccacaagcccctgaagaagggcagcaggacccccagcgacagaacagtgtag

SEQ ID NO: 161707 - DNA, 681 bp, synthetic construct
  misc_feature 1..681: note = Description of Artificial Sequence: Synthetic coding sequence
  source 1..681: mol_type = other DNA
atgcaggtgcacctgactgtgcaggtgccccccaagatctatgacatcagcaatgacatgacagtgaatgaaggcaccaacgtgaccctgacctgcctggccaccgggaagccagagcccagcatctcctggaggcacatcagccccagcgccaagccctttgaaaatggccagtacctggacatctacggcatcacccgggaccaggccggggagtatgagtgcagcgcagaaaatgatgtgtccttcccagatgtgaggaaggtgaaggtggtggtgaactttgcccccaccatccaggagatcaagagcggcaccgtgaccccaggccgcagcggcctcatccgctgtgagggcgctggggtgcccccaccagcctttgagtggtacaagggggagaagaagctgttcaacggccagcagggcatcatcatccagaacttcagcaccaggagcatcctgactgtgaccaacgtgacccaggagcacttcggcaactacacctgtgtggccgccaacaagctgggcaccaccaatgccagcctgcccctgaacccccccagcacagcccagtatggcatcactggatctgcagatgtgctcttcagctgctggtacctggtgctgaccctgagcagcttcaccagcatcttctacctgaagaatgccatcctgcagtag

SEQ ID NO: 161708 - DNA, 1065 bp, synthetic construct
  misc_feature 1..1065: note = Description of Artificial Sequence: Synthetic coding sequence
  source 1..1065: mol_type = other DNA
atggacatgatgctgctggtgcagggcgcctgctgcagcaaccagtggctggccgctgtgctgctgagcctgtgctgcctgctgcccagctgcctgcctgctggccagagcgtggacttcccctgggccgctgtggacaacatgatggtgaggaagggggacacagctgtgctgcgctgctacctggaggatggagccagcaagggggcctggctgaacagaagcagcatcatctttgctggaggagacaagtggagcgtggacccccgggtgtccatcagcaccctgaacaagagggactacagcctgcagatccagaatgtggatgtgacagatgatggcccctacacctgcagcgtgcagacccagcacacccccaggaccatgcaggtgcacctgactgtgcaggtgccccccaagatctatgacatcagcaatgacatgacagtgaatgaaggcaccaacgtgaccctgacctgcctggccaccgggaagccagagcccagcatctcctggaggcacatcagccccagcgccaagccctttgaaaatggccagtacctggacatctacggcatcacccgggaccaggccggggagtatgagtgcagcgcagaaaatgatgtgtccttcccagatgtgaggaaggtgaaggtggtggtgaactttgcccccaccatccaggagatcaagagcggcaccgtgaccccaggccgcagcggcctcatccgctgtgagggcgctggggtgcccccaccagcctttgagtggtacaagggggagaagaagctgttcaacggccagcagggcatcatcatccagaacttcagcaccaggagcatcctgactgtgaccaacgtgacccaggagcacttcggcaactacacctgtgtggccgccaacaagctgggcaccaccaatgccagcctgcccctgaacccccccagcacagcccagtatggcatcactggatctgcagatgtgctcttcagctgctggtacctggtgctgaccctgagcagcttcaccagcatcttctacctgaagaatgccatcctgcagtag

SEQ ID NO: 161709 - DNA, 927 bp, synthetic construct
  misc_feature 1..927: note = Description of Artificial Sequence: Synthetic coding sequence
  source 1..927: mol_type = other DNA
atgatgctgctggtgcagggcgcctgctgcagcaaccagtggctggccgctgtgctgctgagcctgtgctgcctgctgcccagctgcctgcctgctggccagagcgtggacttcccctgggccgctgtggacaacatgatggtgaggaagggggacacagctgtgctgcgctgctacctggaggatggagccagcaagggggcctggctgaacagaagcagcatcatctttgctggaggagacaagtggagcgtggacccccgggtgtccatcagcaccctgaacaagagggactacagcctgcagatccagaatgtggatgtgacagatgatggcccctacacctgcagcgtgcagacccagcacacccccaggaccatgcaggtgcacctgactgtgcaggtgccccccaagatctatgacatcagcaatgacatgacagtgaatgaaggcaccaacgtgaccctgacctgcctggccaccgggaagccagagcccagcatctcctggaggcacatcagccccagcgtggcccccaccatccaggagatcaagagcggcaccgtgaccccaggccgcagcggcctcatccgctgtgagggcgctggggtgcccccaccagcctttgagtggtacaagggggagaagaagctgttcaacggccagcagggcatcatcatccagaacttcagcaccaggagcatcctgactgtgaccaacgtgacccaggagcacttcggcaactacacctgtgtggccgccaacaagctgggcaccaccaatgccagcctgcccctgaacccccccagcacagcccagtatggcatcactggatctgcagatgtgctcttcagctgctggtacctggtgctgaccctgagcagcttcaccagcatcttctacctgaagaatgccatcctgcagtag

SEQ ID NO: 161710 - DNA, 2133 bp, synthetic construct
  misc_feature 1..2133: note = Description of Artificial Sequence: Synthetic coding sequence
  source 1..2133: mol_type = other DNA
atggagacccgggagagcgaggacctggagaagaccaggaggaagagcgccagtgaccagtggaacacagacaatgaaccagccaaggtgaagccagagctgctgcctgagaaggaggagaccagccaggccgaccaggacatccaggacaaggagccccactgccacatccccatcaagagaaattccatcttcaacagaagcatccggaggaagagcaaggccaaggcccgggacaaccctgagagaaatgccagctgcctggccgacagccaggacaacgggaagtctgtgaatgagcccctgaccctgaacatcccctggagcaggatgccaccctgcaggacagccatgcagacagaccccggggcccaggagatgtctgagagcagcagcaccccaggaaatggagccaccccagaggagtggccagccctggccgacagccccaccaccctgacagaggccctgaggatgatccaccccatcccagctgacagctggaggaacctgattgagcagatcggcctgctgtaccaggagtacagagacaagagcaccctgcaggagattgagacccggcggcagcaggatgctgagattgaggacaacaccaacggcagccctgccagcgaggacaccccagaggaggaggaggaggaggaggaggaggaggagcccgccagccccccagagaggaagaccctgccccagatctgcctgctgagcaacccccacagccgcttcaacctgtggcaggacctgcctgagatccgcagcagtggagtgctggagatcctgcagcctgaggagatcaagctgcaggaggccatgtttgagctggtgaccagcgaggccagctactacaagagcctgaacctgctggtgagccacttcatggagaatgaaagaatcaggaagatcctgcaccccagcgaggcccacatcctcttcagcaatgtgctggatgtgctggccgtgtctgagcgcttcctgctggagctggagcacaggatggaggagaacatcgtcatcagtgatgtgtgtgacatcgtgtaccgctatgctgctgaccacttctctgtgtacatcacctacgtgagcaaccagacctaccaggagaggacctacaagcagctgctgcaggagaaggccgccttccgggagctgattgcccagctggagctggaccccaagtgccggggcctgcccttcagcagcttcctgatcctgcccttccagaggatcacccggctgaagctgctggtgcagaacatcctgaagagggtggaggagaggagtgaaagagaatgtacagccctggatgcccacaaggagctggagatggtggtgaaggcctgcaatgaaggagtgaggaagatgagcaggacagagcagatgatcagcatccagaagaagatggagttcaagatcaagtctgtgcccatcatcagccacagccgctggctgctgaagcagggcgagctgcagcagatgagcggccccaagaccagcaggaccctgcggaccaagaagctgttccacgagatctacctgttcctgttcaatgacctgctggtgatctgccggcagatccctggggacaagtaccaggtgtttgacagcgccccccggggcctgctgcgggtggaggagctggaggaccagggccagaccctggccaacgtgttcatcctgcggctgctggagaatgctgatgaccgggaggccacctacatgctgaaggccagcagccagagcgagatgaagcgctggatgaccagcctggcccccaacagaaggaccaagtttgtgtccttcaccagccggctgctggactgcccccaggtgcagtgtgtgcacccctacgtggcccagcagccagatgagctgaccctggagctggccgacatcctgaacatcctggacaagacagatgatggctggatctttggagagcggctgcatgaccaggagcggggctggttccccagctccatgacagaggagatcctgaaccccaagatccgcagccagaacctgaaggagtgcttccgggtgcacaagatggatgacccccagaggagccagaacaaggacaggaggaagctgggcagcaggaaccggcagtag

SEQ ID NO: 161711 - DNA, 1857 bp, synthetic construct
  misc_feature 1..1857: note = Description of Artificial Sequence: Synthetic coding sequence
  source 1..1857: mol_type = other DNA
atggagctgctggccgccgccttctctgctgcctgtgctgtggaccatgacagcagcaccagcgagagtgatgcccgggacagcgctgctggccacctgcccggcagcgagagcagcagcaccccaggaaatggagccaccccagaggagtggccagccctggccgacagccccaccaccctgacagaggccctgaggatgatccaccccatcccagctgacagctggaggaacctgattgagcagatcggcctgctgtaccaggagtacagagacaagagcaccctgcaggagattgagacccggcggcagcaggatgctgagattgaggacaacaccaacggcagccctgccagcgaggacaccccagaggaggaggaggaggaggaggaggaggaggagcccgccagccccccagagaggaagaccctgccccagatctgcctgctgagcaacccccacagccgcttcaacctgtggcaggacctgcctgagatccgcagcagtggagtgctggagatcctgcagcctgaggagatcaagctgcaggaggccatgtttgagctggtgaccagcgaggccagctactacaagagcctgaacctgctggtgagccacttcatggagaatgaaagaatcaggaagatcctgcaccccagcgaggcccacatcctcttcagcaatgtgctggatgtgctggccgtgtctgagcgcttcctgctggagctggagcacaggatggaggagaacatcgtcatcagtgatgtgtgtgacatcgtgtaccgctatgctgctgaccacttctctgtgtacatcacctacgtgagcaaccagacctaccaggagaggacctacaagcagctgctgcaggagaaggccgccttccgggagctgattgcccagctggagctggaccccaagtgccggggcctgcccttcagcagcttcctgatcctgcccttccagaggatcacccggctgaagctgctggtgcagaacatcctgaagagggtggaggagaggagtgaaagagaatgtacagccctggatgcccacaaggagctggagatggtggtgaaggcctgcaatgaaggagtgaggaagatgagcaggacagagcagatgatcagcatccagaagaagatggagttcaagatcaagtctgtgcccatcatcagccacagccgctggctgctgaagcagggcgagctgcagcagatgagcggccccaagaccagcaggaccctgcggaccaagaagctgttccacgagatctacctgttcctgttcaatgacctgctggtgatctgccggcagatccctggggacaagtaccaggtgtttgacagcgccccccggggcctgctgcgggtggaggagctggaggaccagggccagaccctggccaacgtgttcatcctgcggctgctggagaatgctgatgaccgggaggccacctacatgctgaaggccagcagccagagcgagatgaagcgctggatgaccagcctggcccccaacagaaggaccaagtttgtgtccttcaccagccggctgctggactgcccccaggtgcagtgtgtgcacccctacgtggcccagcagccagatgagctgaccctggagctggccgacatcctgaacatcctggacaagacagatgatggctggatctttggagagcggctgcatgaccaggagcggggctggttccccagctccatgacagaggagatcctgaaccccaagatccgcagccagaacctgaaggagtgcttccgggtgcacaagatggatgacccccagaggagccagaacaaggacaggaggaagctgggcagcaggaaccggcagtag

SEQ ID NO: 161712 - DNA, 717 bp, synthetic construct
  misc_feature 1..717: note = Description of Artificial Sequence: Synthetic coding sequence
  source 1..717: mol_type = other DNA
atggagctgctggccgccgccttctctgctgcctgtgctgtggaccatgacagcagcaccagcgagagtgatgcccgggacagcgctgctggccacctgcccggcagcgagagcagcagcaccccaggaaatggagccaccccagaggagtggccagccctggccgacagccccaccaccctgacagaggccctgaggatgatccaccccatcccagctgacagctggaggaacctgattgagcagatcggcctgctgtaccaggagtacagagacaagagcaccctgcaggagattgagacccggcggcagcaggatgctgagattgaggacaacaccaacggcagccctgccagcgaggacaccccagaggaggaggaggaggaggaggaggaggaggagcccgccagccccccagagaggaagaccctgccccagatctgcctgctgagcaacccccacagccgcttcaacctgtggcaggacctgcctgagatccgcagcagtggagtgctggagatcctgcagcctgaggagatcaagctgcaggaggccatgtttgagctggtgaccagcgaggccagctactacaagagcctgaacctgctggtgagccacttcatggagaatgaaagaatcaggaagatcctgcaccccagcgaggcccacatcctcttcagcaatgtgctggatgtgctggccgtgtctgagaggtag

SEQ ID NO: 161713 - DNA, 1302 bp, synthetic construct
  misc_feature 1..1302: note = Description of Artificial Sequence: Synthetic coding sequence
  source 1..1302: mol_type = other DNA
atgtttgagctggtgaccagcgaggccagctactacaagagcctgaacctgctggtgagccacttcatggagaatgaaagaatcaggaagatcctgcaccccagcgaggcccacatcctcttcagcaatgtgctggatgtgctggccgtgtctgagcgcttcctgctggagctggagcacaggatggaggagaacatcgtcatcagtgatgtgtgtgacatcgtgtaccgctatgctgctgaccacttctctgtgtacatcacctacgtgagcaaccagacctaccaggagaggacctacaagcagctgctgcaggagaaggccgccttccgggagctgattgcccagctggagctggaccccaagtgccggggcctgcccttcagcagcttcctgatcctgcccttccagaggatcacccggctgaagctgctggtgcagaacatcctgaagagggtggaggagaggtctgagcgggagtgcacagccctggatgcccacaaggagctggagatggtggtgaaggcctgcaatgaaggagtgaggaagatgagcaggacagagcagatgatcagcatccagaagaagatggagttcaagatcaagtctgtgcccatcatcagccacagccgctggctgctgaagcagggcgagctgcagcagatgagcggccccaagaccagcaggaccctgcggaccaagaagctgttccacgagatctacctgttcctgttcaatgacctgctggtgatctgccggcagatccctggggacaagtaccaggtgtttgattctgccccccggggcctgctgcgggtggaggagctggaggaccagggccagaccctggccaacgtgttcatcctgcggctgctggagaatgctgatgaccgggaggccacctacatgctgaaggccagcagccagagcgagatgaagcgctggatgaccagcctggcccccaacagaaggaccaagtttgtgtccttcaccagccggctgctggactgcccccaggtgcagtgtgtgcacccctacgtggcccagcagccagatgagctgaccctggagctggccgacatcctgaacatcctggacaagacagatgatggctggatctttggagagcggctgcatgaccaggagcggggctggttccccagctccatgacagaggagatcctgaaccccaagatccgcagccagaacctgaaggagtgcttccgggtgcacaagatggatgacccccagaggagccagaacaaggacaggaggaagctgggcagcaggaaccggcagtag

SEQ ID NO: 161714 - DNA, 1803 bp, synthetic construct
  misc_feature 1..1803: note = Description of Artificial Sequence: Synthetic coding sequence
  source 1..1803: mol_type = other DNA
atgccaccctgcaggacagccatgcagacagaccccggggcccaggagatgtctgagagcagcagcaccccaggaaatggagccaccccagaggagtggccagccctggccgacagccccaccaccctgacagaggccctgaggatgatccaccccatcccagctgacagctggaggaacctgattgagcagatcggcctgctgtaccaggagtacagagacaagagcaccctgcaggagattgagacccggcggcagcaggatgctgagattgaggacaacaccaacggcagccctgccagcgaggacaccccagaggaggaggaggaggaggaggaggaggaggagcccgccagccccccagagaggaagaccctgccccagatctgcctgctgagcaacccccacagccgcttcaacctgtggcaggacctgcctgagatccgcagcagtggagtgctggagatcctgcagcctgaggagatcaagctgcaggaggccatgtttgagctggtgaccagcgaggccagctactacaagagcctgaacctgctggtgagccacttcatggagaatgaaagaatcaggaagatcctgcaccccagcgaggcccacatcctcttcagcaatgtgctggatgtgctggccgtgtctgagcgcttcctgctggagctggagcacaggatggaggagaacatcgtcatcagtgatgtgtgtgacatcgtgtaccgctatgctgctgaccacttctctgtgtacatcacctacgtgagcaaccagacctaccaggagaggacctacaagcagctgctgcaggagaaggccgccttccgggagctgattgcccagctggagctggaccccaagtgccggggcctgcccttcagcagcttcctgatcctgcccttccagaggatcacccggctgaagctgctggtgcagaacatcctgaagagggtggaggagaggagtgaaagagaatgtacagccctggatgcccacaaggagctggagatggtggtgaaggcctgcaatgaaggagtgaggaagatgagcaggacagagcagatgatcagcatccagaagaagatggagttcaagatcaagtctgtgcccatcatcagccacagccgctggctgctgaagcagggcgagctgcagcagatgagcggccccaagaccagcaggaccctgcggaccaagaagctgttccacgagatctacctgttcctgttcaatgacctgctggtgatctgccggcagatccctggggacaagtaccaggtgtttgacagcgccccccggggcctgctgcgggtggaggagctggaggaccagggccagaccctggccaacgtgttcatcctgcggctgctggagaatgctgatgaccgggaggccacctacatgctgaaggccagcagccagagcgagatgaagcgctggatgaccagcctggcccccaacagaaggaccaagtttgtgtccttcaccagccggctgctggactgcccccaggtgcagtgtgtgcacccctacgtggcccagcagccagatgagctgaccctggagctggccgacatcctgaacatcctggacaagacagatgatggctggatctttggagagcggctgcatgaccaggagcggggctggttccccagctccatgacagaggagatcctgaaccccaagatccgcagccagaacctgaaggagtgcttccgggtgcacaagatggatgacccccagaggagccagaacaaggacaggaggaagctgggcagcaggaaccggcagtag

SEQ ID NO: 161715 - DNA, 705 bp, synthetic construct
  misc_feature 1..705: note = Description of Artificial Sequence: Synthetic coding sequence
  source 1..705: mol_type = other DNA
atgacaggcagctctgtgtttgactacatccaccctggggaccacagcgaggtgctggagcagctgggcctgcggacccccaccccaggcccccccaccccacccagcgtgagcagcagcagcagcagcagcagcagcctggccgacaccccagaaattgaggccagcctgaccaaggtgccccccagcagcctggtgcaggagaggagcttctttgtgaggatgaagagcaccctgaccaagaggggcctgcacgtgaaggccagcggctacaaggtgattcatgtgacaggccgcctgcgggcccacgccctgggcctggtggccctgggccacaccctgcccccagcccccctggccgagctgcccctgcacggccacatgattgtgttccggctgagcctgggcctgaccatcctggcctgtgagagccgggtgtctgaccacatggacctgggccccagcgagctggtgggccgcagctgctaccagtttgtgcacggccaggatgccacccgcatccggcagagccacgtggacagctgccggggcctgcgggtggccgctgtgtgtggccacagcggctgggagcgggaggagcccaggggggccccctgtgccctgggccagccccgggcccagcccagccggggctggcccaacagctttggctgcctgcctgccagcagccagaggggcctgtag

SEQ ID NO: 161716 - DNA, 1773 bp, synthetic construct
  misc_feature 1..1773: note = Description of Artificial Sequence: Synthetic coding sequence
  source 1..1773: mol_type = other DNA
atggccgccccctacccaggcagcggcggcggcagcgaggtgaagtgtgtgggcggccgcggggcctctgtgccctgggacttcctgcccggcctgatggtgaaggcccccagcggcccctgcctgcaggcccagaggaaggagaagagcagaaatgctgcccggagcagaagaggcaaggagaacctggagttctttgagctggccaagctgctgcccctgcccggggccatcagcagccagctggacaaggccagcatcgtgcggctgtctgtgacctacctgcggctgcggagatttgctgccctgggcgccccaccctggggcctgcgggctgctggccccccagctggcctggcccctggaagaagaggccctgctgccctggtgtctgaggtgtttgagcagcacctgggcggccacatcctgcagagcctggatggctttgtgtttgccctgaaccaggagggcaagttcctgtacatcagcgagaccgtgtccatctacctgggcctgagccaggtggagatgacaggcagctctgtgtttgactacatccaccctggggaccacagcgaggtgctggagcagctgggcctgcggacccccaccccaggcccccccaccccacccagcgtgagcagcagcagcagcagcagcagcagcctggccgacaccccagaaattgaggccagcctgaccaaggtgccccccagcagcctggtgcaggagaggagcttctttgtgaggatgaagagcaccctgaccaagaggggcctgcacgtgaaggccagcggctacaaggtgattcatgtgacaggccgcctgcgggcccacgccctgggcctggtggccctgggccacaccctgcccccagcccccctggccgagctgcccctgcacggccacatgattgtgttccggctgagcctgggcctgaccatcctggcctgtgagagccgggtgtctgaccacatggacctgggccccagcgagctggtgggccgcagctgctaccagtttgtgcacggccaggatgccacccgcatccggcagagccacgtggacctgctggacaagggccaggtgatgacaggctactaccgctggctgcagagagctgggggctttgtgtggctgcagagcgtggccaccgtggccggcagcggcaagagccctggagagcaccacgtgctgtgggtgagccacgtgctgagccaggccgagggcggccagacccccctggatgccttccagctgcctgcctctgtggcctgtgaggaggccagcagccctggccctgagcccacagagcctgagcccccaacagagggcaagcaggccgccccagcagaaaatgaggccccccagacccagggcaagaggatcaaggtggagcccggcccccgggagaccaagggcagcgaggacagcggagatgaggaccccagcagccacccagccacccccaggcctgagttcaccagcgtcatccgggccggcgtgctgaagcaggaccctgtgcggccctggggcctggcccctcctggggaccccccacccaccctgctgcacgccggcttcctgccccctgtggtgcggggcctgtgcaccccaggcaccatccgctatggccctgctgagctgggcctggtgtacccccacctgcagaggctgggccctggccctgccctgcctgaggccttctacccacccctgggcctgccctacccaggccctgctggcacccggctgcccaggaagggggactag

SEQ ID NO: 161717 - DNA, 2475 bp, synthetic construct
  misc_feature 1..2475: note = Description of Artificial Sequence: Synthetic coding sequence
  source 1..2475: mol_type = other DNA
atggatgaagatgagaaggaccgggccaagagggccagcaggaacaagtctgagaagaagagaagagaccagttcaacgtgctgatcaaggagctgagctccatgctgcccggcaacaccaggaagatggacaagaccaccgtgctggagaaggtgattggcttcctgcagaagcacaatgaggtgtctgcccagacagagatctgtgacatccagcaggactggaagcccagcttcctgagcaatgaggagttcacccagctgatgctggaggccctggatggcttcatcatcgctgtgaccacagatggcagcatcatctacgtgtctgacagcatcacccccctgctgggccacctgcccagtgatgtgatggaccagaacctgctgaacttcctgcctgagcaggagcacagcgaggtgtacaagatcctgagcagccacatgctggtgacagacagccccagccctgagtacctgaagagtgacagcgacctggagttctactgccacctgctgcggggcagcctgaaccccaaggagttccccacctatgagtacatcaagtttgtgggcaacttccgcagctacaacaacgtgcccagccccagctgcaatggatttgacaacaccctgagccggccctgccgggtgcccctgggcaaggaggtgtgcttcatcgccaccgtgcggctggccaccccccagttcctgaaggagatgtgcatcgtggatgagcccctggaggagttcaccagccgccacagcctggagtggaagttcctgttcctggaccaccgggccccacccatcatcggctacctgccctttgaggtgctgggcaccagcggctatgactactaccacattgatgacctggagctgctggcccgctgccaccagcacctgatgcagtttgggaagggcaagagctgctgctaccgcttcctgaccaagggccagcagtggatctggctgcagacccactactacatcacctaccaccagtggaacagcaagccagagttcatcgtgtgcacccacagcgtggtgtcctatgcagatgtgcgggtggagcggcggcaggagctggccctggaggaccccccatctgaggccctgcacagcagcgccctgaaggacaagggcagcagcctggagccccggcagcacttcaacaccctggatgtgggcgccagcggcctgaacaccagccacagccccagcgccagcagccgcagcagccacaagagcagccacacagccatgtctgagcccaccagcacccccaccaagctgatggccgaggccagcaccccagccctgcccaggtctgccaccctgccccaggagctgcctgtgcccggcctgagccaggccgccaccatgcctgcccccctgcccagccccagcagctgtgacctgacccagcagctgctgccccagacagtgctgcagagcaccccagcccccatggcccagttcagcgcccagttctccatgttccagaccatcaaggaccagctggagcagaggacccgcatcctgcaggccaacatccgctggcagcaggaggagctgcacaagatccaggagcagctgtgcctggtgcaggacagcaatgtgcagatgttcctgcagcagcctgctgtgtccctgtccttcagcagcacccagaggcctgaggcccagcagcagctgcagcagaggtctgctgctgtgacccagccccagctgggcgccggcccccagctgcccggccagatcagcagcgcccaggtgaccagccagcacctgctgcgggagagcagcgtcatcagcacccagggccccaagcccatgaggagcagccagctgatgcagagcagcggccgcagcggcagcagcctggtgagccccttcagcagcgccacagctgccctgccccccagcctgaacctgaccaccccagccagcaccagccaggatgccagccagtgccagcccagcccagacttcagccatgaccggcagctgcggctgctgctgagccagcccatccagcccatgatgcctggcagctgtgatgcccggcagcccagcgaggtgtccaggacaggccggcaggtgaagtatgcccagagccagaccgtcttccagaacccagatgcccacccagccaacagcagcagcgcccccatgcctgtgctgctgatgggccaggccgtgctgcaccccagcttccctgccagccagcccagccccctgcagcctgcccaggcccggcagcagcccccccagcactacctgcaggtgcaggcccccaccagcctgcacagcgagcagcaggacagcctgctgctgagcacctacagccagcagcccggcaccctgggctacccccagcccccaccagcccagccccagcccctgcggcccccccggcgggtgagcagcctgtctgagagcagcggcctgcagcagccccccaggtag

SEQ ID NO: 161718 - DNA, 2670 bp, synthetic construct
  misc_feature 1..2670: note = Description of Artificial Sequence: Synthetic coding sequence
  source 1..2670: mol_type = other DNA
atgtatgcctacggctttgtgggccgctgtgcccccttccctgctgaggagggccgcacctttgacctgtctgaggagctgggccgctctgtgacccgggagggcaccggcaccacccggctgaacagcgagcctgtgcccctgctgtgcctgcccctgctgaactgcagcaggaagaactgcatcgagaacctgatggatgaagatgagaaggaccgggccaagagggccagcaggaacaagtctgagaagaagaggcgggaccagttcaacgtgctgatcaaggagctgagctccatgctgcccggcaacaccaggaagatggacaagaccaccgtgctggagaaggtgattggcttcctgcagaagcacaatgaggtgtctgcccagacagagatctgtgacatccagcaggactggaagcccagcttcctgagcaatgaggagttcacccagctgatgctggaggccctggatggcttcatcatcgctgtgaccacagatggcagcatcatctacgtgtctgacagcatcacccccctgctgggccacctgcccagtgatgtgatggaccagaacctgctgaacttcctgcctgagcaggagcacagcgaggtgtacaagatcctgagcagccacatgctggtgacagacagccccagccctgagtacctgaagagtgacagcgacctggagttctactgccacctgctgcggggcagcctgaaccccaaggagttccccacctatgagtacatcaagtttgtgggcaacttccgcagctacaacaacgtgcccagccccagctgcaatggatttgacaacaccctgagccggccctgccgggtgcccctgggcaaggaggtgtgcttcatcgccaccgtgcggctggccaccccccagttcctgaaggagatgtgcatcgtggatgagcccctggaggagttcaccagccgccacagcctggagtggaagttcctgttcctggaccaccgggccccacccatcatcggctacctgccctttgaggtgctgggcaccagcggctatgactactaccacattgatgacctggagctgctggcccgctgccaccagcacctgatgcagtttgggaagggcaagagctgctgctaccgcttcctgaccaagggccagcagtggatctggctgcagacccactactacatcacctaccaccagtggaacagcaagccagagttcatcgtgtgcacccacagcgtggtgtcctatgcagatgtgcgggtggagcggcggcaggagctggccctggaggacccccccagcgaggccctgcacagcagcgccctgaaggacaagggcagcagcctggagccccggcagcacttcaacaccctggatgtgggcgccagcggcctgaacaccagccacagccccagcgccagcagccgcagcagccacaagagcagccacacagccatgtctgagcccaccagcacccccaccaagctgatggccgaggccagcaccccagccctgcccaggtctgccaccctgccccaggagctgcctgtgcccggcctgagccaggccgccaccatgcctgcccccctgcccagccccagcagctgtgacctgacccagcagctgctgccccagacagtgctgcagagcaccccagcccccatggcccagttcagcgcccagttctccatgttccagaccatcaaggaccagctggagcagaggacccgcatcctgcaggccaacatccgctggcagcaggaggagctgcacaagatccaggagcagctgtgcctggtgcaggacagcaatgtgcagatgttcctgcagcagcctgctgtgtccctgtccttcagcagcacccagaggcctgaggcccagcagcagctgcagcagaggtctgctgctgtgacccagccccagctgggcgccggcccccagctgcccggccagatcagcagcgcccaggtgaccagccagcacctgctgcgggagagcagcgtcatcagcacccagggccccaagcccatgaggagcagccagctgatgcagagcagcggccgcagcggcagcagcctggtgagccccttcagcagcgccacagctgccctgccccccagcctgaacctgaccaccccagccagcaccagccaggatgccagccagtgccagcccagcccagacttcagccatgaccggcagctgcggctgctgctgagccagcccatccagcccatgatgcctggcagctgtgatgcccggcagcccagcgaggtgtccaggacaggccggcaggtgaagtatgcccagagccagacagtgttccagaacccagatgcccacccagccaacagcagcagcgcccccatgcctgtgctgctgatgggccaggccgtgctgcaccccagcttccctgccagccagcccagccccctgcagcctgcccaggcccggcagcagcccccccagcactacctgcaggtgcaggcccccaccagcctgcacagcgagcagcaggacagcctgctgctgagcacctacagccagcagcccggcaccctgggctacccccagcccccaccagcccagccccagcccctgcggcccccaagaagagtgagcagcctgtctgagagcagcggcctgcagcagcccccaagatag

SEQ ID NO: 161719 - DNA, 774 bp, synthetic construct
  misc_feature 1..774: note = Description of Artificial Sequence: Synthetic coding sequence
  source 1..774: mol_type = other DNA
atggcccccaccaagcccagcttccagcaggaccccagccggcgggagcgcatcacagcccagcaccccctgcccaaccagagtgaatgtaggaagatctaccgctatgatggcatctactgtgagagcacctaccagaacctgcaggccctgaggaaggagaagagcagagatgctgcccggagcagaagaggcaaggaaaattttgagttctatgagctggccaagctgctgcccctgcctgctgccatcaccagccagctggacaaggccagcatcatccggctgaccatctcctacctgaagatgagggactttgccaaccagggcgaccccccctggaacctgaggatggagggccccccacccaacacctctgtgaaggtgattggagcccagaggagaagaagccccagcgccctggccatcgaggtgtttgaggcccacctgggcagccacatcctgcagagcctggatggctttgtgtttgccctgaaccaggagggcaagttcctgtacatcagcgagaccgtgtccatctacctgggcctgagccaggtggagctgaccggcagctctgtgtttgattatgtgcaccctggggaccacgtggagatggccgagcagctgggcatgaagctgcccccaggccggggcctgctgagccagggcacagcagaagatggagccagcagcgccagcagcagcagccagagcgagaccccagagcctgtggtgtgcttccccccagccagtgaccagttcctgctgtag

SEQ ID NO: 161720 - DNA, 2706 bp, synthetic construct
  misc_feature 1..2706: note = Description of Artificial Sequence: Synthetic coding sequence
  source 1..2706: mol_type = other DNA
atggcccccaccaagcccagcttccagcaggaccccagccggcgggagcggctgcaggccctgaggaaggagaagagcagagatgctgcccggagcagaagaggcaaggaaaattttgagttctatgagctggccaagctgctgcccctgcctgctgccatcaccagccagctggacaaggccagcatcatccggctgaccatctcctacctgaagatgagggactttgccaaccagggcgaccccccctggaacctgaggatggagggccccccacccaacacctctgtgaagggggcccagaggagaagaagccccagcgccctggccatcgaggtgtttgaggcccacctgggcagccacatcctgcagagcctggatggctttgtgtttgccctgaaccaggagggcaagttcctgtacatcagcgagaccgtgtccatctacctgggcctgagccaggtggagctgaccggcagctctgtgtttgattatgtgcaccctggggaccacgtggagatggccgagcagctgggcatgaagctgcccccaggccggggcctgctgagccagggcacagcagaagatggagccagcagcgccagcagcagcagccagagcgagaccccagagcctgtggagagcaccagccccagcctgctgaccacagacaacaccctggagaggagcttcttcatccgcatgaagagcaccctgaccaagaggggcgtgcacatcaagagcagcggctacaaggtgatccacatcaccggccgcctgcggctgcgggtgtccctgagccacggccgcacagtgcccagccagatcatgggcctggtggtggtggcccacgccctgcccccacccaccatcaatgaggtgagaattgactgccacatgtttgtgaccagggtgaacatggacctgaacatcatctactgtgaaaatcgcatcagtgactacatggacctgacccctgtggacatcgtgggcaagcgctgctaccacttcatccacgcagaagatgtggagggcatccgccacagccacctggacctgctgaacaagggccagtgtgtgaccaagtactaccgctggatgcagaagaatggaggctacatctggatccagagcagcgccaccatcgccatcaatgccaagaatgccaatgagaagaacatcatctgggtgaactacctgctgagcaaccctgagtacaaggacacccccatggacatcgcccagctgccccacctgcctgagaagaccagcgagagcagcgagaccagtgacagcgagagtgacagcaaggacaccagcggcatcacagaggacaatgaaaacagcaagagtgatgagaagggcaaccagagtgaaaattctgaggaccctgagccagacaggaagaagtctggaaatgcctgtgacaatgacatgaactgcaatgatgatggccacagcagcagcaacccagacagccgggacagtgatgacagctttgagcacagcgactttgagaaccccaaggccggggaggatggctttggagccctgggcgccatgcagatcaaggtggagcgctacgtggagagcgagagtgacctgcggctgcagaactgtgagagcctgaccagtgacagcgccaaggacagcgacagcgctggggaggccggggcccaggccagcagcaagcaccagaagaggaagaagaggaggaagaggcagaagggcggcagcgccagcagaagaaggctgagcagcgccagcagccctgggggcctggatgctggcctggtggagcccccccggctgctgagcagccccaacagcgcctctgtgctgaagatcaagacagagatcagcgagcccatcaactttgacaatgacagcagcatctggaactacccacccaaccgggagatcagcagaaatgaaagcccctacagcatgaccaagccacccagcagcgagcacttccccagcccccagggcggcggcggcggcggcggcggcggcggcggcctgcacgtggccatcccagacagcgtgctgaccccacctggagcagatggagctgctgccaggaagacccagtttggagccagcgccacagctgccctggcccctgtggccagtgaccccctgagcccccccctgagcgccagcccccgggacaagcaccctggaaatggaggcggcggcggcggcggcggcggcggggccggcggcggcggccccagcgccagcaacagcctgctgtacacaggagacctggaggccctgcagaggctgcaggccggaaatgtggtgctgcccctggtgcaccgggtgacaggcaccctggccgccaccagcacagctgcccagagggtgtacaccaccggcaccatccgctatgccccagctgaggtgaccctggccatgcagagcaacctgctgcccaatgcccatgctgtgaactttgtggatgtgaacagccctggcttcggcctggaccccaagacccccatggagatgctgtaccaccacgtgcaccggctgaacatgagcggcccctttggaggagctgtgtctgctgccagcctgacccagatgcctgctggaaatgtgttcaccacagctgagggcctcttcagcaccctgcccttccctgtgtacagcaatggcatccacgccgcccagaccctggagaggaaggaggactag

SEQ ID NO: 161721 - DNA, 2802 bp, synthetic construct
  misc_feature 1..2802: note = Description of Artificial Sequence: Synthetic coding sequence
  source 1..2802: mol_type = other DNA
atggcccccaccaagcccagcttccagcaggaccccagccggcgggagcgcatcacagcccagcaccccctgcccaaccagagtgaatgtaggaagatctaccgctatgatggcatctactgtgagagcacctaccagaacctgcaggccctgaggaaggagaagagcagagatgctgcccggagcagaagaggcaaggaaaattttgagttctatgagctggccaagctgctgcccctgcctgctgccatcaccagccagctggacaaggccagcatcatccggctgaccatctcctacctgaagatgagggactttgccaaccagggcgaccccccctggaacctgaggatggagggccccccacccaacacctctgtgaaggtgattggagcccagaggagaagaagccccagcgccctggccatcgaggtgtttgaggcccacctgggcagccacatcctgcagagcctggatggctttgtgtttgccctgaaccaggagggcaagttcctgtacatcagcgagaccgtgtccatctacctgggcctgagccaggtggagctgaccggcagctctgtgtttgattatgtgcaccctggggaccacgtggagatggccgagcagctgggcatgaagctgcccccaggccggggcctgctgagccagggcacagcagaagatggagccagcagcgccagcagcagcagccagagcgagaccccagagcctgtggagagcaccagccccagcctgctgaccacagacaacaccctggagaggagcttcttcatccgcatgaagagcaccctgaccaagaggggcgtgcacatcaagagcagcggctacaaggtgatccacatcaccggccgcctgcggctgcgggtgtccctgagccacggccgcacagtgcccagccagatcatgggcctggtggtggtggcccacgccctgcccccacccaccatcaatgaggtgagaattgactgccacatgtttgtgaccagggtgaacatggacctgaacatcatctactgtgaaaatcgcatcagtgactacatggacctgacccctgtggacatcgtgggcaagcgctgctaccacttcatccacgcagaagatgtggagggcatccgccacagccacctggacctgctgaacaagggccagtgtgtgaccaagtactaccgctggatgcagaagaatggaggctacatctggatccagagcagcgccaccatcgccatcaatgccaagaatgccaatgagaagaacatcatctgggtgaactacctgctgagcaaccctgagtacaaggacacccccatggacatcgcccagctgccccacctgcctgagaagaccagcgagagcagcgagaccagtgacagcgagagtgacagcaaggacaccagcggcatcacagaggacaatgaaaacagcaagagtgatgagaagggcaaccagagtgaaaattctgaggaccctgagccagacaggaagaagtctggaaatgcctgtgacaatgacatgaactgcaatgatgatggccacagcagcagcaacccagacagccgggacagtgatgacagctttgagcacagcgactttgagaaccccaaggccggggaggatggctttggagccctgggcgccatgcagatcaaggtggagcgctacgtggagagcgagagtgacctgcggctgcagaactgtgagagcctgaccagtgacagcgccaaggacagcgacagcgctggggaggccggggcccaggccagcagcaagcaccagaagaggaagaagaggaggaagaggcagaagggcggcagcgccagcagaagaaggctgagcagcgccagcagccctgggggcctggatgctggcctggtggagcccccccggctgctgagcagccccaacagcgcctctgtgctgaagatcaagacagagatcagcgagcccatcaactttgacaatgacagcagcatctggaactacccacccaaccgggagatcagcagaaatgaaagcccctacagcatgaccaagccacccagcagcgagcacttccccagcccccagggcggcggcggcggcggcggcggcggcggcggcctgcacgtggccatcccagacagcgtgctgaccccacctggagcagatggagctgctgccaggaagacccagtttggagccagcgccacagctgccctggcccctgtggccagtgaccccctgagcccccccctgagcgccagcccccgggacaagcaccctggaaatggaggcggcggcggcggcggcggcggcggggccggcggcggcggccccagcgccagcaacagcctgctgtacacaggagacctggaggccctgcagaggctgcaggccggaaatgtggtgctgcccctggtgcaccgggtgacaggcaccctggccgccaccagcacagctgcccagagggtgtacaccaccggcaccatccgctatgccccagctgaggtgaccctggccatgcagagcaacctgctgcccaatgcccatgctgtgaactttgtggatgtgaacagccctggcttcggcctggaccccaagacccccatggagatgctgtaccaccacgtgcaccggctgaacatgagcggcccctttggaggagctgtgtctgctgccagcctgacccagatgcctgctggaaatgtgttcaccacagctgagggcctcttcagcaccctgcccttccctgtgtacagcaatggcatccacgccgcccagaccctggagaggaaggaggactag

SEQ ID NO: 161722 - DNA, 2763 bp, synthetic construct
  misc_feature 1..2763: note = Description of Artificial Sequence: Synthetic coding sequence
  source 1..2763: mol_type = other DNA
atggcccccaccaagcccagcttccagcaggaccccagccggcgggagcggctgcaggccctgaggaaggagaagagcagagatgctgcccggagcagaagaggcaaggaaaattttgagttctatgagctggccaagctgctgcccctgcctgctgccatcaccagccagctggacaaggccagcatcatccggctgaccatctcctacctgaagatgagggactttgccaaccagggcgaccccccctggaacctgaggatggagggccccccacccaacacctctgtgaagggcatccagatgtggaagtctgagctgtgcatgaggaagaccccctgtgaggtgattggagcccagaggcggcgcagccccagcgccctggccatcgaggtgtttgaggcccacctgggcagccacatcctgcagagcctggatggctttgtgtttgccctgaaccaggagggcaagttcctgtacatcagcgagaccgtgtccatctacctgggcctgagccaggtggagctgaccggcagctctgtgtttgattatgtgcaccctggggaccacgtggagatggccgagcagctgggcatgaagctgcccccaggccggggcctgctgagccagggcacagcagaagatggagccagcagcgccagcagcagcagccagagcgagaccccagagcctgtggagagcaccagccccagcctgctgaccacagacaacaccctggagaggagcttcttcatccgcatgaagagcaccctgaccaagaggggcgtgcacatcaagagcagcggctacaaggtgatccacatcaccggccgcctgcggctgcgggtgtccctgagccacggccgcacagtgcccagccagatcatgggcctggtggtggtggcccacgccctgcccccacccaccatcaatgaggtgagaattgactgccacatgtttgtgaccagggtgaacatggacctgaacatcatctactgtgagaaccgcatcagtgactacatggacctgacccctgtggacatcgtgggcaagcgctgctaccacttcatccatgctgaagatgtggagggcatccgccacagccacctggacctgctgaacaagggccagtgtgtgaccaagtactaccgctggatgcagaagaatggaggctacatctggatccagagcagcgccaccatcgccatcaatgccaagaatgccaatgagaagaacatcatctgggtgaactacctgctgagcaaccctgagtacaaggacacccccatggacatcgcccagctgccccacctgcctgagaagaccagcgagagcagcgagaccagtgacagcgagagtgacagcaaggacaccagcggcatcacagaagataatgaaaacagcaagagtgatgagaagggcaaccagagcgagaacagtgaagatcctgagccagacaggaagaagtctggaaatgcctgtgacaatgacatgaactgcaatgatgatggccacagcagcagcaacccagacagccgggacagtgatgacagctttgagcacagcgactttgagaaccccaaggctggagaagatggctttggagccctgggcgccatgcagatcaaggtggagagatatgtggagagcgagagtgacctgcggctgcagaactgtgagagcctgaccagtgacagcgccaaggacagcgacagcgctggggaggccggggcccaggccagcagcaagcaccagaagaggaagaagaggaggaagaggcagaagggcggcagcgccagcagaagaaggctgagcagcgccagcagccctgggggcctggatgctggcctggtggagcccccccggctgctgagcagccccaacagcgcctctgtgctgaagatcaagacagagatcagcgagcccatcaactttgacaatgacagcagcatctggaactacccacccaaccgggagatcagcagaaatgaaagcccctacagcatgaccaagccacccagcagcgagcacttccccagcccccagggcggcggcggcggcggcggcggcggcggcggcctgcacgtggccatcccagattctgtgctgaccccacctggagcagatggagctgctgccaggaagacccagtttggagccagcgccacagctgccctggcccctgtggccagtgaccccctgagcccccccctgagcgccagcccccgggacaagcaccctggaaatggaggcggcggcggcggcggcggcggcggggccggcggcggcggccccagcgccagcaacagcctgctgtacaccggggacctggaggccctgcagaggctgcaggccggaaatgtggtgctgcccctggtgcaccgggtgacaggcaccctggccgccaccagcacagctgcccagagggtgtacaccaccggcaccatccgctatgccccagctgaggtgaccctggccatgcagagcaacctgctgcccaatgcccatgctgtgaactttgtggatgtgaacagccctggcttcggcctggaccccaagacccccatggagatgctgtaccaccacgtgcaccggctgaacatgagcggcccctttggaggagctgtgtctgctgccagcctgacccagatgcctgctggaaatgtgttcaccacagctgagggcctcttcagcaccctgcccttccctgtgtacagcaatggcatccatgctgcccagaccctggagaggaaagaagattag

SEQ ID NO: 161723 - DNA, 462 bp, synthetic construct
  misc_feature 1..462: note = Description of Artificial Sequence: Synthetic coding sequence
  source 1..462: mol_type = other DNA
atgagggactttgccaaccagggcgaccccccctggaacctgaggatggagggccccccacccaacacctctgtgaagggggcccagaggagaagaagccccagcgccctggccatcgaggtgtttgaggcccacctgggcagccacatcctgcagagcctggatggctttgtgtttgccctgaaccaggagggcaagttcctgtacatcagcgagaccgtgtccatctacctgggcctgagccaggtggagctgaccggcagctctgtgtttgattatgtgcaccctggggaccacgtggagatggccgagcagctgggcatgaagctgcccccaggccggggcctgctgagccagggcacagcagaagatggagccagcagcgccagcagcagcagccagagcgagaccccagagcctgtggtgtgcttccccccagccagtgaccagttcctgctgtag

SEQ ID NO: 161724 - DNA, 2712 bp, synthetic construct
  misc_feature 1..2712: note = Description of Artificial Sequence: Synthetic coding sequence
  source 1..2712: mol_type = other DNA
atggcccccaccaagcccagcttccagcaggaccccagccggcgggagcggctgcaggccctgaggaaggagaagagcagagatgctgcccggagcagaagaggcaaggaaaattttgagttctatgagctggccaagctgctgcccctgcctgctgccatcaccagccagctggacaaggccagcatcatccggctgaccatctcctacctgaagatgagggactttgccaaccagggcgaccccccctggaacctgaggatggagggccccccacccaacacctctgtgaaggtgattggagcccagaggagaagaagccccagcgccctggccatcgaggtgtttgaggcccacctgggcagccacatcctgcagagcctggatggctttgtgtttgccctgaaccaggagggcaagttcctgtacatcagcgagaccgtgtccatctacctgggcctgagccaggtggagctgaccggcagctctgtgtttgattatgtgcaccctggggaccacgtggagatggccgagcagctgggcatgaagctgcccccaggccggggcctgctgagccagggcacagcagaagatggagccagcagcgccagcagcagcagccagagcgagaccccagagcctgtggagagcaccagccccagcctgctgaccacagacaacaccctggagaggagcttcttcatccgcatgaagagcaccctgaccaagaggggcgtgcacatcaagagcagcggctacaaggtgatccacatcaccggccgcctgcggctgcgggtgtccctgagccacggccgcacagtgcccagccagatcatgggcctggtggtggtggcccacgccctgcccccacccaccatcaatgaggtgagaattgactgccacatgtttgtgaccagggtgaacatggacctgaacatcatctactgtgaaaatcgcatcagtgactacatggacctgacccctgtggacatcgtgggcaagcgctgctaccacttcatccacgcagaagatgtggagggcatccgccacagccacctggacctgctgaacaagggccagtgtgtgaccaagtactaccgctggatgcagaagaatggaggctacatctggatccagagcagcgccaccatcgccatcaatgccaagaatgccaatgagaagaacatcatctgggtgaactacctgctgagcaaccctgagtacaaggacacccccatggacatcgcccagctgccccacctgcctgagaagaccagcgagagcagcgagaccagtgacagcgagagtgacagcaaggacaccagcggcatcacagaggacaatgaaaacagcaagagtgatgagaagggcaaccagagtgaaaattctgaggaccctgagccagacaggaagaagtctggaaatgcctgtgacaatgacatgaactgcaatgatgatggccacagcagcagcaacccagacagccgggacagtgatgacagctttgagcacagcgactttgagaaccccaaggccggggaggatggctttggagccctgggcgccatgcagatcaaggtggagcgctacgtggagagcgagagtgacctgcggctgcagaactgtgagagcctgaccagtgacagcgccaaggacagcgacagcgctggggaggccggggcccaggccagcagcaagcaccagaagaggaagaagaggaggaagaggcagaagggcggcagcgccagcagaagaaggctgagcagcgccagcagccctgggggcctggatgctggcctggtggagcccccccggctgctgagcagccccaacagcgcctctgtgctgaagatcaagacagagatcagcgagcccatcaactttgacaatgacagcagcatctggaactacccacccaaccgggagatcagcagaaatgaaagcccctacagcatgaccaagccacccagcagcgagcacttccccagcccccagggcggcggcggcggcggcggcggcggcggcggcctgcacgtggccatcccagacagcgtgctgaccccacctggagcagatggagctgctgccaggaagacccagtttggagccagcgccacagctgccctggcccctgtggccagtgaccccctgagcccccccctgagcgccagcccccgggacaagcaccctggaaatggaggcggcggcggcggcggcggcggcggggccggcggcggcggccccagcgccagcaacagcctgctgtacacaggagacctggaggccctgcagaggctgcaggccggaaatgtggtgctgcccctggtgcaccgggtgacaggcaccctggccgccaccagcacagctgcccagagggtgtacaccaccggcaccatccgctatgccccagctgaggtgaccctggccatgcagagcaacctgctgcccaatgcccatgctgtgaactttgtggatgtgaacagccctggcttcggcctggaccccaagacccccatggagatgctgtaccaccacgtgcaccggctgaacatgagcggcccctttggaggagctgtgtctgctgccagcctgacccagatgcctgctggaaatgtgttcaccacagctgagggcctcttcagcaccctgcccttccctgtgtacagcaatggcatccacgccgcccagaccctggagaggaaggaggactag

SEQ ID NO: 161725 - DNA, 2409 bp, synthetic construct
  misc_feature 1..2409: note = Description of Artificial Sequence: Synthetic coding sequence
  source 1..2409: mol_type = other DNA
atgtaccgcagcaccaagggggccagcaaggcccggcgggaccagatcaatgctgagatccggaacctgaaggagctgctgcccctggccgaggccgacaaggtgcggctgagctacctgcacatcatgagcctggcctgcatctacaccaggaagggcgtcttctttgctgggggcacccccctggccggccccaccggcctgctgagcgcccaggagctggaggacatcgtggccgccctgcccggcttcctgctggtgttcaccgctgagggcaagctgctgtacctgtctgagagcgtgtctgagcacctgggccacagcatggtggacctggtggcccagggcgacagcatctatgacatcattgatcctgctgaccacctgactgtgcggcagcagctgaccctgcccagcgccctggacacagacaggctcttccgctgccgcttcaacaccagcaagagcctgcggcggcagagcgctggcaacaagctggtgctgatccggggccgcttccacgcccaccccccaggggcctactgggccggcaaccctgtgttcaccgccttctgtgcccccctggagccccggcccaggcctggccctggccctggccctggccctgccagcctcttcctggccatgttccagagcagacatgccaaggacctggccctgctggacatcagcgagagcgtgctgatctacctgggctttgagaggtctgagctgctgtgcaagtcctggtacggcctgctgcaccctgaggacctggcccacgccagcgcccagcactaccgcctgctggccgagagcggggacatccaggccgagatggtggtgcggctgcaggccaagacaggaggctgggcctggatctactgcctgctgtacagcgagggccctgagggccccatcacagccaacaactaccccatcagtgacatggaggcctggagcctgcggcagcagctgaacagcgaggacacccaggccgcctacgtgctgggcacccccaccatgctgcccagcttccctgagaacatcctgagccaggaggagtgcagcagcaccaaccccctcttcaccgctgccctgggcgcccccaggagcaccagcttccccagcgcccctgagctgtctgtggtgtctgccagcgaggagctgccccggcccagcaaggagctggacttctcctacctgaccttccccagcggccctgagcccagcctgcaggccgagctgagcaaggacctggtgtgcaccccaccctacaccccccaccagcccggcggctgtgccttcctgttcagcctgcacgagcccttccagacccacctgcccacccccagcagcaccctgcaggagcagctgacccccagcacagccaccttcagtgaccagctgacccccagcagcgccaccttcccagaccccctgaccagccccctgcagggccagctgacagagacctctgtgcgctcctatgaggaccagctgaccccctgcaccagcaccttcccagaccagctgctgcccagcacagccaccttccctgagcccctgggcagccctgcccacgagcagctgaccccacccagcacagccttccaggcccacctggacagccccagccagaccttccctgagcagctgagccccaaccccaccaagacctactttgcccaggagggctgcagcttcctgtatgagaagctgccccccagccccagcagccctggaaatggagactgcaccctgctggccctggcccagctgcggggccccctgtctgtggatgtgcccctggtgcctgagggcctgctgaccccagaggccagccctgtgaagcagagcttcttccactacagcgagaaggagcagaatgaaattgacaggctcatccagcagatcagccagctggcccagggcatggaccggcccttctctgctgaggccggcaccggcggcctggagcccctgggcggcctggagcccctggacagcaacctgagcctgtctggagctggcccccctgtgctgagcctggacctgaagccctggaagtgccaggagctggacttcctggccgaccctgacaacatgttcctggaggagacccctgtggaggacatcttcatggacctgagcaccccagaccccagcgaggagtggggcagcggggaccctgaggccgagggccctgggggcgcccccagcccctgcaacaacctgagccctgaggaccacagcttcctggaggacctggccacctatgaaacagcctttgagaccggggtgtctgccttcccctatgatggcttcacagatgagctgcaccagctgcagagccaggtgcaggacagcttccatgaagatggcagcggcggggagcccaccttctag

SEQ ID NO: 161726 - DNA, 705 bp, synthetic construct
  misc_feature 1..705: note = Description of Artificial Sequence: Synthetic coding sequence
  source 1..705: mol_type = other DNA
atgtaccgcagcaccaagggggccagcaaggcccggcgggaccagatcaatgctgagatccggaacctgaaggagctgctgcccctggccgaggccgacaaggtgcggctgagctacctgcacatcatgagcctggcctgcatctacaccaggaagggcgtcttctttgctgggggcacccccctggccggccccaccggcctgctgagcgcccaggagctggaggacatcgtggccgccctgcccggcttcctgctggtgttcaccgctgagggcaagctgctgtacctgtctgagagcgtgtctgagcacctgggccacagcatggtggacctggtggcccagggcgacagcatctatgacatcattgatcctgctgaccacctgactgtgcggcagcagctgaccctgcccagcgccctggacacagacaggctcttccgctgccgcttcaacaccagcaagagcctgcggcggcagagcgctggcaacaagctggtgctgatccggggccgcttccacgcccaccccccaggggcctactgggccggcaaccctgtgttcaccgccttctgtgcccccctggagccccggcccaggcctggccctggccctggccctggccctgccagcctcttcctggccatgttccagagcagacatgccaaggacctggccctgctggacatcagcgagagcggctag

SEQ ID NO: 161727 - DNA, 1299 bp, synthetic construct
  misc_feature 1..1299: note = Description of Artificial Sequence: Synthetic coding sequence
  source 1..1299: mol_type = other DNA
atgcctgctggccgggccgcccggacctgtgccctgctggccctgtgcctgctgggcgctggggcccaggactttggccccacccgcttcatctgcacctctgtgcctgtggatgctgacatgtgtgccgcctctgtggccgccggcggcgctgaggagctgcggagctctgtgctgcagctgcgggagaccgtgctgcagcagaaggagaccatcctgagccagaaggagaccatccgggagctgacagccaagctgggccgctgtgagagccagagcaccctggaccctggagctggggaggcccgggccggcggcggcaggaagcagcccggcagcggcaagaacaccatgggagacctgagcaggaccccagctgctgagaccctgagccagctgggccagaccctgcagagcctgaagacccggctggagaacctggagcagtacagccggctgaacagcagcagccagaccaacagcctgaaggacctgctgcagagcaagattgatgagctggagcggcaggtgctgagccgggtgaacaccctggaggagggcaagggcggccccagaaatgacacagaggagcgggtgaagattgaaacagccctgaccagcctgcaccagaggatcagcgagctggagaagggccagaaggacaacagacctggggacaagttccagctgaccttccccctgcggaccaactacatgtatgccaaggtgaagaagagcctgcctgagatgtatgccttcaccgtgtgcatgtggctgaagagcagcgccaccccaggagtgggcacccccttctcctatgctgtgcccggccaggccaatgagctggtgctgattgagtggggcaacaaccccatggagatcctgatcaatgacaaggtggccaagctgccctttgtgatcaatgatggcaagtggcaccacatctgtgtgacctggaccaccagagatggagtgtgggaggcctaccaggacggcacccagggcggcagcggggagaacctggccccctaccaccccatcaagccccagggcgtgctggtgctgggccaggagcaggacaccctgggcggcggctttgatgccacccaggcctttgtgggggagctggcccacttcaacatctgggacaggaagctgaccccaggagaggtgtacaacctggccacctgcagcaccaaggccctgtctggaaatgtgattgcctgggccgagagccacatcgagatctatggaggagccaccaagtggacctttgaggcctgccggcagatcaactag

SEQ ID NO: 161728 - DNA, 585 bp, synthetic construct
  misc_feature 1..585: note = Description of Artificial Sequence: Synthetic coding sequence
  source 1..585: mol_type = other DNA
atgtatgccaaggtgaagaagagcctgcctgagatgtatgccttcaccgtgtgcatgtggctgaagagcagcgccaccccaggagtgggcacccccttctcctatgctgtgcccggccaggccaatgagctggtgctgattgagtggggcaacaaccccatggagatcctgatcaatgacaaggtggccaagctgccctttgtgatcaatgatggcaagtggcaccacatctgtgtgacctggaccaccagagatggagtgtgggaggcctaccaggacggcacccagggcggcagcggggagaacctggccccctaccaccccatcaagccccagggcgtgctggtgctgggccaggagcaggacaccctgggcggcggctttgatgccacccaggcctttgtgggggagctggcccacttcaacatctgggacaggaagctgaccccaggagaggtgtacaacctggccacctgcagcaccaaggccctgtctggaaatgtgattgcctgggccgagagccacatcgagatctatggaggagccaccaagtggacctttgaggcctgccggcagatcaactag

SEQ ID NO: 161729 - DNA, 1296 bp, synthetic construct
  misc_feature 1..1296: note = Description of Artificial Sequence: Synthetic coding sequence
  source 1..1296: mol_type = other DNA
atgctggccctgctggccgcctctgtggccctggccgtggccgccggggcccaggacagccctgcccctggcagcagatttgtgtgcacagccctgcccccagaggccgtgcatgctggctgccccctgcctgccatgcccatgcagggcggggcccagagccctgaggaggagctgcgggctgctgtgctgcagctgcgggagaccgtggtgcagcagaaggagaccctgggcgcccagcgggaggccatccgggagctgaccgggaagctggcccgctgtgagggcctggccggcggcaaggcccggggagctggggccaccgggaaggacaccatgggagacctgccccgggaccccggccacgtggtggagcagctgagccgcagcctgcagaccctgaaggaccggctggagagcctggagcaccagctgcgggccaacgtgtccaatgccggcctgcccggggacttccgggaggtgctgcagcagaggctgggggagctggagcggcagctgctgaggaaggtggccgagctggaggatgagaagagcctgctgcacaatgagaccagcgcccaccggcagaagacagagagcaccctgaatgccctgctgcagagggtgacagagctggagcggggcaacagcgccttcaagagcccagatgccttcaaggtgtccctgcccctgcggaccaactacctgtatggcaagatcaagaagaccctgcctgagctgtatgccttcaccatctgcctgtggctgcggagcagcgccagccctggcatcggcacccccttctcctatgctgtgcccggccaggccaatgaaattgtgctgattgagtggggcaacaaccccatcgagctgctgatcaatgacaaggtggcccagctgcccctgtttgtgtctgatggcaagtggcaccacatctgtgtgacctggaccaccagagatggcatgtgggaggccttccaggatggagagaagctgggcaccggggagaacctggccccctggcaccccatcaagccaggcggcgtgctgatcctgggccaggagcaggacacagtgggcggccgctttgatgccacccaggcctttgtgggggagctgagccagttcaacatctgggacagagtgctgcgggcccaggagatcgtgaacatcgccaactgcagcaccaacatgcctggcaacatcatcccctgggtggacaacaacgtggatgtgtttggaggagccagcaagtggcctgtggagacctgtgaggagcggctgctggacctgtag

SEQ ID NO: 161730 - DNA, 246 bp, synthetic construct
  misc_feature 1..246: note = Description of Artificial Sequence: Synthetic coding sequence
  source 1..246: mol_type = other DNA
atggctgctgtggccgccgccagcgctgagctgctgatcatcggctggtacatcttccgggtgctgctgcaggtgttcctggagtgctgcatctactgggtgggctttgccttcagaaatcctcctggcacccagcccatcgcccggtctgaggtgttccgctacagcctgcagaagctggcctacacagtgtccaggacaggccggcaggtgctgggggagcggcggcagagggcccccaactag

SEQ ID NO: 161731 - DNA, 165 bp, synthetic construct
  misc_feature 1..165: note = Description of Artificial Sequence: Synthetic coding sequence
  source 1..165: mol_type = other DNA
atggctgctgtggccgccgccagcgctgagctgctgatcatcggctggtacatcttccgggtgctgctgcaggtgttccgctacagcctgcagaagctggcctacacagtgtccaggacaggccggcaggtgctgggggagcggcggcagagggcccccaactag

SEQ ID NO: 161732 - DNA, 270 bp, synthetic construct
  misc_feature 1..270: note = Description of Artificial Sequence: Synthetic coding sequence
  source 1..270: mol_type = other DNA
atgatcagctctgtgaagctgaacctgatcctggtgctgagcctgagcaccatgcacgtgttctggtgctaccctgtgcccagcagcaaggtgtctgggaagagtgactacttcctgatcctgctgaacagctgccccacccggctggacaggagcaaggagctggccttcctgaagcccatcctggagaagatgtttgtgaagaggagcttcagaaatggagtgggcaccggcatgaagaagaccagcttccagagggccaagagctag

SEQ ID NO: 161733 - DNA, 525 bp, synthetic construct
  misc_feature 1..525: note = Description of Artificial Sequence: Synthetic coding sequence
  source 1..525: mol_type = other DNA
gtggtgctgctgtatgccagcacctacgtgctggtgtccctgagcattgaccgctaccacgccatcgtgtaccccatgaaggtgctgattgtcatcgcctggagcctgtccttcctgttcagcatccccaccctcatcatctttgggaagaggaccctgagcaatggagaggtgcagtgctgggccctgtggccagatgacagctactggaccccctacatgaccatcgtggccttcctgggcagcctcatcaccttcatctgctgctggagcccctacttcctgtttgacatcctggacaacttcaacctgctgcctgacacccaggagcgcttctacgccagcgtcatcatccagaacctgcctgccctgaacagcgccatcaaccccctcatctactgtgtgttcagcagcagcatctccttcccctgccgggagcagaggagccaggacagcaggatgaccttccgggagaggacagaaagacatgagatgcagatcctgagcaagccagagttcatctag

SEQ ID NO: 161734 - DNA, 1134 bp, synthetic construct
  misc_feature 1..1134: note = Description of Artificial Sequence: Synthetic coding sequence
  source 1..1134: mol_type = other DNA
atgcctgccaacttcacagagggcagctttgacagcagcggcaccggccagaccctggacagcagccctgtggcctgcacagaaacagtgaccttcacagaggtggtggagggcaaggagtggggcagcttctactacagcttcaagacagagcagctgatcaccctgtgggtgctgtttgtgttcaccatcgtgggcaacagcgtggtgctcttcagcacctggaggaggaagaagaagagcaggatgaccttctttgtgacccagctggccatcacagacagcttcaccggcctggtgaacatcctgacagacatcaactggaggttcaccggggacttcaccgccccagacctggtgtgccgggtggtgcgctacctgcaggtggtgctgctgtatgccagcacctacgtgctggtgtccctgagcattgaccgctaccacgccatcgtgtaccccatgaagttcctgcagggcgagaagcaggcccgggtgctgattgtgattgcctggagcctgtccttcctgttcagcatccccaccctcatcatctttgggaagaggaccctgagcaatggagaggtgcagtgctgggccctgtggccagatgacagctactggaccccctacatgaccatcgtggccttcctggtgtacttcatccccctgaccatcatcagcatcatgtatggcatcgtcatccgcaccatctggatcaagagcaagacctatgagaccgtcatcagcaactgcagtgatggcaagctgtgcagcagctacaacagaggcctcatcagcaaggccaagatcaaggccatcaagtacagcatcatcatcatcctggccttcatctgctgctggagcccctacttcctgtttgacatcctggacaacttcaacctgctgcctgacacccaggagcgcttctacgccagcgtcatcatccagaacctgcctgccctgaacagcgccatcaaccccctcatctactgtgtgttcagcagcagcatctccttcccctgcagggtcatccggctgcggcagctgcaggaggccgccctgatgctgtgcccccagcgggagaactggaagggcacctggccaggagtgcccagctgggccctgcccaggtag

SEQ ID NO: 161735 - DNA, 1116 bp, synthetic construct
  misc_feature 1..1116: note = Description of Artificial Sequence: Synthetic coding sequence
  source 1..1116: mol_type = other DNA
atgcctgccaacttcacagagggcagctttgacagcagcggcaccggccagaccctggacagcagccctgtggcctgcacagaaacagtgaccttcacagaggtggtggagggcaaggagtggggcagcttctactacagcttcaagacagagcagctgatcaccctgtgggtgctgtttgtgttcaccatcgtgggcaacagcgtggtgctcttcagcacctggaggaggaagaagaagagcaggatgaccttctttgtgacccagctggccatcacagacagcttcaccggcctggtgaacatcctgacagacatcaactggaggttcaccggggacttcaccgccccagacctggtgtgccgggtggtgcgctacctgcaggtggtgctgctgtatgccagcacctacgtgctggtgtccctgagcattgaccgctaccacgccatcgtgtaccccatgaagttcctgcagggcgagaagcaggcccgggtgctgattgtgattgcctggagcctgtccttcctgttcagcatccccaccctcatcatctttgggaagaggaccctgagcaatggagaggtgcagtgctgggccctgtggccagatgacagctactggaccccctacatgaccatcgtggccttcctggtgtacttcatccccctgaccatcatcagcatcatgtatggcatcgtcatccgcaccatctggatcaagagcaagacctatgagaccgtcatcagcaactgcagtgatggcaagctgtgcagcagctacaacagaggcctcatcagcaaggccaagatcaaggccatcaagtacagcatcatcatcatcctggccttcatctgctgctggagcccctacttcctgtttgacatcctggacaacttcaacctgctgcctgacacccaggagcgcttctacgccagcgtcatcatccagaacctgcctgccctgaacagcgccatcaaccccctcatctactgtgtgttcagcagcagcatctccttcccctgccgggagcagaggagccaggacagcaggatgaccttccgggagaggacagaaagacatgagatgcagatcctgagcaagccagagttcatctag

SEQ ID NO: 161736 - DNA, 1173 bp, synthetic construct
  misc_feature 1..1173: note = Description of Artificial Sequence: Synthetic coding sequence
  source 1..1173: mol_type = other DNA
atgcctgccaacttcacagagggcagctttgacagcagcggcaccggccagaccctggacagcagccctgtggcctgcacagaaacagtgaccttcacagaggtggtggagggcaaggagtggggcagcttctactacagcttcaagacagagcagctgatcaccctgtgggtgctgtttgtgttcaccatcgtgggcaacagcgtggtgctcttcagcacctggaggaggaagaagaagagcaggatgaccttctttgtgacccagctggccatcacagacagcttcaccggcctggtgaacatcctgacagacatcaactggaggttcaccggggacttcaccgccccagacctggtgtgccgggtggtgcgctacctgcaggtggtgctgctgtatgccagcacctacgtgctggtgtccctgagcattgaccgctaccacgccatcgtgtaccccatgaagttcctgcagggcgagaagcaggcccgggtgctgattgtgattgcctggagcctgtccttcctgttcagcatccccaccctcatcatctttgggaagaggaccctgagcaatggagaggtgcagtgctgggccctgtggccagatgacagctactggaccccctacatgaccatcgtggccttcctggtgtacttcatccccctgaccatcatcagcatcatgtatggcatcgtcatccgcaccatctggatcaagagcaagacctatgagaccgtcatcagcaactgcagtgatggcaagctgtgcagcagctacaacagaggcctcatcagcaaggccaagatcaaggccatcaagtacagcatcatcatcatcctggccttcatctgctgctggagcccctacttcctgtttgacatcctggacaacttcaacctgctgcctgacacccaggagcgcttctacgccagcgtcatcatccagaacctgcctgccctgaacagcgccatcaaccccctcatctactgtgtgttcagcagcagcatctccttcccctgccgggccaacagctctgtgtacctgctggcctgtgatgtgtctgtgctgtgggccctggtgctgaccagcgagaaggagagctgtgagagctggaggaggaaaggagccaagatcaccggcttccagaatgatgtgcctggagaaaattag

SEQ ID NO: 161737 - DNA, 918 bp, synthetic construct
  misc_feature 1..918: note = Description of Artificial Sequence: Synthetic coding sequence
  source 1..918: mol_type = other DNA
atgcctgccaacttcacagagggcagctttgacagcagcggcaccggccagaccctggacagcagccctgtggcctgcacagaaacagtgaccttcacagaggtggtggagggcaaggagtggggcagcttctactacagcttcaagacagagcagctgatcaccctgtgggtgctgtttgtgttcaccatcgtgggcaacagcgtggtgctcttcagcacctggaggaggaagaagaagagcaggatgaccttctttgtgacccagctggccatcacagagaagcaggcccgggtgctgattgtgattgcctggagcctgtccttcctgttcagcatccccaccctcatcatctttgggaagaggaccctgagcaatggagaggtgcagtgctgggccctgtggccagatgacagctactggaccccctacatgaccatcgtggccttcctggtgtacttcatccccctgaccatcatcagcatcatgtatggcatcgtcatccgcaccatctggatcaagagcaagacctatgagaccgtcatcagcaactgcagtgatggcaagctgtgcagcagctacaacagaggcctcatcagcaaggccaagatcaaggccatcaagtacagcatcatcatcatcctggccttcatctgctgctggagcccctacttcctgtttgacatcctggacaacttcaacctgctgcctgacacccaggagcgcttctacgccagcgtcatcatccagaacctgcctgccctgaacagcgccatcaaccccctcatctactgtgtgttcagcagcagcatctccttcccctgccgggagcagaggagccaggacagcaggatgaccttccgggagaggacagaaagacatgagatgcagatcctgagcaagccagagttcatctag

SEQ ID NO: 161738 - DNA, 432 bp, synthetic construct
  misc_feature 1..432: note = Description of Artificial Sequence: Synthetic coding sequence
  source 1..432: mol_type = other DNA
atgcctgccaacttcacagagggcagctttgacagcagcggcaccggccagaccctggacagcagccctgtggcctgcacagaaacagtgaccttcacagaggtggtggagggcaaggagtggggcagcttctactacagcttcaagacagagcagctgatcaccctgtgggtgctgtttgtgttcaccatcgtgggcaacagcgtggtgctcttcagcacctggaggaggaagaagaagagcaggatgaccttctttgtgacccagctggccatcacagacagcttcaccggcctggtgaacatcctgacagacatcaactggaggttcaccggggacttcaccgccccagacctggtgtgccgggtggtgcgctacctgcaggtgatggtgatgaagctgttccacatccagaagatgaacatggagtag

SEQ ID NO: 161739 - DNA, 285 bp, synthetic construct
  misc_feature 1..285: note = Description of Artificial Sequence: Synthetic coding sequence
  source 1..285: mol_type = other DNA
atgcctgccaacttcacagagggcagctttgacagcagcggcaccggccagaccctggacagcagccctgtggcctgcacagaaacagtgaccttcacagaggtggtggagggcaaggagtggggcagcttctactacagcttcaagacagagcagctgatcaccctgtgggtgctgtttgtgttcaccatcgtgggcaacagcgtggtgctcttcagcacctggaggaggaagaagaagagcaggatgaccttctttgtgacccagctggccatcaccgtgtag

SEQ ID NO: 161740 - DNA, 294 bp, synthetic construct
  misc_feature 1..294: note = Description of Artificial Sequence: Synthetic coding sequence
  source 1..294: mol_type = other DNA
atgctgggcaacaagaggctgggcctgagcggcctgaccctggccctgagcctgctggtgtgcctgggcgccctggccgaggcctaccccagcaagccagacaaccctggagaagatgccccagctgaggacatggcccgctactacagcgccctgcggcactacatcaacctgatcacccggcagagatatggcaagaggagcagccctgagaccctcatcagtgacctgctgatgagggagagcacagaaaatgtgcccaggacccggctggaggaccctgccatgtggtag

SEQ ID NO: 161741 - DNA, 294 bp, synthetic construct; identical to SEQ ID NO: 161740
  misc_feature 1..294: note = Description of Artificial Sequence: Synthetic coding sequence
  source 1..294: mol_type = other DNA

SEQ ID NO: 161742 - DNA, 294 bp, synthetic construct; identical to SEQ ID NO: 161740
  misc_feature 1..294: note = Description of Artificial Sequence: Synthetic coding sequence
  source 1..294: mol_type = other DNA

SEQ ID NO: 161743 - DNA, 1155 bp, synthetic construct
  misc_feature 1..1155: note = Description of Artificial Sequence: Synthetic coding sequence
  source 1..1155: mol_type = other DNA
atgaacagcaccctcttcagccaggtggagaaccacagcgtgcacagcaacttcagcgagaagaatgcccagctgctggcctttgaaaatgatgactgccacctgcccctggccatgatcttcaccctggccctggcctatggagctgtgatcatcctgggcgtgtctggcaacctggccctgatcatcatcatcctgaagcagaaggagatgagaaatgtgaccaacatcctgattgtgaacctgtccttcagtgacctgctggtggccatcatgtgcctgcccttcacctttgtgtacaccctgatggaccactgggtgtttggagaggccatgtgcaagctgaacccctttgtgcagtgtgtgtccatcaccgtgtccatcttcagcctggtgctgattgctgtggagcggcaccagctgatcatcaacccccggggctggaggcccaacaacagacatgcctacgtgggcattgctgtgatctgggtgctggccgtggccagcagcctgcccttcctgatctaccaggtgatgacagatgagcccttccagaatgtgaccctggatgcctacaaggacaagtatgtgtgctttgaccagttccccagcgacagccaccggctgagctacaccaccctgctgctggtgctgcagtacttcggccccctgtgcttcatcttcatctgctacttcaagatctacatccggctgaagagaagaaacaacatgatggacaagatgagggacaacaagtaccgcagcagcgagaccaagaggatcaacatcatgctgctgagcatcgtggtggcctttgctgtgtgctggctgcccctgaccatcttcaacacagtgtttgactggaaccaccagatcatcgccacctgcaaccacaacctgctcttcctgctgtgccacctgacagccatgatcagcacctgtgtgaaccccatcttctacggcttcctgaacaagaacttccagagggacctgcagttcttcttcaacttctgtgacttccgcagcagagatgatgattatgagaccatcgccatgagcaccatgcacacagatgtgtccaagaccagcctgaagcaggccagccctgtggccttcaagaagatcaacaacaatgatgacaatgagaagatctag

SEQ ID NO: 161744 - DNA, 186 bp, synthetic construct
  misc_feature 1..186: note = Description of Artificial Sequence: Synthetic coding sequence
  source 1..186: mol_type = other DNA
atgaacagcaccctcttcagccaggtggagaaccacagcgtgcacagcaacttcagcgagaagaatgcccagctgctggcctttgaaaatgatgactgccacctgcccctggccatgatcttcaccctggccctggcctatggagctgtgatcatcctgggcgtgtctggcaacctggccctgtag

SEQ ID NO: 161745 - DNA, 426 bp, synthetic construct
  misc_feature 1..426: note = Description of Artificial Sequence: Synthetic coding sequence
  source 1..426: mol_type = other DNA
atgatggacaagatgagggacaacaagtaccgcagcagcgagaccaagaggatcaacatcatgctgctgagcatcgtggtggcctttgctgtgtgctggctgcccctgaccatcttcaacacagtgtttgactggaaccaccagatcatcgccacctgcaaccacaacctgctcttcctgctgtgccacctgacagccatgatcagcacctgtgtgaaccccatcttctacggcttcctgaacaagaacttccagagggacctgcagttcttcttcaacttctgtgacttccgcagcagagatgatgattatgagaccatcgccatgagcaccatgcacacagatgtgtccaagaccagcctgaagcaggccagccctgtggccttcaagaagatcaacaacaatgatgacaatgagaagatctag

SEQ ID NO: 161746 - DNA, 78 bp, synthetic construct
  misc_feature 1..78: note = Description of Artificial Sequence: Synthetic coding sequence
  source 1..78: mol_type = other DNA
atgaacagcaccctcttcagccaggtggagaaccacagcgtgcacagcaacttcagcgagaagaatgcccagctgtag

SEQ ID NO: 161747 - DNA, 183 bp, synthetic construct
  misc_feature 1..183: note = Description of Artificial Sequence: Synthetic coding sequence
  source 1..183: mol_type = other DNA
atgaacagcaccctcttcagccaggtggagaaccacagcgtgcacagcaacttcagcgagaagaatgcccagctgctggcctttgaaaatgatgactgccacctgcccctggccatgatcttcaccctggccctggcctatggagctgtgatcatcctgggcgtgtctggcaacctggcctag

SEQ ID NO: 161748 - DNA, 1146 bp, synthetic construct
  misc_feature 1..1146: note = Description of Artificial Sequence: Synthetic coding sequence
  source 1..1146: mol_type = other DNA
atgggccccatcggggctgaggctgatgagaaccagacagtggaggagatgaaggtggagcagtatggcccccagaccaccccaagaggagagctggtgcctgaccctgagcctgagctgattgacagcaccaagctgattgaggtgcaggtggtgctgatcctggcctactgcagcatcatcctgctgggcgtcatcggcaacagcctggtgattcatgtggtgatcaagttcaagtccatgaggacagtgaccaacttcttcatcgccaacctggccgtggccgacctgctggtgaacaccctgtgcctgcccttcaccctgacctacaccctgatgggagagtggaagatgggccctgtgctgtgccacctggtgccctatgcccagggcctggccgtgcaggtgtccaccatcaccctgaccgtcatcgccctggacagacaccgctgcatcgtgtaccacctggagagcaagatcagcaagaggatctccttcctgatcatcggcctggcctggggcatcagcgccctgctggccagccccctggccatcttccgggagtacagcctcatcgagatcatcccagactttgagatcgtggcctgcacagagaagtggccaggagaggagaagagcatctatggaacagtgtacagcctgagcagcctgctgatcctgtatgtgctgcccctgggcatcatctccttctcctacacccgcatctggagcaagctgaagaaccacgtgtcccctggggccgccaatgaccactaccaccagaggcggcagaagaccaccaagatgctggtgtgtgtggtggtggtgtttgctgtgtcctggctgcccctgcacgccttccagctggccgtggacatcgacagccaggtgctggacctgaaggagtacaagctgatcttcaccgtcttccacatcatcgccatgtgcagcacctttgccaaccccctgctgtatggctggatgaacagcaactacaggaaggccttcctgagcgccttccgctgtgagcagaggctggatgccatccacagcgaggtgtctgtgaccttcaaggccaagaagaacctggaggtgaggaagaacagcggccccaatgacagcttcacagaggccaccaacgtgtag

SEQ ID NO: 161749 - DNA, 1146 bp, synthetic construct; identical to SEQ ID NO: 161748
  misc_feature 1..1146: note = Description of Artificial Sequence: Synthetic coding sequence
  source 1..1146: mol_type = other DNA

SEQ ID NO: 161750 - DNA, 1338 bp, synthetic construct
  misc_feature 1..1338: note = Description of Artificial Sequence: Synthetic coding sequence
  source 1..1338: mol_type = other DNA
atggacctggagctggatgagtactacaacaagaccctggccacagagaacaacacagctgccaccaggaacagcgacttccctgtgtgggatgactacaagagctctgtggatgacctgcagtacttcctgattggcctgtacacctttgtgtccctgctgggcttcatgggcaacctgctgatcctgatggccctgatgaagaagaggaaccagaagaccaccgtgaacttcctgattggcaacctggccttcagtgacatcctggtggtgctcttctgcagccccttcaccctgacctctgtgctgctggaccagtggatgtttgggaaggtgatgtgccacatcatgcccttcctgcagtgtgtgtctgtgctggtgtccaccctcatcctgatcagcatcgccatcgtgcgctaccacatgatcaagcaccccatcagcaacaacctgacagccaaccacggctacttcctgattgccaccgtgtggaccctgggctttgccatctgcagccccctgcctgtgttccacagcctggtggagctgcaggagacctttggaagtgccctgctgagcagccgctacctgtgtgtggagagctggcccagcgacagctacagaattgccttcaccatcagcctgctgctggtgcagtacatcctgcccctggtgtgcctgactgtgagccacacctctgtgtgccgcagcatcagctgtggcctgagcaacaaggagaaccggctggaggagaatgagatgatcaacctgaccctgcaccccagcaagaagagcggcccccaggtgaagctgagcggcagccacaagtggagctacagcttcatcaagaagcacagaagacgctacagcaagaagacagcctgtgtgctgcctgcccctgagcggcccagccaggagaaccacagccgcatcctgcctgagaactttggatctgtgcgcagccagctgagcagcagcagcaagttcatccctggggtgcccacctgctttgagatcaagccagaagaaaattctgatgtgcatgagctgcgggtgaagaggtctgtgacccgcatcaagaagaggagccgctctgtgttctaccgcctgaccatcctgatcctggtgtttgctgtgtcctggatgcccctgcacctgttccacgtggtgacagacttcaatgacaacctgatcagcaacagacacttcaagctggtgtactgcatctgccacctgctgggcatgatgagctgctgcctgaaccccatcctgtatggcttcctgaacaacggcatcaaggctgacctggtgtccctcatccactgcctgcacatgtag

SEQ ID NO: 161751 - DNA, 1338 bp, synthetic construct; identical to SEQ ID NO: 161750
  misc_feature 1..1338: note = Description of Artificial Sequence: Synthetic coding sequence
  source 1..1338: mol_type = other DNA

SEQ ID NO: 161752 - DNA, 1338 bp, synthetic construct; identical to SEQ ID NO: 161750
  misc_feature 1..1338: note = Description of Artificial Sequence: Synthetic coding sequence
  source 1..1338: mol_type = other DNA

SEQ ID NO: 161753 - DNA, 987 bp, synthetic construct
  misc_feature 1..987: note = Description of Artificial Sequence: Synthetic coding sequence
  source 1..987: mol_type = other DNA
atggacaatgccagcttcagcgagccctggccagccaatgccagcggccctgaccctgccctgagctgcagcaatgccagcaccctggcccccctgcctgcccccctggccgtggccgtgcctgtggtgtatgctgtgatctgtgctgtgggcctggccggcaacagcgctgtgctgtatgtgctgctgcgggcccccaggatgaagacagtgaccaacctcttcatcctgaacctggccatcgcagatgagctgttcaccctggtgctgcccatcaacattgctgacttcctgctgcggcagtggccctttggagagctgatgtgcaagctgattgtggccatcgaccagtacaacaccttcagcagcctgtacttcctgactgtgatgtctgctgaccgctacctggtggtgctggccacagctgagagcagaagagtggccggccgcacctacagcgctgcccgggctgtgtccctggccgtgtggggcatcgtgaccctggtggtgctgccctttgctgtgtttgcccggctggatgatgagcagggccggcggcagtgtgtgctggtgttcccccagcctgaggccttctggtggagggccagccggctgtacaccctggtgctgggctttgccatccctgtgtccaccatctgtgtgctgtacaccaccctgctgtgccgcctgcacgccatgaggctggacagccacgccaaggccctggagcgggccaagaagagggtgaccttcctggtggtggccatcctggccgtgtgcctgctgtgctggaccccctaccacctgagcacagtggtggccctgaccacagacctgccccagacccccctggtgattgccatctcctacttcatcaccagcctgtcctatgccaacagctgcctgaaccccttcctgtatgccttcctggatgccagcttcagaagaaacctgcggcagctgatcacctgcagagctgctgcctag

SEQ ID NO: 161754 - DNA, 1599 bp, synthetic construct
  misc_feature 1..1599: note = Description of Artificial Sequence: Synthetic coding sequence
  source 1..1599: mol_type = other DNA
atgctggccgagcccttccccaaggtggtggccagcctcatcatcctgcacctgagcggggccaccaagaagggcacagagaagcagaccaccagcgagacccagaagtctgtgcagtgtggcacctggaccaagcatgctgagggcggcatcttcaccagccccaactaccccagcaagtaccccccagaccgggagtgcatctacatcattgaagctgccccccggcagtgcatcgagctgtactttgatgagaagtacagcattgagcccagctgggagtgcaagtttgaccacatcgaggtgagagatggccccttcggcttcagccccatcatcggccgcttctgtggccagcagaacccccctgtgatcaagagcagcggccgcttcctgtggatcaagttctttgctgatggagagctggagagcatgggcttcagcgcccgctacaacttcaccccagaccctgacttcaaggacctgggcgccctgaagcccctgcctgcctgtgaatttgagatgggcggcagcgagggcatcgtggagagcatccagatcatgaaggagggcaaggccacagccagcgaggccgtggactgcaagtggtacatccgggccccacccaggagcaagatctacctgcgcttcctggactatgagatgcagaacagcaatgaatgcaagaggaactttgtggccgtgtatgatggcagcagctctgtggaggacctgaaggccaagttctgcagcacagtggccaatgatgtgatgctgaggacaggcctgggcgtcatccgcatgtgggcagatgagggcagcaggaacagccgcttccagatgctgttcaccagcttccaggagcccccctgtgagggcaacaccttcttctgccacagcaacatgtgcatcaacaacaccctggtgtgcaatggcctgcagaactgtgtgtacccctgggatgagaaccactgcaaggagaagaggaagaccagcctgctggaccagctgaccaacaccagcggcaccgtgattggagtgaccagctgcatcgtcatcatcctgatcatcatctctgtgattgtgcagatcaagcagcccaggaagaagtatgtgcagaggaagagtgactttgaccagacagtgttccaggaggtgtttgagcccccccactatgagctgtgcaccctgcggggcaccggggccacagctgactttgctgatgtggctgatgactttgagaactaccacaagctgcggcgcagcagcagcaagtgcatccatgaccaccactgcggcagccagctgagcagcaccaagggcagccgcagcaacctgagcaccagagatgccagcatcctgacagagatgcccacccagcccgggaagcccctcatcccccccatgaacagaagaaacatcctggtgatgaagcacagctacagccaggatgctgctgatgcctgtgacattgatgaaattgaggaggtgcccaccaccagccaccggctgagcagacatgacaaggctgtgcagcgcttctgcctgattggcagcctgagcaagcatgaaagtgagtacaacaccaccagggtgtag

SEQ ID NO: 161755 - DNA, 1602 bp, synthetic construct
  misc_feature 1..1602: note = Description of Artificial Sequence: Synthetic coding sequence
  source 1..1602: mol_type = other DNA
atgattcatggccgctctgtgctgcacatcgtggccagcctcatcatcctgcacctgagcggggccaccaagaagggcacagagaagcagaccaccagcgagacccagaagtctgtgcagtgtggcacctggaccaagcacgccgagggcggcatcttcaccagccccaactaccccagcaagtaccccccagaccgggagtgcatctacatcatcgaggccgccccccggcagtgcatcgagctgtactttgatgagaagtacagcattgagcccagctgggagtgcaagtttgaccacatcgaggtgagagatggccccttcggcttcagccccatcatcggccgcttctgtggccagcagaacccccctgtgatcaagagcagcggccgcttcctgtggatcaagttctttgctgatggagagctggagagcatgggcttcagcgcccgctacaacttcaccccagaccctgacttcaaggacctgggcgccctgaagcccctgcctgcctgtgaatttgagatgggcggcagcgagggcatcgtggagagcatccagatcatgaaggagggcaaggccacagccagcgaggccgtggactgcaagtggtacatccgggccccacccaggagcaagatctacctgcgcttcctggactatgagatgcagaacagcaatgaatgcaagaggaactttgtggccgtgtatgatggcagcagctctgtggaggacctgaaggccaagttctgcagcacagtggccaatgatgtgatgctgaggacaggcctgggcgtcatccgcatgtgggcagatgagggcagcaggaacagccgcttccagatgctgttcaccagcttccaggagcccccctgtgagggcaacaccttcttctgccacagcaacatgtgcatcaacaacaccctggtgtgcaatggcctgcagaactgtgtgtacccctgggatgagaaccactgcaaggagaagaggaagaccagcctgctggaccagctgaccaacaccagcggcaccgtcatcggcgtgaccagctgcatcgtcatcatcctgatcatcatcagcgtcatcgtgcagatcaagcagcccaggaagaagtatgtgcagaggaagagtgactttgaccagaccgtcttccaggaggtgtttgagcccccccactatgagctgtgcaccctgcggggcactggagccacagctgactttgctgatgtggctgatgactttgagaactaccacaagctgcggcgcagcagcagcaagtgcatccatgaccaccactgcggcagccagctgagcagcaccaagggcagccgcagcaacctgagcaccagagatgccagcatcctgacagagatgcccacccagcccgggaagcccctcatcccccccatgaacagaagaaacatcctggtgatgaagcacagctacagccaggatgctgctgatgcctgtgacattgatgaaattgaggaggtgcccaccaccagccaccggctgagcagacatgacaaggctgtgcagcgcttctgcctgattggcagcctgagcaagcatgagagcgagtacaacaccaccagggtgtag

SEQ ID NO: 161756 - DNA, 471 bp, synthetic construct
  misc_feature 1..471: note = Description of Artificial Sequence: Synthetic coding sequence
  source 1..471: mol_type = other DNA
atgctggccgagcccttccccaaggtggtggccagcctcatcatcctgcacctgagcggggccaccaagaagggcacagagaagcagaccaccagcgagacccagaagtctgtgcagtgtggcacctggaccaagcatgctgagggcggcatcttcaccagccccaactaccccagcaagtaccccccagaccgggagtgcatctacatcattgaagctgccccccggcagtgcatcgagctgtactttgatgagaagtacagcattgagcccagctgggagtgcaagtttgaccacatcgaggtgagagatggccccttcggcttcagccccatcatcggccgcttctgtggccagcagaacccccctgtgatcaagagcagcggccgcttcctgtggatcaagttctttgctgatggagagctggagagcatgggcttcagcgcccgctacaacttcaccccagagtag

SEQ ID NO: 161757 - DNA, 1602 bp, synthetic construct; identical to SEQ ID NO: 161755
  misc_feature 1..1602: note = Description of Artificial Sequence: Synthetic coding sequence
  source 1..1602: mol_type = other DNA

SEQ ID NO: 161758 - DNA, 1017 bp, synthetic construct
  misc_feature 1..1017: note = Description of Artificial Sequence: Synthetic coding sequence
  source 1..1017: mol_type = other DNA
atgagcggcagcagcctgcccagcgccctggccctgagcctgctgctggtgtctggcagcctgctgcccggccctggagctgcccagaatgccggctttgtgaagagccccatgtctgagaccaagctgactggagatgcctttgagctgtactgtgatgtggtgggcagccccaccccagagatccagtggtggtatgcagaggtgaacagagctgagagcttccggcagctgtgggatggagccaggaagagaagagtgacagtgaacacagcctacggcagcaatggagtgtctgtgctgcgcatcacccggctgaccctggaggacagcggcacctatgaatgtcgggccagcaatgaccccaagagaaatgacctgcggcagaaccccagcatcacctggatccgggcccaggccaccatctctgtgctgcagaagccccgcatcgtgaccagcgaggaggtgatcatccgggacagccctgtgctgcctgtgaccctgcagtgcaacctgaccagcagcagccacaccctgacctacagctactggaccaagaatggagtggagctgagcgccaccaggaagaatgccagcaacatggagtaccgcatcaacaagcccagggcagaagattctggagagtaccactgtgtgtaccactttgtgtctgcccccaaggccaatgccaccatcgaggtgaaggccgccccagacatcaccggccacaagagaagtgagaacaagaatgaaggccaggatgccaccatgtactgcaagtctgtgggctacccccacccagactggatctggaggaagaaggaaaatggcatgcccatggacatcgtgaacaccagcggccgcttcttcatcatcaacaaggagaactacacagagctgaacatcgtgaacctgcagatcacagaagatcctggagaatatgagtggtgtggggccacctggccccacagcggcctgtcctgggagttctggctgaagctgagcagcctgtggtag

SEQ ID NO: 161759 - DNA, 1197 bp, synthetic construct
  misc_feature 1..1197: note = Description of Artificial Sequence: Synthetic coding sequence
  source 1..1197: mol_type = other DNA
atgagcggcagcagcctgcccagcgccctggccctgagcctgctgctggtgtctggcagcctgctgcccggccctggagctgcccagaatgccggctttgtgaagagccccatgtctgagaccaagctgactggagatgcctttgagctgtactgtgatgtggtgggcagccccaccccagagatccagtggtggtatgcagaggtgaacagagctgagagcttccggcagctgtgggatggagccaggaagagaagagtgacagtgaacacagcctacggcagcaatggagtgtctgtgctgcgcatcacccggctgaccctggaggacagcggcacctatgaatgtcgggccagcaatgaccccaagagaaatgacctgcggcagaaccccagcatcacctggatccgggcccaggccaccatctctgtgctgcagaagccccgcatcgtgaccagcgaggaggtgatcatccgggacagccctgtgctgcctgtgaccctgcagtgcaacctgaccagcagcagccacaccctgacctacagctactggaccaagaatggagtggagctgagcgccaccaggaagaatgccagcaacatggagtaccgcatcaacaagcccagggcagaagattctggagagtaccactgtgtgtaccactttgtgtctgcccccaaggccaatgccaccatcgaggtgaaggccgccccagacatcaccggccacaagagaagtgagaacaagaatgaaggccaggatgccaccatgtactgcaagtctgtgggctacccccacccagactggatctggaggaagaaggaaaatggcatgcccatggacatcgtgaacaccagcggccgcttcttcatcatcaacaaggagaactacacagagctgaacatcgtgaacctgcagatcacagaagatcctggagaatatgaatgtaatgccaccaatgccatcggcagcgcctctgtggtgacagtgctgcgggtgcgcagccacctggcccccctgtggcccttcctgggcatcctggccgagatcatcatcctggtggtgatcatcgtggtgtatgagaagaggaagaggccagatgaggtgcctgatgatgatgagcccgccggccccatgaagaccaacagcaccaacaaccacaaggacaagaacctgcggcagaggaacaccaactag

SEQ ID NO: 161760 - DNA, 849 bp, synthetic construct
  misc_feature 1..849: note = Description of Artificial Sequence: Synthetic coding sequence
  source 1..849: mol_type = other DNA
atgagcggcagcagcctgcccagcgccctggccctgagcctgctgctggtgtctggcagcctgctgcccggccctggagctgcccagaatgagccccgcatcgtgaccagcgaggaggtgatcatccgggacagccctgtgctgcctgtgaccctgcagtgcaacctgaccagcagcagccacaccctgacctacagctactggaccaagaatggagtggagctgagcgccaccaggaagaatgccagcaacatggagtaccgcatcaacaagcccagggcagaagattctggagagtaccactgtgtgtaccactttgtgtctgcccccaaggccaatgccaccatcgaggtgaaggccgccccagacatcaccggccacaagagaagtgagaacaagaatgaaggccaggatgccaccatgtactgcaagtctgtgggctacccccacccagactggatctggaggaagaaggaaaatggcatgcccatggacatcgtgaacaccagcggccgcttcttcatcatcaacaaggagaactacacagagctgaacatcgtgaacctgcagatcacagaagatcctggagaatatgaatgtaatgccaccaatgccatcggcagcgcctctgtggtgacagtgctgcgggtgcgcagccacctggcccccctgtggcccttcctgggcatcctggccgagatcatcatcctggtggtgatcatcgtggtgtatgagaagaggaagaggccagatgaggtgcctgatgatgatgagcccgccggccccatgaagaccaacagcaccaacaaccacaaggacaagaacctgcggcagaggaacaccaactag

SEQ ID NO: 161761 - DNA, 582 bp, synthetic construct
  misc_feature 1..582: note = Description of Artificial Sequence: Synthetic coding sequence
  source 1..582: mol_type = other DNA
atgagcggcagcagcctgcccagcgccctggccctgagcctgctgctggtgtctggcagcctgctgcccggccctggagctgcccagaatgctgccccagacatcaccggccacaagaggtctgagaacaagaatgaaggccaggatgccaccatgtactgcaagtctgtgggctacccccacccagactggatctggaggaagaaggaaaatggcatgcccatggacatcgtgaacaccagcggccgcttcttcatcatcaacaaggagaactacacagagctgaacatcgtgaacctgcagatcacagaggaccccggggagtatgagtgcaatgccaccaatgccatcggcagcgcctctgtggtgacagtgctgcgggtgcgcagccacctggcccccctgtggcccttcctgggcatcctggccgagatcatcatcctggtggtgatcatcgtggtgtatgagaagaggaagaggccagatgaggtgcctgatgatgatgagcctgctggccccatgaagaccaacagcaccaacaaccacaaggacaagaacctgcggcagaggaacaccaactag

SEQ ID NO: 161762 - DNA, 1185 bp, synthetic construct
  misc_feature 1..1185: note = Description of Artificial Sequence: Synthetic coding sequence
  source 1..1185: mol_type = other DNA
atgagcggcagcagcctgcccagcgccctggccctgagcctgctgctggtgtctggcagcctgctgcccggccctggagctgcccagaatgccggctttgtgaagagccccatgtctgagaccaagctgactggagatgcctttgagctgtactgtgatgtggtgggcagccccaccccagagatccagtggtggtatgcagaggtgaacagagctgagagcttccggcagctgtgggatggagccaggaagagaagagtgacagtgaacacagcctacggcagcaatggagtgtctgtgctgcgcatcacccggctgaccctggaggacagcggcacctatgaatgtcgggccagcaatgaccccaagagaaatgacctgcggcagaaccccagcatcacctggatccgggcccaggccaccatctctgtgctgcagaagccccgcatcgtgaccagcgaggaggtgatcatccgggacagccctgtgctgcctgtgaccctgcagtgcaacctgaccagcagcagccacaccctgacctacagctactggaccaagaatggagtggagctgagcgccaccaggaagaatgccagcaacatggagtaccgcatcaacaagcccagggcagaagattctggagagtaccactgtgtgtaccactttgtgtctgcccccaaggccaatgccaccatcgaggtgaaggccgccccagacatcaccggccacaagagaagtgagaacaagaatgaaggccaggatgccaccatgtactgcaagtctgtgggctacccccacccagactggatctggaggaagaaggaaaatggcatgcccatggacatcgtgaacaccagcggccgcttcttcatcatcaacaaggagaactacacagagctgaacatcgtgaacctgcagatcacagaagatcctggagaatatgaatgtaatgccaccaatgccatcggcagcgcctctgtggtgacagtgctgcgggtgcgcagccacctggcccccctgtggcccttcctgggcatcctggccgagatcatcatcctggtggtgatcatcgtggtgtatgagaagaggaagaggccagatgaggtgcctgatgtgccccccaggaagaccaacagcaccaacaaccacaaggacaagaacctgcggcagaggaacaccaactag

SEQ ID NO: 161763 - DNA, 513 bp, synthetic construct
  misc_feature 1..513: note = Description of Artificial Sequence: Synthetic coding sequence
  source 1..513: mol_type = other DNA
atgatggccggcatgaagatccagctggtgtgcatgctgctgctggccttcagctcctggagcctgtgcagcgacagcgaggaggagatgaaggccctggaggccgacttcctgaccaacatgcacaccagcaagatcagcaaggcccacgtgcccagctggaagatgaccctgctgaatgtgtgcagcctggtgaacaacctgaacagccctgctgaggagactggagaggtgcatgaggaggagctggtggcccggaggaagctgcccacagccctggatggcttcagcctggaggccatgctgaccatctaccagctgcacaagatctgccacagccgggccttccagcactgggagctgatccaggaggacatcctggacacaggaaatgacaagaatggcaaggaggaggtgatcaagaggaagatcccctacatcctgaagaggcagctgtatgagaacaagccccggcggccctacatcctgaagagggacagctactactactag

SEQ ID NO: 161764 - DNA, 348 bp, synthetic construct
  misc_feature 1..348: note = Description of Artificial Sequence: Synthetic coding sequence
  source 1..348: mol_type = other DNA
atgaccctgctgaatgtgtgcagcctggtgaacaacctgaacagccctgctgaggagaccggggaggtgcatgaggaggagctggtggcccggaggaagctgcccacagccctggatggcttcagcctggaggccatgctgaccatctaccagctgcacaagatctgccacagccgggccttccagcactgggagctgatccaggaggacatcctggacacaggaaatgacaagaatggcaaggaggaggtgatcaagaggaagatcccctacatcctgaagaggcagctgtatgagaacaagccccggcggccctacatcctgaagagggacagctactactactag

SEQ ID NO: 161765 - DNA, 288 bp, synthetic construct
  misc_feature 1..288: note = Description of Artificial Sequence: Synthetic coding sequence
  source 1..288: mol_type = other DNA
atgatggccggcatgaagatccagctggtgtgcatgctgctgctggccttcagctcctggagcctgtgcagcgacagcgaggaggagatgaaggccctggaggccgacttcctgaccaacatgcacaccagcaagctgatccaggaggacatcctggacacaggaaatgacaagaatggcaaggaggaggtgatcaagaggaagatcccctacatcctgaagaggcagctgtatgagaacaagccccggcggccctacatcctgaagagggacagctactactactag

SEQ ID NO: 161766 - DNA, 1257 bp, synthetic construct
  misc_feature 1..1257: note = Description of Artificial Sequence: Synthetic coding sequence
  source 1..1257: mol_type = other DNA
atgaggctgaacagcagcgcccctggcaccccaggcaccccagctgctgaccccttccagagggcccaggccggcctggaggaggccctgctggcccctggctttggaaatgccagcggaaatgccagcgagcgggtgctggccgcccccagcagcgagctggatgtgaacacagacatctacagcaaggtgctggtgacagctgtgtacctggccctgtttgtggtgggcaccgtgggcaacacagtgacagccttcaccctggccaggaagaagagcctgcagagcctgcagagcacagtgcactaccacctgggcagcctggccctgagtgacctgctgaccctgctgctggccatgcctgtggagctgtacaacttcatctgggtgcaccacccctgggcctttggagatgctggctgccggggctactacttcctgagagatgcctgcacctacgccacagccctgaatgtggccagcctgtctgtggagcgctacctggccatctgccaccccttcaaggccaagaccctgatgagccgcagcaggaccaagaagttcatcagcgccatctggctggccagcgccctgctggccgtgcccatgctgttcaccatgggagagcagaacagatctgcagatggccagcacgccggcggcctggtgtgcacccccaccatccacacagccaccgtgaaggtggtgatccaggtgaacaccttcatgtccttcatcttccccatggtggtgatctctgtgctgaacaccatcatcgccaacaagctgactgtgatggtgcggcaggccgctgagcagggccaggtgtgcaccgtgggcggggagcacagcaccttctccatggccatcgagcccggccgggtgcaggccctgcggcatggagtgcgggtgctgcgggctgtggtgattgcctttgtggtgtgctggctgccctaccacgtgcggcggctgatgttctgctacatcagtgatgagcagtggacccccttcctgtatgacttctaccactacttctacatggtgaccaatgccctcttctacgtgagcagcaccatcaaccccatcctgtacaacctggtgtctgccaacttccgccacatcttcctggccaccctggcctgcctgtgccctgtgtggaggagaagaaggaagaggcctgccttcagcaggaaggctgacagcgtgagcagcaaccacaccctgagcagcaatgccacccgggagaccctgtactag

SEQ ID NO: 161767 - DNA, 951 bp, synthetic construct
  misc_feature 1..951: note = Description of Artificial Sequence: Synthetic coding sequence
  source 1..951: mol_type = other DNA
atgggcgtgtgtggctacctgttcctgccctggaagtgcctggtggtggtgtccctgcggctgctcttcctggtgcccactggagtgcctgtgcgctctggagatgccaccttccccaaggccatggacaacgtgacagtgcggcagggcgagagcgccaccctgcgctgcaccatcgacaacagagtgaccagggtggcctggctgaacagaagcaccatcctgtatgctggaaatgacaagtggtgcctggacccccgggtggtgctgctgagcaacacccagacccagtacagcattgagatccagaatgtggatgtgtatgatgagggcccctacacctgcagcgtgcagacagacaaccaccccaagaccagccgggtgcacctgattgtgcaggtgagccccaagatcgtggagatcagcagtgacatcagcatcaatgaaggcaacaacatcagcctgacctgcatcgccaccggccggcctgagcccaccgtgacctggaggcacatcagccccaaggctgtgggctttgtgtctgaagatgagtacctggagatccagggcatcacccgggagcagagcggggactatgagtgcagcgccagcaatgatgtggccgcccctgtggtgagaagagtgaaggtgacagtgaactacccaccctacatcagcgaggccaagggcactggagtgcctgtgggccagaagggcaccctgcagtgtgaggccagcgctgtgcccagcgctgagttccagtggtacaaggatgacaagaggctgattgagggcaagaagggcgtgaaggtggagaaccggcccttcctgagcaagctgatcttcttcaacgtgtctgaacatgactatggcaactacacctgtgtggccagcaacaagctgggccacaccaatgccagcatcatgctgtttggagagaccgtgctgtag

SEQ ID NO: 161768 - DNA, 1035 bp, synthetic construct
  misc_feature 1..1035: note = Description of Artificial Sequence: Synthetic coding sequence
  source 1..1035: mol_type = other DNA
atgggcgtgtgtggctacctgttcctgccctggaagtgcctggtggtggtgtccctgcggctgctcttcctggtgcccactggagtgcctgtgcgctctggagatgccaccttccccaaggccatggacaacgtgacagtgcggcagggcgagagcgccaccctgcgctgcaccatcgacaacagagtgaccagggtggcctggctgaacagaagcaccatcctgtatgctggaaatgacaagtggtgcctggacccccgggtggtgctgctgagcaacacccagacccagtacagcattgagatccagaatgtggatgtgtatgatgagggcccctacacctgcagcgtgcagacagacaaccaccccaagaccagccgggtgcacctgattgtgcaggtgagccccaagatcgtggagatcagcagtgacatcagcatcaatgaaggcaacaacatcagcctgacctgcatcgccaccggccggcctgagcccaccgtgacctggaggcacatcagccccaaggctgtgggctttgtgtctgaagatgagtacctggagatccagggcatcacccgggagcagagcggggactatgagtgcagcgccagcaatgatgtggccgcccctgtggtgagaagagtgaaggtgacagtgaactacccaccctacatcagcgaggccaagggcactggagtgcctgtgggccagaagggcaccctgcagtgtgaggccagcgctgtgcccagcgctgagttccagtggtacaaggatgacaagaggctgattgagggcaagaagggcgtgaaggtggagaaccggcccttcctgagcaagctgatcttcttcaacgtgtctgaacatgactatggcaactacacctgtgtggccagcaacaagctgggccacaccaatgccagcatcatgctgtttggacctggagctgtgtctgaggtgtccaatggcaccagcagaagagctggctgtgtgtggctgctgcccctgctggtgctgcacctgctgctgaagttctag

SEQ ID NO: 161769 - DNA, 1035 bp, synthetic construct
  misc_feature 1..1035: note = Description of Artificial Sequence: Synthetic coding sequence
  source 1..1035: mol_type = other DNA
atgaagaccatccagcccaagatgcacaacagcatctcctgggccatcttcaccggcctggccgccctgtgcctcttccagggcgtgcctgtgcgctctggagatgccaccttccccaaggccatggacaacgtgacagtgcggcagggcgagagcgccaccctgcgctgcaccatcgacaacagagtgaccagggtggcctggctgaacagaagcaccatcctgtatgctggaaatgacaagtggtgcctggacccccgggtggtgctgctgagcaacacccagacccagtacagcattgagatccagaatgtggatgtgtatgatgagggcccctacacctgcagcgtgcagacagacaaccaccccaagaccagccgggtgcacctgattgtgcaggtgagccccaagatcgtggagatcagcagtgacatcagcatcaatgaaggcaacaacatcagcctgacctgcatcgccaccggccggcctgagcccaccgtgacctggaggcacatcagccccaaggctgtgggctttgtgtctgaagatgagtacctggagatccagggcatcacccgggagcagagcggggactatgagtgcagcgccagcaatgatgtggccgcccctgtggtgagaagagtgaaggtgacagtgaactacccaccctacatcagcgaggccaagggcactggagtgcctgtgggccagaagggcaccctgcagtgtgaggccagcgctgtgcccagcgctgagttccagtggtacaaggatgacaagaggctgattgagggcaagaagggcgtgaaggtggagaaccggcccttcctgagcaagctgatcttcttcaacgtgtctgaacatgactatggcaactacacctgtgtggccagcaacaagctgggccacaccaatgccagcatcatgctgtttggacctggagctgtgtctgaggtgtccaatggcaccagcagaagagctggctgtgtgtggctgctgcccctgctggtgctgcacctgctgctgaagttctag

SEQ ID NO: 161770 - DNA, 1041 bp, synthetic construct
  misc_feature 1..1041: note = Description of Artificial Sequence: Synthetic coding sequence
  source 1..1041: mol_type = other DNA
atgaatggcaagagaaatggagagggcggcaagcgctggaagtggaagggcaccggggtgcctgtgcgctctggagatgccaccttccccaaggccatggacaacgtgacagtgcggcagggcgagagcgccaccctgcgctgcaccatcgacaacagagtgaccagggtggcctggctgaacagaagcaccatcctgtatgctggaaatgacaagtggtgcctggacccccgggtggtgctgctgagcaacacccagacccagtacagcattgagatccagaatgtggatgtgtatgatgagggcccctacacctgcagcgtgcagacagacaaccaccccaagaccagccgggtgcacctgattgtgcaggtgagccccaagatcgtggagatcagcagtgacatcagcatcaatgaaggcaacaacatcagcctgacctgcatcgccaccggccggcctgagcccaccgtgacctggaggcacatcagccccaaggctgtgggctttgtgtctgaagatgagtacctggagatccagggcatcacccgggagcagagcggggactatgaatgttctgccagcaatgatgtggccgcccctgtggtgcggcgggtgaaggtgacagtgaactacccaccctacatcagcgaggccaagggcaccggggtgcctgtgggccagaagggcaccctgcagtgtgaggccagcgctgtgcccagcgctgagttccagtggtacaaggatgacaagaggctcatcgagggcaagaagggcgtgaaggtggagaaccggcccttcctgagcaagctgatcttcttcaacgtgtctgaacatgactatggcaactacacctgtgtggccagcaacaagctgggccacaccaatgccagcatcatgctgtttgaggtgaagaccacagccctgaccccctggaagggccctggagctgtgtctgaggtgtccaatggcaccagcagaagagctggctgtgtgtggctgctgcccctgctggtgctgcacctgctgctgaagttctag

SEQ ID NO: 161771 - DNA, 1068 bp, synthetic construct
  misc_feature 1..1068: note = Description of Artificial Sequence: Synthetic coding sequence
  source 1..1068: mol_type = other DNA
atgaagaccatccagcccaagatgcacaacagcatctcctgggccatcttcaccggcctggccgccctgtgcctcttccagggcgtgcctgtgcgctctggagatgccaccttccccaaggccatggacaacgtgacagtgcggcagggcgagagcgccaccctgcgctgcaccatcgacaacagagtgaccagggtggcctggctgaacagaagcaccatcctgtatgctggaaatgacaagtggtgcctggacccccgggtggtgctgctgagcaacacccagacccagtacagcattgagatccagaatgtggatgtgtatgatgagggcccctacacctgcagcgtgcagacagacaaccaccccaagaccagccgggtgcacctgattgtgcaggtgagccccaagatcgtggagatcagcagtgacatcagcatcaatgaaggcaacaacatcagcctgacctgcatcgccaccggccggcctgagcccaccgtgacctggaggcacatcagccccaaggctgtgggctttgtgtctgaagatgagtacctggagatccagggcatcacccgggagcagagcggggactatgagtgcagcgccagcaatgatgtggccgcccctgtggtgagaagagtgaaggtgacagtgaactacccaccctacatcagcgaggccaagggcactggagtgcctgtgggccagaagggcaccctgcagtgtgaggccagcgctgtgcccagcgctgagttccagtggtacaaggatgacaagaggctgattgagggcaagaagggcgtgaaggtggagaaccggcccttcctgagcaagctgatcttcttcaacgtgtctgaacatgactatggcaactacacctgtgtggccagcaacaagctgggccacaccaatgccagcatcatgctgtttgaggtgaagaccacagccctgaccccctggaagggccctggagctgtgtctgaggtgtccaatggcaccagccggcgggccggctgtgtgtggctgctgcccctgctggtgctgcacctgctgctgaagttctag

SEQ ID NO: 161772 - DNA, 1068 bp, synthetic construct
  misc_feature 1..1068: note = Description of Artificial Sequence: Synthetic coding sequence
  source 1..1068: mol_type = other DNA
atgggcgtgtgtggctacctgttcctgccctggaagtgcctggtggtggtgtccctgcggctgctcttcctggtgcccactggagtgcctgtgcgctctggagatgccaccttccccaaggccatggacaacgtgacagtgcggcagggcgagagcgccaccctgcgctgcaccatcgacaacagagtgaccagggtggcctggctgaacagaagcaccatcctgtatgctggaaatgacaagtggtgcctggacccccgggtggtgctgctgagcaacacccagacccagtacagcattgagatccagaatgtggatgtgtatgatgagggcccctacacctgcagcgtgcagacagacaaccaccccaagaccagccgggtgcacctgattgtgcaggtgagccccaagatcgtggagatcagcagtgacatcagcatcaatgaaggcaacaacatcagcctgacctgcatcgccaccggccggcctgagcccaccgtgacctggaggcacatcagccccaaggctgtgggctttgtgtctgaagatgagtacctggagatccagggcatcacccgggagcagagcggggactatgagtgcagcgccagcaatgatgtggccgcccctgtggtgagaagagtgaaggtgacagtgaactacccaccctacatcagcgaggccaagggcactggagtgcctgtgggccagaagggcaccctgcagtgtgaggccagcgctgtgcccagcgctgagttccagtggtacaaggatgacaagaggctgattgagggcaagaagggcgtgaaggtggagaaccggcccttcctgagcaagctgatcttcttcaacgtgtctgaacatgactatggcaactacacctgtgtggccagcaacaagctgggccacaccaatgccagcatcatgctgtttgaggtgaagaccacagccctgaccccctggaagggccctggagctgtgtctgaggtgtccaatggcaccagccggcgggccggctgtgtgtggctgctgcccctgctggtgctgcacctgctgctgaagttctag

SEQ ID NO: 161773 - DNA, 2373 bp, synthetic construct
  misc_feature 1..2373: note = Description of Artificial Sequence: Synthetic coding sequence
  source 1..2373: mol_type = other DNA
atgctgcggggcggccggcggggccagctgggctggcacagctgggccgccggccctggcagcctgctggcctggctgatcctggccagcgctggagctgccccctgcccagatgcctgctgcccccacggcagcagcggcctgcgctgcaccagagatggagccctggacagcctgcaccacctgcctggagctgagaacctgacagagctgtacatcgagaaccagcagcacctgcagcacctggagctgcgggacctgcggggcctgggggagctgaggaacctgaccatcgtgaagagcggcctgcgctttgtggccccagatgccttccacttcaccccccggctgagccggctgaacctgtccttcaatgccctggagagcctgtcctggaagacagtgcagggcctgagcctgcaggagctggtgctgagcggcaaccccctgcactgcagctgtgccctgcgctggctgcagcgctgggaggaggagggcctgggcggcgtgcctgagcagaagctgcagtgccacggccagggccccctggcccacatgcccaatgccagctgtggggtgcccaccctgaaggtgcaggtgcccaatgcctctgtggatgtgggagatgatgtgctgctgcgctgccaggtggagggccggggcctggagcaggccggctggatcctgacagagctggagcagagcgccaccgtgatgaagagcggcggcctgcccagcctgggcctgaccctggccaacgtgaccagtgacctgaacaggaagaatgtgacctgctgggccgagaatgatgtgggccgggcagaggtgtctgtgcaggtgaatgtgtccttccctgcctctgtgcagctgcacacagctgtggagatgcaccactggtgcatccccttctctgtggatggccagcctgcccccagcctgcgctggctgttcaacggctctgtgctgaatgagaccagcttcatcttcacagagttcctggagcctgctgccaatgagaccgtgagacatggctgcctgcggctgaaccagcccacccacgtgaacaacggcaactacaccctgctggccgccaaccccttcggccaggccagcgccagcatcatggccgccttcatggacaacccctttgagttcaaccctgaggaccccatcccagacaccaacagcaccagcggggaccctgtggagaagaaggatgagacccccttcggcgtgtctgtggccgtgggcctggccgtgtttgcctgcctcttcctgagcaccctgctgctggtgctgaacaagtgtggcagaagaaacaagtttggcatcaacagacctgctgtgctggccccagaagatggcctggccatgagcctgcacttcatgaccctgggcggcagcagcctgagccccacagagggcaagggcagcggcctgcagggccacatcatcgagaacccccagtacttcagtgatgcctgtgtgcaccacatcaagagaagagacatcgtgctgaagtgggagctgggggagggcgccttcggcaaggtgttcctggccgagtgccacaacctgctgcctgagcaggacaagatgctggtggccgtgaaggccctgaaggaggccagcgagagcgcccggcaggacttccagcgggaggccgagctgctgaccatgctgcagcaccagcacatcgtgcgcttcttcggcgtgtgcacagagggccggcccctgctgatggtgtttgagtacatgagacatggagacctgaaccgcttcctgcggagccacggcccagatgccaagctgctggccggaggagaagatgtggcccctggccccctgggcctgggccagctgctggccgtggccagccaggtggccgccggcatggtgtacctggccggcctgcactttgtgcaccgggacctggccaccaggaactgcctggtgggccagggcctggtggtgaagatcggggactttggcatgagccgggacatctacagcacagactactacagagtgggcggccgcaccatgctgcccatccgctggatgcctcctgagagcatcctgtacaggaagttcaccacagaaagtgatgtgtggagctttggagtggtgctgtgggagatcttcacctacggcaagcagccctggtaccagctgagcaacacagaggccatcgactgcatcacccagggccgggagctggagcggccccgggcctgccccccagaggtgtatgccatcatgaggggctgctggcagcgggagccccagcagaggcacagcatcaaggatgtgcacgcccggctgcaggccctggcccaggcccctcctgtgtacctggatgtgctgggctag

SEQ ID NO: 161774 - DNA, 2283 bp, synthetic construct
  misc_feature 1..2283: note = Description of Artificial Sequence: Synthetic coding sequence
  source 1..2283: mol_type = other DNA
atgaaggaggccgccctgatctgcctggcccccagcgtgccccccatcctgactgtgaagtcctgggacaccatgcagctgcgggccgcccggagccgctgcaccaacctgctggccgccagctacatcgagaaccagcagcacctgcagcacctggagctgcgggacctgcggggcctgggggagctgaggaacctgaccatcgtgaagagcggcctgcgctttgtggccccagatgccttccacttcaccccccggctgagccggctgaacctgtccttcaatgccctggagagcctgtcctggaagacagtgcagggcctgagcctgcaggagctggtgctgagcggcaaccccctgcactgcagctgtgccctgcgctggctgcagcgctgggaggaggagggcctgggcggcgtgcctgagcagaagctgcagtgccacggccagggccccctggcccacatgcccaatgccagctgtggggtgcccaccctgaaggtgcaggtgcccaatgcctctgtggatgtgggagatgatgtgctgctgcgctgccaggtggagggccggggcctggagcaggccggctggatcctgacagagctggagcagagcgccaccgtgatgaagagcggcggcctgcccagcctgggcctgaccctggccaacgtgaccagtgacctgaacaggaagaatgtgacctgctgggccgagaatgatgtgggccgggcagaggtgtctgtgcaggtgaatgtgtccttccctgcctctgtgcagctgcacacagctgtggagatgcaccactggtgcatccccttctctgtggatggccagcctgcccccagcctgcgctggctgttcaacggctctgtgctgaatgagaccagcttcatcttcacagagttcctggagcctgctgccaatgagaccgtgagacatggctgcctgcggctgaaccagcccacccacgtgaacaacggcaactacaccctgctggccgccaaccccttcggccaggccagcgccagcatcatggccgccttcatggacaacccctttgagttcaaccctgaggaccccatcccagacaccaacagcaccagcggggaccctgtggagaagaaggatgagacccccttcggcgtgtctgtggccgtgggcctggccgtgtttgcctgcctcttcctgagcaccctgctgctggtgctgaacaagtgtggcagaagaaacaagtttggcatcaacagacctgctgtgctggccccagaagatggcctggccatgagcctgcacttcatgaccctgggcggcagcagcctgagccccacagagggcaagggcagcggcctgcagggccacatcatcgagaacccccagtacttcagtgatgcctgtgtgcaccacatcaagagaagagacatcgtgctgaagtgggagctgggggagggcgccttcggcaaggtgttcctggccgagtgccacaacctgctgcctgagcaggacaagatgctggtggccgtgaaggccctgaaggaggccagcgagagcgcccggcaggacttccagcgggaggccgagctgctgaccatgctgcagcaccagcacatcgtgcgcttcttcggcgtgtgcacagagggccggcccctgctgatggtgtttgagtacatgagacatggagacctgaaccgcttcctgcggagccacggcccagatgccaagctgctggccggaggagaagatgtggcccctggccccctgggcctgggccagctgctggccgtggccagccaggtggccgccggcatggtgtacctggccggcctgcactttgtgcaccgggacctggccaccaggaactgcctggtgggccagggcctggtggtgaagatcggggactttggcatgagccgggacatctacagcacagactactacagagtgggcggccgcaccatgctgcccatccgctggatgcctcctgagagcatcctgtacaggaagttcaccacagaaagtgatgtgtggagctttggagtggtgctgtgggagatcttcacctacggcaagcagccctggtaccagctgagcaacacagaggccatcgactgcatcacccagggccgggagctggagcggccccgggcctgccccccagaggtgtatgccatcatgaggggctgctggcagcgggagccccagcagaggcacagcatcaaggatgtgcacgcccggctgcaggccctggcccaggcccctcctgtgtacctggatgtgctgggctag

SEQ ID NO: 161775 - DNA, 2391 bp, synthetic construct
  misc_feature 1..2391: note = Description of Artificial Sequence: Synthetic coding sequence
  source 1..2391: mol_type = other DNA
atgctgcggggcggccggcggggccagctgggctggcacagctgggccgccggccctggcagcctgctggcctggctgatcctggccagcgctggagctgccccctgcccagatgcctgctgcccccacggcagcagcggcctgcgctgcaccagagatggagccctggacagcctgcaccacctgcctggagctgagaacctgacagagctgtacatcgagaaccagcagcacctgcagcacctggagctgcgggacctgcggggcctgggggagctgaggaacctgaccatcgtgaagagcggcctgcgctttgtggccccagatgccttccacttcaccccccggctgagccggctgaacctgtccttcaatgccctggagagcctgtcctggaagacagtgcagggcctgagcctgcaggagctggtgctgagcggcaaccccctgcactgcagctgtgccctgcgctggctgcagcgctgggaggaggagggcctgggcggcgtgcctgagcagaagctgcagtgccacggccagggccccctggcccacatgcccaatgccagctgtggggtgcccaccctgaaggtgcaggtgcccaatgcctctgtggatgtgggagatgatgtgctgctgcgctgccaggtggagggccggggcctggagcaggccggctggatcctgacagagctggagcagagcgccaccgtgatgaagagcggcggcctgcccagcctgggcctgaccctggccaacgtgaccagtgacctgaacaggaagaatgtgacctgctgggccgagaatgatgtgggccgggcagaggtgtctgtgcaggtgaatgtgtccttccctgcctctgtgcagctgcacacagctgtggagatgcaccactggtgcatccccttctctgtggatggccagcctgcccccagcctgcgctggctgttcaacggctctgtgctgaatgagaccagcttcatcttcacagagttcctggagcctgctgccaatgagaccgtgagacatggctgcctgcggctgaaccagcccacccacgtgaacaacggcaactacaccctgctggccgccaaccccttcggccaggccagcgccagcatcatggccgccttcatggacaacccctttgagttcaaccctgaggaccccatccctgtgtccttcagccctgtggacaccaacagcaccagcggggaccctgtggagaagaaggatgagacccccttcggcgtgtctgtggccgtgggcctggccgtgtttgcctgcctcttcctgagcaccctgctgctggtgctgaacaagtgtggcagaagaaacaagtttggcatcaacagacctgctgtgctggccccagaagatggcctggccatgagcctgcacttcatgaccctgggcggcagcagcctgagccccacagagggcaagggcagcggcctgcagggccacatcatcgagaacccccagtacttcagtgatgcctgtgtgcaccacatcaagagaagagacatcgtgctgaagtgggagctgggggagggcgccttcggcaaggtgttcctggccgagtgccacaacctgctgcctgagcaggacaagatgctggtggccgtgaaggccctgaaggaggccagcgagagcgcccggcaggacttccagcgggaggccgagctgctgaccatgctgcagcaccagcacatcgtgcgcttcttcggcgtgtgcacagagggccggcccctgctgatggtgtttgagtacatgagacatggagacctgaaccgcttcctgcggagccacggcccagatgccaagctgctggccggaggagaagatgtggcccctggccccctgggcctgggccagctgctggccgtggccagccaggtggccgccggcatggtgtacctggccggcctgcactttgtgcaccgggacctggccaccaggaactgcctggtgggccagggcctggtggtgaagatcggggactttggcatgagccgggacatctacagcacagactactacagagtgggcggccgcaccatgctgcccatccgctggatgcctcctgagagcatcctgtacaggaagttcaccacagaaagtgatgtgtggagctttggagtggtgctgtgggagatcttcacctacggcaagcagccctggtaccagctgagcaacacagaggccatcgactgcatcacccagggccgggagctggagcggccccgggcctgccccccagaggtgtatgccatcatgaggggctgctggcagcgggagccccagcagaggcacagcatcaaggatgtgcacgcccggctgcaggccctggcccaggcccctcctgtgtacctggatgtgctgggctag

SEQ ID NO: 161776 - DNA, 2517 bp, synthetic construct
  misc_feature 1..2517: note = Description of Artificial Sequence: Synthetic coding sequence
  source 1..2517: mol_type = other DNA
atgagctcctggatccgctggcacggccctgccatggcccggctgtggggcttctgctggctggtggtgggcttctggagggctgcctttgcctgccccaccagctgcaagtgcagcgccagccgcatctggtgcagcgaccccagccctggcatcgtggccttcccccggctggagcccaacagcgtggaccctgagaacatcacagagatcttcatcgccaaccagaagaggctggagatcatcaatgaagatgatgtggaggcctacgtgggcctgaggaacctgaccatcgtggacagcggcctgaagtttgtggcccacaaggccttcctgaagaacagcaacctgcagcacatcaacttcaccaggaacaagctgaccagcctgagcaggaagcacttccgccacctggacctgtctgagctgatcctggtgggcaaccccttcacctgcagctgtgacatcatgtggatcaagaccctgcaggaggccaagagcagcccagacacccaggacctgtactgcctgaatgaaagcagcaagaacatccccctggccaacctgcagatccccaactgtggcctgcccagcgccaacctggccgcccccaacctgactgtggaggagggcaagagcatcaccctgagctgcagcgtggccggggaccctgtgcccaacatgtactgggatgtgggcaacctggtgtccaagcacatgaatgagaccagccacacccagggcagcctgcgcatcaccaacatcagcagtgatgacagcggcaagcagatcagctgtgtggccgagaacctggtgggggaggaccaggacagcgtgaacctgactgtgcactttgcccccaccatcaccttcctggagagccccaccagtgaccaccactggtgcatccccttcaccgtgaagggcaaccccaagccagccctgcagtggttctacaacggggccatcctgaatgaaagcaagtacatctgcaccaagatccacgtgaccaaccacacagagtaccacggctgcctgcagctggacaaccccacccacatgaacaacggggactacaccctcatcgccaagaatgaatatggcaaggatgagaagcagatcagcgcccacttcatgggctggccaggcattgatgatggagccaaccccaactacccagatgtgatctatgaggactatggaacagctgccaatgacattggagacaccaccaacagaagcaatgagatccccagcacagatgtgacagacaagacaggccgggagcacctgtctgtgtatgctgtggtggtgattgcctctgtggtgggcttctgcctgctggtgatgctgttcctgctgaagctggcccggcacagcaagtttggcatgaaggacttctcctggtttggatttgggaaggtgaagagccggcagggcgtgggccctgccagcgtcatcagcaatgatgatgattctgccagccccctgcaccacatcagcaatggcagcaacacccccagcagcagcgagggcggcccagatgctgtgatcatcggcatgaccaagatccctgtgattgagaacccccagtacttcggcatcaccaacagccagctgaagccagacacctttgtgcagcacatcaagaggcacaacatcgtgctgaagcgggagctgggggagggcgccttcggcaaggtgttcctggccgagtgctacaacctgtgcccagagcaggacaagatcctggtggccgtgaagaccctgaaggatgccagtgacaatgccaggaaggacttccaccgggaggccgagctgctgaccaacctgcagcacgagcacatcgtgaagttctacggcgtgtgtgtggagggggaccccctcatcatggtgtttgagtacatgaagcacggggacctgaacaagttcctgcgggcccacggcccagatgctgtgctgatggccgagggcaaccccccaacagagctgacccagagccagatgctgcacatcgcccagcagattgctgctggcatggtgtacctggccagccagcactttgtgcaccgggacctggccaccaggaactgcctggtgggggagaacctgctggtgaagatcggggactttggcatgagcagagatgtgtacagcacagactactacagagtgggcggccacaccatgctgcccatccgctggatgcctcctgagagcatcatgtacaggaagttcaccacagaaagtgatgtgtggagcctgggcgtggtgctgtgggagatcttcacctacggcaagcagccctggtaccagctgagcaacaatgaggtgattgagtgcatcacccagggccgggtgctgcagaggcccaggacctgcccccaggaggtgtatgagctgatgctgggctgctggcagcgggagccccacatgaggaagaacatcaagggcatccacaccctgctgcagaacctggccaaggccagccctgtgtacctggacatcctgggctag

SEQ ID NO: 161777 - DNA, 1662 bp, synthetic construct
  misc_feature 1..1662: note = Description of Artificial Sequence: Synthetic coding sequence
  source 1..1662: mol_type = other DNA
atgagctcctggatccgctggcacggccctgccatggcccggctgtggggcttctgctggctggtggtgggcttctggagggctgcctttgcctgccccaccagctgcaagtgcagcgccagccgcatctggtgcagcgaccccagccctggcatcgtggccttcccccggctggagcccaacagcgtggaccctgagaacatcacagagatcttcatcgccaaccagaagaggctggagatcatcaatgaagatgatgtggaggcctacgtgggcctgaggaacctgaccatcgtggacagcggcctgaagtttgtggcccacaaggccttcctgaagaacagcaacctgcagcacatcaacttcaccaggaacaagctgaccagcctgagcaggaagcacttccgccacctggacctgtctgagctgatcctggtgggcaaccccttcacctgcagctgtgacatcatgtggatcaagaccctgcaggaggccaagagcagcccagacacccaggacctgtactgcctgaatgaaagcagcaagaacatccccctggccaacctgcagatccccaactgtggcctgcccagcgccaacctggccgcccccaacctgactgtggaggagggcaagagcatcaccctgagctgcagcgtggccggggaccctgtgcccaacatgtactgggatgtgggcaacctggtgtccaagcacatgaatgagaccagccacacccagggcagcctgcgcatcaccaacatcagcagtgatgacagcggcaagcagatcagctgtgtggccgagaacctggtgggggaggaccaggacagcgtgaacctgactgtgcactttgcccccaccatcaccttcctggagagccccaccagtgaccaccactggtgcatccccttcaccgtgaagggcaaccccaagccagccctgcagtggttctacaacggggccatcctgaatgaaagcaagtacatctgcaccaagatccacgtgaccaaccacacagagtaccacggctgcctgcagctggacaaccccacccacatgaacaacggggactacaccctcatcgccaagaatgaatatggcaaggatgagaagcagatcagcgcccacttcatgggctggccaggcattgatgatggagccaaccccaactacccagatgtgatctatgaggactatggaacagctgccaatgacattggagacaccaccaacagaagcaatgagatccccagcacagatgtgacagacaagacaggccgggagcacctgtctgtgtatgctgtggtggtgattgcctctgtggtgggcttctgcctgctggtgatgctgttcctgctgaagctggcccggcacagcaagtttggcatgaaggacttctcctggtttggatttgggaaggtgaagagccggcagggcgtgggccctgccagcgtcatcagcaatgatgatgattctgccagccccctgcaccacatcagcaatggcagcaacacccccagcagcagcgagggcggcccagatgctgtgatcatcggcatgaccaagatccctgtgattgagaacccccagtacttcggcatcaccaacagccagctgaagccagacacctggccccggggcagccccaagacagcctag

SEQ ID NO: 161778 - DNA, 2469 bp, synthetic construct
  misc_feature 1..2469: note = Description of Artificial Sequence: Synthetic coding sequence
  source 1..2469: mol_type = other DNA
atgagctcctggatccgctggcacggccctgccatggcccggctgtggggcttctgctggctggtggtgggcttctggagggctgcctttgcctgccccaccagctgcaagtgcagcgccagccgcatctggtgcagcgaccccagccctggcatcgtggccttcccccggctggagcccaacagcgtggaccctgagaacatcacagagatcttcatcgccaaccagaagaggctggagatcatcaatgaagatgatgtggaggcctacgtgggcctgaggaacctgaccatcgtggacagcggcctgaagtttgtggcccacaaggccttcctgaagaacagcaacctgcagcacatcaacttcaccaggaacaagctgaccagcctgagcaggaagcacttccgccacctggacctgtctgagctgatcctggtgggcaaccccttcacctgcagctgtgacatcatgtggatcaagaccctgcaggaggccaagagcagcccagacacccaggacctgtactgcctgaatgaaagcagcaagaacatccccctggccaacctgcagatccccaactgtggcctgcccagcgccaacctggccgcccccaacctgactgtggaggagggcaagagcatcaccctgagctgcagcgtggccggggaccctgtgcccaacatgtactgggatgtgggcaacctggtgtccaagcacatgaatgagaccagccacacccagggcagcctgcgcatcaccaacatcagcagtgatgacagcggcaagcagatcagctgtgtggccgagaacctggtgggggaggaccaggacagcgtgaacctgactgtgcactttgcccccaccatcaccttcctggagagccccaccagtgaccaccactggtgcatccccttcaccgtgaagggcaaccccaagccagccctgcagtggttctacaacggggccatcctgaatgaaagcaagtacatctgcaccaagatccacgtgaccaaccacacagagtaccacggctgcctgcagctggacaaccccacccacatgaacaacggggactacaccctcatcgccaagaatgaatatggcaaggatgagaagcagatcagcgcccacttcatgggctggccaggcattgatgatggagccaaccccaactacccagatgtgatctatgaggactatggaacagctgccaatgacattggagacaccaccaacagaagcaatgagatccccagcacagatgtgacagacaagacaggccgggagcacctgtctgtgtatgctgtggtggtgattgcctctgtggtgggcttctgcctgctggtgatgctgttcctgctgaagctggcccggcacagcaagtttggcatgaagggccctgccagcgtcatcagcaatgatgatgattctgccagccccctgcaccacatcagcaatggcagcaacacccccagcagcagcgagggcggcccagatgctgtgatcatcggcatgaccaagatccctgtgattgagaacccccagtacttcggcatcaccaacagccagctgaagccagacacctttgtgcagcacatcaagaggcacaacatcgtgctgaagcgggagctgggggagggcgccttcggcaaggtgttcctggccgagtgctacaacctgtgcccagagcaggacaagatcctggtggccgtgaagaccctgaaggatgccagtgacaatgccaggaaggacttccaccgggaggccgagctgctgaccaacctgcagcacgagcacatcgtgaagttctacggcgtgtgtgtggagggggaccccctcatcatggtgtttgagtacatgaagcacggggacctgaacaagttcctgcgggcccacggcccagatgctgtgctgatggccgagggcaaccccccaacagagctgacccagagccagatgctgcacatcgcccagcagattgctgctggcatggtgtacctggccagccagcactttgtgcaccgggacctggccaccaggaactgcctggtgggggagaacctgctggtgaagatcggggactttggcatgagcagagatgtgtacagcacagactactacagagtgggcggccacaccatgctgcccatccgctggatgcctcctgagagcatcatgtacaggaagttcaccacagaaagtgatgtgtggagcctgggcgtggtgctgtgggagatcttcacctacggcaagcagccctggtaccagctgagcaacaatgaggtgattgagtgcatcacccagggccgggtgctgcagaggcccaggacctgcccccaggaggtgtatgagctgatgctgggctgctggcagcgggagccccacatgaggaagaacatcaagggcatccacaccctgctgcagaacctggccaaggccagccctgtgtacctggacatcctgggctag

SEQ ID NO: 161779 - DNA, 1434 bp, synthetic construct
  misc_feature 1..1434: note = Description of Artificial Sequence: Synthetic coding sequence
  source 1..1434: mol_type = other DNA
atgagctcctggatccgctggcacggccctgccatggcccggctgtggggcttctgctggctggtggtgggcttctggagggctgcctttgcctgccccaccagctgcaagtgcagcgccagccgcatctggtgcagcgaccccagccctggcatcgtggccttcccccggctggagcccaacagcgtggaccctgagaacatcacagagatcttcatcgccaaccagaagaggctggagatcatcaatgaagatgatgtggaggcctacgtgggcctgaggaacctgaccatcgtggacagcggcctgaagtttgtggcccacaaggccttcctgaagaacagcaacctgcagcacatcaacttcaccaggaacaagctgaccagcctgagcaggaagcacttccgccacctggacctgtctgagctgatcctggtgggcaaccccttcacctgcagctgtgacatcatgtggatcaagaccctgcaggaggccaagagcagcccagacacccaggacctgtactgcctgaatgaaagcagcaagaacatccccctggccaacctgcagatccccaactgtggcctgcccagcgccaacctggccgcccccaacctgactgtggaggagggcaagagcatcaccctgagctgcagcgtggccggggaccctgtgcccaacatgtactgggatgtgggcaacctggtgtccaagcacatgaatgagaccagccacacccagggcagcctgcgcatcaccaacatcagcagtgatgacagcggcaagcagatcagctgtgtggccgagaacctggtgggggaggaccaggacagcgtgaacctgactgtgcactttgcccccaccatcaccttcctggagagccccaccagtgaccaccactggtgcatccccttcaccgtgaagggcaaccccaagccagccctgcagtggttctacaacggggccatcctgaatgaaagcaagtacatctgcaccaagatccacgtgaccaaccacacagagtaccacggctgcctgcagctggacaaccccacccacatgaacaacggggactacaccctcatcgccaagaatgaatatggcaaggatgagaagcagatcagcgcccacttcatgggctggccaggcattgatgatggagccaaccccaactacccagatgtgatctatgaggactatggaacagctgccaatgacattggagacaccaccaacagaagcaatgagatccccagcacagatgtgacagacaagacaggccgggagcacctgtctgtgtatgctgtggtggtgattgcctctgtggtgggcttctgcctgctggtgatgctgttcctgctgaagctggcccggcacagcaagtttggcatgaagggctttgtgctcttccacaagatccccctggatggatag

SEQ ID NO: 161780 - DNA, 1614 bp, synthetic construct
  misc_feature 1..1614: note = Description of Artificial Sequence: Synthetic coding sequence
  source 1..1614: mol_type = other DNA
atgagctcctggatccgctggcacggccctgccatggcccggctgtggggcttctgctggctggtggtgggcttctggagggctgcctttgcctgccccaccagctgcaagtgcagcgccagccgcatctggtgcagcgaccccagccctggcatcgtggccttcccccggctggagcccaacagcgtggaccctgagaacatcacagagatcttcatcgccaaccagaagaggctggagatcatcaatgaagatgatgtggaggcctacgtgggcctgaggaacctgaccatcgtggacagcggcctgaagtttgtggcccacaaggccttcctgaagaacagcaacctgcagcacatcaacttcaccaggaacaagctgaccagcctgagcaggaagcacttccgccacctggacctgtctgagctgatcctggtgggcaaccccttcacctgcagctgtgacatcatgtggatcaagaccctgcaggaggccaagagcagcccagacacccaggacctgtactgcctgaatgaaagcagcaagaacatccccctggccaacctgcagatccccaactgtggcctgcccagcgccaacctggccgcccccaacctgactgtggaggagggcaagagcatcaccctgagctgcagcgtggccggggaccctgtgcccaacatgtactgggatgtgggcaacctggtgtccaagcacatgaatgagaccagccacacccagggcagcctgcgcatcaccaacatcagcagtgatgacagcggcaagcagatcagctgtgtggccgagaacctggtgggggaggaccaggacagcgtgaacctgactgtgcactttgcccccaccatcaccttcctggagagccccaccagtgaccaccactggtgcatccccttcaccgtgaagggcaaccccaagccagccctgcagtggttctacaacggggccatcctgaatgaaagcaagtacatctgcaccaagatccacgtgaccaaccacacagagtaccacggctgcctgcagctggacaaccccacccacatgaacaacggggactacaccctcatcgccaagaatgaatatggcaaggatgagaagcagatcagcgcccacttcatgggctggccaggcattgatgatggagccaaccccaactacccagatgtgatctatgaggactatggaacagctgccaatgacattggagacaccaccaacagaagcaatgagatccccagcacagatgtgacagacaagacaggccgggagcacctgtctgtgtatgctgtggtggtgattgcctctgtggtgggcttctgcctgctggtgatgctgttcctgctgaagctggcccggcacagcaagtttggcatgaagggccctgccagcgtcatcagcaatgatgatgattctgccagccccctgcaccacatcagcaatggcagcaacacccccagcagcagcgagggcggcccagatgctgtgatcatcggcatgaccaagatccctgtgattgagaacccccagtacttcggcatcaccaacagccagctgaagccagacacctggccccggggcagccccaagacagcctag

SEQ ID NO: 161781 - DNA, 2469 bp, synthetic construct; identical to SEQ ID NO: 161778
  misc_feature 1..2469: note = Description of Artificial Sequence: Synthetic coding sequence
  source 1..2469: mol_type = other DNA

SEQ ID NO: 161782 - DNA, 2517 bp, synthetic construct; identical to SEQ ID NO: 161776
  misc_feature 1..2517: note = Description of Artificial Sequence: Synthetic coding sequence
  source 1..2517: mol_type = other DNA

SEQ ID NO: 161783 - DNA, 966 bp, synthetic construct
  misc_feature 1..966: note = Description of Artificial Sequence: Synthetic coding sequence
  source 1..966: mol_type = other DNA
atgtggatcaagaccctgcaggaggccaagagcagcccagacacccaggacctgtactgcctgaatgaaagcagcaagaacatccccctggccaacctgcagatccccaactgtggcctgcccagcgccaacctggccgcccccaacctgactgtggaggagggcaagagcatcaccctgagctgcagcgtggccggggaccctgtgcccaacatgtactgggatgtgggcaacctggtgtccaagcacatgaatgagaccagccacacccagggcagcctgcgcatcaccaacatcagcagtgatgacagcggcaagcagatcagctgtgtggccgagaacctggtgggggaggaccaggacagcgtgaacctgactgtgcactttgcccccaccatcaccttcctggagagccccaccagtgaccaccactggtgcatccccttcaccgtgaagggcaaccccaagccagccctgcagtggttctacaacggggccatcctgaatgaaagcaagtacatctgcaccaagatccacgtgaccaaccacacagagtaccacggctgcctgcagctggacaaccccacccacatgaacaacggggactacaccctcatcgccaagaatgaatatggcaaggatgagaagcagatcagcgcccacttcatgggctggccaggcattgatgatggagccaaccccaactacccagatgtgatctatgaggactatggaacagctgccaatgacattggagacaccaccaacagaagcaatgagatccccagcacagatgtgacagacaagacaggccgggagcacctgtctgtgtatgctgtggtggtgattgcctctgtggtgggcttctgcctgctggtgatgctgttcctgctgaagctggcccggcacagcaagtttggcatgaagggctttgtgctcttccacaagatccccctggatggatag

SEQ ID NO: 161784 - DNA, 1434 bp, synthetic construct; identical to SEQ ID NO: 161779
  misc_feature 1..1434: note = Description of Artificial Sequence: Synthetic coding sequence
  source 1..1434: mol_type = other DNA

SEQ ID NO: 161785 - DNA, 1839 bp, synthetic construct
  misc_feature 1..1839: note = Description of Artificial Sequence: Synthetic coding sequence
  source 1..1839: mol_type = other DNA
atggatgtgtccctgtgcccagccaagtgcagcttctggaggatcttcctgctgggctctgtgtggctggactatgtgggctctgtgctggcctgcccagccaactgtgtgtgcagcaagacagagatcaactgccggcggccagatgatggcaacctcttccccctgctggagggccaggacagcggcaacagcaatggaaatgccagcatcaacatcacagacatcagcaggaacatcaccagcatccacatcgagaactggaggagcctgcacaccctgaatgctgtggacatggagctgtacacaggcctgcagaagctgaccatcaagaacagcggcctgcggagcatccagccccgggcctttgccaagaacccccacctgcgctacatcaacctgagcagcaaccggctgaccaccctgtcctggcagctgttccagaccctgagcctgcgggagctgcagctggagcagaacttcttcaactgcagctgtgacatccgctggatgcagctgtggcaggagcagggcgaggccaagctgaacagccagaacctgtactgcatcaatgctgatggcagccagctgcccctcttcaggatgaacatcagccagtgtgacctgcctgagatctctgtgagccacgtgaacctgactgtgcgggagggggacaatgctgtgatcacctgcaatggcagcggcagccccctgcctgatgtggactggatcgtgacaggcctgcagagcatcaacacccaccagaccaacctgaactggaccaacgtgcacgccatcaacctgaccctggtgaatgtgaccagcgaggacaatggcttcaccctgacctgcatcgcagaaaatgtggtgggcatgagcaatgcctctgtggccctgactgtgtactacccaccccgggtggtgtccctggaggagcctgagctgcggctggagcactgcattgaatttgtggtgcggggcaaccccccacccaccctgcactggctgcacaacggccagcccctgcgggagagcaagatcatccacgtggagtactaccaggagggggagatcagcgagggctgcctgctcttcaacaagcccacccactacaacaatggaaactacaccctgattgccaagaaccccctgggcacagccaaccagaccatcaatggccacttcctgaaggagcccttccctgagagcacagacaacttcatcctgtttgatgaggtgagccccaccccacccatcaccgtgacccacaagccagaggaggacaccttcggcgtgtccattgctgtgggcctggccgcctttgcctgtgtgctgctggtggtgctgtttgtgatgatcaacaagtatggccgccgcagcaagtttggcatgaagggccctgtggccgtcatcagcggggaggaggacagcgccagccccctgcaccacatcaaccacggcatcaccacccccagcagcctggatgctggccctgacacagtggtgattggcatgacccgcatccctgtgattgagaacccccagtacttccggcagggccacaactgccacaagccagacacctgggtgttcagcaacatcgacaaccacggcatcctgaacctgaaggacaacagagaccacctggtgcccagcacccactacatctatgaggagcctgaggtgcagagcggggaggtgtcctaccccaggagccacggcttccgggagatcatgctgaaccccatcagcctgcccggccacagcaagcccctgaaccacggcatctacgtggaggatgtgaatgtgtacttcagcaagggccgccacggcttctag

SEQ ID NO: 161786 - DNA, 414 bp, synthetic construct
  misc_feature 1..414: note = Description of Artificial Sequence: Synthetic coding sequence
  source 1..414: mol_type = other DNA
atgacccgcatccctgtgattgagaacccccagtacttccggcagggccacaactgccacaagccagacacctacgtgcagcacatcaagagaagagacatcgtgctgaagcgggagctgggggagggcgccttcggcaaggtgttcctggccgagtgctacaacctgagccccaccaaggacaagatgctggtggccgtgaaggccctgaaggaccccaccctggccgccaggaaggacttccagcgggaggccgagctgctgaccaacctgcagcacgagcacatcgtgaagttctacggcgtgtgtggagatggagaccccctcatcatggtgtttgagtacatgaagcacggggacctgaacaagttcctgagcagcatcagcagccccaagagccaccagcagggctag

SEQ ID NO: 161787 - DNA, 2478 bp, synthetic construct
  misc_feature 1..2478: note = Description of Artificial Sequence: Synthetic coding sequence
  source 1..2478: mol_type = other DNA
atggatgtgtccctgtgcccagccaagtgcagcttctggaggatcttcctgctgggctctgtgtggctggactatgtgggctctgtgctggcctgcccagccaactgtgtgtgcagcaagacagagatcaactgccggcggccagatgatggcaacctcttccccctgctggagggccaggacagcggcaacagcaatggaaatgccagcatcaacatcacagacatcagcaggaacatcaccagcatccacatcgagaactggaggagcctgcacaccctgaatgctgtggacatggagctgtacacaggcctgcagaagctgaccatcaagaacagcggcctgcggagcatccagccccgggcctttgccaagaacccccacctgcgctacatcaacctgagcagcaaccggctgaccaccctgtcctggcagctgttccagaccctgagcctgcgggagctgcagctggagcagaacttcttcaactgcagctgtgacatccgctggatgcagctgtggcaggagcagggcgaggccaagctgaacagccagaacctgtactgcatcaatgctgatggcagccagctgcccctcttcaggatgaacatcagccagtgtgacctgcctgagatctctgtgagccacgtgaacctgactgtgcgggagggggacaatgctgtgatcacctgcaatggcagcggcagccccctgcctgatgtggactggatcgtgacaggcctgcagagcatcaacacccaccagaccaacctgaactggaccaacgtgcacgccatcaacctgaccctggtgaatgtgaccagcgaggacaatggcttcaccctgacctgcatcgcagaaaatgtggtgggcatgagcaatgcctctgtggccctgactgtgtactacccaccccgggtggtgtccctggaggagcctgagctgcggctggagcactgcattgaatttgtggtgcggggcaaccccccacccaccctgcactggctgcacaacggccagcccctgcgggagagcaagatcatccacgtggagtactaccaggagggggagatcagcgagggctgcctgctcttcaacaagcccacccactacaacaatggaaactacaccctgattgccaagaaccccctgggcacagccaaccagaccatcaatggccacttcctgaaggagcccttccctgagagcacagacaacttcatcctgtttgatgaggtgagccccaccccacccatcaccgtgacccacaagccagaggaggacaccttcggcgtgtccattgctgtgggcctggccgcctttgcctgtgtgctgctggtggtgctgtttgtgatgatcaacaagtatggccgccgcagcaagtttggcatgaagggccctgtggccgtcatcagcggggaggaggacagcgccagccccctgcaccacatcaaccacggcatcaccacccccagcagcctggatgctggccctgacacagtggtgattggcatgacccgcatccctgtgattgagaacccccagtacttccggcagggccacaactgccacaagccagacacctacgtgcagcacatcaagagaagagacatcgtgctgaagcgggagctgggggagggcgccttcggcaaggtgttcctggccgagtgctacaacctgagccccaccaaggacaagatgctggtggccgtgaaggccctgaaggaccccaccctggccgccaggaaggacttccagcgggaggccgagctgctgaccaacctgcagcacgagcacatcgtgaagttctacggcgtgtgtggagatggagaccccctcatcatggtgtttgagtacatgaagcacggggacctgaacaagttcctgcgggcccacggcccagatgccatgatcctggtggatggccagccccggcaggccaagggggagctgggcctgagccagatgctgcacatcgccagccagatcgccagcggcatggtgtacctggccagccagcactttgtgcaccgggacctggccaccaggaactgcctggtgggcgccaacctgctggtgaagattggagactttggcatgagcagagatgtgtacagcacagactactacagagtgggcggccacaccatgctgcccatccgctggatgcctcctgagagcatcatgtacaggaagttcaccacagaaagtgatgtgtggagctttggagtcatcctgtgggagatcttcacctacggcaagcagccctggttccagctgagcaacacagaggtgattgagtgcatcacccagggccgggtgctggagcggccccgggtgtgccccaaggaggtgtatgatgtgatgctgggctgctggcagcgggagccccagcagaggctgaacatcaaggagatctacaagatcctgcacgccctgggcaaggccacccccatctacctggacatcctgggctag

SEQ ID NO: 161788 - DNA, 2496 bp, synthetic construct
  misc_feature 1..2496: note = Description of Artificial Sequence: Synthetic coding sequence
  source 1..2496: mol_type = other DNA
atggatgtgtccctgtgcccagccaagtgcagcttctggaggatcttcctgctgggctctgtgtggctggactatgtgggctctgtgctggcctgcccagccaactgtgtgtgcagcaagacagagatcaactgccggcggccagatgatggcaacctcttccccctgctggagggccaggacagcggcaacagcaatggaaatgccagcatcaacatcacagacatcagcaggaacatcaccagcatccacatcgagaactggaggagcctgcacaccctgaatgctgtggacatggagctgtacacaggcctgcagaagctgaccatcaagaacagcggcctgcggagcatccagccccgggcctttgccaagaacccccacctgcgctacatcaacctgagcagcaaccggctgaccaccctgtcctggcagctgttccagaccctgagcctgcgggagctgcagctggagcagaacttcttcaactgcagctgtgacatccgctggatgcagctgtggcaggagcagggcgaggccaagctgaacagccagaacctgtactgcatcaatgctgatggcagccagctgcccctcttcaggatgaacatcagccagtgtgacctgcctgagatctctgtgagccacgtgaacctgactgtgcgggagggggacaatgctgtgatcacctgcaatggcagcggcagccccctgcctgatgtggactggatcgtgacaggcctgcagagcatcaacacccaccagaccaacctgaactggaccaacgtgcacgccatcaacctgaccctggtgaatgtgaccagcgaggacaatggcttcaccctgacctgcatcgcagaaaatgtggtgggcatgagcaatgcctctgtggccctgactgtgtactacccaccccgggtggtgtccctggaggagcctgagctgcggctggagcactgcattgaatttgtggtgcggggcaaccccccacccaccctgcactggctgcacaacggccagcccctgcgggagagcaagatcatccacgtggagtactaccaggagggggagatcagcgagggctgcctgctcttcaacaagcccacccactacaacaatggaaactacaccctgattgccaagaaccccctgggcacagccaaccagaccatcaatggccacttcctgaaggagcccttccctgtggatgaggtgagccccaccccacccatcaccgtgacccacaagccagaggaggacaccttcggcgtgtccattgctgtgggcctggccgcctttgcctgtgtgctgctggtggtgctgtttgtgatgatcaacaagtatggccgccgcagcaagtttggcatgaagggccctgtggccgtcatcagcggggaggaggacagcgccagccccctgcaccacatcaaccacggcatcaccacccccagcagcctggatgctggccctgacacagtggtgattggcatgacccgcatccctgtgattgagaacccccagtacttccggcagggccacaactgccacaagccagacacctacgtgcagcacatcaagagaagagacatcgtgctgaagcgggagctgggggagggcgccttcggcaaggtgttcctggccgagtgctacaacctgagccccaccaaggacaagatgctggtggccgtgaaggccctgaaggaccccaccctggccgccaggaaggacttccagcgggaggccgagctgctgaccaacctgcagcacgagcacatcgtgaagttctacggcgtgtgtggagatggagaccccctcatcatggtgtttgagtacatgaagcacggggacctgaacaagttcctgcgggcccacggcccagatgccatgatcctggtggatggccagccccggcaggccaagggggagctgggcctgagccagatgctgcacatcgccagccagatcgccagcggcatggtgtacctggccagccagcactttgtgcaccgggacctggccaccaggaactgcctggtgggcgccaacctgctggtgaagattggagactttggcatgagcagagatgtgtacagcacagactactaccgcctcttcaaccccagcggaaatgacttctgcatctggtgtgaggtgggcggccacaccatgctgcccatccgctggatgcctcctgagagcatcatgtacaggaagttcaccacagaaagtgatgtgtggagctttggagtcatcctgtgggagatcttcacctacggcaagcagccctggttccagctgagcaacacagaggtgattgagtgcatcacccagggccgggtgctggagcggccccgggtgtgccccaaggaggtgtatgatgtgatgctgggctgctggcagcgggagccccagcagaggctgaacatcaaggagatctacaagatcctgcacgccctgggcaaggccacccccatctacctggacatcctgggctag

SEQ ID NO: 161789 - DNA, 2520 bp, synthetic construct
  misc_feature 1..2520: note = Description of Artificial Sequence: Synthetic coding sequence
  source 1..2520: mol_type = other DNA
atggatgtgtccctgtgcccagccaagtgcagcttctggaggatcttcctgctgggctctgtgtggctggactatgtgggctctgtgctggcctgcccagccaactgtgtgtgcagcaagacagagatcaactgccggcggccagatgatggcaacctcttccccctgctggagggccaggacagcggcaacagcaatggaaatgccagcatcaacatcacagacatcagcaggaacatcaccagcatccacatcgagaactggaggagcctgcacaccctgaatgctgtggacatggagctgtacacaggcctgcagaagctgaccatcaagaacagcggcctgcggagcatccagccccgggcctttgccaagaacccccacctgcgctacatcaacctgagcagcaaccggctgaccaccctgtcctggcagctgttccagaccctgagcctgcgggagctgcagctggagcagaacttcttcaactgcagctgtgacatccgctggatgcagctgtggcaggagcagggcgaggccaagctgaacagccagaacctgtactgcatcaatgctgatggcagccagctgcccctcttcaggatgaacatcagccagtgtgacctgcctgagatctctgtgagccacgtgaacctgactgtgcgggagggggacaatgctgtgatcacctgcaatggcagcggcagccccctgcctgatgtggactggatcgtgacaggcctgcagagcatcaacacccaccagaccaacctgaactggaccaacgtgcacgccatcaacctgaccctggtgaatgtgaccagcgaggacaatggcttcaccctgacctgcatcgcagaaaatgtggtgggcatgagcaatgcctctgtggccctgactgtgtactacccaccccgggtggtgtccctggaggagcctgagctgcggctggagcactgcattgaatttgtggtgcggggcaaccccccacccaccctgcactggctgcacaacggccagcccctgcgggagagcaagatcatccacgtggagtactaccaggagggggagatcagcgagggctgcctgctcttcaacaagcccacccactacaacaatggaaactacaccctgattgccaagaaccccctgggcacagccaaccagaccatcaatggccacttcctgaaggagcccttccctgagagcacagacaacttcatcctgtttgatgaggtgagccccaccccacccatcaccgtgacccacaagccagaggaggacaccttcggcgtgtccattgctgtgggcctggccgcctttgcctgtgtgctgctggtggtgctgtttgtgatgatcaacaagtatggccgccgcagcaagtttggcatgaagggccctgtggccgtcatcagcggggaggaggacagcgccagccccctgcaccacatcaaccacggcatcaccacccccagcagcctggatgctggccctgacacagtggtgattggcatgacccgcatccctgtgattgagaacccccagtacttccggcagggccacaactgccacaagccagacacctacgtgcagcacatcaagagaagagacatcgtgctgaagcgggagctgggggagggcgccttcggcaaggtgttcctggccgagtgctacaacctgagccccaccaaggacaagatgctggtggccgtgaaggccctgaaggaccccaccctggccgccaggaaggacttccagcgggaggccgagctgctgaccaacctgcagcacgagcacatcgtgaagttctacggcgtgtgtggagatggagaccccctcatcatggtgtttgagtacatgaagcacggggacctgaacaagttcctgcgggcccacggcccagatgccatgatcctggtggatggccagccccggcaggccaagggggagctgggcctgagccagatgctgcacatcgccagccagatcgccagcggcatggtgtacctggccagccagcactttgtgcaccgggacctggccaccaggaactgcctggtgggcgccaacctgctggtgaagattggagactttggcatgagcagagatgtgtacagcacagactactaccgcctcttcaaccccagcggaaatgacttctgcatctggtgtgaggtgggcggccacaccatgctgcccatccgctggatgcctcctgagagcatcatgtacaggaagttcaccacagaaagtgatgtgtggagctttggagtcatcctgtgggagatcttcacctacggcaagcagccctggttccagctgagcaacacagaggtgattgagtgcatcacccagggccgggtgctggagcggccccgggtgtgccccaaggaggtgtatgatgtgatgctgggctgctggcagcgggagccccagcagaggctgaacatcaaggagatctacaagatcctgcacgccctgggcaaggccacccccatctacctggacatcctgggctag

SEQ ID NO: 161790 - DNA, 2478 bp, synthetic construct; identical to SEQ ID NO: 161787
  misc_feature 1..2478: note = Description of Artificial Sequence: Synthetic coding sequence
  source 1..2478: mol_type = other DNA

SEQ ID NO: 161791 - DNA, 1839 bp, synthetic construct; identical to SEQ ID NO: 161785
  misc_feature 1..1839: note = Description of Artificial Sequence: Synthetic coding sequence
  source 1..1839: mol_type = other DNA

SEQ ID NO: 161792 - DNA, 1854 bp, synthetic construct
  misc_feature 1..1854: note = Description of Artificial Sequence: Synthetic coding sequence
  source 1..1854: mol_type = other DNA
atggagctgtacacaggcctgcagaagctgaccatcaagaacagcggcctgcggagcatccagccccgggcctttgccaagaacccccacctgcgctacatcaacctgagcagcaaccggctgaccaccctgtcctggcagctgttccagaccctgagcctgcgggagctgcagctggagcagaacttcttcaactgcagctgtgacatccgctggatgcagctgtggcaggagcagggcgaggccaagctgaacagccagaacctgtactgcatcaatgctgatggcagccagctgcccctcttcaggatgaacatcagccagtgtgacctgcctgagatctctgtgagccacgtgaacctgactgtgcgggagggggacaatgctgtgatcacctgcaatggcagcggcagccccctgcctgatgtggactggatcgtgacaggcctgcagagcatcaacacccaccagaccaacctgaactggaccaacgtgcacgccatcaacctgaccctggtgaatgtgaccagcgaggacaatggcttcaccctgacctgcatcgcagaaaatgtggtgggcatgagcaatgcctctgtggccctgactgtgtactacccaccccgggtggtgtccctggaggagcctgagctgcggctggagcactgcattgaatttgtggtgcggggcaaccccccacccaccctgcactggctgcacaacggccagcccctgcgggagagcaagatcatccacgtggagtactaccaggagggggagatcagcgagggctgcctgctcttcaacaagcccacccactacaacaatggaaactacaccctgattgccaagaaccccctgggcacagccaaccagaccatcaatggccacttcctgaaggagcccttccctgagagcacagacaacttcatcctgtttgatgaggtgagccccaccccacccatcaccgtgacccacaagccagaggaggacaccttcggcgtgtccattgctgtgggcctggccgcctttgcctgtgtgctgctggtggtgctgtttgtgatgatcaacaagtatggccgccgcagcaagtttggcatgaagggccctgtggccgtcatcagcggggaggaggacagcgccagccccctgcaccacatcaaccacggcatcaccacccccagcagcctggatgctggccctgacacagtggtgattggcatgacccgcatccctgtgattgagaacccccagtacttccggcagggccacaactgccacaagccagacacctacgtgcagcacatcaagagaagagacatcgtgctgaagcgggagctgggggagggcgccttcggcaaggtgttcctggccgagtgctacaacctgagccccaccaaggacaagatgctggtggccgtgaaggccctgaaggaccccaccctggccgccaggaaggacttccagcgggaggccgagctgctgaccaacctgcagcacgagcacatcgtgaagttctacggcgtgtgtggagatggagaccccctcatcatggtgtttgagtacatgaagcacggggacctgaacaagttcctgcgggcccacggcccagatgccatgatcctggtggatggccagccccggcaggccaagggggagctgggcctgagccagatgctgcacatcgccagccagatcgccagcggcatggtgtacctggccagccagcactttgtgcaccgggacctggccaccaggaactgcctggtgggcgccaacctgctggtgaagattggagactttggcatgagcagagatgtgtacagcacagactactacagagtggtgcaggcctag

SEQ ID NO: 161793 - DNA, 774 bp, synthetic construct
  misc_feature 1..774: note = Description of Artificial Sequence: Synthetic coding sequence
  source 1..774: mol_type = other DNA
atgagcatcctcttctacgtgatcttcctggcctacctgcggggcatccagggcaacaacatggaccagaggagcctgcctgaggacagcctgaacagcctcatcatcaagctgatccaggccgacatcctgaagaacaagctgagcaagcagatggtggatgtgaaggagaactaccagagcaccctgcccaaggccgaggccccccgggagcctgagcggggcggccctgccaagagcgccttccagcccgtcatcgccatggacacagagctgctgcggcagcagaggcgctacaacagcccccgggtgctgctgagtgacagcacccccctggagcccccacccctgtacctgatggaggactatgtgggcagccctgtggtggccaacagaaccagcaggaggaagagatatgcagagcacaagagccacagaggagagtacagcgtgtgtgacagcgagagcctgtgggtgacagacaagagcagcgccatcgacatccggggccaccaggtgacagtgctgggggagatcaagacaggcaacagccctgtgaagcagtacttctatgagacccgctgcaaggaggcccggcctgtgaagaatggctgccggggcattgatgacaagcactggaacagccagtgcaagaccagccagacctacgtgcgggccctgaccagcgagaacaacaagctggtgggctggcgctggatcagaattgacaccagctgtgtgtgtgccctgagcaggaagattggccgcacctag

SEQ ID NO: 161794 - DNA, 813 bp, synthetic construct
  misc_feature 1..813: note = Description of Artificial Sequence: Synthetic coding sequence
  source 1..813: mol_type = other DNA
atggtgacctttgccaccatcctgcaggtgaacaaggtgatgagcatcctcttctacgtgatcttcctggcctacctgcggggcatccagggcaacaacatggaccagaggagcctgcctgaggacagcctgaacagcctcatcatcaagctgatccaggccgacatcctgaagaacaagctgagcaagcagatggtggatgtgaaggagaactaccagagcaccctgcccaaggccgaggccccccgggagcctgagcggggcggccctgccaagagcgccttccagcctgtgattgccatggacacagagctgctgcggcagcagaggcgctacaacagcccccgggtgctgctgagtgacagcacccccctggagcccccacccctgtacctgatggaggactatgtgggcagccctgtggtggccaacagaaccagcaggaggaagagatatgcagagcacaagagccacagaggagagtacagcgtgtgtgacagcgagagcctgtgggtgacagacaagagcagcgccatcgacatccggggccaccaggtgacagtgctgggggagatcaagacaggcaacagccctgtgaagcagtacttctatgagacccgctgcaaggaggcccggcctgtgaagaatggctgccggggcattgatgacaagcactggaacagccagtgcaagaccagccagacctacgtgcgggccctgaccagcgagaacaacaagctggtgggctggcgctggatcagaattgacaccagctgtgtgtgtgccctgagcaggaagattggaagaacatag

SEQ ID NO: 161795 - DNA, 633 bp, synthetic construct
  misc_feature 1..633: note = Description of Artificial Sequence: Synthetic coding sequence
  source 1..633: mol_type = other DNA
atgctgcccctgcccagctgcagcctgcccatcctgctgctcttcctgctgcccagcgtgcccatcgagagccagcccccacccagcaccctgccccccttcctggcccctgagtgggacctgctgagcccccgggtggtgctgagcagaggagccccagctggcccccccctgctcttcctgctggaggccggggccttccgggagagcgctggggccccagccaacagaagcagaagaggagtgtctgaaacagccccagccagccggcggggggagctggccgtgtgtgatgctgtgtctggctgggtgacagacagaagaacagctgtggacctgcggggccgggaggtggaggtgctgggggaggtgcctgctgctgggggcagccccctgcggcagtacttctttgagacccgctgcaaggctgacaatgctgaggagggcggccctggagctgggggcggcggctgccggggcgtggacagaagacactgggtgtctgagtgcaaggccaagcagagctatgtgcgggccctgacagcagatgcccagggccgggtgggctggcgctggatcagaattgacacagcctgtgtgtgcaccctgctgagcaggacaggccgggcctag

SEQ ID NO: 161796 - DNA, 594 bp, synthetic construct
  misc_feature 1..594: note = Description of Artificial Sequence: Synthetic coding sequence
  source 1..594: mol_type = other DNA
atgcagcgctggaaggctgctgccctggcctctgtgctgtgcagctctgtgctgagcatctggatgtgccgggagggcctgctgctgagccaccggctgggccctgccctggtgcccctgcaccggctgcccaggaccctggatgccagaattgcccggctggcccagtaccgggccctgctgcagggcgccccagatgccatggagctgcgggagctgaccccctgggccggccggcccccaggccccaggagaagagctggccccaggagaagaagagcccgggcccggctgggcgcccggccctgtggcctgcgggagctggaggtgcgggtgtctgagctgggcctgggctacgccagtgatgagaccgtgctcttccgctactgtgccggggcctgtgaggccgccgcccgggtgtatgacctgggcctgcggcggctgcggcagaggcggcggctgcggcgggagcgggtgcgggcccagccctgctgccggcccacagcctatgaagatgaggtgtccttcctggatgcccacagccgctaccacacagtgcatgagctgagcgccagagaatgtgcctgtgtgtag

SEQ ID NO: 161797 - DNA, 1323 bp, synthetic construct
  misc_feature 1..1323: note = Description of Artificial Sequence: Synthetic coding sequence
  source 1..1323: mol_type = other DNA
atgagcagctgccggggccagaaggtggccggcggcctgcgggtggtgagccccttccccctgtgccagcctgctggggagcccagccagggcaagatgaggagcagctgtgtgctgctgacagccctggtggccctggccgcctactacgtgtacatccccctgcccggctctgtgtctgacccctggaagctgatgctgctggatgccaccttccggggggcccagcaggtgagcaacctgatccactacctgggcctgagccaccacctgctggccctgaacttcatcatcgtgtcctttgggaagaagagcgcctggagcagcgcccaggtgaaggtgacagacacagactttgatggagtggaggtgcgggtgtttgagggcccccccaagccagaggagcccctgaagaggtctgtggtgtacatccatggaggcggctgggccctggccagcgccaagatccgctactatgatgagctgtgcacagccatggccgaggagctgaatgctgtgattgtgtccattgagtaccgcctggtgcccaaggtgtacttccctgagcagatccatgatgtggtgcgggccaccaagtacttcctgaagccagaggtgctgcagaagtacatggtggaccccggccgcatctgcatcagcggggacagcgctgggggcaacctggccgccgccctgggccagcagttcacccaggatgccagcctgaagaacaagctgaagctgcaggccctgatctaccctgtgctgcaggccctggacttcaacacccccagctaccagcagaatgtgaacacccccatcctgccccgctacgtgatggtgaagtactgggtggactacttcaagggcaactatgactttgtgcaggccatgattgtgaacaaccacaccagcctggatgtggaggaggccgctgctgtgcgggcccggctgaactggaccagcctgctgcctgccagcttcaccaagaactacaagcctgtggtgcagaccactggaaatgcccgcatcgtgcaggagctgccccagctgctggatgcccggagcgcccccctgattgctgaccaggccgtgctgcagctgctgcccaagacctacatcctgacctgtgaacatgatgtgctgagagatgatggcatcatgtatgccaagaggctggagagcgctggggtggaggtgaccctggaccactttgaagatggcttccacggctgcatgatcttcacctcctggcccaccaacttctctgtgggcatccgcaccagaaattcctacatcaagtggctggaccagaacctgtag

SEQ ID NO: 161798 - DNA, 1227 bp, synthetic construct
  misc_feature 1..1227: note = Description of Artificial Sequence: Synthetic coding sequence
  source 1..1227: mol_type = other DNA
atgaggagcagctgtgtgctgctgacagccctggtggccctggccgcctactacgtgtacatccccctgcccggctctgtgtctgacccctggaagctgatgctgctggatgccaccttccggggggcccagcaggtgagcaacctgatccactacctgggcctgagccaccacctgctggccctgaacttcatcatcgtgtcctttgggaagaagagcgcctggagcagcgcccaggtgaaggtgacagacacagactttgatggagtggaggtgcgggtgtttgagggcccccccaagccagaggagcccctgaagaggtctgtggtgtacatccatggaggcggctgggccctggccagcgccaagatccgctactatgatgagctgtgcacagccatggccgaggagctgaatgctgtgattgtgtccattgagtaccgcctggtgcccaaggtgtacttccctgagcagatccatgatgtggtgcgggccaccaagtacttcctgaagccagaggtgctgcagaagtacatggtggaccccggccgcatctgcatcagcggggacagcgctgggggcaacctggccgccgccctgggccagcagttcacccaggatgccagcctgaagaacaagctgaagctgcaggccctgatctaccctgtgctgcaggccctggacttcaacacccccagctaccagcagaatgtgaacacccccatcctgccccgctacgtgatggtgaagtactgggtggactacttcaagggcaactatgactttgtgcaggccatgattgtgaacaaccacaccagcctggatgtggaggaggccgctgctgtgcgggcccggctgaactggaccagcctgctgcctgccagcttcaccaagaactacaagcctgtggtgcagaccactggaaatgcccgcatcgtgcaggagctgccccagctgctggatgcccggagcgcccccctgattgctgaccaggccgtgctgcagctgctgcccaagacctacatcctgacctgtgaacatgatgtgctgagagatgatggcatcatgtatgccaagaggctggagagcgctggggtggaggtgaccctggaccactttgaagatggcttccacggctgcatgatcttcacctcctggcccaccaacttctctgtgggcatccgcaccagaaattcctacatcaagtggctggaccagaacctgtag

SEQ ID NO: 161799 - DNA, 1347 bp, synthetic construct
  misc_feature 1..1347: note = Description of Artificial Sequence: Synthetic coding sequence
  source 1..1347: mol_type = other DNA
atgagcagctgccggggccagaaggtggccggcggcctgcgggtggtgagccccttccccctgtgccagcctgctggggagcccagccagggcaagatgaggagcagctgtgtgctgctgacagccctggtggccctggccgcctactacgtgtacatccccctgcccggctctgtgtctgacccctggaagctgatgctgctggatgccaccttccggggggcccagcaggtgagcaacctgatccactacctgggcctgagccaccacctgctggccctgaacttcatcatcgtgtcctttgggaagaagagcgcctggagcagcgcccaggtgaaggtgacagacacagactttgatggagtggaggtgcgggtgtttgagggcccccccaagccagaggagcccctgaagaggtctgtggtgtacatccatggaggcggctgggccctggccagcgccagcgcctcctggagccccagtgatgagatccgctactatgatgagctgtgcacagccatggccgaggagctgaatgctgtgattgtgtccattgagtaccgcctggtgcccaaggtgtacttccctgagcagatccatgatgtggtgcgggccaccaagtacttcctgaagccagaggtgctgcagaagtacatggtggaccccggccgcatctgcatcagcggggacagcgctgggggcaacctggccgccgccctgggccagcagttcacccaggatgccagcctgaagaacaagctgaagctgcaggccctgatctaccctgtgctgcaggccctggacttcaacacccccagctaccagcagaatgtgaacacccccatcctgccccgctacgtgatggtgaagtactgggtggactacttcaagggcaactatgactttgtgcaggccatgattgtgaacaaccacaccagcctggatgtggaggaggccgctgctgtgcgggcccggctgaactggaccagcctgctgcctgccagcttcaccaagaactacaagcctgtggtgcagaccactggaaatgcccgcatcgtgcaggagctgccccagctgctggatgcccggagcgcccccctgattgctgaccaggccgtgctgcagctgctgcccaagacctacatcctgacctgtgaacatgatgtgctgagagatgatggcatcatgtatgccaagaggctggagagcgctggggtggaggtgaccctggaccactttgaagatggcttccacggctgcatgatcttcacctcctggcccaccaacttctctgtgggcatccgcaccagaaattcctacatcaagtggctggaccagaacctgtag

SEQ ID NO: 161800 - DNA, 828 bp, synthetic construct
  misc_feature 1..828: note = Description of Artificial Sequence: Synthetic coding sequence
  source 1..828: mol_type = other DNA
atggccgaggagctgaatgctgtgattgtgtccattgagtaccgcctggtgcccaaggtgtacttccctgagcagatccatgatgtggtgcgggccaccaagtacttcctgaagccagaggtgctgcagaagtacatggtggaccccggccgcatctgcatcagcggggacagcgctgggggcaacctggccgccgccctgggccagcagttcacccaggatgccagcctgaagaacaagctgaagctgcaggccctgatctaccctgtgctgcaggccctggacttcaacacccccagctaccagcagaatgtgaacacccccatcctgcccaggtatgtgatggtgaagtactgggtggactacttcaagggcaactatgactttgtgcaggccatgattgtgaacaaccacaccagcctggatgtggaggaggccgctgctgtgcgggcccggctgaactggaccagcctgctgcctgccagcttcaccaagaactacaagcctgtggtgcagaccactggaaatgccagaattgtgcaggagctgccccagctgctggatgcccggagcgcccccctgattgctgaccaggccgtgctgcagctgctgcccaagacctacatcctgacctgtgaacatgatgtgctgagagatgatggcatcatgtatgccaagaggctggagagcgctggggtggaggtgaccctggaccactttgaagatggcttccacggctgcatgatcttcacctcctggcccaccaacttctctgtgggcatccgcaccaggaacagctacatcaagtggctggaccagaacctgtag

SEQ ID NO: 161801 - DNA, 2754 bp, synthetic construct
  misc_feature 1..2754: note = Description of Artificial Sequence: Synthetic coding sequence
  source 1..2754: mol_type = other DNA
atggccttcatcaggaagaagcagcaggagcagcagctgcagctgtacagcaaggagcgcttcagcctgctgctgctgaacctggaggagtactactttgagcagcaccgggccaaccacatcctgcacaagggcagccaccacgagaggaagatccggggcagcctgaagatctgcagcaagagcgtcatctttgagccagacagcatcagccagcccatcatcaagatccccctgcgggactgcatcaagattggcaagcacggggagaatggagccaacagacacttcaccaaggccaagagcggcggcatcagcctcatcttcagccaggtgtacttcatcaaggagcacaacgtggtggccccctacaagattgaaagaggcaagatggagtatgtgtttgagctggatgtgcctgggaaggtggaggatgtggtggagaccctgctgcagctgcaccgggccagctgcctggacaagctgggggaccagacagccatgatcacagccatcctgcagagccggctggcccggaccagctttgacaagaaccgcttccagaacatcagcgagaagctgcacatggagtgcaaggccgagatggtgacccccctggtgaccaaccctggccacgtgtgcatcacagacaccaacctgtacttccagcccctgaatggctaccccaagcctgtggtgcagatcaccctgcaggatgtgcggcgcatctacaagagaagacatggcctgatgcccctgggcctggaggtgttctgcacagaagatgacctgtgcagcgacatctacctgaagttctatgagccccaggacagagatgacctgtacttctacatcgccacctacctggagcaccacgtggccgagcacacagctgagagctacatgctgcagtggcagaggggccacctgagcaactaccagtacctgctgcacctgaacaacctggccgacaggagctgcaatgacctgagccagtaccctgtgttcccctggatcatccatgactacagcagcagcgagctggacctgagcaaccctggcaccttccgggacctgagcaagcctgtgggcgccctgaacaaggagcggctggagcggctgctgacccgctaccaggagatgcctgagcccaagttcatgtatggcagccactacagcagccctggctacgtgctcttctacctggtgagaattgcccctgagtacatgctgtgcctgcagaatggccgctttgacaatgctgacaggatgttcaacagcattgctgagacctggaagaactgcctggatggagccacagacttcaaggagctgatccctgagttctatggagatgatgtgtccttcctggtgaacagcctgaagctggacctgggcaagaggcagggcggccagatggtggatgatgtggagctgcccccctgggccagcagccctgaggacttcctgcagaagagcaaggatgccctggagagcaactacgtgtctgagcacctgcacgagtggattgacctgatcttcggctacaagcagaagggcagtgatgctgtgggcgcccacaacgtgttccaccccctgacctatgaaggaggagtggacctgaacagcatccaggaccctgatgagaaggtggccatgctgacccagatcctggagtttggccagacccccaagcagctgtttgtgaccccccacccccggcgcatcacccccaagttcaagagcctgagccagaccagcagctacaatgcctccatggctgacagccctggagaggagagctttgaggacctgacagaggagagcaagaccctggcctggaacaacatcaccaagctgcagctgcacgagcactacaagatccacaaggaggccgtgacaggcatcaccgtgtccagaaatggcagcagcgtcttcaccaccagccaggacagcaccctgaagatgttcagcaaggagagcaagatgctgcagaggagcatctccttcagcaacatggccctgagcagctgcctgctgctgcctggagatgccaccgtcatcaccagctcctgggacaacaacgtgtacttctacagcatcgcctttggaagacggcaggacaccctgatgggccatgatgatgctgtgtccaagatctgctggcatgacaacagactctacagcgcctcctgggacagcacagtgaaggtgtggagcggcgtgcctgctgagatgcctggcaccaagaggcaccactttgacctgctggccgagctggagcatgatgtgtctgtggacaccatcagcctgaatgctgccagcaccctgctggtgtctggcaccaaggagggcaccgtgaacatctgggacctgaccacagccaccctgatgcaccagatcccctgccacagcggcatcgtgtgtgacacagccttctccccagacagcagacatgtgctgagcactggaacagatggctgcctgaatgtgattgatgtgcagacaggcatgctgatcagctccatgaccagtgatgagccccagcgctgctttgtgtgggatggcaacagcgtgctgagcggcagccagagcggggagctgctggtgtgggacctgctgggcgccaagatcagcgagcgcatccagggccacactggagctgtgacctgcatctggatgaatgagcagtgcagcagcatcatcactggaggagaggaccggcagatcatcttctggaagctgcagtactag

SEQ ID NO: 161802 - DNA, 2847 bp, synthetic construct
  misc_feature 1..2847: note = Description of Artificial Sequence: Synthetic coding sequence
  source 1..2847: mol_type = other DNA
atgacaggccaggcccgcttccacagaggagctgaggcctgccgggccatccggcagtgccgcagcagaagacccagggctgcccaccctgagggccgggccggcagcggccggggcagcagacatgccagccctggggtgcggcggggcggcttcagcctgctgctgctgaacctggaggagtactactttgagcagcaccgggccaaccacatcctgcacaagggcagccaccacgagaggaagatccggggcagcctgaagatctgcagcaagagcgtcatctttgagccagacagcatcagccagcccatcatcaagatccccctgcgggactgcatcaagattggcaagcatggagaaaatggagccaacagacacttcaccaaggccaagagcggcggcatcagcctcatcttcagccaggtgtacttcatcaaggagcacaacgtggtggccccctacaagattgagcggggcaagatggagtatgtgtttgagctggatgtgcctgggaaggtggaggatgtggtggagaccctgctgcagctgcaccgggccagctgcctggacaagctgggggaccagacagccatgatcacagccatcctgcagagccggctggcccggaccagctttgacaagaaccgcttccagaacatcagcgagaagctgcacatggagtgcaaggccgagatggtgacccccctggtgaccaaccctggccacgtgtgcatcacagacaccaacctgtacttccagcccctgaatggctaccccaagcctgtggtgcagatcaccctgcaggatgtgcggcgcatctacaagagaagacatggcctgatgcccctgggcctggaggtgttctgcacagaagatgacctgtgcagcgacatctacctgaagttctatgagccccaggacagagatgacctgtacttctacatcgccacctacctggagcaccacgtggccgagcacacagctgagagctacatgctgcagtggcagaggggccacctgagcaactaccagtacctgctgcacctgaacaacctggccgacaggagctgcaatgacctgagccagtaccctgtgttcccctggatcatccatgactacagcagcagcgagctggacctgagcaaccctggcaccttccgggacctgagcaagcctgtgggcgccctgaacaaggagcggctggagcggctgctgacccgctaccaggagatgcctgagcccaagttcatgtatggcagccactacagcagccctggctacgtgctcttctacctggtgcgcatcgcccctgagtacatgctgtgcctgcagaatggccgctttgacaatgctgacaggatgttcaacagcattgctgagacctggaagaactgcctggatggagccacagacttcaaggagctgatccctgagttctatggagatgatgtgtccttcctggtgaacagcctgaagctggacctgggcaagaggcagggcggccagatggtggatgatgtggagctgcccccctgggccagcagccctgaggacttcctgcagaagagcaaggatgccctggagagcaactacgtgtctgagcacctgcacgagtggattgacctgatcttcggctacaagcagaagggcagtgatgctgtgggcgcccacaacgtgttccaccccctgacctatgagggcggcgtggacctgaacagcatccaggaccctgatgagaaggtggccatgctgacccagatcctggagtttggccagacccccaagcagctgtttgtgaccccccacccccggcgcatcacccccaagttcaagagcctgagccagaccagcagctacaatgcctccatggctgacagccctggagaggagagctttgaggacctgacagaggagagcaagaccctggcctggaacaacatcaccaagctgcagctgcacgagcactacaagatccacaaggaggccgtgacaggcatcaccgtgtccagaaatggcagctctgtgttcaccaccagccaggacagcaccctgaagatgttcagcaaggagagcaagatgctgcagaggagcatctccttcagcaacatggccctgagcagctgcctgctgctgcctggagatgccaccgtcatcaccagctcctgggacaacaacgtgtacttctacagcatcgccttcggccggcggcaggacaccctgatgggccatgatgatgctgtgtccaagatctgctggcatgacaaccggctgtacagcgcctcctgggacagcacagtgaaggtgtggagcggcgtgcctgctgagatgcctggcaccaagaggcaccactttgacctgctggccgagctggagcatgatgtgtctgtggacaccatcagcctgaatgctgccagcaccctgctggtgtctggcaccaaggagggcaccgtgaacatctgggacctgaccacagccaccctgatgcaccagatcccctgccacagcggcatcgtgtgtgacacagccttctccccagacagccgccacgtgctgagcactggaacagatggctgcctgaatgtgattgatgtgcagacaggcatgctgatcagctccatgaccagtgatgagccccagcgctgctttgtgtgggatggcaacagcgtgctgagcggcagccagagcggggagctgctggtgtgggacctgctgggcgccaagatcagcgagcgcatccagggccacactggagctgtgacctgcatctggatgaatgagcagtgcagcagcatcatcactggaggagaagatcggcagatcatcttctggaagctgcagtactag

SEQ ID NO: 161803 - DNA, 1173 bp, synthetic construct
  misc_feature 1..1173: note = Description of Artificial Sequence: Synthetic coding sequence
  source 1..1173: mol_type = other DNA
atgggagacaccttcatccgccacatcgccctgctgggctttgagaagagatttgtgcccagccagcactacgtgtacatgttcctggtgaagtggcaggacctgtctgagaaggtggtgtaccgccgcttcacagagatctatgagttccacaagaccctgaaggagatgttccccatcgaggccggggccatcaaccctgagaaccgcatcatcccccacctgcctgcccccaagtggtttgatggccagagagctgctgagaaccggcagggcaccctgacagagtactgcggcaccctgatgagcctgcccaccaagatcagccgctgcccccacctgctggacttcttcaaggtgcggccagatgacctgaagctgcccacagacaaccagaccaagaagccagagacctacctgatgcccaaggatggcaagagcacagccacagacatcaccggccccatcatcctgcagacctaccgggccatcgccaactatgagaagaccagcggcagcgagatggccctgagcactggagatgtggtggaggtggtggagaagtctgagagcggctggtggttctgccagatgaaggccaagaggggctggatcccagccagcttcctggagcccctggacagcccagatgaaacagaggaccctgagcccaactatgctggggagccctacgtggccatcaaggcctacacagctgtggagggagatgaggtgtccctgctggagggggaggccgtggaggtgatccacaagctgctggatggctggtgggtgatcaggaaggatgatgtgacaggctacttccccagcatgtacctgcagaagagcggccaggatgtgtcccaggcccagaggcagatcaagagaggagcccccccaagaagaagcagcatcagaaatgcccacagcatccaccagaggagcaggaagaggctgagccaggatgcctacagaagaaacagcgtgcgcttcctgcagcagaggcggcggcaggcccggcccggcccccagagccctggcagccccctggaggaggagcggcagacccagaggagcaagccccagcctgctgtgcccccccggcccagcgctgacctgatcctgaaccgctgcagcgagagcaccaagaggaagctggccagcgctgtgtag

SEQ ID NO: 161804 - DNA, 444 bp, synthetic construct
  misc_feature 1..444: note = Description of Artificial Sequence: Synthetic coding sequence
  source 1..444: mol_type = other DNA
atgaccaagaagccagagacctacctgatgcccaaggatggcaagagcacagccacagacatcaccggccccatcatcctgcagacctaccgggccatcgccaactatgagaagaccagcggcagcgagatggccctgagcactggagatgtggtggaggtggtggagaagtctgagagcggccagaccagccacctgaccggcctgctgcccctggtgctgaggaacccccagccccaggccccctgccagggcagcggcagcctggcccctggccgcaccccagccctgctgggcgccctgaatgtgctgcccaccctgtgggtggccttctgcctgtctgtgcaccctgtggtggccgtgggcatctgtgcctggcaggccggggccggccacgtgtgtgtgttctgcctggatggctatggaacagtgtgcagcctgtag

SEQ ID NO: 161805 - DNA, 759 bp, synthetic construct
  misc_feature 1..759: note = Description of Artificial Sequence: Synthetic coding sequence
  source 1..759: mol_type = other DNA
atgggagacaccttcatccgccacatcgccctgctgggctttgagaagagatttgtgcccagccagcactacgtgcacgtgcctggagagatggccggccctgtgggggagggcggcctgcctgccctgcaccgggacctgcgggtgcccagccccaagtggtttgatggccagagagctgctgagaaccggcagggcaccctgacagagtactgcggcaccctgatgagcctgcccaccaagatcagccgctgcccccacctgctggacttcttcaaggtgcggccagatgacctgaagctgcccacagacaaccagaccaagaagccagagacctacctgatgcccaaggatggcaagagcacagccacagacatcaccggccccatcatcctgcagacctaccgggccatcgccaactatgagaagaccagcggcagcgagatggccctgagcactggagatgtggtggaggtggtggagaagtctgagagcggccagaccagccacctgaccggcctgctgcccctggtgctgaggaacccccagccccaggccccctgccagggcagcggcagcctggcccctggccgcaccccagccctgctgggcgccctgaatgtgctgcccaccctgtgggtggccttctgcctgtctgtgcaccctgtggtggccgtgggcatctgtgcctggcaggccggggccggccacgtgtgtgtgttctgcctggatggctacggcaccgtgtgcagcctgtag

SEQ ID NO: 161806 - DNA, 1581 bp, synthetic construct
  misc_feature 1..1581: note = Description of Artificial Sequence: Synthetic coding sequence
  source 1..1581: mol_type = other DNA
atgagcctggtggaggccatcagcctgtggaatgaaggagtgctggccgctgacaagaaggactggaagggggccctggatgccttctctgctgtgcaggacccccacagccgcatctgcttcaacatcggctgcatgtacaccatcctgaagaacatgacagaggccgagaaggccttcaccaggagcatcaacagagacaagcacctggccgtggcctacttccagaggggcatgctgtactaccagacagagaagtatgacctggccatcaaggacctgaaggaggccctgatccagctgcggggcaaccagctgattgactacaagatcctgggcctgcagttcaagctgtttgcctgtgaggtgctgtacaacatcgccttcatgtatgccaagaaggaggagtggaagaaggccgaggagcagctggccctggccacctccatgaagtctgagcccaggcacagcaagattgacaaggccatggagtgtgtgtggaagcagaagctgtatgagcctgtggtgattcctgtgggcaagctgttccggcccaatgaaaggcaggtggcccagctggccaagaaggactacctgggcaaggccaccgtggtggcctctgtggtggaccaggacagcttcagcggctttgcccccctgcagccccaggccgctgagcccccaccccggcccaagaccccagagatcttccgggccctggagggggaggcccaccgggtgctgtttggatttgtgcctgagaccaaggaggagctgcaggtgatgcctggcaacatcgtgtttgtgctgaagaagggaaatgacaactgggccaccgtgatgtttaatggccagaagggcctggtgccctgcaactacctggagcctgtggagctgcgcatccacccccagcagcagccccaggaggagagcagcccccagagcgacatcccagccccacccagcagcaaggcccctggccggccccagctgagccctggccagaagcagaaggaggagcccaaggaggtgaagctgtctgtgcccatgccctacaccctgaaggtgcactacaagtacacagtggtgatgaagacccagcccggcctgccctacagccaggtgcgggacatggtgtccaagaagctggagctgcggctggagcacaccaagctgagctaccggccccgggacagcaatgagctggtgcccctgtctgaagattccatgaaggatgcctggggccaggtgaagaactactgcctgaccctgtggtgtgaaaatacagtgggggaccagggcttcccagatgagcccaaggagagcgagaaggcagatgccaacaaccagaccacagagccccagctgaagaagggcagccaggtggaggccctcttctcctatgaggccacccagcctgaggacctggagttccaggagggggacatcatcctggtgctgagcaaggtgaatgaggagtggctggagggggagtgcaagggcaaggtgggcatcttccccaaggtgtttgtggaggactgtgccaccacagacctggagagcacccggcgggaggtgtag

SEQ ID NO: 161807 - DNA, 1581 bp, synthetic construct; identical to SEQ ID NO: 161806
  misc_feature 1..1581: note = Description of Artificial Sequence: Synthetic coding sequence
  source 1..1581: mol_type = other DNA

SEQ ID NO: 161808 - DNA, 1797 bp, synthetic construct
  misc_feature 1..1797: note = Description of Artificial Sequence: Synthetic coding sequence
  source 1..1797: mol_type = other DNA
ggcagccctgcccggggagatgcccccacctgcctgctgtctgtgtcctggcagctgtcctggccacccagcttctacctgatcatgagcctggtggaggccatcagcctgtggaatgaaggagtgctggccgctgacaagaaggactggaagggggccctggatgccttctctgctgtgcaggacccccacagccgcatctgcttcaacatcggctgcatgtacaccatcctgaagaacatgacagaggccgagaaggccttcaccaggagcatcaacagagacaagcacctggccgtggcctacttccagaggggcatgctgtactaccagacagagaagtatgacctggccatcaaggacctgaaggaggccctgatccagctgcggggcaaccagctgattgactacaagatcctgggcctgcagttcaagctgtttgcctgtgaggtgctgtacaacatcgccttcatgtatgccaagaaggaggagtggaagaaggccgaggagcagctggccctggccacctccatgaagtctgagcccaggcacagcaagattgacaaggccatggagtgtgtgtggaagcagaagctgtatgagcctgtggtgattcctgtgggcaagctgttccggcccaatgaaaggcaggtggcccagctggccaagaaggactacctgggcaaggccaccgtggtggcctctgtggtggaccaggacagcttcagcggctttgcccccctgcagccccaggtgcggcagagcgacctgctgggcgcccaggccggctctgtgagcagccggcagctgcagctggatgtggagctggagcccggctggagccaggtgcccggcagcaagttctctgtgtttgccccctggcaccacgtgcggggctggggcctggacctggtgtccatcctgtgccgggccctggagggggaggcccaccgggtgctgtttggatttgtgcctgagaccaaggaggagctgcaggtgatgcctggcaacatcgtgtttgtgctgaagaagggaaatgacaactgggccaccgtgatgtttaatggccagaagggcctggtgccctgcaactacctggagcctgtggagctgcgcatccacccccagcagcagccccaggaggagagcagcccccagagcgacatcccagccccacccagcagcaaggcccctggccggccccagctgagccctggccagaagcagaaggaggagcccaaggaggtgaagctgtctgtgcccatgccctacaccctgaaggtgcactacaagtacacagtggtgatgaagacccagcccggcctgccctacagccaggtgcgggacatggtgtccaagaagctggagctgcggctggagcacaccaagctgagctaccggccccgggacagcaatgagctggtgcccctgtctgaagattccatgaaggatgcctggggccaggtgaagaactactgcctgaccctgtggtgtgaaaatacagtgggggaccagggcttcccagatgagcccaaggagagcgagaaggcagatgccaacaaccagaccacagagccccagctgaagaagggcagccaggtggaggccctcttctcctatgaggccacccagcctgaggacctggagttccaggagggggacatcatcctggtgctgagcaaggtgaatgaggagtggctggagggggagtgcaagggcaaggtgggcatcttccccaaggtgtttgtggaggactgtgccaccacagacctggagagcacccggcgggaggtgtag

SEQ ID NO: 161809 - DNA, 1446 bp, synthetic construct
  misc_feature 1..1446: note = Description of Artificial Sequence: Synthetic coding sequence
  source 1..1446: mol_type = other DNA
atgagcctggtggaggccatcagcctgtggaatgaaggagtgctggccgctgacaagaaggactggaagggggccctggatgccttctctgctgtgcaggacccccacagccgcatctgcttcaacatcggctgcatgtacaccatcctgaagaacatgacagaggccgagaaggccttcaccaggagcatcaacagagacaagcacctggccgtggcctacttccagaggggcatgctgtactaccagacagagaagtatgacctggccatcaaggacctgaaggaggccctgatccagctgcggggcaaccagctgattgactacaagatcctgggcctgcagttcaagctgtttgcctgtgagaagcagaagctgtatgagcctgtggtgattcctgtgggcaagctgttccggcccaatgaaaggcaggtggcccagctggccaagaaggactacctgggcaaggccaccgtggtggcctctgtggtggaccaggacagcttcagcggctttgcccccctgcagccccaggccgctgagcccccaccccggcccaagaccccagagatcttccgggccctggagggggaggcccaccgggtgctgtttggatttgtgcctgagaccaaggaggagctgcaggtgatgcctggcaacatcgtgtttgtgctgaagaagggaaatgacaactgggccaccgtgatgttcaacggccagaagggcctggtgccctgcaactacctggagcctgtggagctgcgcatccacccccagcagcagccccaggaggagagcagcccccagagcgacatcccagccccacccagcagcaaggcccctggccggccccagctgagccctggccagaagcagaaggaggagcccaaggaggtgaagctgtctgtgcccatgccctacaccctgaaggtgcactacaagtacacagtggtgatgaagacccagcccggcctgccctacagccaggtgcgggacatggtgtccaagaagctggagctgcggctggagcacaccaagctgagctaccggccccgggacagcaatgagctggtgcccctgtctgaggacagcatgaaggatgcctggggccaggtgaagaactactgcctgaccctgtggtgtgagaacacagtgggggaccagggcttcccagatgagcccaaggagagcgagaaggcagatgccaacaaccagaccacagagccccagctgaagaagggcagccaggtggaggccctcttctcctatgaggccacccagcctgaggacctggagttccaggagggggacatcatcctggtgctgagcaaggtgaatgaggagtggctggagggagaatgtaaaggcaaggtgggcatcttccccaaggtgtttgtggaggactgtgccaccacagacctggagagcacccggcgggaggtgtag

SEQ ID NO: 161810 - DNA, 1338 bp, synthetic construct
  misc_feature 1..1338: note = Description of Artificial Sequence: Synthetic coding sequence
  source 1..1338: mol_type = other DNA
atgagcctggtggaggccatcagcctgtggaatgaaggagtgctggccgctgacaagaaggactggaagggggccctggatgccttctctgctgtgcaggacccccacagccgcatctgcttcaacatcggctgcatgtacaccatcctgaagaacatgacagaggccgagaaggccttcaccaggagcatcaacagagacaagcacctggccgtggcctacttccagaggggcatgctgtactaccagacagagaagtatgacctggccatcaaggacctgaaggaggccctgatccagctgcggggcaaccagctgattgactacaagatcctgggcctgcagttcaagctgtttgcctgtgaggtggtggcctctgtggtggaccaggacagcttcagcggctttgcccccctgcagccccaggccgctgagcccccaccccggcccaagaccccagagatcttccgggccctggagggggaggcccaccgggtgctgtttggatttgtgcctgagaccaaggaggagctgcaggtgatgcctggcaacatcgtgtttgtgctgaagaagggaaatgacaactgggccaccgtgatgttcaacggccagaagggcctggtgccctgcaactacctggagcctgtggagctgcgcatccacccccagcagcagccccaggaggagagcagcccccagagcgacatcccagccccacccagcagcaaggcccctggccggccccagctgagccctggccagaagcagaaggaggagcccaaggaggtgaagctgtctgtgcccatgccctacaccctgaaggtgcactacaagtacacagtggtgatgaagacccagcccggcctgccctacagccaggtgcgggacatggtgtccaagaagctggagctgcggctggagcacaccaagctgagctaccggccccgggacagcaatgagctggtgcccctgtctgaggacagcatgaaggatgcctggggccaggtgaagaactactgcctgaccctgtggtgtgagaacacagtgggggaccagggcttcccagatgagcccaaggagagcgagaaggcagatgccaacaaccagaccacagagccccagctgaagaagggcagccaggtggaggccctcttctcctatgaggccacccagcctgaggacctggagttccaggagggggacatcatcctggtgctgagcaaggtgaatgaggagtggctggagggagaatgtaaaggcaaggtgggcatcttccccaaggtgtttgtggaggactgtgccaccacagacctggagagcacccggcgggaggtgtag

SEQ ID NO: 161811 - DNA, 432 bp, synthetic construct
  misc_feature 1..432: note = Description of Artificial Sequence: Synthetic coding sequence
  source 1..432: mol_type = other DNA
atgcctggcaacatcgtgtttgtgctgaagaagggaaatgacaactgggccaccgtgatgttcaacggccagaagggcctggtgccctgcaactacctggagcctgtggagctgcgcatccacccccagcagcagccccaggaggagagcagcccccagagcgacatcccagccccacccagcagcaaggcccctggccggccccagctgagccctggccagaagcagaaggaggagcccaaggaggtgaagctgtctgtgcccatgccctacaccctgaaggtgcactacaagtacacagtggtgatgaagacccagcccggcctgccctacagccaggtgcgggacatggtgtccaagaagctggagctgcggctggagcacaccaagctgagctaccggccccgggacagcaatgagctggtgccctag

SEQ ID NO: 161812 - DNA, 171 bp, synthetic construct
  misc_feature 1..171: note = Description of Artificial Sequence: Synthetic coding sequence
  source 1..171: mol_type = other DNA
atgccctacaccctgaaggtgcactacaagtacacagtggtgatgaagacccagcccggcctgccctacagccaggtgcgggacatggtgtccaagaagctggagctgcggctggagcacaccaagctgagctaccggccccgggacagcaatgagctggtgcccctgtag

SEQ ID NO: 161813 - DNA, 1020 bp, synthetic construct
  misc_feature 1..1020: note = Description of Artificial Sequence: Synthetic coding sequence
  source 1..1020: mol_type = other DNA
atggctgtggcccagcagctgcgggcagagagtgactttgagcagctgcctgatgatgtggccatcagcgccaacattgctgacatcgaggagaagaggggcttcaccagccactttgtgtttgtgattgaggtgaagaccaagggcggcagcaagtacctgatctaccgccgctaccggcagttccacgccctgcagagcaagctggaggagagatttggaccagacagcaagagcagcgccctggcctgcaccctgcccaccctgcctgccaaggtgtatgtgggcgtgaagcaggagattgctgagatgaggatcccagccctgaatgcctacatgaagagcctgctgagcctgcctgtgtgggtgctgatggatgaagatgtgcgcatcttcttctaccagagcccctatgacagcgagcaggtgccccaggccctgcggcggctgcggcccaggaccaggaaggtgaagtctgtgagcccccagggcaacagcgtggacaggatggccgcccccagggctgaggccctgtttgacttcaccggcaacagcaagctggagctgaacttcaaggctggagatgtgatcttcctgctgagccgcatcaacaaggactggctggagggcaccgtgcggggggccaccggcatcttccccctgagctttgtgaagatcctgaaggacttcccagaagaagatgaccccaccaactggctgcgctgctactactatgaggacaccatcagcaccatcaaggacattgctgtggaggaggacctgagcagcacccccctgctgaaggacctgctggagctgacccggcgggagttccagagagaagatattgccctgaactacagagatgctgagggggacctggtgcggctgctgagtgatgaagatgtggccctgatggtgcggcaggcccggggcctgcccagccagaagaggctcttcccctggaagctgcacatcacccagaaggacaactacagagtgtacaacaccatgccctag

SEQ ID NO: 161814 - DNA, 1047 bp, synthetic construct
  misc_feature 1..1047: note = Description of Artificial Sequence: Synthetic coding sequence
  source 1..1047: mol_type = other DNA
atggctgtggcccagcagctgcgggcagagagtgactttgagcagctgcctgatgatgtggccatcagcgccaacattgctgacatcgaggagaagaggggcttcaccagccactttgtgtttgtgattgaggtgaagaccaagggcggcagcaagtacctgatctaccgccgctaccggcagttccacgccctgcagagcaagctggaggagagatttggaccagacagcaagagcagcgccctggcctgcaccctgcccaccctgcctgccaaggtgtatgtgggcgtgaagcaggagattgctgagatgaggatcccagccctgaatgcctacatgaagagcctgctgagcctgcctgtgtgggtgctgatggatgaagatgtgcgcatcttcttctaccagagcccctatgacagcgagcaggtgccccaggccctgcggcggctgcggcccaggaccaggaaggtgaagtctgtgagcccccagggcaacagcgtggacaggatggccgcccccagggctgaggccctgtttgacttcaccggcaacagcaagctggagctgaacttcaaggctggagatgtgatcttcctgctgagccgcatcaacaaggactggctggagggcaccgtgcggggggccaccggcatcttccccctgagctttgtgaagatcctgaaggacttcccagaagaagatgaccccaccaactggctgcgctgctactactatgaggacaccatcagcaccatcaagtctgtggcctgggagggcggggcctgcccagccttcctgcccagcctgcggcccctgcccctgaccagccccagccacggcagcctgagccacagcaaggcccccagcggcagccagatgagccacaatgctgtgaccagccaccagaggcctggctggccaggccagccccacagccccttcccccaccccaccccccacttccagccagatgccagcctgctgcagcctgtgacccccctgggcaccagccgctggaggaagatctctgctgccctgccctactag

SEQ ID NO: 161815 - DNA, 501 bp, synthetic construct
  misc_feature 1..501: note = Description of Artificial Sequence: Synthetic coding sequence
  source 1..501: mol_type = other DNA
atgaggatcccagccctgaatgcctacatgaagagcctgctgagcctgcctgtgtgggtgctgatggatgaagatgtgcgcatcttcttctaccagagcccctatgattctgagcaggtgccccaggccctgcggcggctgcggcccaggaccaggaaggtgaagtctgtgagcccccagggcaacagcgtggacaggatggccgcccccagggctgaggccctgtttgacttcaccggcaacagcaagctggagctgaacttcaaggctggagatgtgatcttcctgctgagccgcatcaacaaggactggctggagggcaccgtgcggggggccaccggcatcttccccctgagctttgtgaagatcctgaaggacttccctgaggaggatgaccccaccaactggctgcgctgctactactatgaggacaccatcagcaccatcaagtctgtggcctgggagggcggggcctgcccagccttcctgcccagcctgtag

SEQ ID NO: 161816 - DNA, 480 bp, synthetic construct
  misc_feature 1..480: note = Description of Artificial Sequence: Synthetic coding sequence
  source 1..480: mol_type = other DNA
atgaatgacatcagccagaaggccgagatcctgctgagcagcagcaagcctgtgcccaagacctacgtgcccaagctgggcaaaggagatgtgaaggacaagtttgaggccatgcagagggcccgggaggagaggaaccagaggaggagcagagatgagaagcagaggaggaaggagcagtacatccgggagcgggagtggaacagaaggaagcaggagatcaaggagatgctggccagtgatgatgaggaggatgtgagcagcaaggtggagaaggcctacgtgcccaagctgactggaacagtgaagggccgctttgctgagatggagaagcagaggcaggaggagcagaggaagaggacagaggaggagaggaagagaagaattgagcaggacatgctggagaagaggaagatccagcgggagctggccaagagagctgagcagaagctggccaggagagatggagcccacctgtag

SEQ ID NO: 161817 - DNA, 1836 bp, synthetic construct
  misc_feature 1..1836: note = Description of Artificial Sequence: Synthetic coding sequence
  source 1..1836: mol_type = other DNA
atgaatgacatcagccagaaggccgagatcaaggagatgctggccagtgatgatgaggaggatgtgagcagcaaggtggagaaggcctacgtgcccaagctgactggaacagtgaagggccgctttgctgagatggagaagcagaggcaggaggagcagaggaagaggacagaggaggagaggaagagaagaattgagcaggacatgctggagaagaggaagatccagcgggagctggccaagagagctgagcagatcgaggacatcaacaacacaggaacagagagcgccagcgaggagggagatgacagcctgctgatcaccgtggtgcctgtgaagagctacaagaccagcggcaagatgaagaagaactttgaggacctggagaaggagcgggaggagaaggagcgcatcaagtatgaggaggacaagaggatccgctatgaggagcagaggcccagcctgaaggaggccaagtgcctgagcctggtgatggatgatgaaattgaaagtgaggccaagaaggagagcctgagccctgggaagctgaagctgacctttgaggagctggagcggcagaggcaggagaacaggaagaagcaggccgaggaggaggccaggaagaggctggaggaggagaagagggcctttgaggaggcccggcggcagatggtgaatgaagatgaggagaaccaggacacagccaagatcttcaagggctacagacctgggaagctgaagctgagctttgaggagatggagcggcagaggagagaagatgagaagaggaaggccgaggaggaggccaggagaagaattgaggaggagaagaaggcctttgctgaggcccggaggaacatggtggtggatgatgacagccctgagatgtacaagaccatcagccaggagttcctgaccccaggcaagctggagatcaactttgaggagctgctgaagcagaagatggaggaggagaagagaagaacagaggaggagaggaagcacaagctggagatggagaagcaggagtttgagcagctgcggcaggagatgggagaggaggaggaggagaatgagaccttcggcctgagccgggagtatgaggagctgatcaagctgaagaggagcggcagcatccaggccaagaacctgaagagcaagtttgagaagattggccagctgtctgagaaggagatccagaagaagattgaggaggagcgggcccggcggcgggccatcgacctggagatcaaggagcgggaggccgagaacttccacgaggaggatgatgtggatgtgcggcctgccaggaagtctgaggcccccttcacccacaaggtgaacatgaaggccaggtttgagcagatggccaaggcccgggaggaggaggagcagaggcgcatcgaggagcagaagctgctgaggatgcagtttgagcagcgggagattgatgctgccctgcagaagaagcgggaggaggaggaggaggaggagggcagcatcatgaatggcagcacagcagaagatgaggagcagaccaggtctggggccccctggttcaagaagcccctgaagaacacctctgtggtggacagcgagcctgtgcgcttcaccgtgaaggtgactggagagcccaagccagagatcacctggtggtttgaaggagagatcctgcaggatggagaggactaccagtacatcgagcggggggagacctactgcctgtacctgcctgagaccttcccagaagatggaggagagtacatgtgcaaggctgtgaacaacaagggcagcgctgccagcacctgcatcctgaccatcgagagcaagaactag

SEQ ID NO: 161818 - DNA, 2028 bp, synthetic construct
  misc_feature 1..2028: note = Description of Artificial Sequence: Synthetic coding sequence
  source 1..2028: mol_type = other DNA
atgaatgacatcagccagaaggccgagatcctgctgagcagcagcaagcctgtgcccaagacctacgtgcccaagctgggcaaaggagatgtgaaggacaagtttgaggccatgcagagggcccgggaggagaggaaccagaggaggagcagagatgagaagcagaggaggaaggagcagtacatccgggagcgggagtggaacagaaggaagcaggagatcaaggagatgctggccagtgatgatgaggaggatgtgagcagcaaggtggagaaggcctacgtgcccaagctgactggaacagtgaagggccgctttgctgagatggagaagcagaggcaggaggagcagaggaagaggacagaggaggagaggaagagaagaattgagcaggacatgctggagaagaggaagatccagcgggagctggccaagagagctgagcagatcgaggacatcaacaacacaggaacagagagcgccagcgaggagggagatgacagcctgctgatcaccgtggtgcctgtgaagagctacaagaccagcggcaagatgaagaagaactttgaggacctggagaaggagcgggaggagaaggagcgcatcaagtatgaggaggacaagaggatccgctatgaggagcagaggcccagcctgaaggaggccaagtgcctgagcctggtgatggatgatgaaattgaaagtgaggccaagaaggagagcctgagccctgggaagctgaagctgacctttgaggagctggagcggcagaggcaggagaacaggaagaagcaggccgaggaggaggccaggaagaggctggaggaggagaagagggcctttgaggaggcccggcggcagatggtgaatgaagatgaggagaaccaggacacagccaagatcttcaagggctacagacctgggaagctgaagctgagctttgaggagatggagcggcagaggagagaagatgagaagaggaaggccgaggaggaggccaggagaagaattgaggaggagaagaaggcctttgctgaggcccggaggaacatggtggtggatgatgacagccctgagatgtacaagaccatcagccaggagttcctgaccccaggcaagctggagatcaactttgaggagctgctgaagcagaagatggaggaggagaagagaagaacagaggaggagaggaagcacaagctggagatggagaagcaggagtttgagcagctgcggcaggagatgggagaggaggaggaggagaatgagaccttcggcctgagccgggagtatgaggagctgatcaagctgaagaggagcggcagcatccaggccaagaacctgaagagcaagtttgagaagattggccagctgtctgagaaggagatccagaagaagattgaggaggagcgggcccggcggcgggccatcgacctggagatcaaggagcgggaggccgagaacttccacgaggaggatgatgtggatgtgcggcctgccaggaagtctgaggcccccttcacccacaaggtgaacatgaaggccaggtttgagcagatggccaaggcccgggaggaggaggagcagaggcgcatcgaggagcagaagctgctgaggatgcagtttgagcagcgggagattgatgctgccctgcagaagaagcgggaggaggaggaggaggaggagggcagcatcatgaatggcagcacagcagaagatgaggagcagaccaggtctggggccccctggttcaagaagcccctgaagaacacctctgtggtggacagcgagcctgtgcgcttcaccgtgaaggtgactggagagcccaagccagagatcacctggtggtttgaaggagagatcctgcaggatggagaggactaccagtacatcgagcggggggagacctactgcctgtacctgcctgagaccttcccagaagatggaggagagtacatgtgcaaggctgtgaacaacaagggcagcgctgccagcacctgcatcctgaccatcgagagcaagaactag

SEQ ID NO: 161819 - DNA, 1731 bp, synthetic construct
  misc_feature 1..1731: note = Description of Artificial Sequence: Synthetic coding sequence
  source 1..1731: mol_type = other DNA
tgagtgaagggccgctttgctgagatggagaagcagaggcaggaggagcagaggaagaggacagaggaggagaggaagagaagaattgagcaggacatgctggagaagaggaagatccagcgggagctggccaagagagctgagcagatcgaggacatcaacaacacaggaacagagagcgccagcgaggagggagatgacagcctgctgatcaccgtggtgcctgtgaagagctacaagaccagcggcaagatgaagaagaactttgaggacctggagaaggagcgggaggagaaggagcgcatcaagtatgaggaggacaagaggatccgctatgaggagcagaggcccagcctgaaggaggccaagtgcctgagcctggtgatggatgatgaaattgaaagtgaggccaagaaggagagcctgagccctgggaagctgaagctgacctttgaggagctggagcggcagaggcaggagaacaggaagaagcaggccgaggaggaggccaggaagaggctggaggaggagaagagggcctttgaggaggcccggcggcagatggtgaatgaagatgaggagaaccaggacacagccaagatcttcaagggctacagacctgggaagctgaagctgagctttgaggagatggagcggcagaggagagaagatgagaagaggaaggccgaggaggaggccaggagaagaattgaggaggagaagaaggcctttgctgaggcccggaggaacatggtggtggatgatgacagccctgagatgtacaagaccatcagccaggagttcctgaccccaggcaagctggagatcaactttgaggagctgctgaagcagaagatggaggaggagaagagaagaacagaggaggagaggaagcacaagctggagatggagaagcaggagtttgagcagctgcggcaggagatgggagaggaggaggaggagaatgagaccttcggcctgagccgggagtatgaggagctgatcaagctgaagaggagcggcagcatccaggccaagaacctgaagagcaagtttgagaagattggccagctgtctgagaaggagatccagaagaagattgaggaggagcgggcccggcggcgggccatcgacctggagatcaaggagcgggaggccgagaacttccacgaggaggatgatgtggatgtgcggcctgccaggaagtctgaggcccccttcacccacaaggtgaacatgaaggccaggtttgagcagatggccaaggcccgggaggaggaggagcagaggcgcatcgaggagcagaagctgctgaggatgcagtttgagcagcgggagattgatgctgccctgcagaagaagcgggaggaggaggaggaggaggagggcagcatcatgaatggcagcacagcagaagatgaggagcagaccaggtctggggccccctggttcaagaagcccctgaagaacacctctgtggtggacagcgagcctgtgcgcttcaccgtgaaggtgactggagagcccaagccagagatcacctggtggtttgaaggagagatcctgcaggatggagaggactaccagtacatcgagcggggggagacctactgcctgtacctgcctgagaccttcccagaagatggaggagagtacatgtgcaaggctgtgaacaacaagggcagcgctgccagcacctgcatcctgaccattgaaacagatgactactag

SEQ ID NO: 161820 - DNA, 966 bp, synthetic construct
  misc_feature 1..966: note = Description of Artificial Sequence: Synthetic coding sequence
  source 1..966: mol_type = other DNA
atgaatgacatcagccagaaggccgagatcaaggagatgctggccagtgatgatgaggaggatgtgagcagcaaggtggagaaggcctacgtgcccaagctgactggaacagtgaagggccgctttgctgagatggagaagcagaggcaggaggagcagaggaagaggacagaggaggagaggaagagaagaattgagcaggacatgctggagaagaggaagatccagcgggagctggccaagagagctgagcagatcgaggacatcaacaacacaggaacagagagcgccagcgaggagggagatgacagcctgctgatcaccgtggtgcctgtgaagagctacaagaccagcggcaagatgaagaagaactttgaggacctggagaaggagcgggaggagaaggagcgcatcaagtatgaggaggacaagaggatccgctatgaggagcagaggcccagcctgaaggaggccaagtgcctgagcctggtgatggatgatgaaattgaaagtgaggccaagaaggagagcctgagccctgggaagctgaagctgacctttgaggagctggagcggcagaggcaggagaacaggaagaagcaggccgaggaggaggccaggaagaggctggaggaggagaagagggcctttgaggaggcccggcggcagatggtgaatgaagatgaggagaaccaggacacagccaagatcttcaagggctacagacctgggaagctgaagctgagctttgaggagatggagcggcagaggagagaagatgagaagaggaaggccgaggaggaggccaggagaagaattgaggaggagaagaaggcctttgctgaggcccggaggaacatggtggtggatgatgacagccctgagatgtacaagaccatcagccaggagttcctgaccccaggcaagctggagatcaactttgaggagctgctgaagcagaagtag

SEQ ID NO: 161821 - DNA, 1308 bp, synthetic construct
  misc_feature 1..1308: note = Description of Artificial Sequence: Synthetic coding sequence
  source 1..1308: mol_type = other DNA
atgaatgacatcagccagaaggccgagatcctgctgagcagcagcaagcctgtgcccaagacctacgtgcccaagctgggcaaaggagatgtgaaggacaagtttgaggccatgcagagggcccgggaggagaggaaccagaggaggagcagagatgagaagcagaggaggaaggagcagtacatccgggagcgggagtggaacagaaggaagcaggagatcaaggagatgctggccagtgatgatgaggaggatgtgagcagcaaggtggagaaggcctacgtgcccaagctgactggaacagtgaagggccgctttgctgagatggagaagcagaggcaggaggagcagaggaagaggacagaggaggagaggaagagaagaattgagcaggacatgctggagaagaggaagatccagcgggagctggccaagagagctgagcaggagggagatgacagcctgctgatcaccgtggtgcctgtgaagagctacaagaccagcggcaagatgaagaagaactttgaggacctggagaaggagcgggaggagaaggagcgcatcaagtatgaggaggacaagaggatccgctatgaggagcagaggcccagcctgaaggaggccaagtgcctgagcctggtgatggatgatgaaattgaaagtgaggccaagaaggagagcctgagccctgggaagctgaagctgacctttgaggagctggagcggcagaggcaggagaacaggaagaagcaggccgaggaggaggccaggaagaggctggaggaggagaagagggcctttgaggaggcccggcggcagatggtgaatgaagatgaggagaaccaggacacagccaagatcttcaagggctacagacctgggaagctgaagctgagctttgaggagatggagcggcagaggagagaagatgagaagaggaaggccgaggaggaggccaggagaagaattgaggaggagaagaaggcctttgctgaggcccggaggaacatggtggtggatgatgacagccctgagatgtacaagaccatcagccaggagttcctgaccccaggcaagctggagatcaactttgaggagctgctgaagcagaagatggaggaggagaagagaagaacagaggaggagaggaagcacaagctggagatggagaagcaggagtttgagcagctgcggcaggagatgggagaggaggaggaggagaatgagaccttcggcctgagccgggagtatgaggagctgatcaagctgaagaggagcggcagcatccaggccaagaacctgaagtag

SEQ ID NO: 161822 - DNA, 1989 bp, synthetic construct
  misc_feature 1..1989: note = Description of Artificial Sequence: Synthetic coding sequence
  source 1..1989: mol_type = other DNA
atgaatgacatcagccagaaggccgagatcctgctgagcagcagcaagcctgtgcccaagacctacgtgcccaagctgggcaaaggagatgtgaaggacaagtttgaggccatgcagagggcccgggaggagaggaaccagaggaggagcagagatgagaagcagaggaggaaggagcagtacatccgggagcgggagtggaacagaaggaagcaggagatcaaggagatgctggccagtgatgatgaggaggatgtgagcagcaaggtggagaaggcctacgtgcccaagctgactggaacagtgaagggccgctttgctgagatggagaagcagaggcaggaggagcagaggaagaggacagaggaggagaggaagagaagaattgagcaggacatgctggagaagaggaagatccagcgggagctggccaagagagctgagcaggagggagatgacagcctgctgatcaccgtggtgcctgtgaagagctacaagaccagcggcaagatgaagaagaactttgaggacctggagaaggagcgggaggagaaggagcgcatcaagtatgaggaggacaagaggatccgctatgaggagcagaggcccagcctgaaggaggccaagtgcctgagcctggtgatggatgatgaaattgaaagtgaggccaagaaggagagcctgagccctgggaagctgaagctgacctttgaggagctggagcggcagaggcaggagaacaggaagaagcaggccgaggaggaggccaggaagaggctggaggaggagaagagggcctttgaggaggcccggcggcagatggtgaatgaagatgaggagaaccaggacacagccaagatcttcaagggctacagacctgggaagctgaagctgagctttgaggagatggagcggcagaggagagaagatgagaagaggaaggccgaggaggaggccaggagaagaattgaggaggagaagaaggcctttgctgaggcccggaggaacatggtggtggatgatgacagccctgagatgtacaagaccatcagccaggagttcctgaccccaggcaagctggagatcaactttgaggagctgctgaagcagaagatggaggaggagaagagaagaacagaggaggagaggaagcacaagctggagatggagaagcaggagtttgagcagctgcggcaggagatgggagaggaggaggaggagaatgagaccttcggcctgagccgggagtatgaggagctgatcaagctgaagaggagcggcagcatccaggccaagaacctgaagagcaagtttgagaagattggccagctgtctgagaaggagatccagaagaagattgaggaggagcgggcccggcggcgggccatcgacctggagatcaaggagcgggaggccgagaacttccacgaggaggatgatgtggatgtgcggcctgccaggaagtctgaggcccccttcacccacaaggtgaacatgaaggccaggtttgagcagatggccaaggcccgggaggaggaggagcagaggcgcatcgaggagcagaagctgctgaggatgcagtttgagcagcgggagattgatgctgccctgcagaagaagcgggaggaggaggaggaggaggagggcagcatcatgaatggcagcacagcagaagatgaggagcagaccaggtctggggccccctggttcaagaagcccctgaagaacacctctgtggtggacagcgagcctgtgcgcttcaccgtgaaggtgactggagagcccaagccagagatcacctggtggtttgaaggagagatcctgcaggatggagaggactaccagtacatcgagcggggggagacctactgcctgtacctgcctgagaccttcccagaagatggaggagagtacatgtgcaaggctgtgaacaacaagggcagcgctgccagcacctgcatcctgaccattgaaacagatgactactag

SEQ ID NO: 161823 - DNA, 813 bp, synthetic construct
  misc_feature 1..813: note = Description of Artificial Sequence: Synthetic coding sequence
  source 1..813: mol_type = other DNA
atggagaaccagcctgtgcgctggagggccctgcccggcctgcccaggcctcctggcctgcctgctgccccctggctgctgctgggcgtgctgctgctgcccggcaccctgcggctggccggcggccagagcgtgacccacacaggcctgcccatcatggccagcctggccaacacagccatctccttcagctgccgcatcacctacccctacaccccccagttcaaggtgttcaccgtgtcctacttccacgaggacctgcagggccagaggagccccaagaagcccaccaactgccaccctggcctgggcacagagaaccagagccacaccctggactgccaggtgaccctggtgctgcccggggccagcgccaccggcacctactactgcagcgtgcactggccccacagcacagtgcggggcagcggcaccttcatcctggtgagagatgctggctaccgggagcccccccagagcccccagaagctgctgctgtttggcttcaccggcctgctgtctgtgctgtctgtggtgggcacagccctgctgctgtggaacaagaagaggatgaggggccctgggaaggaccccaccaggaaatgtcctgaccccaggtctgccagcagccccaagcagcaccccagcgagagcgtgtacacagccctgcagaggcgggagacagaggtgtatgcctgcattgaaaatgaagatggcagcagccccacagccaagcagagccccctgagccaggagcggccccacagatttgaagatgatggagagctgaacctggtgtatgagaacctgtag

SEQ ID NO: 161824 - DNA, 1248 bp, synthetic construct
  misc_feature 1..1248: note = Description of Artificial Sequence: Synthetic coding sequence
  source 1..1248: mol_type = other DNA
atggcccctgtgtctggcagccgcagcccagaccgggaggccagcggcagcggcggcagaagaagaagcagcagcaagagccccaagcccagcaagagcgcccggagcccccggggccgccgcagccgcagccacagctgcagccgcagcggggacagaaatggcctgacccaccagctgggcggcctgagccagggcagcaggaaccagagctaccgcagccgcagccgcagccgcagccgggagcggcccagcgccccccggggcatcccctttgccagcgccagcagctctgtgtactacggcagctacagccggccctacggcagtgacaagccctggcccagcctgctggacaaggagcgggaggagagcctgcggcagaagaggctgtctgagcgggagagaattggagagctgggcgcccctgaggtgtggggcctgagccccaagaaccctgagccagacagtgatgagcacacccctgtggaggatgaggagcccaagaagagcaccaccagcgccagcaccagcgaggaggagaagaagaagaagagcagccgcagcaaggagaggagcaagaagaggaggaagaagaagagcagcaagaggaagcacaagaagtacagtgaagattctgacagcgacagcgacagcgagacagacagcagtgatgaggacaacaagaggcgggccaagaaggccaagaagaaggagaagaagaagaagcacaggagcaagaagtacaagaagaagaggagcaagaagagcaggaaggagagcagtgacagcagcagcaaggagagccaggaggagttcctggagaacccctggaaggacaggaccaaggccgaggagcccagcgacctgattggccctgaggcccccaagaccctgaccagccaggatgacaagcccctgaactacggccacgccctgctgcctggagagggcgccgccatggccgagtatgtgaaggccggcaagaggatccccaggagaggagaaattggcctgaccagcgaggagatcgccagctttgagtgcagcggctacgtgatgagcggcagccgccacaggaggatggaggccgtgcggctgaggaaggagaaccagatctacagcgcagatgagaagagggccctggccagcttcaaccaggaggagaggaggaagcgggagaacaagatcctggccagcttccgggagatggtgtacaggaagaccaagggcaaggatgacaagtag

SEQ ID NO: 161825 - DNA, 2073 bp, synthetic construct
  misc_feature 1..2073: note = Description of Artificial Sequence: Synthetic coding sequence
  source 1..2073: mol_type = other DNA
atggagaagatcctgcagatggccgagggcattgatattggagagatgcccagctatgacctggtgctgagcaagcccagcaagggccagaagaggcacctgagcacctgtgatggccagaacccccccaagaagcaggccggcagcaagttccacgcccggcccaggtttgagcctgtgcactttgtggccagcagcagcaaggatgagcggcaggaggacccctacggcccccagaccaaggaggtgaatgagcagacccactttgcctccatgccccgggacatctaccaggactacacccaggacagcttcagcatccaggacggcaacagccagtactgtgacagcagcggcttcatcctgaccaaggaccagcctgtgacagccaacatgtactttgacagcggcaacccagcccccagcaccaccagccagcaggccaacagccagagcaccccagagcccagccccagccagaccttccctgagagcgtggtggccgagaagcagtacttcatcgagaagctgacagccaccatctggaagaacctgagcaaccctgagatgaccagcggcagtgacaagatcaactacacctacatgctgacccgctgcatccaggcctgcaagaccaaccctgagtacatctatgcccccctgaaggagatccccccagctgacatccccaagaacaagaagctgctgacagatggctacgcctgtgaggtgcgctgccagaacatctacctgaccaccggctacgccggcagcaagaatggcagccgggaccgggccacagagctggccgtgaagctgctgcagaagagaattgaggtgcgggtggtgcggaggaagttcaagcacacctttggagaggacctggtggtgtgccagatcggcatgagcagctatgagttccccccagccctgaagcccccagaggacctggtggtgctgggcaaggatgccagcggccagcccatcttcaatgccagcgccaagcactggaccaacttcgtcatcacagaaaatgccaatgatgccatcggcatcctgaacaacagcgccagcttcaacaagatgagcattgagtacaagtatgagatgatgcccaacagaacctggcgctgcagggtcttcctgcaggaccactgcctggccgagggctacggcaccaagaagaccagcaagcacgccgctgctgatgaggccctgaagatcctgcagaagacccagcccacctaccccagcgtgaagagcagccagtgccacacaggcagcagcccccggggcagcggcaagaagaaggacatcaaggacctggtggtgtatgagaacagcagcaaccctgtgtgcaccctgaatgacacagcccagttcaacaggatgacagtggagtatgtgtatgaaagaatgacaggcctgcgctggaagtgcaaggtgatcctggagagcgaggtgattgctgaggccgtgggcgtgaagaagacagtgaagtatgaagctgctggggaggccgtgaagaccctgaagaagacccagcccaccgtcatcaacaacctgaagaagggagctgtggaggatgtgatcagcagaaatgagatccagggccgctctgctgaggaggcctacaagcagcagatcaaggaggacaacatcggcaaccagctgctgaggaagatgggctggacaggaggcggcctgggcaagagcggggagggcatccgggagcccatctctgtgaaggagcagcacaagcgggagggcctgggcctggatgtggagcgggtgaacaagatcgccaagagggacatcgagcagatcatcagaaattatgcccggtctgagagccacacagacctgaccttcagccgggagctgaccaatgatgagaggaagcagatccaccagatcgcccagaagtatggcctgaagagcaagagccacggcgtgggccatgaccgctacctggtggtgggcaggaagaggaggaaagaagacctgctggaccagctgaagcaggagggccaggtgggccactatgagctggtgatgccccaggccaactag

SEQ ID NO: 161826 - DNA, 2073 bp, synthetic construct; identical to SEQ ID NO: 161825
  misc_feature 1..2073: note = Description of Artificial Sequence: Synthetic coding sequence
  source 1..2073: mol_type = other DNA

SEQ ID NO: 161827 - DNA, 2118 bp, synthetic construct
  misc_feature 1..2118: note = Description of Artificial Sequence: Synthetic coding sequence
  source 1..2118: mol_type = other DNA
atgggcttcatgctgcccctcatcttccgctacagcccccggctgatggagaagatcctgcagatggccgagggcatcgacatcggggagatgcccagctatgacctggtgctgagcaagcccagcaagggccagaagaggcacctgagcacctgtgatggccagaacccccccaagaagcaggccggcagcaagttccacgcccggcccaggtttgagcctgtgcactttgtggccagcagcagcaaggatgagcggcaggaggacccctacggcccccagaccaaggaggtgaatgagcagacccactttgcctccatgccccgggacatctaccaggactacacccaggacagcttcagcatccaggacggcaacagccagtactgtgacagcagcggcttcatcctgaccaaggaccagcctgtgacagccaacatgtactttgattctggcaacccagcccccagcaccaccagccagcaggccaacagccagagcaccccagagcccagccccagccagaccttccctgagagcgtggtggccgagaagcagtacttcatcgagaagctgacagccaccatctggaagaacctgagcaaccctgagatgaccagcggcagtgacaagatcaactacacctacatgctgacccgctgcatccaggcctgcaagaccaaccctgagtacatctatgcccccctgaaggagatccccccagctgacatccccaagaacaagaagctgctgacagatggctacgcctgtgaggtgcgctgccagaacatctacctgaccaccggctacgccggcagcaagaatggcagccgggaccgggccacagagctggccgtgaagctgctgcagaagagaattgaggtgcgggtggtgcggaggaagttcaagcacaccttcggggaggacctggtggtgtgccagatcggcatgagcagctatgagttccccccagccctgaagcccccagaggacctggtggtgctgggcaaggatgccagcggccagcccatcttcaatgccagcgccaagcactggaccaactttgtgatcacagaaaatgccaatgatgccatcggcatcctgaacaacagcgccagcttcaacaagatgagcattgagtacaagtatgagatgatgcccaacagaacctggcgctgcagggtcttcctgcaggaccactgcctggccgagggctacggcaccaagaagaccagcaagcatgctgctgctgatgaggccctgaagatcctgcagaagacccagcccacctaccccagcgtgaagagcagccagtgccacacaggcagcagcccccggggcagcggcaagaagaaggacatcaaggacctggtggtgtatgagaacagcagcaaccctgtgtgcaccctgaatgacacagcccagttcaacaggatgacagtggagtatgtgtatgaaagaatgacaggcctgcgctggaagtgcaaggtgatcctggagagcgaggtgattgctgaggccgtgggcgtgaagaagacagtgaagtatgaggccgccggggaggccgtgaagaccctgaagaagacccagcccaccgtcatcaacaacctgaagaagggagctgtggaggatgtgatcagcagaaatgagatccagggccgctctgctgaggaggcctacaagcagcagatcaaggaggacaacatcggcaaccagctgctgaggaagatgggctggacaggaggcggcctgggcaagtctggagagggcatccgggagcccatctctgtgaaggagcagcacaagcgggagggcctgggcctggatgtggagcgggtgaacaagatcgccaagagggacatcgagcagatcatccggaactatgcccggtctgagagccacacagacctgaccttcagccgggagctgaccaatgatgagaggaagcagatccaccagatcgcccagaagtatggcctgaagagcaagagccatggagtgggccatgaccgctacctggtggtgggcaggaagaggaggaaggaggacctgctggaccagctgaagcaggagggccaggtgggccactatgagctggtgatgccccaggccaactag

SEQ ID NO: 161828 - DNA, 570 bp, synthetic construct
  misc_feature 1..570: note = Description of Artificial Sequence: Synthetic coding sequence
  source 1..570: mol_type = other DNA
atgctgctgcgggccgcctggaggagagctgctgtggccgtgacagctgcccctggccccaagccagctgcccccacccggggcctgcggctgcgggtgggggaccgggccccccagagcgctgtgcctgctgacacagctgctgcccctgaggtgggccctgtgctgcggcccctgtacatggatgtgcaggccaccacccccctggacccccgggtgctggatgccatgctgccctacctgatcaactactacggcaacccccacagcaggacccacgcctacggctgggagagcgaggccgccatggagcgggcccggcagcaggtggccagcctcatcggggctgacccccgggagatcatcttcaccagcggggccacagagagcaacaacatcgccatcaagacagagagccacagcgtcatccaggccggcgtgcagtggcatgacctggacagcctgcaggcccctcctcctggcttcacccccttcagctgcctgagcctgctgagctcctgggactacagaagacctccaccccacccagccaacttcctgtacttctag

SEQ ID NO: 161829 - DNA, 1374 bp, synthetic construct
  misc_feature 1..1374: note = Description of Artificial Sequence: Synthetic coding sequence
  source 1..1374: mol_type = other DNA
atgctgctgcgggccgcctggaggagagctgctgtggccgtgacagctgcccctggccccaagccagctgcccccacccggggcctgcggctgcgggtgggggaccgggccccccagagcgctgtgcctgctgacacagctgctgcccctgaggtgggccctgtgctgcggcccctgtacatggatgtgcaggccaccacccccctggacccccgggtgctggatgccatgctgccctacctgatcaactactacggcaacccccacagcaggacccacgcctacggctgggagagcgaggccgccatggagcgggcccggcagcaggtggccagcctcatcggggctgacccccgggagatcatcttcaccagcggggccacagagagcaacaacatcgccatcaagggcgtggcccgcttctaccgcagcaggaagaagcacctgatcaccacccagacagagcacaagtgtgtgctggacagctgccgcagcctggaggccgagggcttccaggtgacctacctgcctgtgcagaagagcggcatcatcgacctgaaggagctggaggccgccatccagcctgacaccagcctggtgtctgtgatgacagtgaacaatgaaattggagtgaagcagcccatcgccgagatcggccgcatctgcagcagcaggaaggtgtacttccacacagatgctgcccaggccgtgggcaagatccccctggatgtgaatgacatgaagattgacctgatgagcatcagcggccacaagatctacggccccaagggcgtgggcgccatctacatcagaagaagaccccgggtgcgggtggaggccctgcagagcggcggcggccaggagcggggcatgaggtctggaacagtgcccacccccctggtggtgggcctgggcgccgcctgtgaggtggcccagcaggagatggagtatgaccacaagaggatcagcaagctgtctgagcggctcatccagaacatcatgaagagcctgcctgatgtggtgatgaatggagaccccaagcaccactacccaggctgcatcaacctgagctttgcctacgtggagggggagagcctgctgatggccctgaaggatgtggccctgagcagcggcagcgcctgcaccagcgccagcctggagcccagctatgtgctgcgggccatcggcacagatgaggacctggcccacagcagcatccgcttcggcatcggccgcttcaccacagaggaggaggtggactacacagtggagaagtgcatccagcacgtgaagaggctgcgggagatgagccccctgtgggagatggtgcaggacggcatcgacctgaagagcatcaagtggacccagcactag

SEQ ID NO: 161830 - DNA, 486 bp, synthetic construct
  misc_feature 1..486: note = Description of Artificial Sequence: Synthetic coding sequence
  source 1..486: mol_type = other DNA
atgctgctgcgggccgcctggaggagagctgctgtggccgtgacagctgcccctggccccaagccagctgcccccacccggggcctgcggctgcgggtgggggaccgggccccccagagcgctgtgcctgctgacacagctgctgcccctgaggtgggccctgtgctgcggcccctgtacatggatgtgcaggccaccacccccctggacccccgggtgctggatgccatgctgccctacctgatcaactactacggcaacccccacagcaggacccacgcctacggctgggagagcgaggccgccatggagcgggcccggcagcaggtggccagcctcatcggggctgacccccgggagatcatcttcaccagcggggccacagagagcaacaacatcgccatcaagggcgtggcccgcttctaccgcagcaggaagaagcacctgatcaccaccctgagcggcggggccggcggctgtgtgtag

SEQ ID NO: 161831 - DNA, 768 bp, synthetic construct
  misc_feature 1..768: note = Description of Artificial Sequence: Synthetic coding sequence
  source 1..768: mol_type = other DNA
atgacagtgaacaatgaaattggagtgaagcagcccatcgccgagatcggccgcatctgcagcagcaggaaggtgtacttccacacagatgctgcccaggccgtgggcaagatccccctggatgtgaatgacatgaagattgacctgatgagcatcagcggccacaagatctacggccccaagggcgtgggcgccatctacatcagaagaagaccccgggtgcgggtggaggccctgcagagcggcggcggccaggagcggggcatgaggtctggaacagtgcccacccccctggtggtgggcctgggcgccgcctgtgaggtggcccagcaggagatggagtatgaccacaagaggatcagcaagctgtctgagcggctcatccagaacatcatgaagagcctgcctgatgtggtgatgaatggagaccccaagcaccactacccaggctgcatcaacctgagctttgcctacgtggagggggagagcctgctgatggccctgaaggatgtggccctgagcagcggcagcgcctgcaccagcgccagcctggagcccagctatgtgctgcgggccatcggcacagatgaggacctggcccacagcagcatccgcttcggcatcggccgcttcaccacagaggaggaggtggactacacagtggagaagtgcatccagcacgtgaagaggctgcgggagatgagccccctgtgggagatggtgcaggacggcatcgacctgaagagcatcaagtggacccagcactag

SEQ ID NO: 161832 - DNA, 1221 bp, synthetic construct
  misc_feature 1..1221: note = Description of Artificial Sequence: Synthetic coding sequence
  source 1..1221: mol_type = other DNA
atgctgctgcgggccgcctggaggagagctgctgtggccgtgacagctgcccctggccccaagccagctgcccccacccggggcctgcggctgcgggtgggggaccgggccccccagagcgctgtgcctgctgacacagctgctgcccctgaggtgggccctgtgctgcggcccctgtacatggatgtgcaggccaccacccccctggacccccgggtgctggatgccatgctgccctacctgatcaactactacggcaacccccacagcaggacccacgcctacggctgggagagcgaggccgccatggagcgggcccggcagcaggtggccagcctcatcggggctgacccccgggagatcatcttcaccagcggggccacagagagcaacaacatcgccatcaaggagctggaggccgccatccagcctgacaccagcctggtgtctgtgatgacagtgaacaatgaaattggagtgaagcagcccatcgccgagatcggccgcatctgcagcagcaggaaggtgtacttccacacagatgctgcccaggccgtgggcaagatccccctggatgtgaatgacatgaagattgacctgatgagcatcagcggccacaagatctacggccccaagggcgtgggcgccatctacatcagaagaagaccccgggtgcgggtggaggccctgcagagcggcggcggccaggagcggggcatgaggagcggcaccgtgcccacccccctggtggtgggcctgggcgccgcctgtgaggtggcccagcaggagatggagtatgaccacaagaggatcagcaagctgtctgagcggctcatccagaacatcatgaagagcctgcctgatgtggtgatgaatggagaccccaagcaccactacccaggctgcatcaacctgagctttgcctacgtggagggggagagcctgctgatggccctgaaggatgtggccctgagcagcggcagcgcctgcaccagcgccagcctggagcccagctatgtgctgcgggccatcggcacagatgaggacctggcccacagcagcatccgctttggaattggccgcttcaccacagaggaggaggtggactacacagtggagaagtgcatccagcacgtgaagaggctgcgggagatgagccccctgtgggagatggtgcaggacggcatcgacctgaagagcatcaagtggacccagcactag

SEQ ID NO: 161833 - DNA, 693 bp, synthetic construct
  misc_feature 1..693: note = Description of Artificial Sequence: Synthetic coding sequence
  source 1..693: mol_type = other DNA
atgctgaagaacccctacaccatcaagaagcagcccctgcaccagtttgtgcagaggcccctcttccccctgcctgctgccttctaccaccctgtgcgctacatgttcatccagacccaggacacccccaaccccaacagcctgaagttcatccctgggaagcctgtgctggagaccaggaccatggacttccccaccccagctgctgccttccgcagccccctggcccggcagctgttccgcatcgagggcgtgaagtctgtgttcttcggccctgacttcatcaccgtgaccaaggaaaatgaggagctggactggaacctgctgaagccagacatctatgccaccatcatggacttctttgccagcggcctgcccctggtgacagaggagacccccagcggggaggccggctctgaagaagatgatgaggtggtggccatgatcaaggagctgctggacacccgcatccggcccaccgtgcaggaggatggaggagatgtgatctacaagggctttgaagatggcatcgtgcagctgaagctgcagggcagctgcaccagctgccccagcagcatcatcaccctgaagaatggcatccagaacatgctgcagttctacatccctgaggtggagggcgtggagcaggtgatggatgatgaaagtgatgagaaggaggccaacagcccctag

SEQ ID NO: 161834 - DNA, 342 bp, synthetic construct
  misc_feature 1..342: note = Description of Artificial Sequence: Synthetic coding sequence
  source 1..342: mol_type = other DNA
atggacttctttgccagcggcctgcccctggtgacagaggagaccccatctggagaggccggcagcgaggaggatgatgaggtggtggccatgatcaaggagctgctggacacccgcatccggcccaccgtgcaggaggatggaggagatgtgatctacaagggctttgaagatggcatcgtgcagctgaagctgcagggcagctgcaccagctgccccagcagcatcatcaccctgaagaatggcatccagaacatgctgcagttctacatccctgaggtggagggcgtggagcaggtgatggatgatgaaagtgatgagaaggaggccaacagcccctag

SEQ ID NO: 161835 - DNA, 765 bp, synthetic construct
  misc_feature 1..765: note = Description of Artificial Sequence: Synthetic coding sequence
  source 1..765: mol_type = other DNA
atggccgccacagcccggcggggctggggcgctgctgctgtggccgccggcctgcggcggcgcttctgccacatgctgaagaacccctacaccatcaagaagcagcccctgcaccagtttgtgcagaggcccctcttccccctgcctgctgccttctaccaccctgtgcgctacatgttcatccagacccaggacacccccaaccccaacagcctgaagttcatccctgggaagcctgtgctggagaccaggaccatggacttccccaccccagctgctgccttccgcagccccctggcccggcagctgttccgcatcgagggcgtgaagtctgtgttcttcggccctgacttcatcaccgtgaccaaggaaaatgaggagctggactggaacctgctgaagccagacatctatgccaccatcatggacttctttgccagcggcctgcccctggtgacagaggagacccccagcggggaggccggctctgaagaagatgatgaggtggtggccatgatcaaggagctgctggacacccgcatccggcccaccgtgcaggaggatggaggagatgtgatctacaagggctttgaagatggcatcgtgcagctgaagctgcagggcagctgcaccagctgccccagcagcatcatcaccctgaagaatggcatccagaacatgctgcagttctacatccctgaggtggagggcgtggagcaggtgatggatgatgaaagtgatgagaaggaggccaacagcccctag

SEQ ID NO: 161836 - DNA, 300 bp, synthetic construct
  misc_feature 1..300: note = Description of Artificial Sequence: Synthetic coding sequence
  source 1..300: mol_type = other DNA
atggacttctttgccagcggcctgcccctggtgacagaggagaccccatctggagaggccggcagcgaggaggatgatgaggtggtggccatgatcaaggagctgctggacacccgcatccggcccaccgtgcaggaggatggaggagatgtgatctacaagggctttgaagatggcatcgtgcagctgaagctgcagggcagctgcaccagctgccccagcagcatcatcaccctgaagaatggcatccagaacatgctgcagttctacatccctgaggtggagggcgtggagcagtag

SEQ ID NO: 161837 - DNA, 342 bp, synthetic construct; identical to SEQ ID NO: 161834
  misc_feature 1..342: note = Description of Artificial Sequence: Synthetic coding sequence
  source 1..342: mol_type = other DNA

SEQ ID NO: 161838 - DNA, 291 bp, synthetic construct
  misc_feature 1..291: note = Description of Artificial Sequence: Synthetic coding sequence
  source 1..291: mol_type = other DNA
atggacttctttgccagcggcctgcccctggtgacagaggagaccccatctggagaggccggcagcgaggaggatgatgaggtggtggccatgatcaaggagctgctggacacccgcatccggcccaccgtgcaggaggatggaggagatgtgatctacaagggctttgaagatggcatcgtgcagctgaagctgcagggcagctgcaccagctgccccagcagcatcatcaccctgaagaatggcatccagaacatgctgcagttctacatccctgaggtggagggctag

SEQ ID NO: 161839 - DNA, 1464 bp, synthetic construct
  misc_feature 1..1464: note = Description of Artificial Sequence: Synthetic coding sequence
  source 1..1464: mol_type = other DNA
atggctgctgccctgcccaggaccctgggggagctgcagctgtaccgcatcctgcagaaggccaacctgctgagctactttgatgccttcatccagcagggcggagatgatgtgcagcagctgtgtgaggccggggaggaggagttcctggagatcatggccctggtgggcatggccagcaagcccctgcacgtgcggcggctgcagaaggccctgcgggactgggtgaccaaccctggcctcttcaaccagcccctgaccagcctgcctgtgagcagcatccccatctacaagctgcctgagggcagccccacctggctgggcatcagctgcagcagctatgaaagaagcagcaatgcccgggagccccacctgaagatccccaagtgtgccgccaccacctgtgtgcagagcctgggccagggcaagagtgatgtggtgggcagcctggccctgcagagcgtgggggagagccggctgtggcagggccaccacgccacagaaagtgagcacagcctgagccctgctgacctgggcagccctgccagccccaaggagagcagcgaggccctggatgctgctgctgccctgtctgtggctgaatgtgtggagaggatggcccccaccctgcccaagagtgacctgaatgaggtgaaggagctgctgaagaccaacaagaagctggccaagatgattggccacatctttgagatgaatgatgatgacccccacaaggaggaggagatcaggaagtacagcgccatctacggccgctttgacagcaagaggaaggatggcaagcacctgaccctgcacgagctgactgtgaatgaagctgctgcccagctgtgtgtgaaggacaatgccctgctgaccaggagagatgagctgtttgccctggcccggcagatcagccgggaggtgacctacaagtacacctaccgcaccaccaagagcaaatgtggggagagagatgagctgagccccaagaggatcaaggtggaggatggcttcccagacttccaggacagcgtgcagaccctcttccagcaggcccgggccaagtctgaggagctggccgccctgagcagccagcagcctgagaaggtgatggccaagcagatggagttcctgtgcaaccaggccggctatgaaaggctgcagcacgccgagcggcggctgtctgctggcctgtaccggcagagcagcgaggagcacagccccaacggcctgaccagtgacaacagtgatggccagggcgagcggcccctgaacctgaggatgcccaacctgcagaaccggcagccccaccactttgtggtggatggagagctgagccggctgtaccccagcgaggccaagagccacagcagcgagagcctgggcatcctgaaggactacccccacagcgccttcaccctggagaagaaggtgatcaagacagagcctgaggacagcaggtag

SEQ ID NO: 161840 - DNA, 1377 bp, synthetic construct
  misc_feature 1..1377: note = Description of Artificial Sequence: Synthetic coding sequence
  source 1..1377: mol_type = other DNA
atggctgctgccctgcccaggaccctgggggagctgcagctgtaccgcatcctgcagaaggccaacctgctgagctactttgatgccttcatccagcagggcggagatgatgtgcagcagctgtgtgaggccggggaggaggagttcctggagatcatggccctggtgggcatggccagcaagcccctgcacgtgcggcggctgcagaaggccctgcgggactgggtgaccaaccctggcctcttcaaccagcccctgaccagcctgcctgtgagcagcatccccatctacaagctgcctgagggcagccccacctggctgggcatcagctgcagcagctatgaaagaagcagcaatgcccgggagccccacctgaagatccccaagtgtgccgccaccacctgtgtgcagagcctgggccagggcaagagtgatgtggtgggcagcctggccctgcagagcgtgggggagagccggctgtggcagggccaccacgccacagaaagtgagcacagcctgagccctgctgacctgggcagccctgccagccccaaggagagcagcgaggccctggatgctgctgctgccctgtctgtggctgaatgtgtggagaggatggcccccaccctgcccaagagtgacctgaatgaggtgaaggagctgctgaagaccaacaagaagctggccaagatgattggccacatctttgagatgaatgatgatgacccccacaaggaggaggagatcaggaagtacagcgccatctacggccgctttgacagcaagaggaaggatggcaagcacctgaccctgcacgagctgactgtgaatgaagctgctgcccagctgtgtgtgaaggacaatgccctgctgaccaggagagatgagctgtttgccctggcccggcagatcagccgggaggtgacctacaagtacacctaccgcaccaccaagagcaaatgtggggagagagatgagctgagccccaagaggatcaaggtggaggaccagcctgagaaggtgatggccaagcagatggagttcctgtgcaaccaggccggctatgagcggctgcagcacgccgagcggcggctgtctgctggcctgtaccggcagagcagcgaggagcacagccccaacggcctgaccagtgacaacagtgatggccagggcgagcggcccctgaacctgaggatgcccaacctgcagaaccggcagccccaccactttgtggtggatggagagctgagccggctgtaccccagcgaggccaagagccacagcagcgagagcctgggcatcctgaaggactacccccacagcgccttcaccctggagaagaaggtgatcaagacagagcctgaggacagcaggtag

SEQ ID NO: 161841 - DNA, 1464 bp, synthetic construct; identical to SEQ ID NO: 161839
  misc_feature 1..1464: note = Description of Artificial Sequence: Synthetic coding sequence
  source 1..1464: mol_type = other DNA

SEQ ID NO: 161842 - DNA, 1461 bp, synthetic construct
  misc_feature 1..1461: note = Description of Artificial Sequence: Synthetic coding sequence
  source 1..1461: mol_type = other DNA
atggctgctgccctgcccaggaccctgggggagctgcagctgtaccgcatcctgcagaaggccaacctgctgagctactttgatgccttcatccagcagggcggagatgatgtgcagcagctgtgtgaggccggggaggaggagttcctggagatcatggccctggtgggcatggccagcaagcccctgcacgtgcggcggctgcagaaggccctgcgggactgggtgaccaaccctggcctcttcaaccagcccctgaccagcctgcctgtgagcagcatccccatctacaagctgcctgagggcagccccacctggctgggcatcagctgcagcagctatgaaagaagcagcaatgcccgggagccccacctgaagatccccaagtgtgccgccaccacctgtgtgcagagcctgggccagggcaagagtgatgtggtgggcagcctggccctgcagagcgtgggggagagccggctgtggcagggccaccacgccacagaaagtgagcacagcctgagccctgctgacctgggcagccctgccagccccaaggagagcagcgaggccctggatgctgctgctgccctgtctgtggctgaatgtgtggagaggatggcccccaccctgcccaagagtgacctgaatgaggtgaaggagctgctgaagaccaacaagaagctggccaagatgattggccacatctttgagatgaatgatgatgacccccacaaggaggaggagatcaggaagtacagcgccatctacggccgctttgacagcaagaggaaggatggcaagcacctgaccctgcacgagctgactgtgaatgaagctgctgcccagctgtgtgtgaaggacaatgccctgctgaccaggagagatgagctgtttgccctggcccggcagatcagccgggaggtgacctacaagtacacctaccgcaccaccaagagcaaatgtggggagagagatgagctgagccccaagaggatcaaggtggaggatggcttcccagacttccaggacagcgtgcagaccctcttccagcaggcccgggccaagtctgaggagctggccgccctgagcagccagcctgagaaggtgatggccaagcagatggagttcctgtgcaaccaggccggctatgagcggctgcagcacgccgagcggcggctgtctgctggcctgtaccggcagagcagcgaggagcacagccccaacggcctgaccagtgacaacagtgatggccagggcgagcggcccctgaacctgaggatgcccaacctgcagaaccggcagccccaccactttgtggtggatggagagctgagccggctgtaccccagcgaggccaagagccacagcagcgagagcctgggcatcctgaaggactacccccacagcgccttcaccctggagaagaaggtgatcaagacagagcctgaggacagcaggtag

SEQ ID NO: 161843 - DNA, 474 bp, synthetic construct
  misc_feature 1..474: note = Description of Artificial Sequence: Synthetic coding sequence
  source 1..474: mol_type = other DNA
atggctgctgccctgcccaggaccctgggggagctgcagctgtaccgcatcctgcagaaggccaacctgctgagctactttgatgccttcatccagcagggcggagatgatgtgcagcagctgtgtgaggccggggaggaggagttcctggagatcatggccctggtgggcatggccagcaagcccctgcacgtgcggcggctgcagaaggccctgcgggactgggtgaccaaccctggcctcttcaaccagcccctgaccagcctgcctgtgagcagcatccccatctacaagctgcctgagggcagccccacctggctgggcatcagctgcagcagctatgaaagaagcagcaatgcccgggagccccacctgaagatccccaagtgtgccgccaccacctgtgtgcagagcctgggccagggcaagagtgatgtggtgggcagcctggccctgcagagcgtgggggagtag

SEQ ID NO: 161844 - DNA, 189 bp, synthetic construct
  misc_feature 1..189: note = Description of Artificial Sequence: Synthetic coding sequence
  source 1..189: mol_type = other DNA
atggctgctgccctgcccaggaccctgggggagctgcagctgtaccgcatcctgcagaaggccaacctgctgagctactttgatgccttcatccagcagggcggagatgatgtgcagcagctgtgtgaggccggggaggaggagttcctggagatcatggccctggtgggcatggccagcaagccctag

SEQ ID NO: 161845 - DNA, 303 bp, synthetic construct
  misc_feature 1..303: note = Description of Artificial Sequence: Synthetic coding sequence
  source 1..303: mol_type = other DNA
atggctgctgccctgcccaggaccctgggggagctgcagctgtaccgcatcctgcagaaggccaacctgctgagctactttgatgccttcatccagcagggcggagatgatgtgcagcagctgtgtgaggccggggaggaggagttcctggagatcatggccctggtgggcatggccagcaagcccctgcacgtgcggcggctgcagaaggccctgcgggactgggtgaccaaccctggcctcttcaaccagcccctgaccagcctgcctgtgagcagcatccccatctacaagctgccctag

SEQ ID NO: 161846 - DNA, 723 bp, synthetic construct
  misc_feature 1..723: note = Description of Artificial Sequence: Synthetic coding sequence
  source 1..723: mol_type = other DNA
tgaaaggagctgctgaagaccaacaagaagctggccaagatgattggccacatctttgagatgaatgatgatgacccccacaaggaggaggagatcaggaagtacagcgccatctacggccgctttgacagcaagaggaaggatggcaagcacctgaccctgcacgagctgactgtgaatgaggccgccgcccagctgtgtgtgaaggacaatgccctgctgaccaggagagatgagctgtttgccctggcccggcagatcagccgggaggtgacctacaagtacacctaccgcaccaccaagagcaaatgtggggagagagatgagctgagccccaagaggatcaaggtggagcagcctgagaaggtgatggccaagcagatggagttcctgtgcaaccaggccggctatgagcggctgcagcacgccgagcggcggctgtctgctggcctgtaccggcagagcagcgaggagcacagccccaacggcctgaccagtgacaacagtgatggccagggcgagcggcccctgaacctgaggatgcccaacctgcagaaccggcagccccaccactttgtggtggatggagagctgagccggctgtaccccagcgaggccaagagccacagcagcgagagcctgggcatcctgaaggactacccccacagcgccttcaccctggagaagaaggtgatcaagacagagcctgaggacagcaggtag

SEQ ID NO: 161847 - DNA, 459 bp, synthetic construct
  misc_feature 1..459: note = Description of Artificial Sequence: Synthetic coding sequence
  source 1..459: mol_type = other DNA
atggctgctgccctgcccaggaccctgggggagctgcagctgtaccgcatcctgcagaaggccaacctgctgagctactttgatgccttcatccagcagggcggagatgatgtgcagcagctgtgtgaggccggggaggaggagttcctggagatcatggccctggtgggcatggccagcaagcccctgcacgtgcggcggctgcagaaggccctgcgggactgggtgaccaaccctggcctcttcaaccagcccctgaccagcctgcctgtgagcagcatccccatctacaagctgcctgagggcagccccacctggctgggcatcagctgcagcagctatgaaagaagcagcaatgcccgggagccccacctgaagatccccaagtgtgccgccaccacctgtgtgcagagcctgggccagggcaagagtgatgtggtgggcagcctggccctgtag

SEQ ID NO: 161848 - DNA, 684 bp, synthetic construct
  misc_feature 1..684: note = Description of Artificial Sequence: Synthetic coding sequence
  source 1..684: mol_type = other DNA
atgattggccacatctttgagatgaatgatgatgacccccacaaggaggaggagatcaggaagtacagcgccatctacggccgctttgacagcaagaggaaggatggcaagcacctgaccctgcacgagctgactgtgaatgaagctgctgcccagctgtgtgtgaaggacaatgccctgctgaccaggagagatgagctgtttgccctggcccggcagatcagccgggaggtgacctacaagtacacctaccgcaccaccaagagcaaatgtggggagagagatgagctgagccccaagaggatcaaggtggagcagcctgagaaggtgatggccaagcagatggagttcctgtgcaaccaggccggctatgaaaggctgcagcacgccgagcggcggctgtctgctggcctgtaccggcagagcagcgaggagcacagccccaacggcctgaccagtgacaacagtgatggccagggcgagcggcccctgaacctgaggatgcccaacctgcagaaccggcagccccaccactttgtggtggatggagagctgagccggctgtaccccagcgaggccaagagccacagcagcgagagcctgggcatcctgaaggactacccccacagcgccttcaccctggagaagaaggtgatcaagacagagcctgaggacagcaggtag

SEQ ID NO: 161849 - DNA, 1578 bp, synthetic construct
  misc_feature 1..1578: note = Description of Artificial Sequence: Synthetic coding sequence
  source 1..1578: mol_type = other DNA
atgcaccgggcccccagccccacagctgagcagcccccaggcggcggggacagcgcccggaggaccctgcagccccggctgaagcccagcgcccgggccatggccctgcccaggaccctgggggagctgcagctgtacagagtgctgcagagggccaacctgctgagctactatgagaccttcatccagcagggcggagatgatgtgcagcagctgtgtgaggccggggaggaggagttcctggagatcatggccctggtgggcatggccaccaagcccctgcacgtgcggcggctgcagaaggccctgcgggagtgggccaccaaccctggcctcttcagccagcctgtgcctgctgtgcctgtgagcagcatccccctcttcaagatcagcgagacagctggcaccaggaagggctccatgagcaatggacatggcagccctggagagaaggccggcagcgcccgctccttcagccccaagagccccctggagctgggggagaagctgagccccctgcccggcggccctggagctggggacccccgcatctggccaggccgcagcaccccagagagtgatgtgggcgccggcggggaggaggaggccggcagcccccccttcagccccccagctgggggcggcgtgcctgagggcaccggggccggcggcctggccgccggcggcaccggcggcggccctgaccggctggagcctgagatggtgaggatggtggtggagagcgtggagcgcatcttccgctccttccccagaggagatgctggggaggtgaccagcctgctgaagctgaacaagaagctggcccggtctgtgggccacatctttgagatggatgacaatgacagccagaaggaggaggagatcaggaagtacagcatcatctacggccgctttgacagcaagagaagagagggcaagcagctgagcctgcacgagctgaccatcaatgaagctgctgcccagttctgcatgagggacaacaccctgctgctgcggcgggtggagctgttcagcctgagccggcaggtggcccgggagagcacctacctgagcagcctgaagggcagccggctgcaccctgaggagctgggcggcccccccctgaagaagctgaagcaggaggtgggggagcagagccaccctgagatccagcagcccccacctggccctgagagctatgtgcccccctaccggcccagcctggaggaggacagcgccagcctgagcggggagagcctggatggccacctgcaggccgtgggcagctgcccccggctgaccccacctcctgctgacctgcccctggccctgcctgcccacggcctgtggagccgccacatcctgcagcagaccctgatggatgagggcctgcggctggcccggctggtgtcccatgacagagtgggccgcctgagcccctgtgtgcctgccaagccacccctggccgagtttgaggagggcctgctggaccgctgcccagcccctggcccccacccagccctggtggagggccgccgcagctctgtgaaggtggaggccgaggccagccggcagtag

SEQ ID NO: 161850 - DNA, 1386 bp, synthetic construct
  misc_feature 1..1386: note = Description of Artificial Sequence: Synthetic coding sequence
  source 1..1386: mol_type = other DNA
atgcaccgggcccccagccccacagctgagcagcccccaggcggcggggacagcgcccggaggaccctgcagccccggctgaagcccagcgcccgggccatggccctgcccaggaccctgggggagctgcagctgtacagagtgctgcagagggccaacctgctgagctactatgagaccttcatccagcagggcggagatgatgtgcagcagctgtgtgaggccggggaggaggagttcctggagatcatggccctggtgggcatggccaccaagcccctgcacgtgcggcggctgcagaaggccctgcgggagtgggccaccaaccctggcctcttcagccagcctgtgcctgctgtgcctgtgagcagcatccccctcttcaagatcagcgagacagctggcaccaggaagggctccatgagcaatggacatggcagccctggagagaaggccggcagcgcccgctccttcagccccaagagccccctggagctgggggagaagctgagccccctgcccggcggccctggagctggggacccccgcatctggccaggccgcagcaccccagagagtgatgtgggcgccggcggggaggaggaggccggcagcccccccttcagccccccagctgggggcggcgtgcctgagggcaccggggccggcggcctggccgccggcggcaccggcggcggccctgaccggctggagcctgagatggtgaggatggtggtggagagcgtggagcgcatcttccgctccttccccagaggagatgctggggaggtgaccagcctgctgaagctgaacaagaagctggcccggtctgtgggccacatctttgagatggatgacaatgacagccagaaggaggaggagatcaggaagtacagcatcatctacggccgctttgacagcaagagaagagagggcaagcagctgagcctgcacgagctgaccatcaatgaagctgctgcccagttctgcatgagggacaacaccctgctgctgcggcgggtggagctgttcagcctgagccggcaggtggcccgggagagcacctacctgagcagcctgaagggcagccggctgcaccctgaggagctgggcggcccccccctgaagaagctgaagcaggaggtgggggagcagagccaccctgagatccagcagcccccacctggccctgagagctatgtgcccccctaccggcccagcctggaggaggacagcgccagcctgagcggggagagcctggatggccacctgcaggagtttgaggagggcctgctggaccgctgcccagcccctggcccccacccagccctggtggagggccgccgcagctctgtgaaggtggaggccgaggccagccggcagtag

SEQ ID NO: 161851 - DNA, 969 bp, synthetic construct
  misc_feature 1..969: note = Description of Artificial Sequence: Synthetic coding sequence
  source 1..969: mol_type = other DNA
atgcaccgggcccccagccccacagctgagcagcccccaggcggcggggacagcgcccggaggaccctgcagccccggctgaagcccagcgcccgggccatggccctgcccaggaccctgggggagctgcagctgtacagagtgctgcagagggccaacctgctgagctactatgagaccttcatccagcagggcggagatgatgtgcagcagctgtgtgaggccggggaggaggagttcctggagatcatggccctggtgggcatggccaccaagcccctgcacgtgcggcggctgcagaaggccctgcgggagtgggccaccaaccctggcctcttcagccagcctgtgcctgctgtgcctgtgagcagcatccccctcttcaagatcagcgagacagctggcaccaggaagggctccatgagcaatggacatggcagccctggagagaaggccggcagcgcccgctccttcagccccaagagccccctggagctgggggagaagctgagccccctgcccggcggccctggagctggggacccccgcatctggccaggccgcagcaccccagagagtgatgtgggcgccggcggggaggaggaggccggcagcccccccttcagccccccagctgggggcggcgtgcctgagggcaccggggccggcggcctggccgccggcggcaccggcggcggccctgaccggctggagcctgagatggtgaggatggtggtggagagcgtggagcgcatcttccgctccttccccagaggagatgctggggaggtgaccagcctgctgaagctgaacaagaagctggcccggtctgtgggccacatctttgagatggatgacaatgacagccagaaggaggaggagatcaggaagtacagcatcatctacggccgctttgacagcaagagaagagagggcaagcagctgagcctgcacgaggccagcccctag

SEQ ID NO: 161852 - DNA, 723 bp, synthetic construct
  misc_feature 1..723: note = Description of Artificial Sequence: Synthetic coding sequence
  source 1..723: mol_type = other DNA
tgaagcggcagcgccagccctgctgtggccgagctgtgccagaacaccccagagaccttcctggaggccagcaagctgctgctgacctatgctgacaacatcctgaggaaccccaatgatgagaagtaccgcagcatccgcatcggcaacacagccttcagcacccggctgctgcctgtgagaggagctgtggagtgcctgtttgagatgggctttgaggagggggagacccacctgatcttccccaagaaggcctctgtggagcagctgcagaagatccgggacctgattgccatcgagaggagcagccggctggatggcagcaacaagagccacaaggtgaagagcagccagcagcctgctgccagcacccagctgcccaccacccccagcagcaaccccagcggcctgaaccagcacaccaggaaccggcagggccagagcagtgaccccccatctgccagcacagtggccgctgacagcgccatcctggaggtgctgcagagcaacatccagcacgtgctggtgtatgagaacccagccctgcaggagaaggccctggcctgcatccctgtgcaggagctgaagaggaagagccaggagaagctgagccgggccaggaagctggacaaggacatcatcaccctgaggaacttctggaagcaggatgtggatggagtggccagcggccccatcgtgctgcactgtgccgctgagctgtag

SEQ ID NO: 161853 - DNA, 1965 bp, synthetic construct
  misc_feature 1..1965: note = Description of Artificial Sequence: Synthetic coding sequence
  source 1..1965: mol_type = other DNA
atggctgctgctgccctgggcagcagcagcggcagcgccagccctgctgtggccgagctgtgccagaacaccccagagaccttcctggaggccagcaagctgctgctgacctatgctgacaacatcctgaggaaccccaatgatgagaagtaccgcagcatccgcatcggcaacacagccttcagcacccggctgctgcctgtgagaggagctgtggagtgcctgtttgagatgggctttgaggagggggagacccacctgatcttccccaagaaggcctctgtggagcagctgcagaagatccgggacctgattgccatcgagaggagcagccggctggatggcagcaacaagagccacaaggtgaagagcagccagcagcctgctgccagcacccagctgcccaccacccccagcagcaaccccagcggcctgaaccagcacaccaggaaccggcagggccagagcagtgaccccccatctgccagcacagtggccgctgacagcgccatcctggaggtgctgcagagcaacatccagcacgtgctggtgtatgagaacccagccctgcaggagaaggccctggcctgcatccctgtgcaggagctgaagaggaagagccaggagaagctgagccgggccaggaagctggacaagggcatcaacatcagtgatgaggacttcctgctgctggagctgctgcactggttcaaggaggagttcttccactgggtgaacaacgtgctgtgcagcaaatgtggcggccagaccaggagccgggacaggagcctgctgcccagtgatgatgagctgaagtggggcgccaaggaggtggaggaccactactgtgatgcctgccagttcagcaaccgcttcccccgctacaacaaccctgagaagctgctggagacccgctgtggccgctgtggggagtgggccaactgcttcaccctgtgctgcagagctgtgggctttgaggcccgctacgtgtgggactacacagaccacgtgtggacagaggtgtacagccccagccagcagcgctggctgcactgtgatgcctgtgaagatgtgtgtgacaagcccctgctgtatgaaattggctggggcaagaagctgtcctatgtgattgccttcagcaaggatgaggtggtggatgtgacctggagatacagctgcaagcatgaggaggtgattgcccggaggaccaaggtgaaggaggccctgctgcgggacaccatcaatggcctgaacaagcagaggcagctgttcctgtctgaaaatagaaggaaggagctgctgcagaggatcatcgtggagctggtggagttcatcagccccaagacccccaagccaggagagctgggcggccgcatcagcggctctgtggcctggagggtggcccggggggagatgggcctgcagaggaaggagaccctcttcatcccctgtgaaaatgagaagatcagcaagcagctgcacctgtgctacaacatcgtgaaggaccgctacgtgcgggtgagcaacaacaaccagaccatcagcggctgggagaatggagtgtggaagatggagagcatcttcaggaaggtggagacagactggcacatggtgtacctggccaggaaggagggcagcagctttgcctacatctcctggaagtttgaatgtggctctgtgggcctgaaggtggacagcatcagcatccgcaccagcagccagaccttccagacaggcaccgtggagtggaagctgcggagtgacacagcccaggtggagctgactggagacaacagcctgcacagctatgctgacttcagcggggccacagaggtgatcctggaggccgagctgagcagaggagatggagatgtggcctggcagcacacccagctgttccggcagagcctgaatgaccacgaggagaactgcctggagatcatcatcaagttcagtgacctgtag

SEQ ID NO: 161854 - DNA, 1902 bp, synthetic construct
  misc_feature 1..1902: note = Description of Artificial Sequence: Synthetic coding sequence
  source 1..1902: mol_type = other DNA
gctgccctgggcagcagcagcggcagcgccagccctgctgtggccgagctgtgccagaacaccccagagaccttcctggaggccagcaagctgctgctgacctacgccgacaacatcctgaggaaccccaatgatgagaagtaccgcagcatcagaattggcaacacagccttcagcacccggctgctgcctgtgagaggagctgtggagtgcctgtttgagatgggctttgaggagggggagacccacctgatcttccccaagaaggcctctgtggagcagctgcagaagatccgggacctgattgccatcgagaggagcagccggctggatggcagcaacaagagccacaaggtgaagagcagccagcagcctgctgccagcacccagctgcccaccacccccagcagcaaccccagcggcctgaaccagcacaccaggaaccggcagggccagagcagtgacccccccagcgccagcacagtggccgctgacagcgccatcctggaggtgctgcagagcaacatccagcacgtgctggtgtatgaaaatcctgccctgcaggagaaggccctggcctgcatccctgtgcaggagctgaagaggaagagccaggagaagctgagccgggccaggaagctggacaagggcatcaacatcagtgatgaggacttcctgctgctggagctgctgcactggttcaaggaggagttcttccactgggtgaacaacgtgctgtgcagcaaatgtggcggccagaccaggagccgggacaggagcctgctgcccagtgatgatgagctgaagtggggcgccaaggaggtggaggaccactactgtgatgcctgccagttcagcaaccgcttcccccgctacaacaaccctgagaagctgctggagacccgctgtggccgctgtggggagtgggccaactgcttcaccctgtgctgcagagctgtgggctttgaggcccgctacgtgtgggactacacagagctgcagaggaccctgagcctgaagctgaccaccctgaaggagatcggcaagaccttcctgcgcatcagcaagaggcagaagctgatccaggtggtggatgtgacctggagatacagctgcaagcatgaggaggtgattgcccggaggaccaaggtgaaggaggccctgctgcgggacaccatcaatggcctgaacaagcagaggcagctgttcctgtctgagaacagaaggaaggagctgctgcagaggatcatcgtggagctggtggagttcatcagccccaagacccccaagccaggagagctgggcggccgcatcagcggctctgtggcctggagggtggcccggggggagatgggcctgcagaggaaggagaccctcttcatcccctgtgaaaatgagaagatcagcaagcagctgcacctgtgctacaacatcgtgaaggacagatatgtgcgggtgagcaacaacaaccagaccatcagcggctgggagaatggagtgtggaagatggagagcatcttcaggaaggtggagacagactggcacatggtgtacctggccaggaaggagggcagcagctttgcctacatctcctggaagtttgaatgtggctctgtgggcctgaaggtggacagcatcagcatccgcaccagcagccagaccttccagacaggaacagtggagtggaagctgcggagtgacacagcccaggtggagctgaccggggacaacagcctgcacagctatgctgacttcagcggggccacagaggtgatcctggaggccgagctgagcagaggagatggagatgtggcctggcagcacacccagctgttccggcagagcctgaatgaccacgaggagaactgcctggagatcatcatcaagttcagtgacctgtag

SEQ ID NO: 161855 - DNA, 1677 bp, synthetic construct
  misc_feature 1..1677: note = Description of Artificial Sequence: Synthetic coding sequence
  source 1..1677: mol_type = other DNA
atggctgctgctgccctgggcagcagcagcggcagcgccagccctgctgtggccgagctgtgccagaacaccccagagaccttcctggaggccagcaagctgctgctgacctatgctgacaacatcctgaggaaccccaatgatgagaagtaccgcagcatccgcatcggcaacacagccttcagcacccggctgctgcctgtgagaggagctgtggagtgcctgtttgagatgggctttgaggagggggagacccacctgatcttccccaagaaggcctctgtggagcagctgcagaagatccgggacctgattgccatcgagaggagcagccggctggatggcagcaacaagagccacaaggtgaagagcagccagcagcctgctgccagcacccagctgcccaccacccccagcagcaaccccagcggcctgaaccagcacaccaggaaccggcagggccagagcagtgaccccccatctgccagcacagtggccgctgacagcgccatcctggaggtgctgcagagcaacatccagcacgtgctggtgtatgagaacccagccctgcaggagaaggccctggcctgcatccctgtgcaggagctgaagaggaagagccaggagaagctgagccgggccaggaagctggacaagggcatcaacatcagtgatgaggacttcctgctgctggagctgctgcactggttcaaggaggagttcttccactgggtgaacaacgtgctgtgcagcaaatgtggcggccagaccaggagccgggacaggagcctgctgcccagtgatgatgagctgaagtggggcgccaaggaggtggaggaccactactgtgatgcctgccagttcagcaaccgcttcccccgctacaacaaccctgagaagctgctggagacccgctgtggccgctgtggggagtgggccaactgcttcaccctgtgctgcagagctgtgggctttgaggcccgctacgtgtgggactacacagaccacgtgtggacagaggtgtacagccccagccagcagcgctggctgcactgtgatgcctgtgaagatgtgtgtgacaagcccctgctgtatgaaattggctggggcaagaagctgtcctatgtgattgccttcagcaaggatgaggtggtggatgtgacctggagatacagctgcaagcatgaggaggtgattgcccggaggaccaaggtgaaggaggccctgctgcgggacaccatcaatggcctgaacaagcagaggcagctgttcctgtctgaaaatagaaggaaggagctgctgcagaggatcatcgtggagctggtggagttcatcagccccaagacccccaagccaggagagctgggcggccgcatcagcggctctgtggcctggagggtggcccggggggagatgggcctgcagaggaaggagaccctcttcatcccctgtgaaaatgagaagatcagcaagcagctgcacctgtgctacaacatcgtgaaggaccgctacgtgcgggtgagcaacaacaaccagaccatcagcggctgggagaatggagtgtggaagatggagagcatcttcaggaaggtggagacagactggcacatgatcaccgtcttcacccccatgctgatcttcctggtgcccctgaagctgttctggaagcagaactag

SEQ ID NO: 161856 - DNA, 1839 bp, synthetic construct
  misc_feature 1..1839: note = Description of Artificial Sequence: Synthetic coding sequence
  source 1..1839: mol_type = other DNA
atgaggaaccccaatgatgagaagtaccgcagcatccgcatcggcaacacagccttcagcacccggctgctgcctgtgagaggagctgtggagtgcctgtttgagatgggctttgaggagggggagacccacctgatcttccccaagaaggcctctgtggagcagctgcagaagatccgggacctgattgccatcgagaggagcagccggctggatggcagcaacaagagccacaaggtgaagagcagccagcagcctgctgccagcacccagctgcccaccacccccagcagcaaccccagcggcctgaaccagcacaccaggaaccggcagggccagagcagtgaccccccatctgccagcacagtggccgctgacagcgccatcctggaggtgctgcagagcaacatccagcacgtgctggtgtatgagaacccagccctgcaggagaaggccctggcctgcatccctgtgcaggagctgaagaggaagagccaggagaagctgagccgggccaggaagctggacaagggcatcaacatcagtgatgaggacttcctgctgctggagctgctgcactggttcaaggaggagttcttccactgggtgaacaacgtgctgtgcagcaaatgtggcggccagaccaggagccgggacaggagcctgctgcccagtgatgatgagctgaagtggggcgccaaggaggtggaggaccactactgtgatgcctgccagttcagcaaccgcttcccccgctacaacaaccctgagaagctgctggagacccgctgtggccgctgtggggagtgggccaactgcttcaccctgtgctgcagagctgtgggctttgaggcccgctacgtgtgggactacacagaccacgtgtggacagaggtgtacagccccagccagcagcgctggctgcactgtgatgcctgtgaagatgtgtgtgacaagcccctgctgtatgaaattggctggggcaagaagctgtcctatgtgattgccttcagcaaggatgaggtggtggatgtgacctggagatacagctgcaagcatgaggaggtgattgcccggaggaccaaggtgaaggaggccctgctgcgggacaccatcaatggcctgaacaagcagaggcagctgttcctgtctgaaaatagaaggaaggagctgctgcagaggatcatcgtggagctggtggagttcatcagccccaagacccccaagccaggagagctgggcggccgcatcagcggctctgtggcctggagggtggcccggggggagatgggcctgcagaggaaggagaccctcttcatcccctgtgaaaatgagaagatcagcaagcagctgcacctgtgctacaacatcgtgaaggaccgctacgtgcgggtgagcaacaacaaccagaccatcagcggctgggagaatggagtgtggaagatggagagcatcttcaggaaggtggagacagactggcacatggtgtacctggccaggaaggagggcagcagctttgcctacatctcctggaagtttgaatgtggctctgtgggcctgaaggtggacagcatcagcatccgcaccagcagccagaccttccagacaggcaccgtggagtggaagctgcggagtgacacagcccaggtggagctgactggagacaacagcctgcacagctatgctgacttcagcggggccacagaggtgatcctggaggccgagctgagcagaggagatggagatgtggcctggcagcacacccagctgttccggcagagcctgaatgaccacgaggagaactgcctggagatcatcatcaagttcagtgacctgtag

SEQ ID NO: 161857 - DNA, 516 bp, synthetic construct
  misc_feature 1..516: note = Description of Artificial Sequence: Synthetic coding sequence
  source 1..516: mol_type = other DNA
atgggctttgaggagggggagacccacctgatcttccccaagaaggcctctgtggagcagctgcagaagatccgggacctgattgccatcgagaggagcagccggctggatggcagcaacaagagccacaaggtgaagagcagccagcagcctgctgccagcacccagctgcccaccacccccagcagcaaccccagcggcctgaaccagcacaccaggaaccggcagggccagagcagtgacccccccagcgccagcacagtggccgctgacagcgccatcctggaggtgctgcagagcaacatccagcacgtgctggtgtatgaaaatcctgccctgcaggagaaggccctggcctgcatccctgtgcaggagctgaagaggaagagccaggagaagctgagccgggccaggaagctggacaaggacatcatcaccctgaggaacttctggaagcaggatgtggatggagtggccagcggccccatcgtgctgcactgtgccgctgagctgtag

SEQ ID NO: 161858 - DNA, 1911 bp, synthetic construct
  misc_feature 1..1911: note = Description of Artificial Sequence: Synthetic coding sequence
  source 1..1911: mol_type = other DNA
atggctgctgctgccctgggcagcagcagcggcagcgccagccctgctgtggccgagctgtgccagaacaccccagagaccttcctggaggccagcaagctgctgctgacctatgctgacaacatcctgaggaaccccaatgatgagaagtaccgcagcatccgcatcggcaacacagccttcagcacccggctgctgcctgtgagaggagctgtggagtgcctgtttgagatgggctttgaggagggggagacccacctgatcttccccaagaaggcctctgtggagcagctgcagaagatccgggacctgattgccatcgagaggagcagccggctggatggcagcaacaagagccacaaggtgaagagcagccagcagcctgctgccagcacccagctgcccaccacccccagcagcaaccccagcggcctgaaccagcacaccaggaaccggcagggccagagcagtgaccccccatctgccagcacagtggccgctgacagcgccatcctggaggtgctgcagagcaacatccagcacgtgctggtgtatgagaacccagccctgcaggagaaggccctggcctgcatccctgtgcaggagctgaagaggaagagccaggagaagctgagccgggccaggaagctggacaagggcatcaacatcagtgatgaggacttcctgctgctggagctgctgcactggttcaaggaggagttcttccactgggtgaacaacgtgctgtgcagcaaatgtggcggccagaccaggagccgggacaggagcctgctgcccagtgatgatgagctgaagtggggcgccaaggaggtggaggaccactactgtgatgcctgccagttcagcaaccgcttcccccgctacaacaaccctgagaagctgctggagacccgctgtggccgctgtggggagtgggccaactgcttcaccctgtgctgcagagctgtgggctttgaggcccgctacgtgtgggactacacagagctgcagaggaccctgagcctgaagctgaccaccctgaaggagatcggcaagaccttcctgcgcatcagcaagaggcagaagctgatccaggtggtggatgtgacctggagatacagctgcaagcatgaggaggtgattgcccggaggaccaaggtgaaggaggccctgctgcgggacaccatcaatggcctgaacaagcagaggcagctgttcctgtctgaaaatagaaggaaggagctgctgcagaggatcatcgtggagctggtggagttcatcagccccaagacccccaagccaggagagctgggcggccgcatcagcggctctgtggcctggagggtggcccggggggagatgggcctgcagaggaaggagaccctcttcatcccctgtgaaaatgagaagatcagcaagcagctgcacctgtgctacaacatcgtgaaggaccgctacgtgcgggtgagcaacaacaaccagaccatcagcggctgggagaatggagtgtggaagatggagagcatcttcaggaaggtggagacagactggcacatggtgtacctggccaggaaggagggcagcagctttgcctacatctcctggaagtttgaatgtggctctgtgggcctgaaggtggacagcatcagcatccgcaccagcagccagaccttccagacaggcaccgtggagtggaagctgcggagtgacacagcccaggtggagctgactggagacaacagcctgcacagctatgctgacttcagcggggccacagaggtgatcctggaggccgagctgagcagaggagatggagatgtggcctggcagcacacccagctgttccggcagagcctgaatgaccacgaggagaactgcctggagatcatcatcaagttcagtgacctgtag

SEQ ID NO: 161859 - DNA, 1188 bp, synthetic construct
  misc_feature 1..1188: note = Description of Artificial Sequence: Synthetic coding sequence
  source 1..1188: mol_type = other DNA
atggctgctgaggccagcgagagcggccctgccctgcacgagctgatgagggaggccgagatcagcctgctggagtgcaaggtgtgctttgagaagtttggccaccggcagcagaggcggcccaggaacctgagctgtggccacgtggtgtgcctggcctgtgtggccgccctggcccaccccaggaccctggccctggagtgccccttctgccggcgggcctgccggggctgtgacaccagtgactgcctgcctgtgctgcacctgattgagctgctgggcagcgccctgcggcagagccctgctgcccaccgggccgcccccagcgcccctggggccctgacctgccaccacaccttcggcggctggggcaccctggtgaaccccaccggcctggccctgtgccccaagacaggccgggtggtggtggtgcatgatggaagaagaagagtgaagatctttgacagcggcggcggctgtgcccaccagtttggagagaagggagatgctgcccaggacatccgctaccctgtggatgtgaccatcaccaatgactgccacgtggtggtgacagatgctggggacaggagcatcaaggtgtttgacttcttcggccagatcaagctggtgattggaggccagttcagcctgccctggggcgtggagaccaccccccagaatggaattgtggtgacagatgctgaggccggcagcctgcacctgctggatgtggactttgctgagggcgtgctgcggaggacagagcggctgcaggcccacctgtgcaacccccggggcgtggccgtgtcctggctgactggagccatcgctgtgctggagcaccccctggccctgggcactggagtgtgcagcaccagggtgaaggtgttcagcagctccatgcagctggtgggccaggtggacaccttcggcctgagcctgtacttccccagcaagatcacagccagcgctgtgacctttgaccaccagggcaatgtcatcgtggccgacaccagcggccctgccatcctgtgcctgggcaagccagaggagttccctgtgcccaagcccatggtgacccacggcctgagccaccctgtggccctgaccttcaccaaggagaacagcctgctggtgctggacacagccagccacagcatcaaggtgtacaaggtggactggggctag

SEQ ID NO: 161860 - DNA, 903 bp, synthetic construct
  misc_feature 1..903: note = Description of Artificial Sequence: Synthetic coding sequence
  source 1..903: mol_type = other DNA
atggctgctgctgctggagatgctgatgatgagcccaggagcggccacagcagcagcgagggggagtgtgctgtggcccctgagcccctgacagatgctgagggcctcttctcctttgctgactttggcagcgccctgggcggcggcggggccggcctgagcggccgggccagcggcggggcccagagccccctgcgctacctgcacgtgctgtggcagcaggatgctgagcccagagatgagctgcgctgcaagatcccagctggccgcctgcggcgggccgcccggccccaccggcggctgggccccaccgggaaggaggtgcacgccctgaagaggctgcgggacagcgccaatgccaatgatgtggagaccgtgcagcagctgctggaggatggagctgacccctgtgccgcagatgacaagggccgcacagccctgcactttgccagctgcaatggaaatgaccagatcgtgcagctgctgctggaccatggagctgaccccaaccagagagatggcctgggcaacacccccctgcacctggccgcctgcaccaaccacgtgcctgtgatcaccaccctgctgcggggcggggcccgggtggatgccctggaccgggccggccgcacccccctgcacctggccaagagcaagctgaacatcctgcaggagggccacgcccagtgcctggaggccgtgcggctggaggtgaagcagatcatccacatgctgcgggagtacctggagcggctgggccagcacgagcagcgggagcggctggatgacctgtgcacccggctgcagatgaccagcaccaaggagcaggtggatgaggtgacagacctgctggccagcttcaccagcctgagcctgcagatgcagagcatggagaagaggtag

SEQ ID NO: 161861 - DNA, 387 bp, synthetic construct
  misc_feature 1..387: note = Description of Artificial Sequence: Synthetic coding sequence
  source 1..387: mol_type = other DNA
atgacagaagcagatgtgaaccccaaggcctaccccctggctgatgcccacctgaccaagaagctgctggacctggtgcagcagagctgcaactacaagcagctgaggaaaggagccaatgaggccaccaagaccctgaacagaggcatcagcgagttcatcgtgatggccgcagatgctgagcccctggagatcatcctgcacctgcccctgctgtgtgaggacaagaatgtgccctacgtgtttgtgcgcagcaagcaggccctgggccgggcctgtggggtgtccaggcctgtgattgcctgcagcgtgaccatcaaggagggcagccagctgaagcagcagatccagagcatccagcagagcattgagcggctgctggtgtag

SEQ ID NO: 161862 - DNA, 387 bp, synthetic construct; identical to SEQ ID NO: 161861
  misc_feature 1..387: note = Description of Artificial Sequence: Synthetic coding sequence
  source 1..387: mol_type = other DNA

SEQ ID NO: 161863 - DNA, 399 bp, synthetic construct
  misc_feature 1..399: note = Description of Artificial Sequence: Synthetic coding sequence
  source 1..399: mol_type = other DNA
atgctgctggtgcagacagaagcagatgtgaaccccaaggcctaccccctggctgatgcccacctgaccaagaagctgctggacctggtgcagcagagctgcaactacaagcagctgaggaaaggagccaatgaggccaccaagaccctgaacagaggcatcagcgagttcatcgtgatggccgcagatgctgagcccctggagatcatcctgcacctgcccctgctgtgtgaggacaagaatgtgccctacgtgtttgtgcgcagcaagcaggccctgggccgggcctgtggggtgtccaggcctgtgattgcctgcagcgtgaccatcaaggagggcagccagctgaagcagcagatccagagcatccagcagagcattgagcggctgctggtgtag

SEQ ID NO: 161864 - DNA, 2130 bp, synthetic construct
  misc_feature 1..2130: note = Description of Artificial Sequence: Synthetic coding sequence
  source 1..2130: mol_type = other DNA
atggccacagctgggggcggcagcggggctgaccccggcagccggggcctgctgcggctgctgtccttctgtgtgctgctggccggcctgtgccggggcaacagcgtggagaggaagatctacatccccctgaacaagacagccccctgtgtgcggctgctgaatgccacccaccagatcggctgccagagcagcatcagcggggacaccggggtcatccacgtggtggagaaggaggaggacctgcagtgggtgctgacagatggccccaaccccccctacatggtgctgctggagagcaagcacttcacccgggacctgatggagaagctgaagggccgcaccagcagaattgctggcctggccgtgtccctgaccaagcccagccctgccagcggcttcagccccagcgtgcagtgccccaatgatggctttggagtgtacagcaacagctatggccctgagtttgcccactgccgggagatccagtggaacagcctgggcaatggcctggcctatgaggacttctccttccccatcttcctgctggaggatgaaaatgagaccaaggtgatcaagcagtgctaccaggaccacaacctgagccagaatggcagcgcccccaccttccccctgtgtgccatgcagctgttcagccacatgcatgctgtgatcagcacagccacctgcatgaggaggagcagcatccagagcaccttcagcatcaaccctgagatcgtgtgtgaccccctgagtgactacaacgtgtggagcatgctgaagcccatcaacaccaccggcaccctgaagccagatgacagagtggtggtggccgccacccggctggacagccgctccttcttctggaatgtggcccctggagctgagagcgctgtggccagctttgtgacccagctggccgctgctgaggccctgcagaaggccccagatgtgaccaccctgcccagaaatgtgatgtttgtgttcttccagggcgagacctttgactacatcggcagcagcaggatggtgtatgacatggagaagggcaagtttcctgtgcagctggagaatgtggacagctttgtggagctgggccaggtggccctgcggaccagcctggagctgtggatgcacacagatcctgtgtcccagaagaatgaatctgtgaggaaccaggtggaggacctgctggccaccctggagaagagcggggccggcgtgcctgctgtgatcctgcggcggcccaaccagagccagcccctgccccccagcagcctgcagcgcttcctgcgggccaggaacatctctggagtggtgctggccgaccacagcggggccttccacaacaagtactaccagagcatctatgacacagctgagaacatcaacgtgtcctacccagagtggctgagccctgaggaggacctgaactttgtgacagacacagccaaggccctggctgatgtggccaccgtgctgggccgggccctgtatgagctggccggcggcaccaacttcagtgacacagtgcaggccgacccccagacagtgacccggctgctgtatggcttcctgatcaaggccaacaacagctggttccagagcatcctgcggcaggacctgcggagctacctgggagatggccccctgcagcactacatcgctgtgagcagccccaccaacaccacctacgtggtgcagtatgccctggccaacctgactggaacagtggtgaacctgacccgggagcagtgccaggaccccagcaaggtgcccagcgagaacaaggacctgtatgagtacagctgggtgcagggccccctgcacagcaatgaaacagaccggctgccccgctgtgtgcgcagcacagcccggctggcccgggccctgagccctgcctttgagctgagccagtggagcagcacagagtacagcacctggacagagagccgctggaaggacatccgggcccgcatcttcctgattgccagcaaggagctggagctgatcaccctgactgtgggcttcggcatcctgatcttcagcctgattgtgacctactgcatcaatgccaaggcagatgtgctcttcatcgccccccgggagcccggggctgtgtcctactag

SEQ ID NO: 161865 - DNA, 2070 bp, synthetic construct
  misc_feature 1..2070: note = Description of Artificial Sequence: Synthetic coding sequence
  source 1..2070: mol_type = other DNA
atggacttcaacctgatcctggagagcctgtgccggggcaacagcgtggagaggaagatctacatccccctgaacaagacagccccctgtgtgcggctgctgaatgccacccaccagatcggctgccagagcagcatcagcggggacaccggggtcatccacgtggtggagaaggaggaggacctgcagtgggtgctgacagatggccccaaccccccctacatggtgctgctggagagcaagcacttcacccgggacctgatggagaagctgaagggccgcaccagcagaattgctggcctggccgtgtccctgaccaagcccagccctgccagcggcttcagccccagcgtgcagtgccccaatgatggctttggagtgtacagcaacagctatggccctgagtttgcccactgccgggagatccagtggaacagcctgggcaatggcctggcctatgaggacttctccttccccatcttcctgctggaggatgaaaatgagaccaaggtgatcaagcagtgctaccaggaccacaacctgagccagaatggcagcgcccccaccttccccctgtgtgccatgcagctgttcagccacatgcatgctgtgatcagcacagccacctgcatgaggaggagcagcatccagagcaccttcagcatcaaccctgagatcgtgtgtgaccccctgagtgactacaacgtgtggagcatgctgaagcccatcaacaccaccggcaccctgaagccagatgacagagtggtggtggccgccacccggctggacagccgctccttcttctggaatgtggcccctggagctgagagcgctgtggccagctttgtgacccagctggccgctgctgaggccctgcagaaggccccagatgtgaccaccctgcccagaaatgtgatgtttgtgttcttccagggcgagacctttgactacatcggcagcagcaggatggtgtatgacatggagaagggcaagtttcctgtgcagctggagaatgtggacagctttgtggagctgggccaggtggccctgcggaccagcctggagctgtggatgcacacagatcctgtgtcccagaagaatgaatctgtgaggaaccaggtggaggacctgctggccaccctggagaagagcggggccggcgtgcctgctgtgatcctgcggcggcccaaccagagccagcccctgccccccagcagcctgcagcgcttcctgcgggccaggaacatctctggagtggtgctggccgaccacagcggggccttccacaacaagtactaccagagcatctatgacacagctgagaacatcaacgtgtcctacccagagtggctgagccctgaggaggacctgaactttgtgacagacacagccaaggccctggctgatgtggccaccgtgctgggccgggccctgtatgagctggccggcggcaccaacttcagtgacacagtgcaggccgacccccagacagtgacccggctgctgtatggcttcctgatcaaggccaacaacagctggttccagagcatcctgcggcaggacctgcggagctacctgggagatggccccctgcagcactacatcgctgtgagcagccccaccaacaccacctacgtggtgcagtatgccctggccaacctgactggaacagtggtgaacctgacccgggagcagtgccaggaccccagcaaggtgcccagcgagaacaaggacctgtatgagtacagctgggtgcagggccccctgcacagcaatgaaacagaccggctgccccgctgtgtgcgcagcacagcccggctggcccgggccctgagccctgcctttgagctgagccagtggagcagcacagagtacagcacctggacagagagccgctggaaggacatccgggcccgcatcttcctgattgccagcaaggagctggagctgatcaccctgactgtgggcttcggcatcctgatcttcagcctgattgtgacctactgcatcaatgccaaggcagatgtgctcttcatcgccccccgggagcccggggctgtgtcctactag

SEQ ID NO: 161866 - DNA, 1356 bp, synthetic construct
  misc_feature 1..1356: note = Description of Artificial Sequence: Synthetic coding sequence
  source 1..1356: mol_type = other DNA
atgctgaagcccatcaacaccaccggcaccctgaagccagatgacagagtggtggtggccgccacccggctggacagccgctccttcttctggaatgtggcccctggagctgagagcgctgtggccagctttgtgacccagctggccgctgctgaggccctgcagaaggccccagatgtgaccaccctgcccagaaatgtgatgtttgtgttcttccagggcgagacctttgactacatcggcagcagcaggatggtgtatgacatggagaagggcaagtttcctgtgcagctggagaatgtggacagctttgtggagctgggccaggtggccctgcggaccagcctggagctgtggatgcacacagatcctgtgtcccagaagaatgaatctgtgaggaaccaggtggaggacctgctggccaccctggagaagagcggggccggcgtgcctgctgtgatcctgcggcggcccaaccagagccagcccctgccccccagcagcctgcagcgcttcctgcgggccaggaacatctctggagtggtgctggccgaccacagcggggccttccacaacaagtactaccagagcatctatgacacagctgagaacatcaacgtgtcctacccagagtggctgagccctgaggaggacctgaactttgtgacagacacagccaaggccctggctgatgtggccaccgtgctgggccgggccctgtatgagctggccggcggcaccaacttcagtgacacagtgcaggccgacccccagacagtgacccggctgctgtatggcttcctgatcaaggccaacaacagctggttccagagcatcctgcggcaggacctgcggagctacctgggagatggccccctgcagcactacatcgctgtgagcagccccaccaacaccacctacgtggtgcagtatgccctggccaacctgactggaacagtggtgaacctgacccgggagcagtgccaggaccccagcaaggtgcccagcgagaacaaggacctgtatgagtacagctgggtgcagggccccctgcacagcaatgaaacagaccggctgccccgctgtgtgcgcagcacagcccggctggcccgggccctgagccctgcctttgagctgagccagtggagcagcacagagtacagcacctggacagagagccgctggaaggacatccgggcccgcatcttcctgattgccagcaaggagctggagctgatcaccctgactgtgggcttcggcatcctgatcttcagcctgattgtgacctactgcatcaatgccaaggcagatgtgctcttcatcgccccccgggagcccggggctgtgtcctactag

SEQ ID NO: 161867 - DNA, 918 bp, synthetic construct
  misc_feature 1..918: note = Description of Artificial Sequence: Synthetic coding sequence
  source 1..918: mol_type = other DNA
atgctgaagcccatcaacaccaccggcaccctgaagccagatgacagagtggtggtggccgccacccggctggacagccgctccttcttctggaatgtggcccctggagctgagagcgctgtggccagctttgtgacccagctggccgctgctgaggccctgcagaaggccccagatgtgaccaccctgcccagaaatgtgatgtttgtgttcttccagggcgtggccctgcggaccagcctggagctgtggatgcacacagatcctgtgtcccagaagaatgaatctgtgaggaaccaggtggaggacctgctggccaccctggagaagtctggagctggggtgcctgctgtgatcctgcggcggcccaaccagagccagcccctgccccccagcagcctgcagcgcttcctgcgggccaggaacatcagcggcgtggtgctggccgaccacagcggggccttccacaacaagtactaccagagcatctatgacacagctgagaacatcaacgtgtcctacccagagtggctgagccctgaggaggacctgaactttgtgacagacacagccaaggccctggctgatgtggccaccgtgctgggccgggccctgtatgagctggccggcggcaccaacttcagtgacacagtgcaggccgacccccagacagtgacccggctgctgtatggcttcctgatcaaggccaacaacagctggttccagagcatcctgcggcaggacctgcggagctacctgggagatggccccctgcagcactacatcgctgtgagcagccccaccaacaccacctacgtggtgcagtatgccctggccaacctgaccggcaccgtggtgaacctgacccgggagcagtgccaggaccccagcaaggtgcccagcgagaacaaggactag

SEQ ID NO: 161868 - DNA, 2070 bp, synthetic construct; identical to SEQ ID NO: 161865
  misc_feature 1..2070: note = Description of Artificial Sequence: Synthetic coding sequence
  source 1..2070: mol_type = other DNA

SEQ ID NO: 161869 - DNA, 768 bp, synthetic construct
  misc_feature 1..768: note = Description of Artificial Sequence: Synthetic coding sequence
  source 1..768: mol_type = other DNA
atggccacagctgggggcggcagcggggctgaccccggcagccggggcctgctgcggctgctgtccttctgtgtgctgctggccggcctgtgccggggcaacagcgtggagaggaagatctacatccccctgaacaagacagccccctgtgtgcggctgctgaatgccacccaccagatcggctgccagagcagcatcagcggggacaccggggtcatccacgtggtggagaaggaggaggacctgcagtgggtgctgacagatggccccaaccccccctacatggtgctgctggagagcaagcacttcacccgggacctgatggagaagctgaagggccgcaccagcagaattgctggcctggccgtgtccctgaccaagcccagccctgccagcggcttcagccccagcgtgcagtgccccaatgatggctttggagtgtacagcaacagctatggccctgagtttgcccactgccgggagatccagtggaacagcctgggcaatggcctggcctatgaggacttctccttccccatcttcctgctggaggatgaaaatgagaccaaggtgatcaagcaggagacctttgactacatcggcagcagcaggatggtgtatgacatggagaagggcaagtttcctgtgcagctggagaatgtggacagctttgtggagctgggccaggtggccctgcggaccagcctggagctgtggatgcacacagatcctgtgtcccagaagaatgaatctgtgaggaaccagtag

SEQ ID NO: 161870 - DNA, 963 bp, synthetic construct
  misc_feature 1..963: note = Description of Artificial Sequence: Synthetic coding sequence
  source 1..963: mol_type = other DNA
tgaggatttggagtgtacagcaacagctatggccctgagtttgcccactgccgggagatccagtggaacagcctgggcaatggcctggcctatgaggacttctccttccccatcttcctgctggaggatgaaaatgagaccaaggtgatcaagcagctgttcagccacatgcatgctgtgatcagcacagccacctgcatgaggaggagcagcatccagagcaccttcagcatcaaccctgagatcgtgtgtgaccccctgagtgactacaacgtgtggagcatgctgaagcccatcaacaccaccggcaccctgaagccagatgacagagtggtggtggccgccacccggctggacagccgctccttcttctggaatgtggcccctggagctgagagcgctgtggccagctttgtgacccagctggccgctgctgaggccctgcagaaggccccagatgtgaccaccctgcccagaaatgtgatgtttgtgttcttccagggcgagacctttgactacatcggcagcagcaggatggtgtatgacatggagaagggcaagtttcctgtgcagctggagaatgtggacagctttgtggagctgggccaggtggccctgcggaccagcctggagctgtggatgcacacagatcctgtgtcccagaagaatgaatctgtgaggaaccaggtggaggacctgctggccaccctggagaagagcggggccggcgtgcctgctgtgatcctgcggcggcccaaccagagccagcccctgccccccagcagcctgcagcgcttcctgcgggccaggaacatctctggagtggtgctggccgaccacagcggggccttccacaacaagtactaccagagcatctatgacacagctgagaacatcaacgtgtcctacccagagtggctgagccctgaggaggacctgaactttgtgacagacacagcctag

SEQ ID NO: 161871 - DNA, 660 bp, synthetic construct
  misc_feature 1..660: note = Description of Artificial Sequence: Synthetic coding sequence
  source 1..660: mol_type = other DNA
cgcagcagcatccagagcaccttcagcatcaaccctgagatcgtgtgtgaccccctgagtgactacaacgtgtggagcatgctgaagcccatcaacaccaccggcaccctgaagccagatgacagagtggtggtggccgccacccggctggccgctgctgaggccctgcagaaggccccagatgtgaccaccctgcccagaaatgtgatgtttgtgttcttccagggcgagacctttgactacatcggcagcagcaggatggtgtatgacatggagaagggcaagtttcctgtgcagctggagaatgtggacagctttgtggagctgggccaggtggccctgcggaccagcctggagctgtggatgcacacagatcctgtgtcccagaagaatgaatctgtgaggaaccaggtggaggacctgctggccaccctggagaagagcggggccggcgtgcctgctgtgatcctgcggcggcccaaccagagccagcccctgccccccagcagcctgcagcgcttcctgcgggccaggaacatctctggagtggtgctggccgaccacagcggggccttccacaacaagtactaccagagcatctatgacacagctgagaacatcaacgtgtcctacccagagtggctgagccctgaggagtag

SEQ ID NO: 161872 - DNA, 828 bp, synthetic construct
  misc_feature 1..828: note = Description of Artificial Sequence: Synthetic coding sequence
  source 1..828: mol_type = other DNA
tgaaatgtggcccctggagctgagagcgctgtggccagctttgtgacccagctggccgctgctgaggccctgcagaaggccccagatgtgaccaccctgcccagaaatgtgatgtttgtgttcttccagggcgtggccctgcggaccagcctggagctgtggatgcacacagatcctgtgtcccagaagaatgaatctgtgaggaaccaggtggaggacctgctggccaccctggagaagtctggagctggggtgcctgctgtgatcctgcggcggcccaaccagagccagcccctgccccccagcagcctgcagcgcttcctgcgggccaggaacatcagcggcgtggtgctggccgaccacagcggggccttccacaacaagtactaccagagcatctatgacacagctgagaacatcaacgtgtcctacccagagtggctgagccctgaggaggacctgaactttgtgacagacacagccaaggccctggctgatgtggccaccgtgctgggccgggccctgtatgagctggccggcggcaccaacttcagtgacacagtgcaggccgacccccagacagtgacccggctgctgtatggcttcctgatcaaggccaacaacagctggttccagagcatcctgcggcaggacctgcggagctacctgggagatggccccctgcagcactacatcgctgtgagcagccccaccaacaccacctacgtggtgcagtatgccctggccaacctgaccggcaccgtggtgaacctgacccgggagcagtgccaggaccccagcaaggtgcccagcgagaacaaggactag

SEQ ID NO: 161873 - DNA, 405 bp, synthetic construct
  misc_feature 1..405: note = Description of Artificial Sequence: Synthetic coding sequence
  source 1..405: mol_type = other DNA
atggccacagctgggggcggcagcggggctgaccccggcagccggggcctgctgcggctgctgtccttctgtgtgctgctggccggcctgtgccggggcaacagcgtggagaggaagatctacatccccctgaacaagacagccccctgtgtgcggctgctgaatgccacccaccagatcggctgccagagcagcatcagcggggacaccggggtcatccacgtggtggagaaggaggaggacctgcagtgggtgctgacagatggccccaaccccccctacatggtgctgctggagagcaagcacttcacccggcagaatgtgcggctgagtgacaccttcctgtgcagcttcatggagttcctgagctacagccgggacctgatggagaagctgaagggctag

SEQ ID NO: 161874 - DNA, 699 bp, synthetic construct
  misc_feature 1..699: note = Description of Artificial Sequence: Synthetic coding sequence
  source 1..699: mol_type = other DNA
atggccacagctgggggcggcagcggggctgaccccggcagccggggcctgctgcggctgctgtccttctgtgtgctgctggccggcctcttcctggactttgagccagaccccctgcccctgtgcccagatgtgtccttcttcccccagccccagccccccaccccccagagcaaaggaacaggcctgtgccggggcaacagcgtggagaggaagatctacatccccctgaacaagacagccccctgtgtgcggctgctgaatgccacccaccagatcggctgccagagcagcatcagcggggacacaggagtcatccacgtggtggagaaggaggaggacctgcagtgggtgctgacagatggccccaaccccccctacatggtgctgctggagagcaagcacttcacccgggacctgatggagaagctgaagggccgcaccagcagaattgctggcctggccgtgtccctgaccaagcccagccctgccagcggcttcagccccagcgtgcagtgccccaatgatggcttcggcgtgtacagcaacagctatggccctgagtttgcccactgccgggagatccagtggaacagcctgggcaatggcctggcctatgaggacttctccttccccatcttcctgctggaggatgaaaatgagaccaaggtgatcaagcagtgctaccaggaccactag

SEQ ID NO: 161875 - DNA, 1716 bp, synthetic construct
  misc_feature 1..1716: note = Description of Artificial Sequence: Synthetic coding sequence
  source 1..1716: mol_type = other DNA
atggccacagctgggggcggcagcggggctgaccccggcagccggggcctgctgcggctgctgtccttctgtgtgctgctggccggcctgtgccggggcaacagcgtggagaggaagatctacatccccctgaacaagacagccccctgtgtgcggctgctgaatgccacccaccagatcggctgccagagcagcatcagcggggacaccggggtcatccacgtggtggagaaggaggaggacctgcagtgggtgctgacagatggccccaaccccccctacatggtgctgctggagagcaagcacttcacccgggacctgatggagaagctgaagggccgcaccagcagaattgctggcctggccgtgtccctgaccaagcccagccctgccagcggcttcagccccagcgtgcagtgccccaatgatggctttggagtgtacagcaacagctatggccctgagtttgcccactgccgggagatccagtggaacagcctgggcaatggcctggcctatgaggacttctccttccccatcttcctgctggaggatgaaaatgagaccaaggtgatcaagcaggagacctttgactacatcggcagcagcaggatggtgtatgacatggagaagggcaagtttcctgtgcagctggagaatgtggacagctttgtggagctgggccaggtggccctgcggaccagcctggagctgtggatgcacacagatcctgtgtcccagaagaatgaatctgtgaggaaccaggtggaggacctgctggccaccctggagaagagcggggccggcgtgcctgctgtgatcctgcggcggcccaaccagagccagcccctgccccccagcagcctgcagcgcttcctgcgggccaggaacatctctggagtggtgctggccgaccacagcggggccttccacaacaagtactaccagagcatctatgacacagctgagaacatcaacgtgtcctacccagagtggctgagccctgaggaggacctgaactttgtgacagacacagccaaggccctggctgatgtggccaccgtgctgggccgggccctgtatgagctggccggcggcaccaacttcagtgacacagtgcaggccgacccccagacagtgacccggctgctgtatggcttcctgatcaaggccaacaacagctggttccagagcatcctgcggcaggacctgcggagctacctgggagatggccccctgcagcactacatcgctgtgagcagccccaccaacaccacctacgtggtgcagtatgccctggccaacctgactggaacagtggtgaacctgacccgggagcagtgccaggaccccagcaaggtgcccagcgagaacaaggacctgtatgagtacagctgggtgcagggccccctgcacagcaatgaaacagaccggctgccccgctgtgtgcgcagcacagcccggctggcccgggccctgagccctgcctttgagctgagccagtggagcagcacagagtacagcacctggacagagagccgctggaaggacatccgggcccgcatcttcctgattgccagcaaggagctggagctgatcaccctgactgtgggcttcggcatcctgatcttcagcctgattgtgacctactgcatcaatgccaaggcagatgtgctcttcatcgccccccgggagcccggggctgtgtcctactag

SEQ ID NO: 161876 - DNA, 642 bp, synthetic construct
  misc_feature 1..642: note = Description of Artificial Sequence: Synthetic coding sequence
  source 1..642: mol_type = other DNA
atgagccgggtgctggtgccctgccacgtgaagggctctgtggccctgcaggtgggagatgtgaggaccagccagggccggcctggggtgctggtgattgatgtgaccttccccagcgtggccccctttgagctgcaggagatcaccttcaagaactactacacagccttcctgagcatccgggtgcggcagtacaccagcgcccacaccccagccaagtgggtgacctgcctgcgggactactgcctgatgccagacccccacagcgaggagggcgcccaggagtatgtgtccctcttcaagcaccagatgctgtgtgacatggcccgcatcagcgagctgcggctcatcctgcggcagcccagccccctgtggctgtccttcaccgtggaggagctgcagatctaccagcagggccccaagagccccagcgtgaccttccccaagtggctgagccaccctgtgccctgtgagcagcctgccctgctgcgggagggcctgcctgaccccagccgggtgtcctctgaggtgcagcagatgtgggccctgacagagatgatccgggccagccacaccagcgcccgcatcggccgctttgatgtggatggctgctatgacctgaacctgctgagctacacctag

SEQ ID NO: 161877 - DNA, 642 bp, synthetic construct; identical to SEQ ID NO: 161876
  misc_feature 1..642: note = Description of Artificial Sequence: Synthetic coding sequence
  source 1..642: mol_type = other DNA

SEQ ID NO: 161878 - DNA, 528 bp, synthetic construct
  misc_feature 1..528: note = Description of Artificial Sequence: Synthetic coding sequence
  source 1..528: mol_type = other DNA
atgagccgggtgctggtgccctgccacgtgaagggctctgtggccctgcaggtgggagatgtgaggaccagccagggccggcctggggtgctggtgattgatgtgaccttccccagcgtggccccctttgagctgcaggagatcaccttcaagaactactacacagccttcctgagcatccgggtgcggcagtacaccagcgcccacaccccagccaagtgggtgacctgcctgcgggactactgcctgatgccagacccccacagcgaggagggcgcccaggagtatgtgtccctcttcaagcaccagagccccagcgtgaccttccccaagtggctgagccaccctgtgccctgtgagcagcctgccctgctgcgggagggcctgcctgaccccagccgggtgtcctctgaggtgcagcagatgtgggccctgacagagatgatccgggccagccacaccagcgcccgcatcggccgctttgatgtggatggctgctatgacctgaacctgctgagctacacctag

SEQ ID NO: 161879 - DNA, 795 bp, synthetic construct
  misc_feature 1..795: note = Description of Artificial Sequence: Synthetic coding sequence
  source 1..795: mol_type = other DNA
atggagagcggcttcaccagcaaggacacctacctgagccacttcaacccccgggactacctggagaagtactacaagtttggcagccgccacagcgctgagagccagatcctgaagcacctgctgaagaacctcttcaagatcttctgcctggatggagtgaagggggacctgctgattgacatcggcagcggccccaccatctaccagctgctgagcgcctgtgagagcttcaaggagatcgtggtgacagactacagcgaccagaacctgcaggagctggagaagtggctgaagaaggagcctgaggcctttgactggagccctgtggtgacctacgtgtgtgacctggagggcaacagagtgaagggccctgagaaggaggagaagctgcggcaggccgtgaagcaggtgctgaagtgtgatgtgacccagagccagcccctgggcgctgtgcccctgcccccagctgactgtgtgctgagcaccctgtgcctggatgctgcctgcccagacctgcccacctactgccgggccctgaggaacctgggcagcctgctgaagccaggcggcttcctggtgatcatggatgccctgaagagcagctactacatgattggagagcagaagttcagcagcctgcccctgggccgggaggccgtggaggccgctgtgaaggaggccggctacaccatcgagtggtttgaagtcatcagccagagctacagcagcaccatggccaacaatgaaggcctcttcagcctggtggccaggaagctgagccggcccctgtag

SEQ ID NO: 161880 - DNA, 795 bp, synthetic construct; identical to SEQ ID NO: 161879
  misc_feature 1..795: note = Description of Artificial Sequence: Synthetic coding sequence
  source 1..795: mol_type = other DNA

SEQ ID NO: 161881 - DNA, 759 bp, synthetic construct
  misc_feature 1..759: note = Description of Artificial Sequence: Synthetic coding sequence
  source 1..759: mol_type = other DNA
atgaagagccgcatccctgtggtgctgctggcctgtggcagcttcaaccccatcaccaacatgcacctgaggatgtttgaggtggcccgggaccacctgcaccagacaggcatgtaccaggtgatccagggcatcatcagccctgtgaatgacacctacggcaagaaggacctggccgccagccaccaccgggtggccatggcccggctggccctgcagaccagtgactggatccgggtggacccctgggagagcgagcaggcccagtggatggagaccgtgaaggtgctgcggcaccaccacagcaagctgctgcggagccccccccagatggagggccctgaccacggcaaggccctcttcagcaccccagctgctgtgcctgagctgaagctgctgtgtggggctgatgtgctgaagaccttccagacccccaacctgtggaaggatgcccacatccaggagatcgtggagaagtttggcctggtgtgtgtgggccgggtgggccatgaccccaagggctacatcgccgagagccccatcctgaggatgcaccagcacaacatccacctggccaaggagcctgtgcagaatgagatcagcgccacctacatccggcgggccctgggccagggccagagcgtgaagtacctgatcccagatgctgtgatcacctacatcaaggaccacggcctgtacaccaagggcagcacctggaagggcaagagcacccagagcacagagggcaagaccagctag

SEQ ID NO: 161882 - DNA, 648 bp, synthetic construct
  misc_feature 1..648: note = Description of Artificial Sequence: Synthetic coding sequence
  source 1..648: mol_type = other DNA
atgtaccaggtgatccagggcatcatcagccctgtgaatgacacctacggcaagaaggacctggccgccagccaccaccgggtggccatggcccggctggccctgcagaccagtgactggatccgggtggacccctgggagagcgagcaggcccagtggatggagaccgtgaaggtgctgcggcaccaccacagcaagctgctgcggagccccccccagatggagggccctgaccacggcaaggccctcttcagcaccccagctgctgtgcctgagctgaagctgctgtgtggggctgatgtgctgaagaccttccagacccccaacctgtggaaggatgcccacatccaggagatcgtggagaagtttggcctggtgtgtgtgggccgggtgggccatgaccccaagggctacatcgccgagagccccatcctgaggatgcaccagcacaacatccacctggccaaggagcctgtgcagaatgagatcagcgccacctacatcagaagagccctgggccagggccagagcgtgaagtacctgatcccagatgctgtgatcacctacatcaaggaccacggcctgtacaccaagggcagcacctggaagggcaagagcacccagagcacagagggcaagaccagctag

SEQ ID NO: 161883 - DNA, 648 bp, synthetic construct; identical to SEQ ID NO: 161882
  misc_feature 1..648: note = Description of Artificial Sequence: Synthetic coding sequence
  source 1..648: mol_type = other DNA

SEQ ID NO: 161884 - DNA, 429 bp, synthetic construct
  misc_feature 1..429: note = Description of Artificial Sequence: Synthetic coding sequence
  source 1..429: mol_type = other DNA
atggagggccctgaccacggcaaggccctcttcagcaccccagctgctgtgcctgagctgaagctgctgtgtggggctgatgtgctgaagaccttccagacccccaacctgtggaaggatgcccacatccaggagatcgtggagaagtttggcctggtgtgtgtgggccgggtgggccatgaccccaagggctacatcgccgagagccccatcctgaggatgcaccagcacaacatccacctggccaaggagcctgtgcagaatgagatcagcgccacctacatccggcgggccctgggccagggccagagcgtgaagtacctgatcccagatgctgtgatcacctacatcaaggaccacggcctgtacaccaagggcagcacctggaagggcaagagcacccagagcacagagggcaagaccagctag

SEQ ID NO: 161885 - DNA, 345 bp, synthetic construct
  misc_feature 1..345: note = Description of Artificial Sequence: Synthetic coding sequence
  source 1..345: mol_type = other DNA
atgaagagccgcatccctgtggtgctgctggcctgtggcagcttcaaccccatcaccaacatgcacctgaggatgtttgaggtggcccgggaccacctgcaccagacaggcatgtaccaggtgatccagggcatcatcagccctgtgaatgacacctacggcaagaaggacctggccgccagccaccaccgggtggccatggcccggctggccctgcagaccagtgactggatccgggtggacccctgggagagcgagcaggcccagtggatggagaccgtgaaggtgctgcggcaccaccacagcaagctgctgcggagccccccccagatggagggcccctag

SEQ ID NO: 161886 - DNA, 492 bp, synthetic construct
  misc_feature 1..492: note = Description of Artificial Sequence: Synthetic coding sequence
  source 1..492: mol_type = other DNA
atgaagagccgcatccctgtggtgctgctggcctgtggcagcttcaaccccatcaccaacatgcacctgaggatgtttgaggtggcccgggaccacctgcaccagacagctgtgcctgagctgaagctgctgtgtggggctgatgtgctgaagaccttccagacccccaacctgtggaaggatgcccacatccaggagatcgtggagaagtttggcctggtgtgtgtgggccgggtgggccatgaccccaagggctacatcgccgagagccccatcctgaggatgcaccagcacaacatccacctggccaaggagcctgtgcagaatgagatcagcgccacctacatcagaagagccctgggccagggccagagcgtgaagtacctgatcccagatgctgtgatcacctacatcaaggaccacggcctgtacaccaagggcagcacctggaagggcaagagcacccagagcacagagggcaagaccagctag

SEQ ID NO: 161887 - DNA, 3261 bp, synthetic construct
  misc_feature 1..3261: note = Description of Artificial Sequence: Synthetic coding sequence
  source 1..3261: mol_type = other DNA
atggccaacctgctgaagacagtggtgacaggctgcagctgccccctgctgagcaacctgggcagctgcaagggcctgcgggtgaagaaggacttcctgcggaccttctacacccaccaggagctgtggtgcaaggcccctgtgaagccaggcatcccctacaagcagctgactgtgggcgtgcccaaggagatcttccagaatgagaagagggtggccctgagccctgctggggtgcagaacctggtgaagcagggcttcaacgtggtggtggagagcggggccggggaggccagcaagttcagtgatgaccactacagagtggccggggcccagatccagggcgccaaggaggtgctggccagtgacctggtggtgaaggtgcgggcccccatggtgaaccccaccctgggcgtgcatgaggccgacctgctgaagaccagcggcaccctcatctccttcatctacccagcccagaaccctgagctgctgaacaagctgagccagaggaagaccaccgtgctggccatggaccaggtgccccgggtgaccatcgcccagggctatgatgccctgagctccatggccaacattgctggctacaaggctgtggtgctggccgccaaccacttcggccgcttcttcaccggccagatcacagctgctgggaaggtgcccccagccaagatcctgattgtgggcggcggcgtggccggcctggccagcgctggagctgccaagtccatgggcgccatcgtgcggggctttgacaccagggctgctgccctggagcagttcaagagcctgggcgctgagcccctggaggtggacctgaaggagagcggggagggccagggcggctacgccaaggagatgagcaaggagttcattgaagctgagatgaagctgtttgcccagcagtgcaaggaggtggacatcctgatcagcacagccctgatccctgggaagaaggcccctgtgctcttcaacaaggagatgattgagagcatgaaggagggctctgtggtggtggacctggccgctgaggccggcggcaactttgagaccaccaagccaggagagctgtacatccacaagggcatcacccacatcggctacacagacctgcccagcaggatggccacccaggccagcaccctgtacagcaacaacatcaccaagctgctgaaggccatcagcccagacaaggacaacttctactttgatgtgaaggatgactttgattttggcaccatgggccacgtgatccggggcaccgtggtgatgaaggatggcaaggtgatcttccctgcccccacccccaagaacatcccccagggcgcccctgtgaagcagaagacagtggccgagctggaggccgagaaggccgccaccatcacccccttcaggaagaccatgagcacagccagcgcctacacagctggcctgaccggcatcctgggcctgggcattgctgcccccaacctggccttcagccagatggtgaccaccttcggcctggccggcatcgtgggctaccacacagtgtggggcgtgaccccagccctgcacagccccctgatgtctgtgaccaatgccatcagcggcctgacagctgtgggcggcctggccctgatgggcggccacctgtaccccagcaccaccagccagggcctggccgccctggccgccttcatcagctctgtgaacattgctgggggcttcctggtgacccagaggatgctggacatgttcaagaggcccacagatcctcctgagtacaactacctgtacctgctgcctgctggcacctttgtgggcggctacctggccgccctgtacagcggctacaacatcgagcagatcatgtacctgggcagcggcctgtgctgcgtgggcgccctggccggcctgagcacccagggcacagcccggctgggcaatgccctgggcatgattggagtggccggcggcctggccgccaccctgggcgtgctgaagccaggccctgagctgctggcccagatgtctggggccatggccctgggcggcaccatcggcctgaccatcgccaagaggatccagatcagtgacctgccccagctggtggccgccttccacagcctggtgggcctggccgctgtgctgacctgcatcgccgagtacatcatcgagtacccccactttgccacagatgctgctgccaacctgaccaagatcgtggcctacctgggcacctacatcggcggcgtgaccttcagcggcagcctcatcgcctacggcaagctgcagggcctgctgaagagcgcccccctgctgctgcccggccgccacctgctgaatgccggcctgctggccgcctctgtgggcggcatcatccccttcatggtggaccccagcttcaccaccggcatcacctgcctgggctctgtgtctgccctgtctgctgtgatgggcgtgaccctgacagctgccatcggcggcgctgacatgcctgtggtgatcaccgtgctgaacagctacagcggctgggccctgtgtgccgagggcttcctgctgaacaacaacctgctgaccatcgtgggcgccctgattggcagcagcggggccatcctgagctacatcatgtgtgtggccatgaacagaagcctggccaacgtcatcctgggcggctacggcaccaccagcacagctgggggcaagcccatggagatcagcggcacccacacagagatcaacctggacaatgccatcgacatgatccgggaggccaacagcatcatcatcaccccaggctacggcctgtgtgccgccaaggcccagtaccccatcgctgacctggtgaagatgctgacagagcagggcaagaaggtgcgcttcggcatccaccctgtggccggccgcatgcctggccagctgaatgtgctgctggccgaggccggcgtgccctatgacatcgtgctggagatggatgagatcaaccacgacttcccagacacagacctggtgctggtgattggagccaatgacacagtgaacagcgctgcccaggaggaccccaacagcatcatcgccggcatgcctgtgctggaggtgtggaagagcaagcaggtgattgtgatgaagaggagcctgggcgtgggctacgccgctgtggacaaccccatcttctacaagcccaacacagccatgctgctgggagatgccaagaagacctgtgatgccctgcaggccaaggtgcgggagagctaccagaagtag

SEQ ID NO: 161888 - DNA, 3261 bp, synthetic construct; identical to SEQ ID NO: 161887
  misc_feature 1..3261: note = Description of Artificial Sequence: Synthetic coding sequence
  source 1..3261: mol_type = other DNA

SEQ ID NO: 161889 - DNA, 600 bp, synthetic construct
  misc_feature 1..600: note = Description of Artificial Sequence: Synthetic coding sequence
  source 1..600: mol_type = other DNA
atggccaacctgctgaagacagtggtgacaggctgcagctgccccctgctgagcaacctgggcagctgcaagggcctgcgggtgaagaaggacttcctgcggaccttctacacccaccaggagctgtggtgcaaggcccctgtgaagccaggcatcccctacaagcagctgactgtgggcgtgcccaaggagatcttccagaatgagaagagggtggccctgagccctgctggggtgcagaacctggtgaagcagggcttcaacgtggtggtggagagcggggccggggaggccagcaagttcagtgatgaccactacagagtggccggggcccagatccagggcgccaaggaggtgctggccagtgacctggtggtgaaggtgcgggcccccatggtgaaccccaccctgggcgtgcatgaggccgacctgctgaagaccagcggcaccctcatctccttcatctacccagcccagaaccctgagctgctgaacaagctgagccagaggaagaccaccgtgctggccatggaccaggtgccccgggtgaccatcgcccagggctatgatgccctgagctccatggccaacatcgcctag

SEQ ID NO: 161890 - DNA, 654 bp, synthetic construct
  misc_feature 1..654: note = Description of Artificial Sequence: Synthetic coding sequence
  source 1..654: mol_type = other DNA
atggccaacctgctgaagacagtggtgacaggctgcagctgccccctgctgagcaacctgggcagctgcaagggcctgcgggtgaagaaggacttcctgcggaccttctacacccaccaggagctgtggtgcaaggcccctgtgaagccaggcatcccctacaagcagctgactgtgggcgtgcccaaggagatcttccagaatgagaagagggtggccctgagccctgctggggtgcagaacctggtgaagcagggcttcaacgtggtggtggagagcggggccggggaggccagcaagttcagtgatgaccactacagagtggccggggcccagatccagggcgccaaggaggtgctggccagtgacctggtggtgaaggtgcgggcccccatggtgaaccccaccctgggcgtgcatgaggccgacctgctgaagaccagcggcaccctcatctccttcatctacccagcccagaaccctgagctgctgaacaagctgagccagaggaagaccaccgtgctggccatggaccaggtgccccgggtgaccatcgcccagggctatgatgccctgagctccatggccaacattgctggctacaaggctgtggtgctggccgccaaccacttcggccgcttcttcaccggctag

SEQ ID NO: 161891 - DNA, 1806 bp, synthetic construct
  misc_feature 1..1806: note = Description of Artificial Sequence: Synthetic coding sequence
  source 1..1806: mol_type = other DNA
atgctgtcctggaacagagtgcgggccaagctgcccagcagccagatggtgaccaccttcggcctggccggcatcgtgggctaccacacagtgtggggcgtgaccccagccctgcacagccccctgatgtctgtgaccaatgccatcagcggcctgacagctgtgggcggcctggccctgatgggcggccacctgtaccccagcaccaccagccagggcctggccgccctggccgccttcatcagctctgtgaacattgctgggggcttcctggtgacccagaggatgctggacatgttcaagaggcccacagaccccccagagtacaactacctgtacctgctgcctgctggcacctttgtgggcggctacctggccgccctgtacagcggctacaacatcgagcagatcatgtacctgggcagcggcctgtgctgcgtgggcgccctggccggcctgagcacccagggcacagcccggctgggcaatgccctgggcatgattggagtggccggcggcctggccgccaccctgggcgtgctgaagccaggccctgagctgctggcccagatgtctggggccatggccctgggcggcaccatcggcctgaccatcgccaagaggatccagatcagtgacctgccccagctggtggccgccttccacagcctggtgggcctggccgctgtgctgacctgcatcgccgagtacatcatcgagtacccccactttgccacagatgctgctgccaacctgaccaagatcgtggcctacctgggcacctacatcggcggcgtgaccttcagcggcagcctgattgcctacggcaagctgcagggcctgctgaagagcgcccccctgctgctgcccggccgccacctgctgaatgccggcctgctggccgcctctgtgggcggcatcatccccttcatggtggaccccagcttcaccaccggcatcacctgcctgggctctgtgtctgccctgtctgctgtgatgggcgtgaccctgacagctgccatcggcggcgctgacatgcctgtggtgatcaccgtgctgaacagctacagcggctgggccctgtgtgccgagggcttcctgctgaacaacaacctgctgaccatcgtgggcgccctgattggcagcagcggggccatcctgagctacatcatgtgtgtggccatgaacagaagcctggccaacgtcatcctgggcggctacggcaccaccagcacagctgggggcaagcccatggagatcagcggcacccacacagagatcaacctggacaatgccatcgacatgatccgggaggccaacagcatcatcatcaccccaggctacggcctgtgtgccgccaaggcccagtaccccatcgctgacctggtgaagatgctgacagagcagggcaagaaggtgcgcttcggcatccaccctgtggccggccgcatgcctggccagctgaatgtgctgctggccgaggccggcgtgccctatgacatcgtgctggagatggatgagatcaaccacgacttcccagacacagacctggtgctggtgattggagccaatgacacagtgaacagcgctgcccaggaggaccccaacagcatcatcgccggcatgcctgtgctggaggtgtggaagagcaagcaggtgattgtgatgaagaggagcctgggcgtgggctatgctgctgtggacaaccccatcttctacaagcccaacacagccatgctgctgggagatgccaagaagacctgtgatgccctgcaggccaaggtgcgggagagctaccagaagtag

SEQ ID NO: 161892 - DNA, 357 bp, synthetic construct
  misc_feature 1..357: note = Description of Artificial Sequence: Synthetic coding sequence
  source 1..357: mol_type = other DNA
atgaggcgggccggcctgggggagggcgtgcccccaggcaactacggcaactacggctacgccaacagcggctacagcgcctgtgaggaggagaatgaaaggctgacagagagcctgcggagcaaggtgacagccatcaagagcctgagcattgaaattggacatgaggtgaagacccagaacaagctgctggccgagatggacagccagtttgacagcaccaccggcttcctgggcaagaccatgggcaagctgaagatcctgagccggggcagccagaccaagctgctgtgctacatgatgctgttcagcctgtttgtgttcttcatcatctactggatcatcaagctgaggtag

SEQ ID NO: 161893 - DNA, 1107 bp, synthetic construct
  misc_feature 1..1107: note = Description of Artificial Sequence: Synthetic coding sequence
  source 1..1107: mol_type = other DNA
atgaacccagctgctgaggccgagttcaacatcctgctggccacagacagctacaaggtgacccactacaagcagtacccacccaacaccagcaaggtgtacagctactttgagtgccgggagaagaagacagagaacagcaagctgaggaaggtgaagtatgaggagaccgtcttctacggcctgcagtacatcctgaacaagtacctgaagggcaaggtggtgaccaaggagaagatccaggaggccaaggatgtgtacaaggagcacttccaggatgatgtgttcaatgagaagggctggaactacatcctggagaagtatgatggccacctgcccatcgagatcaaggctgtgcctgagggctttgtgatccccagaggaaatgtgctcttcaccgtggagaacacagatcctgagtgctactggctgaccaactggattgagaccatcctggtgcagagctggtaccccatcaccgtggccaccaacagccgggagcagaagaagatcctggccaagtacctgctggagaccagcggcaacctggatggcctggagtacaagctgcatgactttggctacagaggagtgagcagccaggagacagctggcatcggggccagcgcccacctggtgaacttcaagggcacagacacagtggccggcctggccctgatcaagaagtactacggcaccaaggaccctgtgcccggctacagcgtgcctgctgctgagcacagcaccatcacagcctggggcaaggaccacgagaaggatgcctttgagcacatcgtgacccagttcagctctgtgcctgtgtctgtggtgtctgacagctatgacatctacaatgcctgtgagaagatctggggcgaggacctgcggcacctgattgtgagccgcagcacccaggcccccctcatcatccggccagacagcggcaaccccctggacacagtgctgaaggtgctggagatcctgggcaagaagtttcctgtgacagagaacagcaagggctacaagctgctgcccccctacctgcgggtcatccagggagatggagtggacatcaacaccctgcaggaggtgtgtgtgctgtactag

SEQ ID NO: 161894 - DNA, 183 bp, synthetic construct
  misc_feature 1..183: note = Description of Artificial Sequence: Synthetic coding sequence
  source 1..183: mol_type = other DNA
atgaacccagctgctgaggccgagttcaacatcctgctggccacagacagctacaaggtgacccactacaagcagtacccacccaacaccagcaaggtgtacagctactttgagtgccgggagaagaagacagagaacagcaagctgaggaaggtgaagtatgaggagaccgtcttctactag

SEQ ID NO: 161895 - DNA, 267 bp, synthetic construct
  misc_feature 1..267: note = Description of Artificial Sequence: Synthetic coding sequence
  source 1..267: mol_type = other DNA
atgaacccagctgctgaggccgagttcaacatcctgctggccacagacagctacaaggtgacccactacaagcagtacccacccaacaccagcaaggtgtacagctactttgagtgccgggagaagaagacagagaacagcaagctgaggaaggtgaagtatgaggagaccgtcttctacggcctgcagtacatcctgaacaagtacctgaagggcaaggtggtgaccaaggagaagatccaggaggccaaggatgtgtacaagtag

SEQ ID NO: 161896 - DNA, 1701 bp, synthetic construct
  misc_feature 1..1701: note = Description of Artificial Sequence: Synthetic coding sequence
  source 1..1701: mol_type = other DNA
atggctgctgagcaggaccctgaggcccgggccgccgcccggcccctgctgacagacctgtaccaggccaccatggccctgggctactggagggctggccgggccagagatgctgctgagtttgagctgttcttccgccgctgcccctttggaggagcctttgccctggccgccggcctgcgggactgtgtgcgcttcctgcgggccttccggctgagagatgctgatgtgcagttcctggcctctgtgctgcccccagacacagatcctgccttctttgagcacctgcgggccctggactgcagcgaggtgacagtgcgggccctgcctgagggcagcctggccttccctggggtgcccctgctgcaggtgtctggccccctgctggtggtgcagctgctggagacccccctgctgtgcctggtgtcctatgccagcctggtggccaccaatgctgcccggctgcggctgattgctggccctgagaagaggctgctggagatgggcctgcggcgggcccagggcccagatggcggcctgacagccagcacctacagctacctgggcggctttgacagcagcagcaatgtgctggccggccagctgcggggcgtgcctgtggccggcaccctggcccacagctttgtgaccagcttcagcggcagcgaggtgcccccagaccccatgctggccccagctgctggggagggccctggggtggacctggccgccaaggcccaggtgtggctggagcaggtgtgtgcccacctgggcctgggcgtgcaggagccccaccctggagagcgggccgcctttgtggcctatgccctggccttcccccgggccttccagggcctgctggacacctacagcgtgtggaggagcggcctgcccaacttcctggccgtggccctggccctgggggagctgggctacagagctgtgggcgtgcggctggacagcggggacctgctgcagcaggcccaggagatcaggaaggtgttccgggctgctgctgcccagttccaggtgccctggctggagagcgtgctgattgtggtgagcaacaacattgatgaggaggccctggcccggctggcccaggagggcagcgaggtgaatgtcatcggcatcggcacctctgtggtgacctgcccccagcagcccagcctgggcggcgtgtacaagctggtggccgtgggcggccagcccaggatgaagctgacagaggaccctgagaagcagaccctgcccggcagcaaggccgccttccggctgctgggcagtgatggcagccccctgatggacatgctgcagctggccgaggagcctgtgccccaggccggccaggagctgcgggtgtggcccccaggggcccaggagccctgcaccgtgcggcctgcccaggtggagcccctgctgcggctgtgcctgcagcagggccagctgtgtgagcccctgcccagcctggccgagagccgggccctggcccagctgagcctgagccggctgagccctgagcaccggcggctgcggagccctgcccagtaccaggtgggcggcggccccccctgccacagcgccctgtgtgccccagccctgaccctgcccacagcccctgtgctgtgcagcctgcaggtggtgctgtctgagcggctgcaggccctggtgaacagcctgtgtgccggccagagcccctag

SEQ ID NO: 161897 - DNA, 1578 bp, synthetic construct
  misc_feature 1..1578: note = Description of Artificial Sequence: Synthetic coding sequence
  source 1..1578: mol_type = other DNA
atggctgctgagcaggaccctgaggcccgggccgccgcccggcccctgctgacagacctgtaccaggccaccatggccctgggctactggagggctggccgggccagagatgctgctgagtttgagctgttcttccgccgctgcccctttggaggagcctttgccctggccgccggcctgcgggactgtgtgcgcttcctgcgggccttccggctgagagatgctgatgtgcagttcctggcctctgtgctgcccccagacacagatcctgccttctttgagcacctgcgggccctggactgcagcgaggtgacagtgcgggccctgcctgagggcagcctggccttccctggggtgcccctgctgcaggtgtctggccccctgctggtggtgcagctgctggagacccccctgctgtgcctggtgtcctatgccagcctggtggccaccaatgctgcccggctgcggctgattgctggccctgagaagaggctgctggagatgggcctgcggcgggcccagggcccagatggcggcctgacagccagcacctacagctacctgggcggctttgacagcagcagcaatgtgctggccggccagctgcggggcgtgcctgtggccggcaccctggcccacagctttgtgaccagcttcagcggcagcgaggtgcccccagaccccatgctggccccagctgctggggagggccctggggtggacctggccgccaaggcccaggtgtggctggagcaggtgtgtgcccacctgggcctgggcgtgcaggagccccaccctggagagcgggccgcctttgtggcctatgccctggccttcccccgggccttccagggcctgctggacacctacagcgtgtggaggagcggcctgcccaacttcctggccgtggccctggccctgggggagctgggctacagagctgtgggcgtgcggctggacagcggggacctgctgcagcaggcccaggagatcaggaaggtgttccgggctgctgctgcccagttccaggtgccctggctggagagcgtgctgattgtggtgagcaacaacattgatgaggaggccctggcccggctggcccaggagggcagcgaggtgaatgtcatcggcatcggcacctctgtggtgacctgcccccagcagcccagcctgggcggcgtgtacaagctggtggccgtgggcggccagcccaggatgaagctgacagaggaccctgagaagcagaccctgcccggcagcaaggccgccttccggctgctgggcagtgatggcagccccctgatggacatgctgcagctggccgaggagcctgtgccccaggccggccaggagctgcgggtgtggcccccaggggcccaggagccctgcaccgtgcggcctgcccagctgtgtgagcccctgcccagcctggccgagagccgggccctggcccagctgagcctgagccggctgagccctgagcaccggcggctgcggagccctgcccagtaccaggtggtgctgtctgagcggctgcaggccctggtgaacagcctgtgtgccggccagagcccctag

SEQ ID NO: 161898 - DNA, 1473 bp, synthetic construct
  misc_feature 1..1473: note = Description of Artificial Sequence: Synthetic coding sequence
  source 1..1473: mol_type = other DNA
atggctgctgagcaggaccctgaggcccgggccgccgcccggcccctgctgacagacctgtaccaggccaccatggccctgggctactggagggctggccgggccagagatgctgctgagtttgagctgttcttccgccgctgcccctttggaggagcctttgccctggccgccggcctgcgggactgtgtgcgcttcctgcgggccttccggctgagagatgctgatgtgcagttcctggcctctgtgctgcccccagacacagatcctgccttctttgagcacctgcgggccctggactgcagcgaggtgacagtgcgggccctgcctgagggcagcctggccttccctggggtgcccctgctgcaggtgtctggccccctgctggtggtgcagctgctggagacccccctgctgtgcctggtgtcctatgccagcctggtggccaccaatgctgcccggctgcggctgattgctggccctgagaagaggctgctggagatgggcctgcggcgggcccagggcccagatggcggcctgacagccagcacctacagctacctgggcggctttgacagcagcagcaatgtgctggccggccagctgcggggcgtgcctgtggccggcaccctggcccacagctttgtgaccagcttcagcggcagcgaggtgcccccagaccccatgctggccccagctgctggggagggccctggggtggacctggccgccaaggcccaggtgtggctggagcaggtgtgtgcccacctgggcctgggcgtgcaggagccccaccctggagagcgggccgcctttgtggcctatgccctggccttcccccgggccttccagggcctgctggacacctacagcgtgtggaggagcggcctgcccaacttcctggccgtggccctggccctgggggagctgggctacagagctgtgggcgtgcggctggacagcggggacctgctgcagcaggcccaggagatcaggaaggtgttccgggctgctgctgcccagttccaggtgccctggctggagagcgtgctgattgtggtgagcaacaacattgatgaggaggccctggcccggctggcccaggagggcagcgaggtgaatgtcatcggcatcggcacctctgtggtgacctgcccccagcagcccagcctgggcggcgtgtacaagctggtggccgtgggcggccagcccaggatgaagctgacagaggaccctgagaagcagaccctgcccggcagcaaggccgccttccggctgctgggcagtgatggcagccccctgatggacatgctgcagctggccgaggagcctgtgccccaggccggccaggagctgcgggtgtggcccccaggggcccaggagccctgcaccgtgcggcctgcccaggtggagcccctgctgcggctgtgcctgcagcagggccaggtggccgcccccccacccagcagctag

SEQ ID NO: 161899 - DNA, 1617 bp, synthetic construct
  misc_feature 1..1617: note = Description of Artificial Sequence: Synthetic coding sequence
  source 1..1617: mol_type = other DNA
atggctgctgagcaggaccctgaggcccgggccgccgcccggcccctgctgacagacctgtaccaggccaccatggccctgggctactggagggctggccgggccagagatgctgctgagtttgagctgttcttccgccgctgcccctttggaggagcctttgccctggccgccggcctgcgggactgtgtgcgcttcctgcgggccttccggctgagagatgctgatgtgcagttcctggcctctgtgctgcccccagacacagatcctgccttctttgagcacctgcgggccctggactgcagcgaggtgacagtgcgggccctgcctgagggcagcctggccttccctggggtgcccctgctgcaggtgtctggccccctgctggtggtgcagctgctggagacccccctgctgtgcctggtgtcctatgccagcctggtggccaccaatgctgcccggctgcggctgattgctggccctgagaagaggctgctggagatgggcctgcggcgggcccagggcccagatggcggcctgacagccagcacctacagctacctgggcggctttgacagcagcagcaatgtgctggccggccagctgcggggcgtgcctgtggccggcaccctggcccacagctttgtgaccagcttcagcggcagcgaggtgcccccagaccccatgctggccccagctgctggggagggccctggggtggacctggccgccaaggcccaggtgtggctggagcaggtgtgtgcccacctgggcctgggcgtgcaggagccccaccctggagagcgggccgcctttgtggcctatgccctggccttcccccgggccttccagggcctgctggacacctacagcgtgtggaggagcggcctgcccaacttcctggccgtggccctggccctgggggagctgggctacagagctgtgggcgtgcggctggacagcggggacctgctgcagcaggcccaggagatcaggaaggtgttccgggctgctgctgcccagttccaggtgccctggctggagagcgtgctgattgtggtgagcaacaacattgatgaggaggccctggcccggctggcccaggagggcagcgaggtgaatgtcatcggcatcggcacctctgtggtgacctgcccccagcagcccagcctgggcggcgtgtacaagctggtggccgtgggcggccagcccaggatgaagctgacagaggaccctgagaagcagaccctgcccggcagcaaggccgccttccggctgctgggcagtgatggcagccccctgatggacatgctgcagctggccgaggagcctgtgccccaggccggccaggagctgcgggtgtggcccccaggggcccaggagccctgcaccgtgcggcctgcccaggtggagcccctgctgcggctgtgcctgcagcagggccagctgtgtgagcccctgcccagcctggccgagagccgggccctggcccagctgagcctgagccggctgagccctgagcaccggcggctgcggagccctgcccagtaccaggtggtgctgtctgagcggctgcaggccctggtgaacagcctgtgtgccggccagagcccctag

SEQ ID NO: 161900 - DNA, 2199 bp, synthetic construct
  misc_feature 1..2199: note = Description of Artificial Sequence: Synthetic coding sequence
  source 1..2199: mol_type = other DNA
atgcctgaggagacccagacccaggaccagcccatggaggaggaggaggtggagacctttgccttccaggccgagatcgcccagctgatgagcctcatcatcaacaccttctacagcaacaaggagatcttcctgcgggagctgatcagcaacagcagtgatgccctggacaagatccgctatgagagcctgacagaccccagcaagctggacagcggcaaggagctgcacatcaacctgatccccaacaagcaggacaggaccctgaccatcgtggacaccggcatcggcatgaccaaggctgacctgatcaacaacctgggcaccatcgccaagagcggcaccaaggccttcatggaggccctgcaggccggggctgacatctccatgattggccagtttggagtgggcttctacagcgcctacctggtggccgagaaggtgaccgtcatcaccaagcacaatgatgatgagcagtatgcctgggagagcagcgctgggggcagcttcaccgtgaggacagacaccggggagcccatgggccggggcaccaaggtgatcctgcacctgaaggaggaccagacagagtacctggaggagcggcgcatcaaggagatcgtgaagaagcacagccagttcatcggctaccccatcaccctgtttgtggagaaggagcgggacaaggaggtgtctgatgatgaagctgaggagaaggaggacaaggaggaggagaaggagaaggaggagaaggagagcgaggacaagccagaaattgaagatgtgggcagtgatgaggaggaggagaagaaggatggagacaagaagaagaagaagaagatcaaggagaagtacatcgaccaggaggagctgaacaagaccaagcccatctggaccagaaatccagatgacatcaccaatgaggagtatggagagttctacaagagcctgaccaatgactgggaggaccacctggccgtgaagcacttctctgtggagggccagctggagttccgggccctgctgtttgtgccccggcgggccccctttgacctgtttgaaaataggaagaagaagaacaacatcaagctgtatgtgcggcgggtcttcatcatggacaactgtgaggagctgatccctgagtacctgaacttcatccggggcgtggtggacagcgaggacctgcccctgaacatcagccgggagatgctgcagcagagcaagatcctgaaggtgatcaggaagaacctggtgaagaagtgcctggagctgttcacagagctggccgaggacaaggagaactacaagaagttctatgagcagttcagcaagaacatcaagctgggcatccacgaggacagccagaacaggaagaagctgtctgagctgctgcgctactacaccagcgccagcggagatgagatggtgtccctgaaggactactgcaccaggatgaaggagaaccagaagcacatctactacatcactggagagaccaaggaccaggtggccaacagcgcctttgtggagcggctgaggaagcacggcctggaggtgatctacatgattgagcccattgatgagtactgtgtgcagcagctgaaggagtttgagggcaagaccctggtgtctgtgaccaaggagggcctggagctgcctgaagatgaggaggagaagaagaagcaggaggagaagaagaccaagtttgagaacctgtgcaagatcatgaaggacatcctggagaagaaggtggagaaggtggtggtgagcaaccggctggtgaccagcccctgctgcatcgtgaccagcacctacggctggacagccaacatggagcgcatcatgaaggcccaggccctgcgggacaacagcaccatgggctacatggccgccaagaagcacctggagatcaacccagaccacagcatcatcgagaccctgcggcagaaggccgaggccgacaagaatgacaagtctgtgaaggacctggtgatcctgctgtatgaaacagccctgctgagcagcggcttcagcctggaggacccccagacccacgccaaccgcatctacaggatgatcaagctgggcctgggcattgatgaagatgaccccacagcagatgacaccagcgctgctgtgacagaggagatgccacccctggagggagatgatgacaccagcaggatggaggaggtggactag

SEQ ID NO: 161901 - DNA, 2910 bp, synthetic construct
  misc_feature 1..2910: note = Description of Artificial Sequence: Synthetic coding sequence
  source 1..2910: mol_type = other DNA
atggagggggacagagtggccggccggcctgtgctgagcagcctgcctgtgctgctgctgctgcccctgctgatgctgcgggctgctgccctgcacccagatgagctgttcccccatggagagagctggggagaccagctgctgcaggagggagatgatgagagcagcgctgtggtgaagctggccaaccccctgcacttctatgaggcccgcttcagcaacctgtatgtgggcaccaacggcatcatcagcacccaggacttcccccgggagacccagtatgtggactatgacttccccacagacttccctgccatcgcccccttcctggccgacatcgacaccagccacggccggggccgggtgctgtacagagtgaatggcaaggtgtctggccacctgcacgtgggccacacccctgtgcacttcacagatgtggacctgcacgcctacatcgtgggcaatgatggccgggcctacacagccatcagccacatcccccagcctgctgcccaggccctgctgcccctgacccccatcggcggcctgtttggctggctgtttgccctggagaagccaggctctgaaaatggcttcagcctggccggggccgccttcacccatgacatggaggtgaccttctacccaggagaggagaccgtgcgcatcacccagacagctgagggcctggaccctgagaactacctgagcatcaagaccaacatccagggccaggtgccctacgtgtctgccaacttcaccgcccacatcagcccctacaaggagctgtaccactacagcgacagcacagtgaccagcaccagcagccgggactacagcctgacctttggagccatcaaccagacctggagctaccgcatccaccagaacatcacctaccaggtgtgcagacatgcccccaggcaccccagcttccccaccacccagcagctgaatgtggacagagtgtttgccctgtacaatgatgaggagcgggtgctgcgctttgctgtgaccaaccagatcggccctgtgaaggaggacagcgaccccaccccaggcaacccctgctatgatggcagccacatgtgtgacaccacagcccgctgccaccctggcaccggggtggactacacctgtgaatgtgccagcggctaccagggagatggaagaaactgtgtggatgaaaatgaatgtgccaccggcttccaccgctgtggccccaacagcgtgtgcatcaacctgcccggcagctaccgctgtgagtgccgcagcggctatgaatttgctgatgacagacacacctgcatcctgatcaccccaccagccaacccctgtgaagatggcagccacacctgtgccccagctggccaggcccgctgtgtgcaccacggcggcagcaccttcagctgtgcctgcctgcccggctatgctggagatggccaccagtgcacagatgtggatgaatgttctgagaaccgctgccaccctgctgccacctgctacaacaccccaggcagcttcagctgccgctgccagcccggctactatggagatggcttccagtgcatcccagacagcaccagcagcctgaccccctgtgagcagcagcagagacatgcccaggcccagtatgcctacccaggggcccgcttccacatcccccagtgtgatgagcagggcaacttcctgcccctgcagtgccacggcagcacaggcttctgctggtgtgtggaccctgatggccacgaggtgcccggcacccagaccccacctggcagcaccccaccccactgcggccccagccctgagcccacccagaggcctcccaccatctgtgagcgctggagggagaacctgctggagcactacggcggcaccccaagagatgaccagtatgtgccccagtgtgatgacctgggccacttcatccccctgcagtgccacggcaagagtgacttctgctggtgtgtggacaaggatggccgggaggtgcagggcaccaggagccagcccggcaccaccccagcctgcatccccaccgtggccccacccatggtgcggcccacccccaggccagatgtgaccccaccttctgtgggcaccttcctgctgtacacccagggccagcagatcggctacctgcccctgaatggcacccggctgcagaaggatgctgccaagaccctgctgagcctgcacggcagcatcatcgtgggcattgattatgactgccgggagaggatggtgtactggacagatgtggccggccgcaccatcagcagagctggcctggagctgggcgctgagcctgagaccatcgtgaacagcggcctcatcagccctgagggcctggccatcgaccacatccggaggaccatgtactggacagattctgtgctggacaagattgagagcgccctgctggatggcagcgagaggaaggtgctcttctacacagacctggtgaacccccgggccatcgctgtggaccccatccggggcaacctgtactggacagactggaaccgggaggcccccaagattgagaccagcagcctggatggagaaaatcgccgcatcctgatcaacacagacatcggcctgcccaacggcctgacctttgaccccttcagcaagctgctgtgctgggcagatgctggcaccaagaagctggagtgcaccctgcctgatggcaccggccggcgggtcatccagaacaacctgaagtaccccttcagcatcgtgtcctatgctgaccacttctaccacacagactggaggagagatggagtggtgtctgtgaacaagcacagcggccagttcacagatgagtacctgcctgagcagaggagccacctgtatggcatcacagctgtgtacccctactgccccaccggcaggaagtag

SEQ ID NO: 161902 - DNA, 3543 bp, synthetic construct
  misc_feature 1..3543: note = Description of Artificial Sequence: Synthetic coding sequence
  source 1..3543: mol_type = other DNA
accccccagacagagcgcatcacccacagcagcatctcctggagcttcctgctgcgcttcagccggggcaagctgctgatgctgcgggctgctgccctgcacccagatgagctgttcccccatggagagagctggggagaccagctgctgcaggagggagatgatgagagcagcgctgtggtgaagctggccaaccccctgcacttctatgaggcccgcttcagcaacctgtatgtgggcaccaacggcatcatcagcacccaggacttcccccgggagacccagtatgtggactatgacttccccacagacttccctgccatcgcccccttcctggccgacatcgacaccagccacggccggggccgggtgctgtaccgggaggacaccagccctgctgtgctgggcctggccgcccgctacgtgcgggccggcttccccaggtctgcccgcttcacccccacccacgccttcctggccacctgggagcaggtgggcgcctatgaggaggtgaagagaggagccctgcccagcggggagctgaacaccttccaggccgtgctggccagtgatggcagtgacagctatgccctcttcctgtacccagccaacggcctgcagttcctgggcacccggcccaaggagagctacaacgtgcagctgcagctgcctgcccgggtgggcttctgccgcggggaggctgatgacctgaagtctgagggcccctacttcagcctgaccagcacagagcagagcgtgaagaacctgtaccagctgagcaacctgggcatccctggggtgtgggccttccacatcggcagcaccagccccctggacaacgtgcggcctgctgctgtgggggacctgtctgctgcccacagctctgtgcccctgggccgctccttcagccacgccacagccctggagagtgactacaatgaagacaacctggactactatgatgtgaatgaggaggaggccgagtacctgcctggagagcctgaggaggccctgaatggccacagcagcattgatgtgtccttccagagcaaggtggacaccaagcccctggaggagagcagcaccctggacccccacaccaaggagggcaccagcctgggggaggtgggcggccctgacctgaagggccaggtggagccctgggatgagcgggagaccaggagccctgcccctcctgaggtggaccgggacagcctggcccccagctgggagaccccaccaccctacccagaaaatggcagcatccagccctacccagatggcggccctgtgcccagcgagatggatgtgcccccagcccaccctgaggaggagatcgtgctgcggagctacccagccagcggccacaccacccccctgagccggggcacctatgaggtgggcctggaggacaacatcggcagcaacacagaggtgttcacctacaatgctgccaacaaggagacctgtgagcacaaccaccggcagtgcagcagacatgccttctgcacagattatgccaccggcttctgctgccactgccagagcaagttctatggaaatggcaagcactgcctgcctgagggcgccccccaccgggtgaatggcaaggtgtctggccacctgcacgtgggccacacccctgtgcacttcacagatgtggacctgcacgcctacatcgtgggcaatgatggccgggcctacacagccatcagccacatcccccagcctgctgcccaggccctgctgcccctgacccccatcggcggcctgtttggctggctgtttgccctggagaagccaggctctgaaaatggcttcagcctggccggggccgccttcacccatgacatggaggtgaccttctacccaggagaggagaccgtgcgcatcacccagacagctgagggcctggaccctgagaactacctgagcatcaagaccaacatccagggccaggtgccctacgtgtctgccaacttcaccgcccacatcagcccctacaaggagctgtaccactacagcgacagcacagtgaccagcaccagcagccgggactacagcctgacctttggagccatcaaccagacctggagctaccgcatccaccagaacatcacctaccaggtgtgcagacatgcccccaggcaccccagcttccccaccacccagcagctgaatgtggacagagtgtttgccctgtacaatgatgaggagcgggtgctgcgctttgctgtgaccaaccagatcggccctgtgaaggaggacagcgaccccaccccaggcaacccctgctatgatggcagccacatgtgtgacaccacagcccgctgccaccctggcaccggggtggactacacctgtgaatgtgccagcggctaccagggagatggaagaaactgtgtggatgaaaatgaatgtgccaccggcttccaccgctgtggccccaacagcgtgtgcatcaacctgcccggcagctaccgctgtgagtgccgcagcggctatgaatttgctgatgacagacacacctgcatcctgatcaccccaccagccaacccctgtgaagatggcagccacacctgtgccccagctggccaggcccgctgtgtgcaccacggcggcagcaccttcagctgtgcctgcctgcccggctatgctggagatggccaccagtgcacagatgtggatgaatgttctgagaaccgctgccaccctgctgccacctgctacaacaccccaggcagcttcagctgccgctgccagcccggctactatggagatggcttccagtgcatcccagacagcaccagcagcctgaccccctgtgagcagcagcagagacatgcccaggcccagtatgcctacccaggggcccgcttccacatcccccagtgtgatgagcagggcaacttcctgcccctgcagtgccacggcagcacaggcttctgctggtgtgtggaccctgatggccacgaggtgcccggcacccagaccccacctggcagcaccccaccccactgcggccccagccctgagcccacccagaggcctcccaccatctgtgagcgctggagggagaacctgctggagcactacggcggcaccccaagagatgaccagtatgtgccccagtgtgatgacctgggccacttcatccccctgcagtgccacggcaagagtgacttctgctggtgtgtggacaaggatggccgggaggtgcagggcaccaggagccagcccggcaccaccccagcctgcatccccaccgtggccccacccatggtgcggcccacccccaggccagatgtgaccccaccttctgtgggcaccttcctgctgtacacccagggccagcagatcggctacctgcccctgaatggcacccggctgcagaaggatgctgccaagaccctgctgagcctgcacgtgaagtggatcagccctgtgggcggccgggccgcctggctgagccagtgggagcccccccaccggccctgctgcagcgaggtggactggtgccgggaggtgctggagggcttctag

SEQ ID NO: 161903 - DNA, 3825 bp, synthetic construct
  misc_feature 1..3825: note = Description of Artificial Sequence: Synthetic coding sequence
  source 1..3825: mol_type = other DNA
atggagggggacagagtgaagctggccaaccccctgcacttctatgaggcccgcttcagcaacctgtatgtgggcaccaacggcatcatcagcacccaggacttcccccgggagacccagtatgtggactatgacttccccacagacttccctgccatcgcccccttcctggccgacatcgacaccagccacggccggggccgggtgctgtaccgggaggacaccagccctgctgtgctgggcctggccgcccgctacgtgcgggccggcttccccaggtctgcccgcttcacccccacccacgccttcctggccacctgggagcaggtgggcgcctatgaggaggtgaagagaggagccctgcccagcggggagctgaacaccttccaggccgtgctggccagtgatggcagtgacagctatgccctcttcctgtacccagccaacggcctgcagttcctgggcacccggcccaaggagagctacaacgtgcagctgcagctgcctgcccgggtgggcttctgccgcggggaggctgatgacctgaagtctgagggcccctacttcagcctgaccagcacagagcagagcgtgaagaacctgtaccagctgagcaacctgggcatccctggggtgtgggccttccacatcggcagcaccagccccctggacaacgtgcggcctgctgctgtgggggacctgtctgctgcccacagctctgtgcccctgggccgctccttcagccacgccacagccctggagagtgactacaatgaagacaacctggactactatgatgtgaatgaggaggaggccgagtacctgcccggggagcctgaggaggccctgaatggccacagcagcattgatgtgtccttccagagcaaggtggacaccaagcccctggaggagagcagcaccctggacccccacaccaaggagggcaccagcctgggggaggtgggcggccctgacctgaagggccaggtggagccctgggatgagcgggagaccaggagccctgcccctcctgaggtggaccgggacagcctggcccccagctgggagaccccaccaccctacccagaaaatggcagcatccagccctacccagatggcggccctgtgcccagcgagatggatgtgcccccagcccaccctgaggaggagatcgtgctgcggagctacccagccagcggccacaccacccccctgagccggggcacctatgaggtgggcctggaggacaacatcggcagcaacacagaggtgttcacctacaatgctgccaacaaggagacctgtgagcacaaccaccggcagtgcagcagacatgccttctgcacagattatgccaccggcttctgctgccactgccagagcaagttctatggaaatggcaagcactgcctgcctgagggcgccccccaccgggtgaatggcaaggtgtctggccacctgcacgtgggccacacccctgtgcacttcacagatgtggacctgcacgcctacatcgtgggcaatgatggccgggcctacacagccatcagccacatcccccagcctgctgcccaggccctgctgcccctgacccccatcggcggcctgtttggctggctgtttgccctggagaagccaggctctgaaaatggcttcagcctggccggggccgccttcacccatgacatggaggtgaccttctacccaggagaggagaccgtgcgcatcacccagacagctgagggcctggaccctgagaactacctgagcatcaagaccaacatccagggccaggtgccctacgtgtctgccaacttcaccgcccacatcagcccctacaaggagctgtaccactacagcgacagcacagtgaccagcaccagcagccgggactacagcctgaccttcggggccatcaaccagacctggagctaccgcatccaccagaacatcacctaccaggtgtgcagacatgcccccaggcaccccagcttccccaccacccagcagctgaatgtggacagagtgtttgccctgtacaatgatgaggagcgggtgctgcgctttgctgtgaccaaccagatcggccctgtgaaggaggacagcgaccccaccccaggcaacccctgctatgatggcagccacatgtgtgacaccacagcccgctgccaccctggcactggagtggactacacctgtgaatgtgccagcggctaccagggagatggcaggaactgtgtggatgaaaatgaatgtgccaccggcttccaccgctgtggccccaacagcgtgtgcatcaacctgcccggcagctaccgctgtgaatgtcgcagcggctatgaatttgctgatgacagacacacctgcatctacgtggatgagtgcagtgaaaatcgctgccaccctgctgccacctgctacaacaccccaggcagcttcagctgccgctgccagcccggctactatggagatggcttccagtgcatcccagacagcaccagcagcctgaccccctgtgagcagcagcagagacatgcccaggcccagtatgcctacccaggggcccgcttccacatcccccagtgtgatgagcagggcaacttcctgcccctgcagtgccacggcagcacaggcttctgctggtgtgtggaccctgatggccacgaggtgcccggcacccagaccccacctggcagcaccccaccccactgcggccccagccctgagcccacccagaggcctcccaccatctgtgagcgctggagggagaacctgctggagcactatggaggcaccccaagagatgaccagtatgtgccccagtgtgatgacctgggccacttcatccccctgcagtgccacggcaagagtgacttctgctggtgtgtggacaaggatggccgggaggtgcagggcaccaggagccagcccggcaccaccccagcctgcatccccaccgtggccccacccatggtgcggcccacccccaggccagatgtgaccccacccagcgtgggcaccttcctgctgtacacccagggccagcagatcggctacctgcccctgaatggcacccggctgcagaaggatgctgccaagaccctgctgagcctgcacggcagcatcatcgtgggcatcgactatgactgccgggagaggatggtgtactggacagatgtggccggccgcaccatcagccgggccggcctggagctgggcgctgagcctgagaccatcgtgaacagcggcctcatcagccctgagggcctggccatcgaccacatccggaggaccatgtactggacagacagcgtgctggacaagattgaaagtgccctgctggatggcagcgagaggaaggtgctcttctacacagacctggtgaacccccgggccatcgctgtggaccccatccggggcaacctgtactggacagactggaaccgggaggcccccaagattgagaccagcagcctggatggagagaacagacgcatcctgatcaacacagacatcggcctgcccaacggcctgacctttgaccccttcagcaagctgctgtgctgggcagatgctggcaccaagaagctggagtgcaccctgcctgatggcactggaagaagagtcatccagaacaacctgaagtaccccttcagcatcgtgtcctatgctgaccacttctaccacacagactggaggagagatggagtggtgtctgtgaacaagcacagcggccagttcacagatgagtacctgcctgagcagaggagccacctgtatggcatcacagctgtgtacccctactgccccactggaaggaagtag

SEQ ID NO: 161904 - DNA, 3837 bp, synthetic construct
  misc_feature 1..3837: note = Description of Artificial Sequence: Synthetic coding sequence
  source 1..3837: mol_type = other DNA
atgacagcccggggcctggccctgggcctgctgctgctgctgctgtgcccagcccaggtgttcagccagagctgtgtgtggtacggggagtgtggcatcgcctatggagacaagcgctacaactgtgagtacagcggcccccccaagcccctgcccaaggatggctatgacctggtgcaggagctgtgccccggcttcttctttggaaatgtgtccctgtgctgtgatgtgcggcagctgcagaccctgaaggacaacctgcagctgcccctgcagttcctgagccgctgccccagctgcttctacaacctgctgaacctcttctgtgagctgacctgcagcccccggcagagccagttcctgaatgtgacagccacagaagattatgtggaccctgtgaccaaccagaccaagaccaacgtgaaggagctgcagtactacgtgggccagagctttgccaatgccatgtacaatgcctgcagagatgtggaggcccccagcagcaatgacaaggccctgggcctgctgtgtgggaaggatgctgatgcctgcaatgccaccaactggattgagtacatgttcaacaaggacaatggccaggcccccttcaccatcacccctgtgttcagtgacttccctgtgcacggcatggagcccatgaacaatgccaccaagggctgtgatgagagcgtggatgaggtgacagccccctgcagctgccaggactgcagcatcgtgtgtggccccaagccccagcccccacctcctccagccccctggaccatcctgggcctggatgccatgtatgtgatcatgtggatcacctacatggccttcctgctggtgttcttcggggccttctttgctgtgtggtgctacaggaagcgctactttgtgtctgagtacacccccatcgacagcaacatcgccttctctgtgaatgccagtgacaagggggaggccagctgctgtgaccctgtgtctgctgcctttgagggctgcctgcggcggctcttcacccgctggggcagcttctgtgtgaggaaccctggctgcgtcatcttcttcagcctggtgttcatcacagcctgcagcagcggcctggtgtttgtgcgggtgaccaccaaccctgtggacctgtggagcgcccccagcagccaggcccggctggagaaggagtactttgaccagcacttcggccccttcttcagaacagagcagctgatcatccgggcccccctgacagacaagcacatctaccagccctaccccagcggggctgatgtgccctttggaccacccctggacatccagatcctgcaccaggtgctggacctgcagatcgccatcgagaacatcacagccagctatgacaatgaaacagtgaccctgcaggacatctgcctggcccccctgagcccctacaacaccaactgcaccatcctgtctgtgctgaactacttccagaacagccacagcgtgctggaccacaagaagggagatgacttctttgtgtatgctgactaccacacccacttcctgtactgtgtgcgggccccagccagcctgaatgacaccagcctgctgcatgacccctgcctgggcacctttggaggccctgtgttcccctggctggtgctgggcggctatgatgaccagaactacaacaatgccacagccctggtgatcaccttccctgtgaacaactactacaatgacacagagaagctgcagagggcccaggcctgggagaaggagttcatcaactttgtgaagaactacaagaaccccaacctgaccatctccttcaccgctgagaggagcattgaagatgagctgaaccgggagagtgacagtgatgtgttcaccgtggtgatctcctatgccatcatgttcctgtacatcagcctggccctgggccacatgaagagctgccggcggctgctggtggacagcaaggtgtccctgggcattgctggcatcctgattgtgctgagctctgtggcctgcagcctgggcgtcttctcctacatcggcctgcccctgaccctgattgtgattgaagtcatccccttcctggtgctggccgtgggcgtggacaacatcttcatcctggtgcaggcctaccagagagatgagcggctgcagggcgagaccctggaccagcagctgggccgggtgctgggggaggtggcccccagcatgttcctgagcagcttcagcgagaccgtggccttcttcctgggcgccctgtctgtgatgcctgctgtgcacaccttcagcctgtttgctggcctggccgtgttcatcgacttcctgctgcagatcacctgctttgtgtccctgctgggcctggacatcaagaggcaggagaagaaccggctggacatcttctgctgcgtgagaggagcagaagatggcacctctgtgcaggccagcgagagctgcctcttccgcttcttcaagaacagctacagccccctgctgctgaaggactggatgaggcccatcgtgattgccatctttgtgggcgtgctgtccttcagcattgctgtgctgaacaaggtggacatcggcctggaccagagcctgtccatgccagatgacagctacatggtggactacttcaagagcatcagccagtacctgcatgctggcccccctgtgtactttgtgctggaggagggccatgactacaccagcagcaagggccagaacatggtgtgtggcggcatgggctgcaacaatgacagcctggtgcagcagatcttcaatgctgcccagctggacaactacaccagaattggatttgcccccagctcctggattgatgactactttgactgggtgaagccccagagcagctgctgccgggtggacaacatcacagaccagttctgcaatgcctctgtggtggaccctgcctgtgtgcgctgccggcccctgaccccagagggcaagcagaggccccagggcggggacttcatgaggttcctgcccatgttcctgagtgacaaccccaaccccaagtgtgggaaaggaggccatgctgcctacagcagcgctgtgaacatcctgctgggccacggcaccagggtgggcgccacctacttcatgacctaccacacagtgctgcagaccagcgctgacttcattgatgccctgaagaaggcccggctgattgccagcaatgtgacagagaccatgggcatcaatggcagcgcctacagagtcttcccctacagcgtcttctacgtgttctatgagcagtacctgaccatcattgatgacaccatcttcaacctgggcgtgtccctgggcgccatcttcctggtgaccatggtgctgctgggctgtgagctgtggagcgctgtgatcatgtgtgccaccatcgccatggtgctggtgaacatgtttggagtgatgtggctgtggggcatcagcctgaatgctgtgtccctggtgaacctggtgatgagctgtggcatctctgtggagttctgcagccacatcacccgggccttcaccgtgtccatgaagggcagccgggtggagagagctgaggaggccctggcccacatgggcagctctgtgttcagcggcatcaccctgaccaagtttggaggcatcgtggtgctggcctttgccaagagccagatcttccagatcttctacttcaggatgtacctggccatggtgctgctgggcgccacccacggcctcatcttcctgcctgtgctgctgagctacatcggccccagcgtgaacaaggccaagagctgtgccacagaggagcgctacaagggcacagagcgggagcggctgctgaacttctag

SEQ ID NO: 161905 - DNA, 2883 bp, synthetic construct
  misc_feature 1..2883: note = Description of Artificial Sequence: Synthetic coding sequence
  source 1..2883: mol_type = other DNA
atgtatgtgatcatgtggatcacctacatggccttcctgctggtgttctttggagccttctttgctgtgtggtgctacaggaagcgctactttgtgtctgagtacacccccatcgacagcaacatcgccttctctgtgaatgccagtgacaagggcacagcctggctgctgaccagcaccttccccagcagccctgtgctgcccggggaggccagctgctgtgaccctgtgtctgctgcctttgagggctgcctgcggcggctcttcacccgctggggcagcttctgtgtgaggaaccctggctgcgtcatcttcttcagcctggtgttcatcacagcctgcagcagcggcctggtgtttgtgcgggtgaccaccaaccctgtggacctgtggagcgcccccagcagccaggcccggctggagaaggagtactttgaccagcacttcggccccttcttcagaacagagcagctgatcatccgggcccccctgacagacaagcacatctaccagccctaccccagcggggctgatgtgccctttggaccacccctggacatccagatcctgcaccaggtgctggacctgcagatcgccatcgagaacatcacagccagctatgacaatgaaacagtgaccctgcaggacatctgcctggcccccctgagcccctacaacaccaactgcaccatcctgtctgtgctgaactacttccagaacagccacagcgtgctggaccacaagaagggagatgacttctttgtgtatgctgactaccacacccacttcctgtactgtgtgcgcttcatcaactttgtgaagaactacaagaaccccaacctgaccatctccttcaccgctgagaggagcattgaagatgagctgaaccgggagagtgacagtgatgtgttcaccgtggtgatctcctatgccatcatgttcctgtacatcagcctggccctgggccacatgaagagctgccggcggctgctggtggacagcaaggtgtccctgggcattgctggcatcctgattgtgctgagctctgtggcctgcagcctgggcgtcttctcctacatcggcctgcccctgaccctgattgtgattgaagtcatccccttcctggtgctggccgtgggcgtggacaacatcttcatcctggtgcaggcctaccagagagatgagcggctgcagggcgagaccctggaccagcagctgggccgggtgctgggggaggtggcccccagcatgttcctgagcagcttcagcgagaccgtggccttcttcctgggcgccctgtctgtgatgcctgctgtgcacaccttcagcctgtttgctggcctggccgtgttcatcgacttcctgctgcagatcacctgctttgtgtccctgctgggcctggacatcaagaggcaggagaagaaccggctggacatcttctgctgcgtgagaggagcagaagatggcacctctgtgcaggccagcgagagctgcctcttccgcttcttcaagaacagctacagccccctgctgctgaaggactggatgaggcccatcgtgattgccatctttgtgggcgtgctgtccttcagcattgctgtgctgaacaaggtggacatcggcctggaccagagcctgtccatgccagatgacagctacatggtggactacttcaagagcatcagccagtacctgcatgctggcccccctgtgtactttgtgctggaggagggccatgactacaccagcagcaagggccagaacatggtgtgtggcggcatgggctgcaacaatgacagcctggtgcagcagatcttcaatgctgcccagctggacaactacaccagaattggatttgcccccagctcctggattgatgactactttgactgggtgaagccccagagcagctgctgccgggtggacaacatcacagaccagttctgcaatgcctctgtggtggaccctgcctgtgtgcgctgccggcccctgaccccagagggcaagcagaggccccagggcggggacttcatgaggttcctgcccatgttcctgagtgacaaccccaaccccaagtgtgggaaaggaggccatgctgcctacagcagcgctgtgaacatcctgctgggccacggcaccagggtgggcgccacctacttcatgacctaccacacagtgctgcagaccagcgctgacttcattgatgccctgaagaaggcccggctgattgccagcaatgtgacagagaccatgggcatcaatggcagcgcctacagagtcttcccctacagcgtcttctacgtgttctatgagcagtacctgaccatcattgatgacaccatcttcaacctgggcgtgtccctgggcgccatcttcctggtgaccatggtgctgctgggctgtgagctgtggagcgctgtgatcatgtgtgccaccatcgccatggtgctggtgaacatgtttggagtgatgtggctgtggggcatcagcctgaatgctgtgtccctggtgaacctggtgatgagctgtggcatctctgtggagttctgcagccacatcacccgggccttcaccgtgtccatgaagggcagccgggtggagagagctgaggaggccctggcccacatgggcagctctgtgttcagcggcatcaccctgaccaagtttggaggcatcgtggtgctggcctttgccaagagccagatcttccagatcttctacttcaggatgtacctggccatggtgctgctgggcgccacccacggcctcatcttcctgcctgtgctgctgagctacatcggccccagcgtgaacaaggccaagagctgtgccacagaggagcgctacaagggcacagagcgggagcggctgctgaacttctag

SEQ ID NO: 161906 - DNA, 2331 bp, synthetic construct
  misc_feature 1..2331: note = Description of Artificial Sequence: Synthetic coding sequence
  source 1..2331: mol_type = other DNA
atgtacaatgcctgcagagatgtggaggcccccagcagcaatgacaaggccctgggcctgctgtgtgggaaggatgctgatgcctgcaatgccaccaactggattgagtacatgttcaacaaggacaatggccaggcccccttcaccatcacccctgtgttcagtgacttccctgtgcacggcatggagcccatgaacaatgccaccaagggctgtgatgaatctgtggatgaggtgacagccccctgcagctgccaggactgcagcatcgtgtgtggccccaagccccagcccccacctcctccagccccctggaccatcctgggcctggatgccatgtatgtgatcatgtggatcacctacatggccttcctgctggtgttctttggagccttctttgctgtgtggtgctacaggaagcgctactttgtgtctgagtacacccccatcgacagcaacatcgccttctctgtgaatgccagtgacaagggggaggccagctgctgtgaccctgtgtctgctgcctttgagggctgcctgcggcggctcttcacccgctggggcagcttctgtgtgagaaatcctggctgtgtgatcttcttcagcctggtgttcatcacagcctgcagcagcggcctggtgtttgtgcgggtgaccaccaaccctgtggacctgtggagcgcccccagcagccaggcccggctggagaaggagtactttgaccagcacttcggccccttcttcagaacagagcagctgatcatccgggcccccctgacagacaagcacatctaccagccctaccccagcggggctgatgtgcccttcggcccccccctggacatccagatcctgcaccaggtgctggacctgcagatcgccatcgagaacatcacagccagctatgacaatgagaccgtgaccctgcaggacatctgcctggcccccctgagcccctacaacaccaactgcaccatcctgtctgtgctgaactacttccagaacagccacagcgtgctggaccacaagaagggagatgacttctttgtgtatgctgactaccacacccacttcctgtactgtgtgcgggccccagccagcctgaatgacaccagcctgctgcatgacccctgcctgggcaccttcggcggccctgtgttcccctggctggtgctgggcggctatgatgaccagaactacaacaatgccacagccctggtgatcaccttccctgtgaacaactactacaatgacacagagaagctgcagagggcccaggcctgggagaaggagttcatcaactttgtgaagaactacaagaaccccaacctgaccatctccttcaccgctgagaggagcattgaagatgagctgaaccgggagagtgacagtgatgtgttcaccgtggtgatctcctatgccatcatgttcctgtacatcagcctggccctgggccacatgaagagctgccggcggctgctggtggacagcaaggtgtccctgggcattgctggcatcctgattgtgctgagctctgtggcctgcagcctgggcgtcttctcctacatcggcctgcccctgaccctcatcgtcatcgaggtgatccccttcctggtgctggccgtgggcgtggacaacatcttcatcctggtgcaggcctaccagagagatgagcggctgcagggcgagaccctggaccagcagctgggccgggtgctgggggaggtggcccccagcatgttcctgagcagcttcagcgagaccgtggccttcttcctgggcgccctgtctgtgatgcctgctgtgcacaccttcagcctgtttgctggcctggccgtgttcatcgacttcctgctgcagatcacctgctttgtgtccctgctgggcctggacatcaagaggcaggagaagaaccggctggacatcttctgctgcgtgagaggagcagaagatggcacctctgtgcaggccagcgagagctgcctcttccgcttcttcaagaacagctacagccccctgctgctgaaggactggatgaggcccatcgtcatcgccatctttgtgggcgtgctgtccttcagcattgctgtgctgaacaaggtggacatcggcctggaccagagcctgtccatgccagatgacagctacatggtggactacttcaagagcatcagccagtacctgcacgccggcccccctgtgtactttgtgctggaggagggccatgactacaccagcagcaagggccagaacatggtgtgtggcggcatgggctgcaacaatgacagcctggtgcagcagatcttcaatgctgcccagctggacaactag

SEQ ID NO: 161907 - DNA, 369 bp, synthetic construct
  misc_feature 1..369: note = Description of Artificial Sequence: Synthetic coding sequence
  source 1..369: mol_type = other DNA
atgaggttcctggccgccaccttcctgctgctggccctgagcacagctgcccaggccgagcctgtgcagttcaaggactgtggctctgtggatggagtcatcaaggaggtgaatgtgagcccctgccccacccagccctgccagctgagcaagggccagagctacagcgtgaatgtgaccttcaccagcaacatccagagcaagagcagcaaggctgtggtgcacggcatcctgatgggcgtgcctgtgcccttccccatccctgagccagatggctgcaagagcggcatcaactgccccatccagaaggacaagacctacagctacctgaacaagctgcctgtgaagtctgagtaccccagcgtgtag

SEQ ID NO: 161908 - DNA, 456 bp, synthetic construct
  misc_feature 1..456: note = Description of Artificial Sequence: Synthetic coding sequence
  source 1..456: mol_type = other DNA
atgaggttcctggccgccaccttcctgctgctggccctgagcacagctgcccaggccgagcctgtgcagttcaaggactgtggctctgtggatggagtcatcaaggaggtgaatgtgagcccctgccccacccagccctgccagctgagcaagggccagagctacagcgtgaatgtgaccttcaccagcaacatccagagcaagagcagcaaggctgtggtgcacggcatcctgatgggcgtgcctgtgcccttccccatccctgagccagatggctgcaagagcggcatcaactgccccatccagaaggacaagacctacagctacctgaacaagctgcctgtgaagtctgagtaccccagcatcaagctggtggtggagtggcagctgcaggatgacaagaaccagagcctcttctgctgggagatccctgtgcagatcgtgagccacctgtag

SEQ ID NO: 161909 - DNA, 1053 bp, synthetic construct
  misc_feature 1..1053: note = Description of Artificial Sequence: Synthetic coding sequence
  source 1..1053: mol_type = other DNA
atggacctgaaggccctgctgagcagcctgaatgactttgccagcctgagctttgctgagagctgggacaacgtgggcctgctggtggagcccagccccccccacacagtgaacaccctcttcctgaccaatgacctgacagaggaggtgatggaggaggtgctgcagaagaaggctgacctgatcctgagctaccacccccccatcttccggcccatgaagaggatcacctggaacacctggaaggagcggctggtgatccgggccctggagaacagagtgggcatctacagcccccacacagcctatgatgctgccccccagggcgtgaacaactggctggccaagggcctgggcgcctgcaccagccggcccatccaccccagcaaggcccccaactaccccacagagggcaaccaccgggtggagttcaacgtgaactacacccaggacctggacaaggtgatgtctgctgtgaagggcattgatggagtgtctgtgaccagcttcagcgccaggactggaaatgaggagcagacccgcatcaacctgaactgcacccagaaggccctgatgcaggtggtggacttcctgagcaggaacaagcagctgtaccagaagacagagatcctgagcctggagaagcccctgctgctgcacacaggcatgggccgcctgtgcaccctggatgagagcgtgtccctggccaccatgattgaccgcatcaagaggcacctgaagctgagccacatccggctggccctgggcgtgggccgcaccctggagagccaggtgaaggtggtggccctgtgtgccggcagcggcagctctgtgctgcagggcgtggaggccgacctgtacctgactggagagatgagccaccacgacaccctggatgctgccagccagggcatcaacgtcatcctgtgtgagcacagcaacacagagcggggcttcctgagtgacctgcgggacatgctggacagccacctggagaacaagatcaacatcatcctgtctgaaacagaccgggaccccctgcaggtggtgtag

SEQ ID NO: 161910 - DNA, 759 bp, synthetic construct
  misc_feature 1..759: note = Description of Artificial Sequence: Synthetic coding sequence
  source 1..759: mol_type = other DNA
atgctgagcagctgtgtgcggcctgtgcccaccaccgtgcgctttgtggacagcctcatctgcaacagcagccgctccttcatggacctgaaggccctgctgagcagcctgaatgactttgccagcctgagctttgctgagagctgggacaacgtgggcctgctggtggagcccagccccccccacacagtgaacaccctcttcctgaccaatgacctgacagaggaggtgatggaggaggtgctgcagaagaaggctgacctgatcctgagctaccacccccccatcttccggcccatgaagaggatcacctggaacacctggaaggagcggctggtgatccgggccctggagaacagagtgggcatctacagcccccacacagcctatgatgctgccccccagggcgtgaacaactggctggccaagggcctgggcgcctgcaccagccggcccatccaccccagcaaggcccccaactaccccacagagggcaaccaccgggtggagttcaacgtgaactacacccaggacctggacaaggtgatgtctgctgtgaagggcattgatggagtgtctgtgaccagcttcagcgccaggactggaaatgaggagcagacccgcatcaacctgaactgcacccagaaggccctgatgcaggtggtggacttcctgagcaggaacaagcagctgtaccagaagcaccaggacaacaccttctacaagtctgctggctgccagctgaagtttgtgacctag

SEQ ID NO: 161911 - DNA, 1134 bp, synthetic construct
  misc_feature 1..1134: note = Description of Artificial Sequence: Synthetic coding sequence
  source 1..1134: mol_type = other DNA
atgctgagcagctgtgtgcggcctgtgcccaccaccgtgcgctttgtggacagcctcatctgcaacagcagccgctccttcatggacctgaaggccctgctgagcagcctgaatgactttgccagcctgagctttgctgagagctgggacaacgtgggcctgctggtggagcccagccccccccacacagtgaacaccctcttcctgaccaatgacctgacagaggaggtgatggaggaggtgctgcagaagaaggctgacctgatcctgagctaccacccccccatcttccggcccatgaagaggatcacctggaacacctggaaggagcggctggtgatccgggccctggagaacagagtgggcatctacagcccccacacagcctatgatgctgccccccagggcgtgaacaactggctggccaagggcctgggcgcctgcaccagccggcccatccaccccagcaaggcccccaactaccccacagagggcaaccaccgggtggagttcaacgtgaactacacccaggacctggacaaggtgatgtctgctgtgaagggcattgatggagtgtctgtgaccagcttcagcgccaggactggaaatgaggagcagacccgcatcaacctgaactgcacccagaaggccctgatgcaggtggtggacttcctgagcaggaacaagcagctgtaccagaagacagagatcctgagcctggagaagcccctgctgctgcacacaggcatgggccgcctgtgcaccctggatgaatctgtgtccctggccaccatgattgaccgcatcaagaggcacctgaagctgagccacatccggctggccctgggcgtgggccgcaccctggagagccaggtgaaggtggtggccctgtgtgccggcagcggcagctctgtgctgcagggcgtggaggccgacctgtacctgaccggggagatgagccaccacgacaccctggatgctgccagccagggcatcaacgtcatcctgtgtgagcacagcaacacagagcggggcttcctgagtgacctgcgggacatgctggacagccacctggagaacaagatcaacatcatcctgtctgaaacagaccgggaccccctgcaggtggtgtag

SEQ ID NO: 161912 - DNA, 489 bp, synthetic construct
  misc_feature 1..489: note = Description of Artificial Sequence: Synthetic coding sequence
  source 1..489: mol_type = other DNA
atggacctgaaggccctgctgagcagcctgaatgactttgccagcctgagctttgctgagagctgggacaacgtgggcctgctggtggagcccagccccccccacacagtgaacaccctcttcctgaccaatgacctgacagaggaggtgatggaggaggtgctgcagaagaaggctgacctgatcctgagctaccacccccccatcttccggcccatgaagaggatcacctggaacacctggaaggagcggctggtgatccgggccctggagaacagagtgggcatctacagcccccacacagcctatgatgctgccccccagggcgtgaacaactggctggccaagggcctgggcgcctgcaccagccggcccatccaccccagcaaggcccccaactaccccacagagggcaaccaccgggtggagttcaacgtgaactacacccaggacctggacaaggtgatgtctgctgtgaagggcatctag

SEQ ID NO: 161913 - DNA, 1134 bp, synthetic construct; identical to SEQ ID NO: 161911
  misc_feature 1..1134: note = Description of Artificial Sequence: Synthetic coding sequence
  source 1..1134: mol_type = other DNA

SEQ ID NO: 161914 - DNA, 858 bp, synthetic construct
  misc_feature 1..858: note = Description of Artificial Sequence: Synthetic coding sequence
  source 1..858: mol_type = other DNA
atgctgagcagctgtgtgcggcctgtgcccaccaccgtgcgctttgtggacagcctcatctgcaacagcagccgctccttcatggacctgaaggccctgctgagcagcctgaatgactttgccagcctgagctttgctgagagctgggacaacgtgggcctgctggtggagcccagccccccccacacagtgaacaccctcttcctgaccaatgacctgacagaggaggtgatggaggaggtgctgcagaagaaggctgacctgatcctgagctaccacccccccatcttccggcccatgaagaggatcacctggaacacctggaaggagcggctggtgatccgggccctggagaacagagtgggcatctacagcccccacacagcctatgatgctgccccccagggcgtgaacaactggctggccaagggcctgggcgcctgcaccagccggcccatccaccccagcaaggcccccaactaccccacagagggcaaccaccgggtggagttcaacgtgaactacacccaggacctggacaaggtgatgtctgctgtgaagggcattgatggagtgtctgtgaccagcttcagcgccaggactggaaatgaggagcagacccgcatcaacctgaactgcacccagaaggccctgatgcaggtggtggacttcctgagcaggaacaagcagctgtaccagaagacagagatcctgagcctggagaagagcctgaagagcaagtcctggccctgtgtgctggtgctgggcgccgccttctgccgggtgctgcggctgaccttcaccagccaggtgcgctgccccatcatgatcctgtggatgctgctgcccaaggagtag

SEQ ID NO: 161915 - DNA, 1134 bp, synthetic construct; identical to SEQ ID NO: 161911
  misc_feature 1..1134: note = Description of Artificial Sequence: Synthetic coding sequence
  source 1..1134: mol_type = other DNA

SEQ ID NO: 161916 - DNA, 630 bp, synthetic construct
  misc_feature 1..630: note = Description of Artificial Sequence: Synthetic coding sequence
  source 1..630: mol_type = other DNA
atggacctgaaggccctgctgagcagcctgaatgactttgccagcctgagctttgctgagagctgggacaacgtgggcctgctggtggagcccagccccccccacacagtgaacaccctcttcctgaccaatgacctgacagaggaggtgatggaggaggtgctgcagaagaaggctgacctgatcctgagctaccacccccccatcttccggcccatgaagaggatcacctggaacacctggaaggagcggctggtgatccgggccctggagaacagagtgggcatctacagcccccacacagcctatgatgctgccccccagggcgtgaacaactggctggccaagggcctgggcgcctgcaccagccggcccatccaccccagcaaggcccccaactaccccacagagggcaaccaccgggtggagttcaacgtgaactacacccaggacctggacaaggtgatgtctgctgtgaagggcattgatggagtgtctgtgaccagcttcagcgccaggactggaaatgaggagcagacccgcatcaacctgaactgcacccagaaggccctgatgcaggtggtggacttcctgagcaggaacaagcagctgtaccagaagacagaatag

SEQ ID NO: 161917 - DNA, 492 bp, synthetic construct
  misc_feature 1..492: note = Description of Artificial Sequence: Synthetic coding sequence
  source 1..492: mol_type = other DNA
atgctgagcagctgtgtgcggcctgtgcccaccaccgtgcgctttgtggacagcctcatctgcaacagcagccgctccttcatggacctgaaggccctgctgagcagcctgaatgactttgccagcctgagctttgctgagagctgggacaacgtgggcctgctggtggagcccagccccccccacacagtgaacaccctcttcctgaccaatgacctgacagaggaggtgatggaggaggtgctgcagaagaaggctgacctgatcctgagctaccacccccccatcttccggcccatgaagaggatcacctggaacacctggaaggagcggctggtgatccgggccctggagaacagagtgggcatctacagcccccacacagcctatgatgctgccccccagggcgtgaacaactggctggccaagggcctgggcgcctgcaccagccggcccatccaccccagcaaggcccccaactaccccacctag

SEQ ID NO: 161918 - DNA, 4749 bp, synthetic construct
  misc_feature 1..4749: note = Description of Artificial Sequence: Synthetic coding sequence
  source 1..4749: mol_type = other DNA
atggccggccctgggggctggagggaccgggaggtgacagacctgggccacctgcctgaccccaccggcatcttcagcctggacaagaccatcggcctgggcacctacggccgcatctacctgggcctgcacgagaagacaggagccttcaccgctgtgaaggtgatgaatgccaggaagacccccctgcctgagatcggccggcgggtgcgggtgaacaagtaccagaagtctgtgggctggagatacagtgatgaggaggaggacctgaggacagagctgaacctgctgaggaagtacagcttccacaagaacatcgtgtccttctacggggccttcttcaagctgagccccccaggccagaggcaccagctgtggatggtgatggagctgtgtgccgccggctctgtgacagatgtggtgaggatgaccagcaaccagagcctgaaggaggactggatcgcctacatctgccgggagatcctgcagggcctggcccacctgcacgcccacagggtcatccaccgggacatcaagggccagaatgtgctgctgacccacaatgctgaggtgaagctggtggactttggagtgtctgcccaggtgtccaggaccaacggcagaagaaattccttcatcggcaccccctactggatggcccctgaggtgattgactgtgatgaggaccccaggaggagctatgactacagaagtgatgtgtggagcgtgggcatcacagccatcgagatggccgagggcgccccacccctgtgcaacctgcagcccctggaggccctgtttgtgatcctgcgggagagcgcccccaccgtgaagagcagcggctggagcaggaagttccacaacttcatggagaagtgcaccatcaagaacttcctgttccggcccaccagcgccaacatgctgcagcacccctttgtgcgggacatcaagaatgaaagacatgtggtggagagcctgaccaggcacctgaccggcatcatcaagaagaggcagaagaagggcatccccctcatctttgagcgggaggaggccatcaaggagcagtacacagtgcggcgcttccggggccccagctgcacccatgagctgctgcggctgcccaccagcagccgctgccggcccctgcgggtgctgcacggggagcccagccagccccgctggctgcctgaccgggaggagccccaggtgcaggccctgcagcagctgcagggcgccgcccgggtcttcatgcccctgcaggccctggacagcgcccccaagcccctgaagggccaggcccaggccccccagaggctgcagggcgccgcccgggtcttcatgcccctgcaggcccaggtgaaggccaaggccagcaagcccctgcagatgcagatcaaggccccaccccggctgcggcgggccgcccgggtgctgatgcccctgcaggcccaggtgcgggccccccggctgctgcaggtgcagagccaggtgtccaagaagcagcaggcccagacccagaccagcgagccccaggacctggaccaggtgcctgaggagttccagggccaggaccaggtgcctgagcagcagaggcagggccaggcccctgagcagcagcagaggcacaaccaggtgcctgagcaggagctggagcagaaccaggcccctgagcagcctgaggtgcaggagcaggccgctgagcccgcccaggccgagacagaagctgaggagcctgagagcctgcgggtgaatgcccaggtgttcctgcccctgctgagccaggaccaccacgtgctgctgcccctgcacctggacacccaggtgctgatccctgtggagggccagacagagggcagcccccaggcccaggcctggaccctggagcccccccaggccatcggctctgtgcaggccctgattgagggcctgagccgggacctgctgcgggcccccaacagcaacaacagcaagcccctgggccccctgcagaccctgatggagaacctgagcagcaaccgcttctacagccagcctgagcaggcccgggagaagaagagcaaggtgtccaccctgcggcaggccctggccaagaggctgagccccaagcgcttccgggccaagagctcctggaggcctgagaagctggagctgagtgacctggaggcccggcggcagaggcggcagaggcgctgggaggacatcttcaaccagcacgaggaggagctgcggcaggtggacaaggacaaggaggatgagagcagtgacaatgatgaggtgttccacagcatccaggccgaggtgcagatcgagcccctgaagccctacatcagcaaccccaagaagattgaggtgcaggagaggagccccagcgtgcccaacaaccaggaccacgcccaccacgtgaagttcagcagctctgtgccccagaggagcctgctggagcaggcccagaagcccatcgacatccggcagaggagcagccagaaccggcagaactggctggccgccagcgagagcagcagcgaggaggagagccctgtgacaggccgccgcagccagagcagccccccctacagcaccatcgaccagaagctgctggtggacatccacgtgcctgatggcttcaaggtgggcaagatcagcccccctgtgtacctgaccaatgagtgggtgggctacaatgccctgtctgagatcttcagaaatgactggctgaccccagcccctgtgatccagcccccagaggaggatggagactatgtggagctgtatgatgccagcgctgacacagatggagatgatgatgatgagagcaatgacacctttgaggacacctatgaccacgccaatggaaatgatgacctggacaaccaggtggaccaggccaatgatgtgtgcaaggaccatgatgatgacaacaacaagtttgtggatgatgtgaacaacaactactatgaggcccccagctgcccccgggccagctatggaagagatggcagctgcaagcaggacggctatgatggcagccggggcaaggaggaggcctaccggggctacggcagccacacagccaacagaagccacggcggcagcgctgcctctgaagataatgctgccatcggggaccaggaggagcacgccgccaacatcggcagcgagcggcggggctctgaaggagatggcggcaaaggagtggtgaggaccagcgaggagagcggggccctgggcctgaatggagaggagaactgcagcgagacagatggccctggcctgaagaggcctgccagccaggactttgagtacctgcaggaggagcccggcggcggcaatgaggccagcaatgccatcgacagcggggccgcccccagcgccccagaccatgaaagtgacaacaaggacatcagcgagagcagcacccagagcgacttcagcgccaaccacagcagccccagcaagggcagcggcatgtctgcagatgccaactttgccagcgccatcctgtatgccggctttgtggaggtgcctgaggagagccccaagcagcccagcgaggtgaatgtgaaccccctgtatgtgtccccagcctgcaagaagcccctcatccacatgtatgagaaggagttcaccagcgagatctgctgcggcagcctgtggggcgtgaacctgctgctgggcaccaggagcaacctgtacctgatggacagaagtggcaaggctgacatcaccaagctgatcagaagaagacccttccggcagatccaggtgctggagcccctgaacctgctgatcaccatcagcggccacaagaaccggctgcgggtgtaccacctgacctggctgaggaacaagatcctgaacaatgaccctgagagcaagaggcggcaggaggagatgctgaagacagaggaggcctgcaaggccatcgacaagctgaccggctgtgagcacttctctgtgctgcagcacgaggagaccacctacatcgccatcgccctgaagagcagcatccacctgtatgcctgggcccccaagagctttgatgagagcacagccatcaaggtgtgcatcgaccagagcgctgacagcgagggggactacatgagctaccaggcctacatccgcatcctggccaagatccaggccgctgaccctgtgaaccgcttcaagaggccagatgagctgctgcacctgctgaagctgaaggtgttccccaccctggaccacaagcctgtgacagtggacctggccatcggcagcgagaagaggctgaagatcttcttcagcagcgcagatggctaccacctgattgatgctgagagcgaggtgatgtctgatgtgaccctgcccaagaaccccctggagatcatcatcccccagaacatcatcatcctgcctgactgcctgggcatcggcatgatgctgaccttcaatgctgaggccctgtctgtggaggccaatgagcagctgttcaagaagatcctggagatgtggaaggacatccccagcagcatcgcctttgaatgtacccagaggaccaccggctggggccagaaggccatcgaggtgcgcagcctgcagagccgggtgctggagagcgagctgaagaggaggagcatcaagaagctgcgcttcctgtgcaccaggggggacaagctgttcttcaccagcaccctgaggaaccaccacagccgggtgtacttcatgaccctgggcaagctggaggagctgcagagcaactatgatgtgtag

SEQ ID NO: 161919 - DNA, 4752 bp, synthetic construct
  misc_feature 1..4752: note = Description of Artificial Sequence: Synthetic coding sequence
  source 1..4752: mol_type = other DNA
atggccggccctgggggctggagggaccgggaggtgacagacctgggccacctgcctgaccccaccggcatcttcagcctggacaagaccatcggcctgggcacctacggccgcatctacctgggcctgcacgagaagacaggagccttcaccgctgtgaaggtgatgaatgccaggaagacccccctgcctgagatcggccggcgggtgcgggtgaacaagtaccagaagtctgtgggctggagatacagtgatgaggaggaggacctgaggacagagctgaacctgctgaggaagtacagcttccacaagaacatcgtgtccttctacggggccttcttcaagctgagccccccaggccagaggcaccagctgtggatggtgatggagctgtgtgccgccggctctgtgacagatgtggtgaggatgaccagcaaccagagcctgaaggaggactggatcgcctacatctgccgggagatcctgcagggcctggcccacctgcacgcccacagggtcatccaccgggacatcaagggccagaatgtgctgctgacccacaatgctgaggtgaagctggtggactttggagtgtctgcccaggtgtccaggaccaacggcagaagaaattccttcatcggcaccccctactggatggcccctgaggtgattgactgtgatgaggaccccaggaggagctatgactacagaagtgatgtgtggagcgtgggcatcacagccatcgagatggccgagggcgccccacccctgtgcaacctgcagcccctggaggccctgtttgtgatcctgcgggagagcgcccccaccgtgaagagcagcggctggagcaggaagttccacaacttcatggagaagtgcaccatcaagaacttcctgttccggcccaccagcgccaacatgctgcagcacccctttgtgcgggacatcaagaatgaaagacatgtggtggagagcctgaccaggcacctgaccggcatcatcaagaagaggcagaagaagaagggcatccccctcatctttgagcgggaggaggccatcaaggagcagtacacagtgcggcgcttccggggccccagctgcacccatgagctgctgcggctgcccaccagcagccgctgccggcccctgcgggtgctgcatggagagcccagccagccccgctggctgcctgaccgggaggagccccaggtgcaggccctgcagcagctgcagggcgccgcccgggtcttcatgcccctgcaggccctggacagcgcccccaagcccctgaagggccaggcccaggccccccagaggctgcagggcgccgcccgggtcttcatgcccctgcaggcccaggtgaaggccaaggccagcaagcccctgcagatgcagatcaaggccccaccccggctgcggcgggccgcccgggtgctgatgcccctgcaggcccaggtgcgggccccccggctgctgcaggtgcagagccaggtgtccaagaagcagcaggcccagacccagaccagcgagccccaggacctggaccaggtgcctgaggagttccagggccaggaccaggtgcctgagcagcagaggcagggccaggcccctgagcagcagcagaggcacaaccaggtgcctgagcaggagctggagcagaaccaggcccctgagcagcctgaggtgcaggagcaggccgctgagcccgcccaggccgagacagaggccgaggagcctgagagcctgcgggtgaatgcccaggtgttcctgcccctgctgagccaggaccaccacgtgctgctgcccctgcacctggacacccaggtgctgatccctgtggagggccagacagagggcagcccccaggcccaggcctggaccctggagcccccccaggccatcggctctgtgcaggccctgattgagggcctgagccgggacctgctgcgggcccccaacagcaacaacagcaagcccctgggccccctgcagaccctgatggagaacctgagcagcaaccgcttctacagccagcctgagcaggcccgggagaagaagagcaaggtgtccaccctgcggcaggccctggccaagaggctgagccccaagcgcttccgggccaagagctcctggaggcctgagaagctggagctgagtgacctggaggcccggcggcagaggcggcagaggcgctgggaggacatcttcaaccagcacgaggaggagctgcggcaggtggacaaggacaaggaggatgagagcagtgacaatgatgaggtgttccacagcatccaggccgaggtgcagatcgagcccctgaagccctacatcagcaaccccaagaagattgaggtgcaggagaggagccccagcgtgcccaacaaccaggaccacgcccaccacgtgaagttcagcagctctgtgccccagaggagcctgctggagcaggcccagaagcccatcgacatccggcagaggagcagccagaaccggcagaactggctggccgccagcgagagcagcagcgaggaggagagccctgtgactggaagaagaagccagagcagccccccctacagcaccatcgaccagaagctgctggtggacatccacgtgcctgatggcttcaaggtgggcaagatcagcccccctgtgtacctgaccaatgagtgggtgggctacaatgccctgtctgagatcttcagaaatgactggctgaccccagcccctgtgatccagcccccagaagaagatggagactatgtggagctgtatgatgccagcgctgacacagatggagatgatgatgatgagagcaatgacacctttgaggacacctatgaccacgccaatggaaatgatgacctggacaaccaggtggaccaggccaatgatgtgtgcaaggaccatgatgatgacaacaacaagtttgtggatgatgtgaacaacaactactatgaggcccccagctgcccccgggccagctatggaagagatggcagctgcaagcaggacggctatgatggcagccggggcaaggaggaggcctaccggggctacggcagccacacagccaacagaagccatggaggcagcgctgccagcgaggacaatgctgccatcggggaccaggaggagcacgccgccaacatcggcagcgagcggcggggctctgaaggagatggcggcaagggcgtggtgaggaccagcgaggagagcggggccctgggcctgaatggagaggagaactgcagcgagacagatggccctggcctgaagaggcctgccagccaggactttgagtacctgcaggaggagcccggcggcggcaatgaggccagcaatgccattgattctggagctgcccccagcgccccagaccacgagagtgacaacaaggacatcagcgagagcagcacccagagcgacttcagcgccaaccacagcagccccagcaaaggaagtggcatgtctgcagatgccaactttgccagcgccatcctgtatgccggctttgtggaggtgcctgaggagagccccaagcagcccagcgaggtgaatgtgaaccccctgtatgtgtccccagcctgcaagaagcccctcatccacatgtatgagaaggagttcaccagcgagatctgctgcggcagcctgtggggcgtgaacctgctgctgggcaccaggagcaacctgtacctgatggacagaagtggcaaggctgacatcaccaagctgatcagaagaagacccttccggcagatccaggtgctggagcccctgaacctgctgatcaccatcagcggccacaagaaccggctgcgggtgtaccacctgacctggctgaggaacaagatcctgaacaatgaccctgagagcaagaggcggcaggaggagatgctgaagacagaggaggcctgcaaggccatcgacaagctgaccggctgtgagcacttctctgtgctgcagcacgaggagaccacctacatcgccatcgccctgaagagcagcatccacctgtatgcctgggcccccaagagctttgatgagagcacagccatcaaggtgtgcatcgaccagagcgctgacagcgagggggactacatgagctaccaggcctacatccgcatcctggccaagatccaggccgctgaccctgtgaaccgcttcaagaggccagatgagctgctgcacctgctgaagctgaaggtgttccccaccctggaccacaagcctgtgacagtggacctggccatcggcagcgagaagaggctgaagatcttcttcagcagcgcagatggctaccacctgattgatgctgagagcgaggtgatgtctgatgtgaccctgcccaagaaccccctggagatcatcatcccccagaacatcatcatcctgcctgactgcctgggcatcggcatgatgctgaccttcaatgctgaggccctgtctgtggaggccaatgagcagctgttcaagaagatcctggagatgtggaaggacatccccagcagcatcgcctttgagtgcacccagaggaccaccggctggggccagaaggccatcgaggtgcgcagcctgcagagccgggtgctggagagcgagctgaagagaagaagcatcaagaagctgcgcttcctgtgcaccaggggggacaagctgttcttcaccagcaccctgaggaaccaccacagccgggtgtacttcatgaccctgggcaagctggaggagctgcagagcaactatgatgtgtag

SEQ ID NO: 161920 - DNA, 567 bp, synthetic construct
  misc_feature 1..567: note = Description of Artificial Sequence: Synthetic coding sequence
  source 1..567: mol_type = other DNA
atggccggccctgggggctggagggaccgggaggtgacagacctgggccacctgcctgaccccaccggcatcttcagcctggacaagaccatcggcctgggcacctacggccgcatctacctgggcctgcacgagaagacaggagccttcaccgctgtgaaggtgatgaatgccaggaagacccccctgcctgagatcggccggcgggtgcgggtgaacaagtaccagaagtctgtgggctggagatacagtgatgaggaggaggacctgaggacagagctgaacctgctgaggaagtacagcttccacaagaacatcgtgtccttctacggggccttcttcaagctgagccccccaggccagaggcaccagctgtggatggtgatggagctgtgtgccgccggctctgtgacagatgtggtgaggatgaccagcaaccagagcctgaaggaggactggatcgcctacatctgccgggagatcctgcagcccaaggtgatcttcctgggcaccggctgcagcgacagcagcctgaagaaggagctgtgcctgaagcaccagaactag

SEQ ID NO: 161921 - DNA, 492 bp, synthetic construct
  misc_feature 1..492: note = Description of Artificial Sequence: Synthetic coding sequence
  source 1..492: mol_type = other DNA
atgcaggtgccccgggagcgcatcaagatcgccttccggctgtggatccccatcctggtgatcagaattgtggtggccggcacctggccccaggcccctggcctgagcaccctgggcctgaacatcatcatcctgcctgactgcctgggcatcggcatgatgctgaccttcaatgctgaggccctgtctgtggaggccaatgagcagctgttcaagaagatcctggagatgtggaaggacatccccagcagcatcgcctttgagtgcacccagaggaccaccggctggggccagaaggccatcgaggtgcgcagcctgcagagccgggtgctggagagcgagctgaagagaagaagcatcaagaagctgcgcttcctgtgcaccaggggggacaagctgttcttcaccagcaccctgaggaaccaccacagccgggtgtacttcatgaccctgggcaagctggaggagctgcagagcaactatgatgtgtag

SEQ ID NO: 161922 - DNA, 1449 bp, synthetic construct
  misc_feature 1..1449: note = Description of Artificial Sequence: Synthetic coding sequence
  source 1..1449: mol_type = other DNA
atgctgaagttccaggaggccgccaagtgtgtgtctggcagcacagccatcagcacctaccccaagaccctgattgccaggagatatgtgctgcagcagaagctgggcagcggcagctttggcaccgtgtacctggtgtctgacaagaaggccaagagaggagaggagctgaaggtgctgaaggagatctctgtgggggagctgaaccccaatgaaacagtgcaggccaacctggaggcccagctgctgagcaagctggaccacccagccatcgtgaagttccacgccagctttgtggagcaggacaacttctgcatcatcacagagtactgtgagggccgggacctggatgacaagatccaggagtacaagcaggccggcaagatcttccctgagaaccagatcatcgagtggttcatccagctgctgctgggcgtggactacatgcatgagcggcgcatcctgcaccgggacctgaagagcaagaatgtgttcctgaagaacaacctgctgaagattggagactttggagtgtcccggctgctgatgggcagctgtgacctggccaccaccctgaccggcaccccccactacatgagccctgaggccctgaagcaccagggctatgacaccaagagtgacatctggagcctggcctgcatcctgtatgagatgtgctgcatgaaccacgcctttgctggcagcaacttcctgagcatcgtgctgaagatcgtggagggggacacccccagcctgcctgagcgctaccccaaggagctgaatgccatcatggagagcatgctgaacaagaaccccagcctgcggcccagcgccatcgagatcctgaagatcccctacctggatgagcagctgcagaacctgatgtgccgctacagcgagatgaccctggaggacaagaacctggactgccagaaggaggccgcccacatcatcaatgccatgcagaagaggatccacctgcagaccctgcgggccctgtctgaggtgcagaagatgaccccccgggagaggatgaggctgaggaagctgcaggccgcagatgagaaggccaggaagctgaagaagatcgtggaggagaagtatgaggagaacagcaagaggatgcaggagctgcggagcaggaacttccagcagctgtctgtggatgtgctgcacgagaagacccacctgaagggcatggaggagaaggaggagcagcctgagggccgcctgagctgcagcccccaggatgaagatgaggagcgctggcagggccgggaggaggagagtgatgagcccaccctggagaacctgcctgagagccagcccatccccagcatggacctgcacgagctggagagcatcgtggaggatgccaccagtgacctgggctaccacggggactgcaacctgatcagcctggatgagtactggaagaatgagaagtag

SEQ ID NO: 161923 - DNA, 1938 bp, synthetic construct
  misc_feature 1..1938: note = Description of Artificial Sequence: Synthetic coding sequence
  source 1..1938: mol_type = other DNA
atgctgaagttccaggaggccgccaagtgtgtgtctggcagcacagccatcagcacctaccccaagaccctgattgccaggagatatgtgctgcagcagaagctgggcagcggcagctttggcaccgtgtacctggtgtctgacaagaaggccaagagaggagaggagctgaaggtgctgaaggagatctctgtgggggagctgaaccccaatgaaacagtgcaggccaacctggaggcccagctgctgagcaagctggaccacccagccatcgtgaagttccacgccagctttgtggagcaggacaacttctgcatcatcacagagtactgtgagggccgggacctggatgacaagatccaggagtacaagcaggccggcaagatcttccctgagaaccagatcatcgagtggttcatccagctgctgctgggcgtggactacatgcatgagcggcgcatcctgcaccgggacctgaagagcaagaatgtgttcctgaagaacaacctgctgaagattggagactttggagtgtcccggctgctgatgggcagctgtgacctggccaccaccctgaccggcaccccccactacatgagccctgaggccctgaagcaccagggctatgacaccaagagtgacatctggagcctggcctgcatcctgtatgagatgtgctgcatgaaccacgcctttgctggcagcaacttcctgagcatcgtgctgaagatcgtggagggggacacccccagcctgcctgagcgctaccccaaggagctgaatgccatcatggagagcatgctgaacaagaaccccagcctgcggcccagcgccatcgagatcctgaagatcccctacctggatgagcagctgcagaacctgatgtgccgctacagcgagatgaccctggaggacaagaacctggactgccagaaggaggccgcccacatcatcaatgccatgcagaagaggatccacctgcagaccctgcgggccctgtctgaggtgcagaagatgaccccccgggagaggatgaggctgaggaagctgcaggccgcagatgagaaggccaggaagctgaagaagatcgtggaggagaagtatgaggagaacagcaagaggatgcaggagctgcggagcaggaacttccagcagctgtctgtggatgtgctgcacgagaagacccacctgaagggcatggaggagaaggaggagcagcctgagggccgcctgagctgcagcccccaggatgaagatgaggagcgctggcagggccgggaggaggagagtgatgagcccaccctggagaacctgcctgagagccagcccatccccagcatggacctgcacgagctggagagcatcgtggaggatgccaccagtgacctgggctaccacgagatccctgaggaccccctggtggccgaggagtactatgcagatgcctttgacagctactgtgaggagagtgatgaggaggaggaggagatcgccctggagaggcctgagaaggagatcagaaatgaaggcagccagcctgcctaccgcaccaaccagcaggacagcgacatcgaggccctggcccgctgcctggagaatgtgctgggctgcaccagcctggacaccaagaccatcaccaccatggccgaggacatgagccctggcccccccatcttcaacagcgtgatggcccggaccaagatgaagaggatgagggagagcgccatgcagaagctgggcacagaggtgtttgaggaggtgtacaactacctgaagagggcccggcaccagaatgccagcgaggccgagatccgggagtgcctggagaaggtggtgccccaggccagtgactgctttgaggtggaccagctgctgtactttgaggagcagctgctgatcaccatgggcaaggagcccaccctgcagaaccacctgtag

SEQ ID NO: 161924 - DNA, 1386 bp, synthetic construct
  misc_feature 1..1386: note = Description of Artificial Sequence: Synthetic coding sequence
  source 1..1386: mol_type = other DNA
atgcatgagcggcgcatcctgcaccgggacctgaagagcaagaatgtgttcctgaagaacaacctgctgaagattggagactttggagtgtcccggctgctgatgggcagctgtgacctggccaccaccctgaccggcaccccccactacatgagccctgaggccctgaagcaccagggctatgacaccaagagtgacatctggagcctggcctgcatcctgtatgagatgtgctgcatgaaccacgcctttgctggcagcaacttcctgagcatcgtgctgaagatcgtggagggggacacccccagcctgcctgagcgctaccccaaggagctgaatgccatcatggagagcatgctgaacaagaaccccagcctgcggcccagcgccatcgagatcctgaagatcccctacctggatgagcagctgcagaacctgatgtgccgctacagcgagatgaccctggaggacaagaacctggactgccagaaggaggccgcccacatcatcaatgccatgcagaagaggatccacctgcagaccctgcgggccctgtctgaggtgcagaagatgaccccccgggagaggatgaggctgaggaagctgcaggccgcagatgagaaggccaggaagctgaagaagatcgtggaggagaagtatgaggagaacagcaagaggatgcaggagctgcggagcaggaacttccagcagctgtctgtggatgtgctgcacgagagtgatgagcccaccctggagaacctgcctgagagccagcccatccccagcatggacctgcacgagctggagagcatcgtggaggatgccaccagtgacctgggctaccacgagatccctgaggaccccctggtggccgaggagtactatgcagatgcctttgacagctactgtgaggagagtgatgaggaggaggaggagatcgccctggagaggcctgagaaggagatcagaaatgaaggcagccagcctgcctaccgcaccaaccagcaggacagcgacatcgaggccctggcccgctgcctggagaatgtgctgggctgcaccagcctggacaccaagaccatcaccaccatggccgaggacatgagccctggcccccccatcttcaacagcgtgatggcccggaccaagatgaagaggatgagggagagcgccatgcagaagctgggcacagaggtgtttgaggaggtgtacaactacctgaagagggcccggcaccagaatgccagcgaggccgagatccgggagtgcctggagaaggtggtgccccaggccagtgactgctttgaggtggaccagctgctgtactttgaggagcagctgctgatcaccatgggcaaggagcccaccctgcagaaccacctgtag

SEQ ID NO: 161925 - DNA, 1938 bp, synthetic construct; identical to SEQ ID NO: 161923
  misc_feature 1..1938: note = Description of Artificial Sequence: Synthetic coding sequence
  source 1..1938: mol_type = other DNA

SEQ ID NO: 161926 - DNA, 1449 bp, synthetic construct; identical to SEQ ID NO: 161922
  misc_feature 1..1449: note = Description of Artificial Sequence: Synthetic coding sequence
  source 1..1449: mol_type = other DNA

SEQ ID NO: 161927 - DNA, 1938 bp, synthetic construct; identical to SEQ ID NO: 161923
  misc_feature 1..1938: note = Description of Artificial Sequence: Synthetic coding sequence
  source 1..1938: mol_type = other DNA

SEQ ID NO: 161928 - DNA, 1413 bp, synthetic construct
  misc_feature 1..1413: note = Description of Artificial Sequence: Synthetic coding sequence
  source 1..1413: mol_type = other DNA
atgctgaagttccaggaggccgccaagtgtgtgtctggcagcacagccatcagcacctaccccaagaccctgattgccaggagatatgtgctgcagcagaagctgggcagcggcagctttggcaccgtgtacctggtgtctgacaagaaggccaagagaggagaggagctgaaggtgctgaaggagatctctgtgggggagctgaaccccaatgaaacagtgcaggccaacctggaggcccagctgctgagcaagctggaccacccagccatcgtgaagttccacgccagctttgtggagcaggacaacttctgcatcatcacagagtactgtgagggccgggacctggatgacaagatccaggagtacaagcaggccggcaagatcttccctgagaaccagatcatcgagtggttcatccagctgctgctgggcgtggactacatgcatgagcggcgcatcctgcaccgggacctgaagagcaagaatgtgttcctgaagaacaacctgctgaagattggagactttggagtgtcccggctgctgatgggcagctgtgacctggccaccaccctgaccggcaccccccactacatgagccctgaggccctgaagcaccagggctatgacaccaagagtgacatctggagcctggcctgcatcctgtatgagatgtgctgcatgaaccacgcctttgctggcagcaacttcctgagcatcgtgctgaagatcgtggagggggacacccccagcctgcctgagcgctaccccaaggagctgaatgccatcatggagagcatgctgaacaagaaccccagcctgcggcccagcgccatcgagatcctgaagatcccctacctggatgagcagctgcagaacctgatgtgccgctacagcgagatgaccctggaggacaagaacctggactgccagaaggaggccgcccacatcatcaatgccatgcagaagaggatccacctgcagaccctgcgggccctgtctgaggtgcagaagatgaccccccgggagaggatgaggctgaggaagctgcaggccgcagatgagaaggccaggaagctgaagaagatcgtggaggagaagtatgaggagaacagcaagaggatgcaggagctgcggagcaggaacttccagcagctgtctgtggatgtgctgcacgagaagacccacctgaagggcatggaggagaaggaggagcagcctgagggccgcctgagctgcagcccccaggatgaagatgaggagcgctggcagggccgggaggaggagagtgatgagcccaccctggagaacctgcctgagagccagcccatccccagcatggacctgcacgagctggagagcatcgtggaggatgccaccagtgacctgggctaccacgccacccacagctag

SEQ ID NO: 161929 - DNA, 2079 bp, synthetic construct
  misc_feature 1..2079: note = Description of Artificial Sequence: Synthetic coding sequence
  source 1..2079: mol_type = other DNA
atggagaagtatgaaagaatccgggtggtgggccgcggggcctttggaattgtgcacctgtgcctgaggaaggctgaccagaagctggtgatcatcaagcagatccctgtggagcagatgaccaaggaggagcggcaggccgcccagaatgaatgccaggtgctgaagctgctgaaccaccccaacgtcatcgagtactatgagaacttcctggaggacaaggccctgatgattgccatggagtatgcccctgggggcaccctggccgagttcatccagaagcgctgcaacagcctgctggaggaggagaccatcctgcacttctttgtgcagatcctgctggccctgcaccacgtgcacacccacctgatcctgcaccgggacctgaagacccagaacatcctgctggacaagcacaggatggtggtgaagattggagactttggcatcagcaagatcctgagcagcaagagcaaggcctacacagtggtgggcaccccctgctacatcagccctgagctgtgtgagggcaagccctacaaccagaagagtgacatctgggccctgggctgtgtgctgtatgagctggccagcctgaagagggcctttgaagctgccaacctgcctgccctggtgctgaagatcatgagcggcacctttgcccccatcagtgaccgctacagccctgagctgcggcagctggtgctgagcctgctgagcctggagcccgcccagaggcctcccctgagccacatcatggcccagcccctgtgcatccgggccctgctgaacctgcacacagatgtgggctctgtgaggatgagaagagctgagaagtctgtggcccccagcaacacaggcagcaggaccacctctgtgcgctgccggggcatcccccggggccctgtgcggcctgccatccccccacccctgagctctgtgtatgcctggggcggcggcctgggcacccccctgcggctgcccatgctgaacacagaggtggtgcaggtggccgccggccgcacccagaaggccggcgtgaccaggagcggccgcctcatcctgtgggaggccccacccctgggcgccggcggcggcagcctgctgcccggggctgtggagcagccccagccccagttcatcagccgcttcctggagggccagagcggcgtgaccatcaagcacgtggcctgtggggacttcttcaccgcctgcctgacagaccggggcatcatcatgacctttggaagtggcagcaatggctgcctgggccacggcagcctgacagacatcagccagcccaccatcgtggaggccctgctgggctatgagatggtgcaggtggcctgtggggccagccacgtgctggccctgagcacagagcgggagctgtttgcctggggccgcggggacagcggccgcctgggcctgggcacccgggagagccacagctgcccccagcaggtgcccatgcctcctggccaggaggcccagagggtggtgtgtggcatcgacagctccatgatcctgactgtgcccggccaggccctggcctgtggcagcaaccgcttcaacaagctgggcctggaccacctgagcctgggggaggagcctgtgccccaccagcaggtggaggaggccctgtccttcaccctgctgggcagcgcccccctggaccaggagcccctgctgagcattgacctgggcacagcccacagcgctgctgtgacagccagcggggactgctacaccttcggcagcaaccagcacggccagctgggcaccaacacccggcggggcagccgggccccctgcaaggtgcagggcctggagggcatcaagatggccatggtggcctgtggagatgccttcaccgtggccatcggggctgagagcgaggtgtacagctggggcaaaggagcccggggccgcctgggcagaagagatgaagatgctggcctgcccaggcctgtgcagctggatgagacccacccctacacagtgacctctgtgtcctgctgccacggcaacaccctgctggccgtgcgctctgtgacagatgagcctgtgcccccatag

SEQ ID NO: 161930 - DNA, 1383 bp, synthetic construct
  misc_feature 1..1383: note = Description of Artificial Sequence: Synthetic coding sequence
  source 1..1383: mol_type = other DNA
atggagaagtatgaaagaatccgggtggtgggccgcggggcctttggaattgtgcacctgtgcctgaggaaggctgaccagaagctggtgatcatcaagcagatccctgtggagcagatgaccaaggaggagcggcaggccgcccagaatgaatgccaggtgctgaagctgctgaaccaccccaacgtcatcgagtactatgagaacttcctggaggacaaggccctgatgattgccatggagtatgcccctgggggcaccctggccgagttcatccagaagcgctgcaacagcctgctggaggaggagaccatcctgcacttctttgtgcagatcctgctggccctgcaccacgtgcacacccacctgatcctgcaccgggacctgaagacccagaacatcctgctggacaagcacaggatggtggtgaagattggagactttggcatcagcaagatcctgagcagcaagagcaaggcctacacagtggtgggcaccccctgctacatcagccctgagctgtgtgagggcaagccctacaaccagaagagtgacatctgggccctgggctgtgtgctgtatgagctggccagcctgaagagggcctttgaagctgccaacctgcctgccctggtgctgaagatcatgagcggcacctttgcccccatcagtgaccgctacagccctgagctgcggcagctggtgctgagcctgctgagcctggagcccgcccagaggcctcccctgagccacatcatggcccagcccctgtgcatccgggccctgctgaacctgcacacagatgtgggctctgtgaggatgagaagacctgtgcagggccagagagctgtgctgggcggccgggtgtgggcccccagcggcagcactggaggcctgcggcagcgggagacctggggcaagagcagcctgcctgcctgcagaaatgtgagaagagtgtttgtgctgcggccccccagcgtgctgcagggccgggaggtgcggggcccccagcagcaccgggagcaggaccaccagtgccccctgcagcgctacccacctggcacctgtgaggccagccaccccaccaccaccgtggtgtctgtgtgcctgggctggtgggccggccaccccccagctgctgccaatgcccagcacagaggaggccctgggggctcctgggcccacgccgagagcagaagacatgccctgtgggccagccaccctgtgggcggccccaccccccgctgcagaagacggcagagccccagctggggcagcggggccgccacagcccctgtgcacctggccttccctgggggccctgtgggctgtgaccaccaggcccggggcctgtggggcctgctgcactgcctgcctgactag

SEQ ID NO: 161931 - DNA, 2940 bp, synthetic construct
  misc_feature 1..2940: note = Description of Artificial Sequence: Synthetic coding sequence
  source 1..2940: mol_type = other DNA
atgtctgtgctgggggagtatgagcggcactgtgacagcatcaacagcgactttggcagcgagagcggcggctgtggggacagcagccctggccccagcgccagccagggcccccgggccggcggcggcgctgctgagcaggaggagctgcactacatccccatccgggtgctgggccgcggggcctttggagaggccaccctgtacagaagaacagaagatgacagcctggtggtgtggaaggaggtggacctgacccggctgtctgagaaggagaggagagatgccctgaatgagatcgtcatcctggccctgctgcagcacgacaacatcatcgcctactacaaccacttcatggacaacaccaccctgctgattgagctggagtactgcaatggaggcaacctgtatgacaagatcctgcggcagaaggacaagctgtttgaggaggagatggtggtgtggtacctgttccagatcgtgtctgctgtgtcctgcatccacaaggccggcatcctgcaccgggacatcaagaccctgaacatcttcctgaccaaggccaacctgatcaagctgggggactatggcctggccaagaagctgaacagcgagtacagcatggccgagaccctggtgggcaccccctactacatgagccctgagctgtgccagggcgtgaagtacaacttcaagagtgacatctgggccgtgggctgtgtgatctttgagctgctgaccctgaagaggacctttgatgccaccaaccccctgaacctgtgtgtgaagatcgtgcagggcatccgggccatggaggtggacagcagccagtacagcctggagctgatccagatggtgcacagctgcctggaccaggaccctgagcagaggcccacagcagatgagctgctggaccggcccctgctgaggaagagaagaagagagatggaggagaaggtgaccctgctgaatgcccccaccaagaggcccaggagcagcacagtgacagaggcccccatcgctgtggtgaccagcaggaccagcgaggtgtatgtgtggggcggcggcaagagcaccccccagaagctggatgtgatcaagagcggctgcagcgcccggcaggtgtgtgccggcaacacccactttgctgtggtgacagtggagaaggagctgtacacctgggtgaacatgcagggcggcaccaagctgcacggccagctgggccacggggacaaggccagctaccggcagcccaagcacgtggagaagctgcagggcaaggccatccggcaggtgtcctgtggagatgacttcaccgtgtgtgtgacagatgagggccagctgtatgccttcggcagtgactactacggctgcatgggcgtggacaaggtggccggccctgaggtgctggagcccatgcagctgaacttcttcctgagcaaccctgtggagcaggtgtcctgtggggacaaccacgtggtggtgctgaccaggaacaaggaggtgtacagctggggctgtggggagtatggccgcctgggcctggacagcgaggaggactactacaccccccagaaggtggatgtgcccaaggccctgatcatcgtggccgtgcagtgtggctgtgatggcaccttcctgctgacccagagcggcaaggtgctggcctgtggcctgaatgagttcaacaagctgggcctgaaccagtgcatgagcggcatcatcaaccacgaggcctaccacgaggtgccctacaccaccagcttcaccctggccaagcagctgtccttctacaagatccgcaccatcgcccctgggaagacccacacagctgccattgatgagcggggccgcctgctgaccttcggctgcaacaagtgtggccagctgggcgtgggcaactacaagaagaggctgggcatcaacctgctgggcggccccctgggcggcaagcaggtgatccgggtgtcctgtggagatgagttcaccatcgccgccacagatgacaaccacatctttgcctggggcaatggaggaaatggccgcctggccatgacccccacagagcggccccacggcagtgacatctgcacctcctggccccggcccatcttcggcagcctgcaccacgtgcctgacctgagctgccggggctggcacaccatcctgattgtggagaaggtgctgaacagcaagaccatccgcagcaacagcagcggcctgagcatcggcaccgtcttccagagcagcagccctgggggcggcggcggcggcggcggcggggaggaggaggacagccagcaggagagcgagaccccagaccccagcggcggcttccggggcaccatggaggccgaccggggcatggagggcctcatcagccccacagaggccatgggcaacagcaatggagccagcagcagctgccccggctggctgaggaaggagctggagaatgctgagttcatccccatgccagacagccccagccccctgtctgctgccttcagcgagagcgagaaggacaccctgccctatgaggagctgcagggcctgaaggtggccagcgaggcccccctggagcacaagccccaggtggaggccagcagcccccggctgaacccagctgtgacctgtgccggcaagggcacccccctgaccccaccagcctgtgcctgcagcagcctgcaggtggaggtggagcggctgcagggcctggtgctgaagtgcctggccgagcagcagaagctgcagcaggagaacctgcagatcttcacccagctgcagaagctgaacaagaagctggagggcggccagcaggtgggcatgcacagcaagggcacccagacagccaaggaggagatggagatggaccccaagccagacctggacagcgacagctggtgcctgctgggcacagacagctgccggcccagcctgtag

SEQ ID NO: 161932 - DNA, 1545 bp, synthetic construct
  misc_feature 1..1545: note = Description of Artificial Sequence: Synthetic coding sequence
  source 1..1545: mol_type = other DNA
atgtctgtgctgggggagtatgagcggcactgtgacagcatcaacagcgactttggcagcgagagcggcggctgtggggacagcagccctggccccagcgccagccagggcccccgggccggcggcggggcctttggagaggccaccctgtacagaagaacagaagatgacagcctggtggtgtggaaggaggtggacctgacccggctgtctgagaaggagaggagagatgccctgaatgagatcgtcatcctggccctgctgcagcacgacaacatcatcgcctactacaaccacttcatggacaacaccaccctgctgattgagctggagtactgcaatggaggcaacctgtatgacaagatcctgcggcagaaggacaagctgtttgaggaggagatggtggtgtggtacctgttccagatcgtgtctgctgtgtcctgcatccacaaggccggcatcctgcaccgggacatcaagaccctgaacatcttcctgaccaaggccaacctgatcaagctgggggactatggcctggccaagaagctgaacagcgagtacagcatggccgagaccctggtgggcaccccctactacatgagccctgagctgtgccagggcgtgaagtacaacttcaagagtgacatctgggccgtgggctgtgtgatctttgagctgctgaccctgaagaggacctttgatgccaccaaccccctgaacctgtgtgtgaagatcgtgcagggcatccgggccatggaggtggacagcagccagtacagcctggagctgatccagatggtgcacagctgcctggaccaggaccctgagcagaggcccacagcagatgagctgctggaccggcccctgctgaggaagagaagaagagagatggaggagaaggtgaccctgctgaatgcccccaccaagaggcccaggagcagcacagtgacagaggcccccatcgctgtggtgaccagcaggaccagcgaggtgtatgtgtggggcggcggcaagagcaccccccagaagctggatgtgatcaagagcggctgcagcgcccggcaggtgtgtgccggcaacacccactttgctgtggtgacagtggagaaggagctgtacacctgggtgaacatgcagggcggcaccaagctgcacggccagctgggccacggggacaaggccagctaccggcagcccaagcacgtggagaagctgcagggcaaggccatccggcaggtgtcctgtggagatgacttcaccgtgtgtgtgacagatgagggccagctgtatgccttcggcagtgactactacggctgcatgggcgtggacaaggtggccggccctgaggtgctggagcccatgcagctgaacttcttcctgagcaaccctgtggagcaggtgtcctgtggggacaaccacgtggtggtgctgaccaggaacaaggaggtgtacagctggggctgtggggagtatggccggggcagcctggtgtctgtgcacttcttcaccggcatccagcctgacttcaaggtggtgtgcatctag

SEQ ID NO: 161933 - DNA, 3777 bp, synthetic construct
  misc_feature 1..3777: note = Description of Artificial Sequence: Synthetic coding sequence
  source 1..3777: mol_type = other DNA
atggagaagtatgtgcggctgcagaagatcggggagggcagctttgggaaggccatcctggtgaagagcacagaagatggccggcagtatgtgatcaaggagatcaacatcagcaggatgagcagcaaggagcgggaggagagcagaagagaggtggccgtgctggccaacatgaagcaccccaacatcgtgcagtaccgggagagctttgaggagaatggcagcctgtacatcgtgatggactactgtgagggcggggacctcttcaagaggatcaatgcccagaagggcgtgctcttccaggaggaccagatcctggactggtttgtgcagatctgcctggccctgaagcacgtgcatgacaggaagatcctgcaccgggacatcaagagccagaacatcttcctgaccaaggatggcaccgtgcagctgggggactttggaattgcccgggtgctgaacagcacagtggagctggcccggacctgcatcggcaccccctactacctgagccctgagatctgtgagaacaagccctacaacaacaagagtgacatctgggccctgggctgtgtgctgtatgagctgtgcaccctgaagcacgcctttgaagctggctccatgaagaacctggtgctgaagatcatcagcggcagcttcccccctgtgtccctgcactacagctatgacctgcggagcctggtgtcccagctgttcaagaggaacccccgggaccggcccagcgtgaacagcatcctggagaagggcttcatcgccaagagaattgagaagttcctgagcccccagctgattgctgaggagttctgcctgaagaccttcagcaagtttggcagccagcccatcccagccaagaggcctgccagcggccagaacagcatctctgtgatgcctgcccagaagatcaccaagccagctgccaagtatggcatccccctggcctacaagaagtacggggacaagaagctgcacgagaagaagcccctgcagaagcacaagcaggcccaccagaccccagagaagagggtgaacacaggagaggagaggaggaagatcagcgaggaggccgccaggaagaggcggctggagttcatcgagaaggagaagaagcagaaggaccagatcatcagcctgatgaaggccgagcagatgaagaggcaggagaaggagcggctggagcgcatcaacagagcccgggagcagggctggagaaatgtgctgtctgctgggggcagcggggaggtgaaggcccccttcctgggcagcggcggcaccatcgcccccagcagcttcagcagccggggccagtatgagcactaccacgccatctttgaccagatgcagcagcagagagcagaagataatgaggccaagtggaagcgggagatctacggccggggcctgcctgagcggggcatcctgcccggggtgcggcccggcttcccctatggagctgctggccaccaccacttcccagatgctgatgacatcaggaagaccctgaagaggctgaaggctgtgtccaagcaggccaatgccaaccggcagaagggccagctggccgtggagcgggccaagcaggtggaggagttcctgcagaggaagcgggaggccatgcagaacaaggcccgggcagagggccacatggtgtacctggcccggctgcggcagatccggctgcagaacttcaatgaaaggcagcagatcaaggccaagctgcggggggagaagaaggaggccaaccacagcgagggccaggagggcagcgaggaggccgacatgaggaggaagaagattgagagcctgaaggcccacgccaatgcccgggctgctgtgctgaaggagcagctggagaggaagaggaaggaggcctatgagcgggagaagaaggtgtgggaggagcacctggtggccaagggcgtgaagagcagtgatgtgagcccccccctgggccagcatgaaacaggaggcagccccagcaagcagcagatgaggagcgtcatctctgtgaccagcgccctgaaggaggtgggcgtggacagcagcctgacagacacccgggagaccagcgaggagatgcagaagaccaacaatgccatcagcagcaagcgggagatcctgcggcggctgaatgaaaacctgaaggcccaggaggatgagaagggcaagcagaacctgagtgacacctttgagatcaacgtgcatgaagatgccaaggagcacgagaaggagaagtctgtgtccagtgacaggaagaagtgggaggccggcggccagctggtgatccccctggatgagctgaccctggacaccagcttcagcaccacagagcggcacacagtgggggaggtgatcaagctgggccccaacggcagcccccggcgggcctggggcaagagccccacagacagcgtgctgaagatcctgggggaggccgagctgcagctgcagacagagctgctggagaacaccaccatccgctctgagatcagccctgagggggagaagtacaagcccctcatcaccggggagaagaaggtgcagtgcatcagccatgagatcaaccccagcgccatcgtggacagccctgtggagaccaagagccctgagttcagcgaggccagcccccagatgagcctgaagctggagggcaacctggaggagccagatgacctggagacagagatcctgcaggagcccagcggcaccaacaaggatgagagcctgccctgcaccatcacagatgtgtggatcagcgaggagaaggagaccaaggagacccagagcgctgaccgcatcaccatccaggagaatgaggtgtctgaagatggagtgagcagcacagtggaccagctgagtgacatccacatcgagcccggcaccaatgacagccagcacagcaaatgtgatgtggacaagtctgtgcagcctgagcccttcttccacaaggtggtgcacagcgagcacctgaacctggtgccccaggtgcagagcgtgcagtgcagccctgaggagagctttgccttccgcagccacagccacctgccccccaagaacaagaacaagaacagcctgctgattggcctgagcacaggcctgtttgatgccaacaaccccaagatgctgcggacctgcagcctgcctgacctgagcaagctgttccgcaccctgatggatgtgcccaccgtgggagatgtgcggcaggacaacctggagattgatgaaattgaagatgagaacatcaaggagggccccagcgacagtgaagatattgtgtttgaggagacagacacagacctgcaggagctgcaggcctccatggagcagctgctgcgggagcagcctggagaggagtacagcgaggaggaggagagcgtgctgaagaacagtgatgtggagcccacagccaatggaacagatgtggctgatgaagatgacaaccccagcagcgagagcgccctgaatgaggagtggcacagcgacaacagtgatggagaaattgcctctgaatgtgaatgtgacagcgtcttcaaccacctggaggagctgcggctgcacctggagcaggagatgggctttgagaagttctttgaggtgtatgagaagatcaaggccatccatgaagatgaagatgagaacatcgagatctgcagcaagatcgtgcagaacatcctgggcaatgagcaccagcacctgtatgccaagatcctgcacctggtgatggctgatggagcctaccaggaggacaatgatgaatag

SEQ ID NO: 161934 - DNA, 3861 bp, synthetic construct
  misc_feature 1..3861: note = Description of Artificial Sequence: Synthetic coding sequence
  source 1..3861: mol_type = other DNA
atggagaagtatgtgcggctgcagaagatcggggagggcagctttgggaaggccatcctggtgaagagcacagaagatggccggcagtatgtgatcaaggagatcaacatcagcaggatgagcagcaaggagcgggaggagagcagaagagaggtggccgtgctggccaacatgaagcaccccaacatcgtgcagtaccgggagagctttgaggagaatggcagcctgtacatcgtgatggactactgtgagggcggggacctcttcaagaggatcaatgcccagaagggcgtgctcttccaggaggaccagatcctggactggtttgtgcagatctgcctggccctgaagcacgtgcatgacaggaagatcctgcaccgggacatcaagagccagaacatcttcctgaccaaggatggcaccgtgcagctgggggactttggaattgcccgggtgctgaacagcacagtggagctggcccggacctgcatcggcaccccctactacctgagccctgagatctgtgagaacaagccctacaacaacaagagtgacatctgggccctgggctgtgtgctgtatgagctgtgcaccctgaagcacgcctttgaagctggctccatgaagaacctggtgctgaagatcatcagcggcagcttcccccctgtgtccctgcactacagctatgacctgcggagcctggtgtcccagctgttcaagaggaacccccgggaccggcccagcgtgaacagcatcctggagaagggcttcatcgccaagagaattgagaagttcctgagcccccagctgattgctgaggagttctgcctgaagaccttcagcaagtttggcagccagcccatcccagccaagaggcctgccagcggccagaacagcatctctgtgatgcctgcccagaagatcaccaagccagctgccaagtatggcatccccctggcctacaagaagtacggggacaagaagctgcacgagaagaagcccctgcagaagcacaagcaggcccaccagaccccagagaagagggtgaacacaggagaggagaggaggaagatcagcgaggaggccgccaggaagaggcggctggagttcatcgagaaggagaagaagcagaaggaccagatcatcagcctgatgaaggccgagcagatgaagaggcaggagaaggagcggctggagcgcatcaacagagcccgggagcagggctggagaaatgtgctgtctgctgggggcagcggggaggtgaaggcccccttcctgggcagcggcggcaccatcgcccccagcagcttcagcagccggggccagtatgagcactaccacgccatctttgaccagatgcagcagcagagagcagaagataatgaggccaagtggaagcgggagatctacggccggggcctgcctgagcggggcatcctgcccggggtgcggcccggcttcccctatggagctgctggccaccaccacttcccagatgctgatgacatcaggaagaccctgaagaggctgaaggctgtgtccaagcaggccaatgccaaccggcagaagggccagctggccgtggagcgggccaagcaggtggaggagttcctgcagaggaagcgggaggccatgcagaacaaggcccgggcagagggccacatgggcatcctgcagaacctggccgccatgtatggaggccggcccagcagcagccggggcggcaagcccaggaacaaggaggaggaggtgtacctggcccggctgcggcagatccggctgcagaacttcaatgaaaggcagcagatcaaggccaagctgcggggggagaagaaggaggccaaccacagcgagggccaggagggcagcgaggaggccgacatgaggaggaagaagattgagagcctgaaggcccacgccaatgcccgggctgctgtgctgaaggagcagctggagaggaagaggaaggaggcctatgagcgggagaagaaggtgtgggaggagcacctggtggccaagggcgtgaagagcagtgatgtgagcccccccctgggccagcatgaaacaggaggcagccccagcaagcagcagatgaggagcgtcatctctgtgaccagcgccctgaaggaggtgggcgtggacagcagcctgacagacacccgggagaccagcgaggagatgcagaagaccaacaatgccatcagcagcaagcgggagatcctgcggcggctgaatgaaaacctgaaggcccaggaggatgagaagggcaagcagaacctgagtgacacctttgagatcaacgtgcatgaagatgccaaggagcacgagaaggagaagtctgtgtccagtgacaggaagaagtgggaggccggcggccagctggtgatccccctggatgagctgaccctggacaccagcttcagcaccacagagcggcacacagtgggggaggtgatcaagctgggccccaacggcagcccccggcgggcctggggcaagagccccacagacagcgtgctgaagatcctgggggaggccgagctgcagctgcagacagagctgctggagaacaccaccatccgctctgagatcagccctgagggggagaagtacaagcccctcatcaccggggagaagaaggtgcagtgcatcagccatgagatcaaccccagcgccatcgtggacagccctgtggagaccaagagccctgagttcagcgaggccagcccccagatgagcctgaagctggagggcaacctggaggagccagatgacctggagacagagatcctgcaggagcccagcggcaccaacaaggatgagagcctgccctgcaccatcacagatgtgtggatcagcgaggagaaggagaccaaggagacccagagcgctgaccgcatcaccatccaggagaatgaggtgtctgaagatggagtgagcagcacagtggaccagctgagtgacatccacatcgagcccggcaccaatgacagccagcacagcaaatgtgatgtggacaagtctgtgcagcctgagcccttcttccacaaggtggtgcacagcgagcacctgaacctggtgccccaggtgcagagcgtgcagtgcagccctgaggagagctttgccttccgcagccacagccacctgccccccaagaacaagaacaagaacagcctgctgattggcctgagcacaggcctgtttgatgccaacaaccccaagatgctgcggacctgcagcctgcctgacctgagcaagctgttccgcaccctgatggatgtgcccaccgtgggagatgtgcggcaggacaacctggagattgatgaaattgaagatgagaacatcaaggagggccccagcgacagtgaagatattgtgtttgaggagacagacacagacctgcaggagctgcaggcctccatggagcagctgctgcgggagcagcctggagaggagtacagcgaggaggaggagagcgtgctgaagaacagtgatgtggagcccacagccaatggaacagatgtggctgatgaagatgacaaccccagcagcgagagcgccctgaatgaggagtggcacagcgacaacagtgatggagaaattgcctctgaatgtgaatgtgacagcgtcttcaaccacctggaggagctgcggctgcacctggagcaggagatgggctttgagaagttctttgaggtgtatgagaagatcaaggccatccatgaagatgaagatgagaacatcgagatctgcagcaagatcgtgcagaacatcctgggcaatgagcaccagcacctgtatgccaagatcctgcacctggtgatggctgatggagcctaccaggaggacaatgatgaatag

SEQ ID NO: 161935 - DNA, 3645 bp, synthetic construct
  misc_feature 1..3645: note = Description of Artificial Sequence: Synthetic coding sequence
  source 1..3645: mol_type = other DNA
atggagaagtatgtgcggctgcagaagatcggggagggcagctttgggaaggccatcctggtgaagagcacagaagatggccggcagtatgtgatcaaggagatcaacatcagcaggatgagcagcaaggagcgggaggagagcagaagagaggtggccgtgctggccaacatgaagcaccccaacatcgtgcagtaccgggagagctttgaggagaatggcagcctgtacatcgtgatggactactgtgagggcggggacctcttcaagaggatcaatgcccagaagggcgtgctcttccaggaggaccagatcctggactggtttgtgcagatctgcctggccctgaagcacgtgcatgacaggaagatcctgcaccgggacatcaagagccagaacatcttcctgaccaaggatggcaccgtgcagctgggggactttggaattgcccgggtgctgaacagcacagtggagctggcccggacctgcatcggcaccccctactacctgagccctgagatctgtgagaacaagccctacaacaacaagagtgacatctgggccctgggctgtgtgctgtatgagctgtgcaccctgaagcacgcctttgaagctggctccatgaagaacctggtgctgaagatcatcagcggcagcttcccccctgtgtccctgcactacagctatgacctgcggagcctggtgtcccagctgttcaagaggaacccccgggaccggcccagcgtgaacagcatcctggagaagggcttcatcgccaagagaattgagaagttcctgagcccccagctgattgctgaggagttctgcctgaagaccttcagcaagtttggcagccagcccatcccagccaagaggcctgccagcggccagaacagcatctctgtgatgcctgcccagaagatcaccaagccagctgccaagtatggcatccccctggcctacaagaagtacggggacaagaagctgcacgagaagaagcccctgcagaagcacaagcaggcccaccagaccccagagaagagggtgaacacaggagaggagaggaggaagatcagcgaggaggccgccaggaagaggcggctggagttcatcgagaaggagaagaagcagaaggaccagatcatcagcctgatgaaggccgagcagatgaagaggcaggagaaggagcggctggagcgcatcaacagagcccgggagcagggctggagaaatgtgctgtctgctgggggcagcggggaggtgaaggcccccttcctgggcagcggcggcaccatcgcccccagcagcttcagcagccggggccagtatgagcactaccacgccatctttgaccagatgcagcagcagagagcagaagataatgaggccaagtggaagcgggagatctacggccggggcctgcctgagcggcagaagggccagctggccgtggagcgggccaagcaggtggaggagttcctgcagaggaagcgggaggccatgcagaacaaggcccgggcagagggccacatggtgtacctggcccggctgcggcagatccggctgcagaacttcaatgaaaggcagcagatcaaggccaagctgcggggggagaagaaggaggccaaccacagcgagggccaggagggcagcgaggaggccgacatgaggaggaagaagattgagagcctgaaggcccacgccaatgcccgggctgctgtgctgaaggagcagctggagaggaagaggaaggaggcctatgagcgggagaagaaggtgtgggaggagcacctggtggccaagggcgtgaagagcagtgatgtgagcccccccctgggccagcatgaaacaggaggcagccccagcaagcagcagatgaggagcgtcatctctgtgaccagcgccctgaaggaggtgggcgtggacagcagcctgacagacacccgggagaccagcgaggagatgcagaagaccaacaatgccatcagcagcaagcgggagatcctgcggcggctgaatgaaaacctgaaggcccaggaggatgagaagggcaagcagaacctgagtgacacctttgagatcaacgtgcatgaagatgccaaggagcacgagaaggagaagtctgtgtccagtgacaggaagaagtgggaggccggcggccagctggtgatccccctggatgagctgaccctggacaccagcttcagcaccacagagcggcacacagtgggggaggtgatcaagctgggccccaacggcagcccccggcgggcctggggcaagagccccacagacagcgtgctgaagatcctgggggaggccgagctgcagctgcagacagagctgctggagaacaccaccatccgctctgagatcagccctgagggggagaagtacaagcccctcatcaccggggagaagaaggtgcagtgcatcagccatgagatcaaccccagcgccatcgtggacagccctgtggagaccaagagccctgagttcagcgaggccagcccccagatgagcctgaagctggagggcaacctggaggagccagatgacctggagacagagatcctgcaggagcccagcggcaccaacaaggatgagagcctgccctgcaccatcacagatgtgtggatcagcgaggagaaggagaccaaggagacccagagcgctgaccgcatcaccatccaggagaatgaggtgtctgaagatggagtgagcagcacagtggaccagctgagtgacatccacatcgagcccggcaccaatgacagccagcacagcaaatgtgatgtggacaagtctgtgcagcctgagcccttcttccacaaggtggtgcacagcgagcacctgaacctggtgccccaggtgcagagcgtgcagtgcagccctgaggagagctttgccttccgcagccacagccacctgccccccaagaacaagaacaagaacagcctgctgattggcctgagcacaggcctgtttgatgccaacaaccccaagatgctgcggacctgcagcctgcctgacctgagcaagctgttccgcaccctgatggatgtgcccaccgtgggagatgtgcggcaggacaacctggagattgatgaaattgaagatgagaacatcaaggagggccccagcgacagtgaagatattgtgtttgaggagacagacacagacctgcaggagctgcaggcctccatggagcagctgctgcgggagcagcctggagaggagtacagcgaggaggaggagagcgtgctgaagaacagtgatgtggagcccacagccaatggaacagatgtggctgatgaagatgacaaccccagcagcgagagcgccctgaatgaggagtggcacagcgacaacagtgatggagaaattgcctctgaatgtgaatgtgacagcgtcttcaaccacctggaggagctgcggctgcacctggagcaggagatgggctttgagaagttctttgaggtgtatgagaagatcaaggccatccatgaagatgaagatgagaacatcgagatctgcagcaagatcgtgcagaacatcctgggcaatgagcaccagcacctgtatgccaagatcctgcacctggtgatggctgatggagcctaccaggaggacaatgatgaatag

SEQ ID NO: 161936 - DNA, 3570 bp, synthetic construct
  misc_feature 1..3570: note = Description of Artificial Sequence: Synthetic coding sequence
  source 1..3570: mol_type = other DNA
atggagaagtatgtgcggctgcagaagatcggggagggcagctttgggaaggccatcctggtgaagagcacagaagatggccggcagtatgtgatcaaggagatcaacatcagcaggatgagcagcaaggagcgggaggagagcagaagagaggtggccgtgctggccaacatgaagcaccccaacatcgtgcagtaccgggagagctttgaggagaatggcagcctgtacatcgtgatggactactgtgagggcggggacctcttcaagaggatcaatgcccagaagggcgtgctcttccaggaggaccagatcctggactggtttgtgcagatctgcctggccctgaagcacgtgcatgacaggaagatcctgcaccgggacatcaagagccagaacatcttcctgaccaaggatggcaccgtgcagctgggggactttggaattgcccgggtgctgaacagcacagtggagctggcccggacctgcatcggcaccccctactacctgagccctgagatctgtgagaacaagccctacaacaacaagagtgacatctgggccctgggctgtgtgctgtatgagctgtgcaccctgaagcacgcctttgaagctggctccatgaagaacctggtgctgaagatcatcagcggcagcttcccccctgtgtccctgcactacagctatgacctgcggagcctggtgtcccagctgttcaagaggaacccccgggaccggcccagcgtgaacagcatcctggagaagggcttcatcgccaagagaattgagaagttcctgagcccccagctgattgctgaggagttctgcctgaagaccttcagcaagtttggcagccagcccatcccagccaagaggcctgccagcggccagaacagcatctctgtgatgcctgcccagaagatcaccaagccagctgccaagtatggcatccccctggcctacaagaagtacggggacaagaagctgcacgagaagaagcccctgcagaagcacaagcaggcccaccagaccccagagaagagggtgaacacaggagaggagaggaggaagatcagcgaggaggccgccaggaagaggcggctggagttcatcgagaaggagaagaagcagaaggaccagatcatcagcctgatgaaggccgagcagatgaagaggcaggagaaggagcgggcccccttcctgggcagcggcggcaccatcgcccccagcagcttcagcagccggggccagtatgagcactaccacgccatctttgaccagatgcagcagcagagagctgaggacaatgaggccaagtggaagcgggagatctacggccggggcctgcctgagcggcagaagggccagctggccgtggagcgggccaagcaggtggaggagttcctgcagaggaagcgggaggccatgcagaacaaggcccgggcagagggccacatggtgtacctggcccggctgcggcagatccggctgcagaacttcaatgaaaggcagcagatcaaggccaagctgcggggggagaagaaggaggccaaccacagcgagggccaggagggcagcgaggaggccgacatgaggaggaagaagattgagagcctgaaggcccacgccaatgcccgggctgctgtgctgaaggagcagctggagaggaagaggaaggaggcctatgaaagagagaagaaggtgtgggaggagcacctggtggccaagggcgtgaagagcagtgatgtgtccccacccctgggccagcacgagaccggcggcagccccagcaagcagcagatgaggagcgtcatctctgtgaccagcgccctgaaggaggtgggcgtggacagcagcctgacagacacccgggagaccagcgaggagatgcagaagaccaacaatgccatcagcagcaagcgggagatcctgcggcggctgaatgaaaacctgaaggcccaggaggatgagaagggcaagcagaacctgagtgacacctttgagatcaacgtgcatgaagatgccaaggagcacgagaaggagaagtctgtgtccagtgacaggaagaagtgggaggccggcggccagctggtgatccccctggatgagctgaccctggacaccagcttcagcaccacagagcggcacacagtgggggaggtgatcaagctgggccccaacggcagcccccggcgggcctggggcaagagccccacagattctgtgctgaagatcctgggggaggccgagctgcagctgcagacagagctgctggagaacaccaccatccgctctgagatcagccctgagggggagaagtacaagcccctcatcactggagagaagaaggtgcagtgcatcagccatgagatcaaccccagcgccatcgtggacagccctgtggagaccaagagccctgagttcagcgaggccagcccccagatgagcctgaagctggagggcaacctggaggagccagatgacctggagacagagatcctgcaggagcccagcggcaccaacaaggatgagagcctgccctgcaccatcacagatgtgtggatcagcgaggagaaggagaccaaggagacccagagcgctgaccgcatcaccatccaggagaatgaggtgtctgaagatggagtgagcagcacagtggaccagctgagtgacatccacatcgagcccggcaccaatgacagccagcacagcaaatgtgatgtggacaagtctgtgcagcctgagcccttcttccacaaggtggtgcacagcgagcacctgaacctggtgccccaggtgcagagcgtgcagtgcagccctgaggagagctttgccttccgcagccacagccacctgccccccaagaacaagaacaagaacagcctgctgattggcctgagcacaggcctgtttgatgccaacaaccccaagatgctgcggacctgcagcctgcctgacctgagcaagctgttccgcaccctgatggatgtgcccaccgtgggagatgtgcggcaggacaacctggagattgatgaaattgaagatgagaacatcaaggagggccccagcgacagcgaggacatcgtgtttgaggagacagacacagacctgcaggagctgcaggcctccatggagcagctgctgcgggagcagcccggggaggagtacagcgaggaggaggagagcgtgctgaagaacagtgatgtggagcccacagccaacggcacagatgtggctgatgaagatgacaaccccagcagcgagagcgccctgaatgaggagtggcacagcgacaacagtgatggagagatcgcctctgaatgtgaatgtgacagcgtcttcaaccacctggaggagctgcggctgcacctggagcaggagatgggctttgagaagttctttgaggtgtatgagaagatcaaggccatccatgaagatgaagatgaaaatattgagatctgcagcaagatcgtgcagaacatcctgggcaatgagcaccagcacctgtatgccaagatcctgcacctggtgatggctgatggagcctaccaggaggacaatgatgaatag

SEQ ID NO: 161937 - DNA, 1155 bp, synthetic construct
  misc_feature 1..1155: note = Description of Artificial Sequence: Synthetic coding sequence
  source 1..1155: mol_type = other DNA
atgcccagcagagctgaggactatgaggtgctgtacaccatcggcaccggcagctatggccgctgccagaagatccggaggaagagtgatggcaagatcctggtgtggaaggagctggactatggctccatgacagaagctgagaagcagatgctggtgtctgaggtgaacctgctgcgggagctgaagcaccccaacatcgtgcgctactatgaccgcatcatcgacaggaccaacaccaccctgtacatcgtgatggagtactgtgagggcggggacctggccagcgtcatcaccaagggcaccaaggagcggcagtacctggatgaggagtttgtgctgcgggtgatgacccagctgaccctggccctgaaggagtgccacagaagaagtgatggcggccacacagtgctgcaccgggacctgaagccagccaacgtgttcctggatggcaagcagaatgtgaagctgggggactttggcctggcccgcatcctgaaccacgacaccagctttgccaagacctttgtgggcaccccctactacatgagccctgagcagatgaacaggatgagctacaatgagaagagtgacatctggagcctgggctgcctgctgtatgagctgtgtgccctgatgccacccttcaccgccttcagccagaaggagctggccggcaagatccgggagggcaagttccgccgcatcccctaccgctacagtgatgagctgaatgagatcatcaccaggatgctgaacctgaaggactaccaccggcccagcgtggaggagatcctggagaaccccctgattgctgacctggtggctgatgagcagaggaggaacctggagcggcggggccggcagctgggggagcctgagaagagccaggacagcagccctgtgctgtctgagctgaagctgaaggagatccagctgcaggagcgggagcgggccctgaaggcccgggaggagcggctggagcagaaggagcaggagctgtgtgtgcgggagcggctggccgaggacaagctggcccgggcagagaacctgctgaagaactacagcctgctgaaggagaggaagttcctgagcctggccagcaaccctggcatgaggatcaacctggtgaacagatcctggtgctacaagtag

SEQ ID NO: 161938 - DNA, 1338 bp, synthetic construct
  misc_feature 1..1338: note = Description of Artificial Sequence: Synthetic coding sequence
  source 1..1338: mol_type = other DNA
atgcccagcagagctgaggactatgaggtgctgtacaccatcggcaccggcagctatggccgctgccagaagatccggaggaagagtgatggcaagatcctggtgtggaaggagctggactatggctccatgacagaagctgagaagcagatgctggtgtctgaggtgaacctgctgcgggagctgaagcaccccaacatcgtgcgctactatgaccgcatcatcgacaggaccaacaccaccctgtacatcgtgatggagtactgtgagggcggggacctggccagcgtcatcaccaagggcaccaaggagcggcagtacctggatgaggagtttgtgctgcgggtgatgacccagctgaccctggccctgaaggagtgccacagaagaagtgatggcggccacacagtgctgcaccgggacctgaagccagccaacgtgttcctggatggcaagcagaatgtgaagctgggggactttggcctggcccgcatcctgaaccacgacaccagctttgccaagacctttgtgggcaccccctactacatgagccctgagcagatgaacaggatgagctacaatgagaagagtgacatctggagcctgggctgcctgctgtatgagctgtgtgccctgatgccacccttcaccgccttcagccagaaggagctggccggcaagatccgggagggcaagttccgccgcatcccctaccgctacagtgatgagctgaatgagatcatcaccaggatgctgaacctgaaggactaccaccggcccagcgtggaggagatcctggagaaccccctgattgctgacctggtggctgatgagcagaggaggaacctggagcggcggggccggcagctgggggagcctgagaagagccaggacagcagccctgtgctgtctgagctgaagctgaaggagatccagctgcaggagcgggagcgggccctgaaggcccgggaggagcggctggagcagaaggagcaggagctgtgtgtgcgggagcggctggccgaggacaagctggcccgggcagagaacctgctgaagaactacagcctgctgaaggagaggaagttcctgagcctggccagcaaccctgagctgctgaacctgcccagcagcgtcatcaagaagaaggtgcacttctctggagagagcaaggagaacatcatgaggtctgagaacagcgagagccagctgaccagcaagagcaagtgcaaggacctgaagaagaggctgcatgctgcccagctgcgggcccaggccctgagtgacatcgagaagaactaccagctgaagagccggcagatcctgggcatgaggtag

SEQ ID NO: 161939 - DNA, 1209 bp, synthetic construct
  misc_feature 1..1209: note = Description of Artificial Sequence: Synthetic coding sequence
  source 1..1209: mol_type = other DNA
atgacagaggccgagaagcagatgctggtgtctgaggtgaacctgctgcgggagctgaagcaccccaacatcgtgcgctactatgaccgcatcatcgacaggaccaacaccaccctgtacatcgtgatggagtactgtgagggcggggacctggccagcgtcatcaccaagggcaccaaggagcggcagtacctggatgaggagtttgtgctgcgggtgatgacccagctgaccctggccctgaaggagtgccaccggcggagtgatggcggccacacagtgctgcaccgggacctgaagccagccaacgtgttcctggatggcaagcagaatgtgaagctgggggactttggcctggcccgcatcctgaaccacgacaccagctttgccaagacctttgtgggcaccccctactacatgagccctgagcagatgaacaggatgagctacaatgagaagagtgacatctggagcctgggctgcctgctgtatgagctgtgtgccctgatgccacccttcaccgccttcagccagaaggagctggccggcaagatccgggagggcaagttccgccgcatcccctaccgctacagtgatgagctgaatgagatcatcaccaggatgctgaacctgaaggactaccaccggcccagcgtggaggagatcctggagaaccccctgattgctgacctggtggctgatgagcagaggaggaacctggagcggcggggccggcagctgggggagcctgagaagagccaggacagcagccctgtgctgtctgagctgaagctgaaggagatccagctgcaggagcgggagcgggccctgaaggcccgggaggagcggctggagcagaaggagcaggagctgtgtgtgcgggagcggctggccgaggacaagctggcccgggcagagaacctgctgaagaactacagcctgctgaaggagaggaagttcctgagcctggccagcaaccctgagctgctgaacctgcccagcagcgtcatcaagaagaaggtgcacttcagcggggagagcaaagaaaacatcatgagaagtgaaaattctgagagccagctgaccagcaagagcaagtgcaaggacctgaagaagaggctgcacgccgcccagctgcgggcccaggccctgagtgacatcgagaagaactaccagctgaagagccggcagatcctgggcatgaggtag

SEQ ID NO: 161940 - DNA, 1521 bp, synthetic construct
  misc_feature 1..1521: note = Description of Artificial Sequence: Synthetic coding sequence
  source 1..1521: mol_type = other DNA
atggatgactacatggtgctgaggatgattggagagggcagctttggccgggccctgctggtgcagcacgagagcagcaaccagatgtttgccatgaaggagatccggctgcccaagagcttcagcaacacccagaacagcaggaaggaggccgtgctgctggccaagatgaagcaccccaacatcgtggccttcaaggagagctttgaagctgagggccacctgtacatcgtgatggagtactgtgatggaggagacctgatgcagaagatcaagcagcagaagggcaagctgtttcctgaggacatgatcctgaactggttcacccagatgtgcctgggcgtgaaccacatccacaagaagagggtgctgcaccgggacatcaagagcaagaacatcttcctgacccagaatggcaaggtgaagctgggggactttggcagcgcccggctgctgagcaaccccatggcctttgcctgcacctacgtgggcaccccctactacgtgcccccagagatctgggagaacctgccctacaacaacaagagtgacatctggagcctgggctgcatcctgtatgagctgtgcaccctgaagcaccccttccaggccaacagctggaagaacctgatcctgaaggtgtgccagggctgcatcagccccctgcccagccactacagctatgagctgcagttcctggtgaagcagatgttcaagaggaaccccagccaccggcccagcgccaccaccctgctgagccggggcatcgtggcccggctggtgcagaagtgcctgcccccagagatcatcatggagtatggagaggaggtgctggaggagatcaagaacagcaagcacaacacccccaggaagaaggccaaccccagccgcatccgcatcgccctgggcaatgaggccagcacagtgcaggaggaggagcaggacaggaagggcagccacacagacctggagagcatcaatgaaaacctggtggagagcgccctgcggcgggtgaaccgggaggagaagggcaacaagtctgtgcacctgaggaaggccagcagccccaacctgcaccggcggcagtgggagaagaatgtgcccaacacagccctgacagccctggagaatgccagcatcctgaccagcagcctgacagcagaagatgaccggggcggcagcgtcatcaagtacagcaagaacaccaccaggaagcagtggctgaaggagaccccagacaccctgctgaacatcctgaagaatgctgacctgagcctggccttccagacctacaccatctaccggcccggcagcgagggcttcctgaagggccccctgtctgaggagacagaggccagtgacagcgtggatggcggccatgacagcgtcatcctggaccctgagcggctggagcccggcctggatgaggaggacacagactttgaggaggaggatgacaacccagactgggtgtctgagctgaagaagagagctggctggcagggcctgtgtgacagatag

SEQ ID NO: 161941 - DNA, 1521 bp, synthetic construct; identical to SEQ ID NO: 161940
  misc_feature 1..1521: note = Description of Artificial Sequence: Synthetic coding sequence
  source 1..1521: mol_type = other DNA

SEQ ID NO: 161942 - DNA, 1470 bp, synthetic construct
  misc_feature 1..1470: note = Description of Artificial Sequence: Synthetic coding sequence
  source 1..1470: mol_type = other DNA
atggatgactacatggtgctgaggatgattggagagggcagctttggccgggccctgctggtgcagcacgagagcagcaaccagatgtttgccatgaaggagatccggctgcccaagagcttcagcaacacccagaacagcaggaaggaggccgtgctgctggccaagatgaagcaccccaacatcgtggccttcaaggagagctttgaagctgagggccacctgtacatcgtgatggagtactgtgatggaggagacctgatgcagaagatcaagcagcagaagggcaagctgtttcctgaggacatgatcctgaactggttcacccagatgtgcctgggcgtgaaccacatccacaagaagagggtgctgcaccgggacatcaagagcaagaacatcttcctgacccagaatggcaaggtgaagctgggggactttggcagcgcccggctgctgagcaaccccatggcctttgcctgcacctacgtgggcaccccctactacgtgcccccagagatctgggagaacctgccctacaacaacaagagtgacatctggagcctgggctgcatcctgtatgagctgtgcaccctgaagcaccccttccaggccaacagctggaagaacctgatcctgaaggtgtgccagggctgcatcagccccctgcccagccactacagctatgagctgcagttcctggtgaagcagatgttcaagaggaaccccagccaccggcccagcgccaccaccctgctgagccggggcatcgtggcccggctggtgcagaagtgcctgcccccagagatcatcatggagtatggagaggaggtgctggaggagatcaagaacagcaagcacaacacccccaggaagaagcaggaggaggagcaggacaggaagggcagccacacagacctggagagcatcaatgaaaacctggtggagagcgccctgcggcgggtgaaccgggaggagaagggcaacaagtctgtgcacctgaggaaggccagcagccccaacctgcaccggcggcagtgggagaagaatgtgcccaacacagccctgacagccctggagaatgccagcatcctgaccagcagcctgacagcagaagatgacagaggaggcagcgtcatcaagtacagcaagaacaccaccaggaagcagtggctgaaggagaccccagacaccctgctgaacatcctgaagaatgctgacctgagcctggccttccagacctacaccatctacagacctggcagcgagggcttcctgaagggccccctgtctgaggagacagaggccagtgacagcgtggatggcggccatgattctgtcatcctggaccctgagcggctggagcccggcctggatgaggaggacacagactttgaggaggaggatgacaacccagactgggtgtctgagctgaagaagagagctggctggcagggcctgtgtgacagatag

SEQ ID NO: 161943 - DNA, 1533 bp, synthetic construct
  misc_feature 1..1533: note = Description of Artificial Sequence: Synthetic coding sequence
  source 1..1533: mol_type = other DNA
atgcagtttggccgggcccatggagactgtgtgtctggggcccagctgtgtggctgccccagcatggatgactacatggtgctgaggatgattggagagggcagctttggccgggccctgctggtgcagcacgagagcagcaaccagatgtttgccatgaaggagatccggctgcccaagagcttcagcaacacccagaacagcaggaaggaggccgtgctgctggccaagatgaagcaccccaacatcgtggccttcaaggagagctttgaggccgagggccacctgtacatcgtgatggagtactgtgatggaggagacctgatgcagaagatcaagcagcagaagggcaagctgtttcctgaggacatgatcctgaactggttcacccagatgtgcctgggcgtgaaccacatccacaagaagagggtgctgcaccgggacatcaagagcaagaacatcttcctgacccagaatggcaaggtgaagctgggggactttggaagtgcccggctgctgagcaaccccatggcctttgcctgcacctacgtgggcaccccctactacgtgcccccagagatctgggagaacctgccctacaacaacaagagtgacatctggagcctgggctgcatcctgtatgagctgtgcaccctgaagcaccccttccaggccaacagctggaagaacctgatcctgaaggtgtgccagggctgcatcagccccctgcccagccactacagctatgagctgcagttcctggtgaagcagatgttcaagaggaaccccagccaccggcccagcgccaccaccctgctgagccggggcatcgtggcccggctggtgcagaagtgcctgcccccagagatcatcatggagtatggagaggaggtgctggaggagatcaagaacagcaagcacaacacccccaggaagaagcaggaggaggagcaggacaggaagggcagccacacagacctggagagcatcaatgaaaacctggtggagagcgccctgcggcgggtgaaccgggaggagaagggcaacaagtctgtgcacctgaggaaggccagcagccccaacctgcaccggcggcagtgggagaagaatgtgcccaacacagccctgacagccctggagaatgccagcatcctgaccagcagcctgacagcagaagatgaccggggcggcagcgtcatcaagtacagcaagaacaccaccaggaagcagtggctgaaggagaccccagacaccctgctgaacatcctgaagaatgctgacctgagcctggccttccagacctacaccatctaccggcccggcagcgagggcttcctgaagggccccctgtctgaggagacagaggccagtgacagcgtggatggcggccatgacagcgtcatcctggaccctgagcggctggagcccggcctggatgaggaggacacagactttgaggaggaggatgacaacccagactgggtgtctgagctgaagaagagagctggctggcagggcctgtgtgacagatag

SEQ ID NO: 161944 - DNA, 177 bp, synthetic construct
  misc_feature 1..177: note = Description of Artificial Sequence: Synthetic coding sequence
  source 1..177: mol_type = other DNA
atggatgactacatggtgctgaggatgattggagagggcagctttggccgggccctgctggtgcagcacgagagcagcaaccagatgtttgccatgaaggagatccggctgcccaagagcttcagcaacacccagaacagcaggaaggaggccgtgctgctggccaagatgaagtag

SEQ ID NO: 161945 - DNA, 510 bp, synthetic construct
  misc_feature 1..510: note = Description of Artificial Sequence: Synthetic coding sequence
  source 1..510: mol_type = other DNA
atggcccggggcggggacaccggctgcaccggccccagcgagaccagcgccagcggggctgctgccatcgccctgcccggcctggagggccctgccacagatgcccagtgccagaccctgcccctgactgtgctgaagagccgcagccccagccccaggagcctgcccccagccctgagctgccccccaccccagcctgccatgctggagcacctgagcagcctgcccacccagatggactacaagggccagaagctggccgagcagatgttccagggcatcatcctcttcagcgccatcgtgggcttcatctacggctacgtggccgagcagtttggctggacagtgtacatcgtgatggccggctttgccttcagctgcctgctgaccctgcccccctggcccatctaccgccgccaccccctgaagtggctgcctgtgcaggagagcagcacagatgacaagaagccaggagagaggaagatcaagagacatgccaagaacaactag

SEQ ID NO: 161946 - DNA, 2259 bp, synthetic construct
  misc_feature 1..2259: note = Description of Artificial Sequence: Synthetic coding sequence
  source 1..2259: mol_type = other DNA
atgcccctggccgcctactgctacctgcgggtggtgggcaagggcagctatggagaggtgaccctggtgaagcacagaagagatggcaagcagtacctgcacgagaagcacatcctgcaccgggacctgaagacccagaatgtgttcctgaccaggaccaacatcatcaaggtgggggacctgggcatcgcccgggtgctggagaaccactgtgacatggccagcaccctcatcggcaccccctactacatgagccctgagctgttcagcaacaagccctacaactacaagagtgatgtgtgggccctgggctgctgcgtgtatgagatggccaccctgaagcacgccttcaatgccaaggacatgaacagcctggtgtaccgcatcatcgagggcaagctgccccccatgccccgggactacagccctgagctggccgagctgatccgcaccatgctgagcaagaggcctgaggagcggcccagcgtgcgcagcatcctgcggcagccctacatcaagaggcagatctccttcttcctggaggccaccaagatcaagaccagcaagaacaacatcaagaatggagacagccagagcaagccctttgccaccgtggtgtctggagaggccgagagcaaccacgaggtgatccacccccagcccctgagcagcgagggcagccagacctacatcatgggagagggcaagtgcctgagccaggagaagccccgggccagcggcctgctgaagagccctgccagcctgaaggcccacacctgcaagcaggacctgagcaacaccacagagctggccaccatcagctctgtgaacatcgacatcctgcctgccaagggccgggacagcgtgtctgatggctttgtgcaggagaaccagccccgctacctggatgccagcaatgagctgggcggcatctgcagcatcagccaggtggaggaggagatgctgcaggacaacaccaagagcagcgcccagccagaaaatctcatccccatgtggagcagtgacatcgtgactggagagaagaatgaacctgtgaagcccctgcagcccctcatcaaggagcagaagcccaaggaccagagcctggccctgagccccaagctggagtgcagcggcaccatcctggcccacagcaacctgcggctgctgggcagcagtgacagccctgccagcgccagccgggtggccggcatcaccggggtgtgccaccacgcccaggaccaggtggccggggagtgcatcatcgagaagcagggccgcatccacccagacctgcagccccacaacagcggcagcgagcccagcctgagccggcagaggcggcagaagagaagagagcagacagagcacagaggagagaagaggcaggtgagaagagacctgtttgccttccaggagagccccccacgcttcctgcccagccaccccatcgtgggcaaggtggatgtgaccagcacccagaaggaggccgagaaccagaggagagtggtgactggatctgtgagcagcagccgcagcagcgagatgagcagcagcaaggaccggcccctgagcgcccgggagcggcggcggctgaagcagagccaggaggagatgagcagcagcggccccagcgtgaggaaggccagcctgtctgtggccggccctgggaagccccaggaggaggaccagcccctgcctgcccggcggctgagcagtgactgcagcgtgacccaggagaggaagcagatccactgcctgtctgaagatgagctgagcagcagcaccagcagcacagacaagagtgatggagactatggagagggcaagggccagaccaatgagatcaatgccctggtgcagctgatgacccagaccctgaagctggacagcaaggagagctgtgaagatgtgcctgtggccaaccctgtgtctgagttcaagctgcacaggaagtacagagacaccctcatcctgcacggcaaggtggccgaggaggccgaggagatccacttcaaggagctgcccagcgccatcatgcctggcagcgagaagatccggcggctggtggaggtgctgaggacagatgtgatccggggcctgggcgtgcagctgctggagcaggtgtatgacctgctggaggaggaggatgaatttgaccgggaggtgcggctgcgggagcacatgggagagaagtacaccacctacagcgtgaaggcccggcagctgaagttctttgaggagaacatgaacttctag

SEQ ID NO: 161947 - DNA, 942 bp, synthetic construct
  misc_feature 1..942: note = Description of Artificial Sequence: Synthetic coding sequence
  source 1..942: mol_type = other DNA
atggccggccagcccggccacatgccccacggcggcagcagcaacaacctgtgccacaccctgggccctgtgcaccccccagacccccagaggcaccccaacaccctgtccttccgctgcagcctggccgacttccagatcgagaagaagattggccggggccagttcagcgaggtgtacaaggccacctgcctgctggacaggaagacagtggccctgaagaaggtgcagatctttgagatgatggatgccaaggcccggcaggactgtgtgaaggagatcggcctgctgaagcagctgaaccaccccaacatcatcaagtacctggacagcttcatcgaggacaatgagctgaacatcgtgctggagctggctgatgctggggacctgagccagatgatcaagtacttcaagaagcagaagaggctcatccctgagaggacagtgtggaagtactttgtgcagctgtgcagcgctgtggagcacatgcacagccggcgggtgatgcaccgggacatcaagccagccaacgtgttcatcacagccactggagtggtgaagctgggggacctgggcctgggccgcttcttcagcagcgagaccacagctgcccacagcctggtgggcaccccctactacatgagccctgagcgcatccatgaaaatggctacaacttcaagagtgacatctggagcctgggctgcctgctgtatgagatggccgccctgcagagccccttctacggggacaagatgaacctcttcagcctgtgccagaagattgagcagtgtgactacccacccctgcccggggagcactacagcgagaagctgcgggagctggtgtccatgtgcatctgcccagacccccaccagaggccagacatcggctacgtgcaccaggtggccaagcagatgcacatctggatgagcagcacctag

SEQ ID NO: 161948 - DNA, 624 bp, synthetic construct
  misc_feature 1..624: note = Description of Artificial Sequence: Synthetic coding sequence
  source 1..624: mol_type = other DNA
atggccggccagcccggccacatgccccacggcggcagcagcaacaacctgtgccacaccctgggccctgtgcaccccccagacccccagaggcaccccaacaccctgtccttccgctgcagcctggccgacttccagatcgagaagaagattggccggggccagttcagcgaggtgtacaaggccacctgcctgctggacaggaagacagtggccctgaagaaggtgcagatctttgagatgatggatgccaaggcccggcaggactgtgtgaaggagatcggcctgctgaagcagctgaaccaccccaacatcatcaagtacctggacagcttcatcgaggacaatgagctgaacatcgtgctggagctggctgatgctggggacctgagccagatgatcaagtacttcaagaagcagaagaggctcatccctgagaggacagtgtggaagtactttgtgcagctgtgcagcgctgtggagcacatgcacagccggcgggtgatgcaccgggacatcaagccagccaacgtgttcatcacagccactggagtggtgaagctgggggacctgggcctgggccgcttcttcagcagcgagaccacagctgcccacagcctgtag

SEQ ID NO: 161949 - DNA, 1044 bp, synthetic construct
  misc_feature 1..1044: note = Description of Artificial Sequence: Synthetic coding sequence
  source 1..1044: mol_type = other DNA
atgccccggcgggaggtgtgctgggaggccgcccacttccggcaggaggagcagagcctgccccggccccgggtgcgggccctggtgcggctggcctgcaggatggccggccagcccggccacatgccccacggcggcagcagcaacaacctgtgccacaccctgggccctgtgcaccccccagacccccagaggcaccccaacaccctgtccttccgctgcagcctggccgacttccagatcgagaagaagattggccggggccagttcagcgaggtgtacaaggccacctgcctgctggacaggaagacagtggccctgaagaaggtgcagatctttgagatgatggatgccaaggcccggcaggactgtgtgaaggagatcggcctgctgaagcagctgaaccaccccaacatcatcaagtacctggacagcttcatcgaggacaatgagctgaacatcgtgctggagctggctgatgctggggacctgagccagatgatcaagtacttcaagaagcagaagaggctcatccctgagaggacagtgtggaagtactttgtgcagctgtgcagcgctgtggagcacatgcacagccggcgggtgatgcaccgggacatcaagccagccaacgtgttcatcacagccactggagtggtgaagctgggggacctgggcctgggccgcttcttcagcagcgagaccacagctgcccacagcctggtgggcaccccctactacatgagccctgagcgcatccatgaaaatggctacaacttcaagagtgacatctggagcctgggctgcctgctgtatgagatggccgccctgcagagccccttctacggggacaagatgaacctcttcagcctgtgccagaagattgagcagtgtgactacccacccctgcccggggagcactacagcgagaagctgcgggagctggtgtccatgtgcatctgcccagacccccaccagaggccagacatcggctacgtgcaccaggtggccaagcagatgcacatctggatgagcagcacctag

SEQ ID NO: 161950 - DNA, 738 bp, synthetic construct
  misc_feature 1..738: note = Description of Artificial Sequence: Synthetic coding sequence
  source 1..738: mol_type = other DNA
atggccggccagcccggccacatgccccacggcggcagcagcaacaacctgtgccacaccctgggccctgtgcaccccccagacccccagcagctgaaccaccccaacatcatcaagtacctggacagcttcatcgaggacaatgagctgaacatcgtgctggagctggctgatgctggggacctgagccagatgatcaagtacttcaagaagcagaagaggctcatccctgagaggacagtgtggaagtactttgtgcagctgtgcagcgctgtggagcacatgcacagccggcgggtgatgcaccgggacatcaagccagccaacgtgttcatcacagccactggagtggtgaagctgggggacctgggcctgggccgcttcttcagcagcgagaccacagctgcccacagcctggtgggcaccccctactacatgagccctgagcgcatccatgaaaatggctacaacttcaagagtgacatctggagcctgggctgcctgctgtatgagatggccgccctgcagagccccttctacggggacaagatgaacctcttcagcctgtgccagaagattgagcagtgtgactacccacccctgcccggggagcactacagcgagaagctgcgggagctggtgtccatgtgcatctgcccagacccccaccagaggccagacatcggctacgtgcaccaggtggccaagcagatgcacatctggatgagcagcacctag

SEQ ID NO: 161951 - DNA, 942 bp, synthetic construct; identical to SEQ ID NO: 161947
  misc_feature 1..942: note = Description of Artificial Sequence: Synthetic coding sequence
  source 1..942: mol_type = other DNA

SEQ ID NO: 161952 - DNA, 1044 bp, synthetic construct; identical to SEQ ID NO: 161949
  misc_feature 1..1044: note = Description of Artificial Sequence: Synthetic coding sequence
  source 1..1044: mol_type = other DNA

SEQ ID NO: 161953 - DNA, 663 bp, synthetic construct
  misc_feature 1..663: note = Description of Artificial Sequence: Synthetic coding sequence
  source 1..663: mol_type = other DNA
atggccggccagcccggccacatgccccacggcggcagcagcaacaacctgtgccacaccctgggccctgtgcaccccccagacccccagaggcaccccaacaccctgtccttccgctgcagcctggccgacttccagatcgagaagaagattggccggggccagttcagcgaggtgtacaaggccacctgcctgctggacaggaagacagtggccctgaagaaggtgcagatctttgagatgatggatgccaaggcccggcaggactgtgtgaaggagatcggcctgctgaagcagctgaaccaccccaacatcatcaagtacctggacagcttcatcgaggacaatgagctgaacatcgtgctggagctggctgatgctggggacctgagccagatgatcaagtacttcaagaagcagaagaggctcatccctgagaggacagtgtggaagtactttgtgcagctgtgcagcgctgtggagcacatgcacagccggcgggtgatgcaccgggacatcaagccagccaacgtgttcatcacagccactggagtggtgaagctgggggacctgggcctgggccgcttcttcagcagcgagaccacagctgcccacagcctggtgggcaccccctactacatgagccctgagcgcatccactag

SEQ ID NO: 161954 - DNA, 585 bp, synthetic construct
  misc_feature 1..585: note = Description of Artificial Sequence: Synthetic coding sequence
  source 1..585: mol_type = other DNA
atgccccggcgggaggtgtgctgggaggccgcccacttccggcaggaggagcagagcctgccccggccccgggtgcgggccctggtgcggctggcctgcaggatggccggccagcccggccacatgccccacggcggcagcagcaacaacctgtgccacaccctgggccctgtgcaccccccagacccccagaggcaccccaacaccctgtccttccgctgcagcctggccgacttccagatcgagaagaagattggccggggccagttcagcgaggtgtacaaggccacctgcctgctggacaggaagacagtggccctgaagaaggtgcagatctttgagatgatggatgccaaggcccggcaggactgtgtgaaggagatcggcctgctgaagcagctgaaccaccccaacatcatcaagtacctggacagcttcatcgaggacaatgagctgaacatcgtgctggagctggctgatgctggggacctgagccagatgatcaagtacttcaagaagcagaagaggctcatccctgagaggacagtgtggaagtactttgtgcagctgtgcagcgctgtgtag

SEQ ID NO: 161955 - DNA, 669 bp, synthetic construct
  misc_feature 1..669: note = Description of Artificial Sequence: Synthetic coding sequence
  source 1..669: mol_type = other DNA
atggccggccagcccggccacatgccccacggcggcagcagcaacaacctgtgccacaccctgggccctgtgcaccccccagacccccagaggcaccccaacaccctgtccttccgctgcagcctggccgacttccagatcgagaagaagattggccggggccagttcagcgaggtgtacaaggccacctgcctgctggacaggaagacagtggccctgaagaaggtgcagatctttgagatgatggatgccaaggcccggcaggactgtgtgaaggagatcggcctgctgaagcagctgaaccaccccaacatcatcaagtacctggacagcttcatcgaggacaatgagctgaacatcgtgctggagctggctgatgctggggacctgagccagatgatcaagtacttcaagaagcagaagaggctcatccctgagaggacagtgtggaagtactttgtgcagctgtgcagcgctgtggagcacatgcacagccggcgggtgatgcaccgggacatcaagccagccaacgtgttcatcacagccactggagtggtgaagctgggggacctgggcctgggccgcttcttcagcagcgagaccacagctgcccacagcctggtgggcaccccctactacatgagccctgagcgcatccatgaaaattag

SEQ ID NO: 161956 - DNA, 660 bp, synthetic construct
  misc_feature 1..660: note = Description of Artificial Sequence: Synthetic coding sequence
  source 1..660: mol_type = other DNA
atggccggccagcccggccacatgccccacggcggcagcagcaacaacctgtgccacaccctgggccctgtgcaccccccagacccccagaggcaccccaacaccctgtccttccgctgcagcctggccgacttccagatcgagaagaagattggccggggccagttcagcgaggtgtacaaggccacctgcctgctggacaggaagacagtggccctgaagaaggtgcagatctttgagatgatggatgccaaggcccggcaggactgtgtgaaggagatcggcctgctgaagcagctgaaccaccccaacatcatcaagtacctggacagcttcatcgaggacaatgagctgaacatcgtgctggagctggctgatgctggggacctgagccagatgatcaagtacttcaagaagcagaagaggctcatccctgagaggacagtgtggaagtactttgtgcagctgtgcagcgctgtggagcacatgcacagccggcgggtgatgcaccgggacatcaagccagccaacgtgttcatcacagccactggagtggtgaagctgggggacctgggcctgggccgcttcttcagcagcgagaccacagctgcccacagcctggtgggcaccccctactacatgagccctgagcgcatctag

SEQ ID NO: 161957 - DNA, 516 bp, synthetic construct
  misc_feature 1..516: note = Description of Artificial Sequence: Synthetic coding sequence
  source 1..516: mol_type = other DNA
atggccggccagcccggccacatgccccacggcggcagcagcaacaacctgtgccacaccctgggccctgtgcaccccccagacccccagaggcaccccaacaccctgtccttccgctgcagcctggccgacttccagatcgagaagaagattggccggggccagttcagcgaggtgtacaaggccacctgcctgctggacaggaagacagtggccctgaagaaggtgcagatctttgagatgatggatgccaaggcccggcaggactgtgtgaaggagatcggcctgctgaagcagctgaaccaccccaacatcatcaagtacctggacagcttcatcgaggacaatgagctgaacatcgtgctggagctggctgatgctggggacctgagccagatgatcaagtacttcaagaagcagaagaggctcatccctgagaggacagtgtggaagtactttgtgcagctgtgcagcgctgtggagcacatgcacagccggcgggtgatgcacaggtag

SEQ ID NO: 161958 - DNA, 606 bp, synthetic construct
  misc_feature 1..606: note = Description of Artificial Sequence: Synthetic coding sequence
  source 1..606: mol_type = other DNA
atggccggccagcccggccacatgccccacggcggcagcagcaacaacctgtgccacaccctgggccctgtgcaccccccagacccccagcagctgaaccaccccaacatcatcaagtacctggacagcttcatcgaggacaatgagctgaacatcgtgctggagctggctgatgctggggacctgagccagatgatcaagtacttcaagaagcagaagaggctcatccctgagaggacagtgtggaagtactttgtgcagctgtgcagcgctgtggagcacatgcacagccggcgggtgatgcaccgggacatcaagccagccaacgtgttcatcacagccactggagtggtgaagctgggggacctgggcctgggccgcttcttcagcagcgagaccacagctgcccacagcctggtgggcaccccctactacatgagccctgagcgcatccatgaaaatggctacaacttcaagagtgacatctggagcctgggctgcctgctgtatgagatggccgccctgcagagccccttctacggggacaagatgaacctcttcagcctgtgccagaagattgagcagtgtgactacccacccctgtag

SEQ ID NO: 161959 - DNA, 1017 bp, synthetic construct
  misc_feature 1..1017: note = Description of Artificial Sequence: Synthetic coding sequence
  source 1..1017: mol_type = other DNA
atggaggccaccggctgggacagccgctgcagccctggcacccaggtgcgggccctggtgcggctggcctgcaggatggccggccagcccggccacatgcctcatggaggcagcagcaacaacctgtgccacaccctgggccctgtgcaccccccagacccccagaggcaccccaacaccctgtccttccgctgcagcctggccgacttccagatcgagaagaagattggccggggccagttcagcgaggtgtacaaggccacctgcctgctggacaggaagacagtggccctgaagaaggtgcagatctttgagatgatggatgccaaggcccggcaggactgtgtgaaggagatcggcctgctgaagcagctgaaccaccccaacatcatcaagtacctggacagcttcattgaagataatgagctgaacatcgtgctggagctggctgatgctggggacctgagccagatgatcaagtacttcaagaagcagaagaggctcatccctgagaggacagtgtggaagtactttgtgcagctgtgcagcgctgtggagcacatgcacagcagaagagtgatgcaccgggacatcaagccagccaacgtgttcatcacagccaccggggtggtgaagctgggggacctgggcctgggccgcttcttcagcagcgagaccacagctgcccacagcctggtgggcaccccctactacatgagccctgagcgcatccatgaaaatggctacaacttcaagagtgacatctggagcctgggctgcctgctgtatgagatggccgccctgcagagccccttctatggagacaagatgaacctcttcagcctgtgccagaagattgagcagtgtgactacccacccctgcctggagagcactacagcgagaagctgcgggagctggtgtccatgtgcatctgcccagacccccaccagaggccagacatcggctacgtgcaccaggtggccaagcagatgcacatctggatgagcagcacctag

SEQ ID NO: 161960 - DNA, 996 bp, synthetic construct
  misc_feature 1..996: note = Description of Artificial Sequence: Synthetic coding sequence
  source 1..996: mol_type = other DNA
atgggcagaagaagacctgcccccttccgggccctggtgcggctggcctgcaggatggccggccagcccggccacatgccccacggcggcagcagcaacaacctgtgccacaccctgggccctgtgcaccccccagacccccagaggcaccccaacaccctgtccttccgctgcagcctggccgacttccagatcgagaagaagattggccggggccagttcagcgaggtgtacaaggccacctgcctgctggacaggaagacagtggccctgaagaaggtgcagatctttgagatgatggatgccaaggcccggcaggactgtgtgaaggagatcggcctgctgaagcagctgaaccaccccaacatcatcaagtacctggacagcttcatcgaggacaatgagctgaacatcgtgctggagctggctgatgctggggacctgagccagatgatcaagtacttcaagaagcagaagaggctcatccctgagaggacagtgtggaagtactttgtgcagctgtgcagcgctgtggagcacatgcacagccggcgggtgatgcaccgggacatcaagccagccaacgtgttcatcacagccactggagtggtgaagctgggggacctgggcctgggccgcttcttcagcagcgagaccacagctgcccacagcctggtgggcaccccctactacatgagccctgagcgcatccatgaaaatggctacaacttcaagagtgacatctggagcctgggctgcctgctgtatgagatggccgccctgcagagccccttctacggggacaagatgaacctcttcagcctgtgccagaagattgagcagtgtgactacccacccctgcccggggagcactacagcgagaagctgcgggagctggtgtccatgtgcatctgcccagacccccaccagaggccagacatcggctacgtgcaccaggtggccaagcagatgcacatctggatgagcagcacctag

SEQ ID NO: 161961 - DNA, 942 bp, synthetic construct; identical to SEQ ID NO: 161947
  misc_feature 1..942: note = Description of Artificial Sequence: Synthetic coding sequence
  source 1..942: mol_type = other DNA

SEQ ID NO: 161962 - DNA, 942 bp, synthetic construct; identical to SEQ ID NO: 161947
  misc_feature 1..942: note = Description of Artificial Sequence: Synthetic coding sequence
  source 1..942: mol_type = other DNA

SEQ ID NO: 161963 - DNA, 909 bp, synthetic construct
  misc_feature 1..909: note = Description of Artificial Sequence: Synthetic coding sequence
  source 1..909: mol_type = other DNA
atggatgagcagagccagggcatgcagggcccccctgtgccccagttccagccccagaaggccctgcggccagacatgggctacaacaccctggccaacttccgcatcgagaagaagattggccggggccagttcagcgaggtgtacagagctgcctgcctgctggatggagtgcctgtggccctgaagaaggtgcagatctttgacctgatggatgccaaggcccgggctgactgcatcaaggagattgacctgctgaagcagctgaaccaccccaacgtcatcaagtactatgccagcttcattgaagataatgagctgaacatcgtgctggagctggctgatgctggggacctgagcaggatgatcaagcacttcaagaagcagaagaggctcatccctgagaggacagtgtggaagtactttgtgcagctgtgcagcgccctggagcacatgcacagcagaagagtgatgcaccgggacatcaagccagccaacgtgttcatcacagccaccggggtggtgaagctgggggacctgggcctgggccgcttcttcagcagcaagaccacagctgcccacagcctggtgggcaccccctactacatgagccctgagcgcatccatgaaaatggctacaacttcaagagtgacatctggagcctgggctgcctgctgtatgagatggccgccctgcagagccccttctatggagacaagatgaacctgtacagcctgtgcaagaagattgagcagtgtgactacccacccctgcccagcgaccactacagcgaggagctgcggcagctggtgaacatgtgcatcaacccagaccctgagaagaggccagatgtgacctacgtgtatgatgtggccaagaggatgcacgcctgcacagccagcagctag

SEQ ID NO: 161964 - DNA, 249 bp, synthetic construct
  misc_feature 1..249: note = Description of Artificial Sequence: Synthetic coding sequence
  source 1..249: mol_type = other DNA
atggatgagcagagccagggcatgcagggcccccctgtgccccagttccagccccagaaggccctgcggccagacatgggctacaacaccctggccaacttccgcatcgagaagaagattggccggggccagttcagcgaggtgtacagagctgcctgcctgctggatggagtgcctgtggccctgaagaaggtgcagatctttgacctgatggatgccaaggcccgggctgactgcatcaaggagtag

SEQ ID NO: 161965 - DNA, 99 bp, synthetic construct
  misc_feature 1..99: note = Description of Artificial Sequence: Synthetic coding sequence
  source 1..99: mol_type = other DNA
atggatgagcagagccagggcatgcagggcccccctgtgccccagttccagccccagaaggccctgcggccagacatgggctacaacaccctggcctag

SEQ ID NO: 161966 - DNA, 909 bp, synthetic construct; identical to SEQ ID NO: 161963
  misc_feature 1..909: note = Description of Artificial Sequence: Synthetic coding sequence
  source 1..909: mol_type = other DNA

SEQ ID NO: 161967 - DNA, 189 bp, synthetic construct
  misc_feature 1..189: note = Description of Artificial Sequence: Synthetic coding sequence
  source 1..189: mol_type = other DNA
atggatgagcagagccagggcatgcagggcccccctgtgccccagttccagccccagaaggccctgcggccagacatgggctacaacaccctggccaacttccgcatcgagaagaagattggccggggccagttcagcgaggtgtacagagctgcctgcctgctggatggagtgcctgtggccctgtag

SEQ ID NO: 161968 - DNA, 3729 bp, synthetic construct
  misc_feature 1..3729: note = Description of Artificial Sequence: Synthetic coding sequence
  source 1..3729: mol_type = other DNA
atggagaagtatgtgcggctgcagaagatcggggagggcagctttgggaaggccatcctggtgaagagcacagaagatggccggcagtatgtgatcaaggagatcaacatcagcaggatgagcagcaaggagcgggaggagagcagaagagaggtggccgtgctggccaacatgaagcaccccaacatcgtgcagtaccgggagagctttgaggagaatggcagcctgtacatcgtgatggactactgtgagggcggggacctcttcaagaggatcaatgcccagaagggcgtgctcttccaggaggaccagatcctggactggtttgtgcagatctgcctggccctgaagcacgtgcatgacaggaagatcctgcaccgggacatcaagagccagaacatcttcctgaccaaggatggcaccgtgcagctgggggactttggaattgcccgggtgctgaacagcacagtggagctggcccggacctgcatcggcaccccctactacctgagccctgagatctgtgagaacaagccctacaacaacaagagtgacatctgggccctgggctgtgtgctgtatgagctgtgcaccctgaagcacgcctttgaagctggctccatgaagaacctggtgctgaagatcatcagcggcagcttcccccctgtgtccctgcactacagctatgacctgcggagcctggtgtcccagctgttcaagaggaacccccgggaccggcccagcgtgaacagcatcctggagaagggcttcatcgccaagagaattgagaagttcctgagcccccagctgattgctgaggagttctgcctgaagaccttcagcaagtttggcagccagcccatcccagccaagaggcctgccagcggccagaacagcatctctgtgatgcctgcccagaagatcaccaagccagctgccaagtatggcatccccctggcctacaagaagtacggggacaagaagctgcacgagaagaagcccctgcagaagcacaagcaggcccaccagaccccagagaagagggtgaacacaggagaggagaggaggaagatcagcgaggaggccgccaggaagaggcggctggagttcatcgagaaggagaagaagcagaaggaccagatcatcagcctgatgaaggccgagcagatgaagaggcaggagaaggagcggctggagcgcatcaacagagcccgggagcagggctggagaaatgtgctgtctgctgggggcagcggggaggtgaaggcccccttcctgggcagcggcggcaccatcgcccccagcagcttcagcagccggggccagtatgagcactaccacgccatctttgaccagatgcagcagcagagagcagaagataatgaggccaagtggaagcgggagatctacggccggggcctgcctgagcggcagaagggccagctggccgtggagcgggccaagcaggtggaggagttcctgcagaggaagcgggaggccatgcagaacaaggcccgggcagagggccacatgggcatcctgcagaacctggccgccatgtatggaggccggcccagcagcagccggggcggcaagcccaggaacaaggaggaggaggtgtacctggcccggctgcggcagatccggctgcagaacttcaatgaaaggcagcagatcaaggccaagctgcggggggagaagaaggaggccaaccacagcgagggccaggagggcagcgaggaggccgacatgaggaggaagaagattgagagcctgaaggcccacgccaatgcccgggctgctgtgctgaaggagcagctggagaggaagaggaaggaggcctatgagcgggagaagaaggtgtgggaggagcacctggtggccaagggcgtgaagagcagtgatgtgagcccccccctgggccagcatgaaacaggaggcagccccagcaagcagcagatgaggagcgtcatctctgtgaccagcgccctgaaggaggtgggcgtggacagcagcctgacagacacccgggagaccagcgaggagatgcagaagaccaacaatgccatcagcagcaagcgggagatcctgcggcggctgaatgaaaacctgaaggcccaggaggatgagaagggcaagcagaacctgagtgacacctttgagatcaacgtgcatgaagatgccaaggagcacgagaaggagaagtctgtgtccagtgacaggaagaagtgggaggccggcggccagctggtgatccccctggatgagctgaccctggacaccagcttcagcaccacagagcggcacacagtgggggaggtgatcaagctgggccccaacggcagcccccggcgggcctggggcaagagccccacagacagcgtgctgaagatcctgggggaggccgagctgcagctgcagacagagctgctggagaacaccaccatccgctctgagatcagccctgagggggagaagtacaagcccctcatcaccggggagaagaaggtgcagtgcatcagccatgagatcaaccccagcgccatcgtggacagccctgtggagaccaagagccctgagttcagcgaggccagcccccagatgagcctgaagctggagggcaacctggaggagccagatgacctggagacagagatcctgcaggagcccagcggcaccaacaaggatgagagcctgccctgcaccatcacagatgtgtggatcagcgaggagaaggagaccaaggagacccagagcgctgaccgcatcaccatccaggagaatgaggtgtctgaagatggagtgagcagcacagtggaccagctgagtgacatccacatcgagcccggcaccaatgacagccagcacagcaaatgtgatgtggacaagtctgtgcagcctgagcccttcttccacaaggtggtgcacagcgagcacctgaacctggtgccccaggtgcagagcgtgcagtgcagccctgaggagagctttgccttccgcagccacagccacctgccccccaagaacaagaacaagaacagcctgctgattggcctgagcacaggcctgtttgatgccaacaaccccaagatgctgcggacctgcagcctgcctgacctgagcaagctgttccgcaccctgatggatgtgcccaccgtgggagatgtgcggcaggacaacctggagattgatgaaattgaagatgagaacatcaaggagggccccagcgacagtgaagatattgtgtttgaggagacagacacagacctgcaggagctgcaggcctccatggagcagctgctgcgggagcagcctggagaggagtacagcgaggaggaggagagcgtgctgaagaacagtgatgtggagcccacagccaatggaacagatgtggctgatgaagatgacaaccccagcagcgagagcgccctgaatgaggagtggcacagcgacaacagtgatggagaaattgcctctgaatgtgaatgtgacagcgtcttcaaccacctggaggagctgcggctgcacctggagcaggagatgggctttgagaagttctttgaggtgtatgagaagatcaaggccatccatgaagatgaagatgagaacatcgagatctgcagcaagatcgtgcagaacatcctgggcaatgagcaccagcacctgtatgccaagatcctgcacctggtgatggctgatggagcctaccaggaggacaatgatgaatag

SEQ ID NO: 161969 - DNA, 1800 bp, synthetic construct
  misc_feature 1..1800: note = Description of Artificial Sequence: Synthetic coding sequence
  source 1..1800: mol_type = other DNA
atgctgaagttccaggaggccgccaagtgtgtgtctggcagcacagccatcagcacctaccccaagaccctgattgccaggagatatgtgctgcagcagaagctgggcagcggcagctttggcaccgtgtacctggtgtctgacaagaaggccaagagaggagaggagctgaaggtgctgaaggagatctctgtgggggagctgaaccccaatgaaacagtgcaggccaacctggaggcccagctgctgagcaagctggaccacccagccatcgtgaagttccacgccagctttgtggagcaggacaacttctgcatcatcacagagtactgtgagggccgggacctggatgacaagatccaggagtacaagcaggccggcaagatcttccctgagaaccagatcatcgagtggttcatccagctgctgctgggcgtggactacatgcatgagcggcgcatcctgcaccgggacctgaagagcaagaatgtgttcctgaagaacaacctgctgaagattggagactttggagtgtcccggctgctgatgggcagctgtgacctggccaccaccctgaccggcaccccccactacatgagccctgaggccctgaagcaccagggctatgacaccaagagtgacatctggagcctggcctgcatcctgtatgagatgtgctgcatgaaccacgcctttgctggcagcaacttcctgagcatcgtgctgaagatcgtggagggggacacccccagcctgcctgagcgctaccccaaggagctgaatgccatcatggagagcatgctgaacaagaaccccagcctgcggcccagcgccatcgagatcctgaagatcccctacctggatgagcagctgcagaacctgatgtgccgctacagcgagatgaccctggaggacaagaacctggactgccagaaggaggccgcccacatcatcaatgccatgcagaagaggatccacctgcagaccctgcgggccctgtctgaggtgcagaagatgaccccccgggagaggatgaggctgaggaagctgcaggccgcagatgagaaggccaggaagctgaagaagatcgtggaggagaagtatgaggagaacagcaagaggatgcaggagctgcggagcaggaacttccagcagctgtctgtggatgtgctgcacgagaagacccacctgaagggcatggaggagaaggaggagcagcctgagggccgcctgagctgcagcccccaggatgaagatgaggagcgctggcagggccgggaggaggagagtgatgagcccaccctggagaacctgcctgagagccagcccatccccagcatggacctgcacgagctggagagcatcgtggaggatgccaccagtgacctgggctaccacgagatccctgaggaccccctggtggccgaggagtactatgcagatgcctttgacagctactgtgaggagagtgatgaggaggaggaggagatcgccctggagaggcctgagaaggagatcagaaatgaaggcagccagcctgcctaccgcaccaaccagcaggacagcgacatcgaggccctggcccgctgcctggagaatgtgctgggctgcaccagcctggaccagccctgccgctcctggggccagaagtacctgaagaggagcatcatcaccagccgggagcagggcatccgcatgctggccaagcagaggtctgcctctgtgtggaagaagtggtgcctgaagccagccaccgtgctgaagtggaccagcagctgcaccctgaagagcagctgctag

SEQ ID NO: 161970 - DNA, 459 bp, synthetic construct
  misc_feature 1..459: note = Description of Artificial Sequence: Synthetic coding sequence
  source 1..459: mol_type = other DNA
atggattctggaacagaggagtatgagctgaatggaggcctgcccccaggcaccccaggcagcccagatgccagccctgcccgctggggctggaggcatggccccatcaacgtgaaccactacgccagcaagaagtctgctgctgagagcatgctggacatcgccctgctgatggccaatgccagccagctgaaggctgtggtggagcagggccccagctttgccttctacgtgcccctggtggtgctgatcagcatcagcctggtgctgcagatcggcgtgggcgtgctgctgatcttcctggtgaagtatgacctgaacaacccagccaagcacgccaagctggacttcctgaacaacctggccaccggcctggtgttcatcatcgtggtggtgaacatcttcatcacagcctttggagtgcagaagcccctgatggacatggccccccagcagtag

SEQ ID NO: 161971 - DNA, 567 bp, synthetic construct
  misc_feature 1..567: note = Description of Artificial Sequence: Synthetic coding sequence
  source 1..567: mol_type = other DNA
atggccggcctgagccggcagctgtgtgccctgagccaccccaagaaggctgctgagacccagacagctgagcctggaggagcccatgctgtgtgcagccgccaccctgtgcgggtgaagggcctggagggcagcgagatggagagcgcccgggagaacatcgacctgcagcccggcagcagtgaccccaggagccagcccatcaacctgaaccactacgccaccaagaagtctgtggccgagagcatgctggatgtggccctcttcatgagcaatgccatgaggctgaaggctgtgctggagcagggccccagcagccactactacaccaccctggtgaccctcatcagcctgagcctgctgctgcaggtggtgattggagtgctgctggtggtgattgcccggctgaacctgaatgaggtggagaagcagtggaggctgaaccagctgaacaatgctgccaccatcctggtgttcttcaccgtggtgatcaacgtgttcatcacagcctttggagcccacaagacaggcttcctggccgcccgggccagcaggaaccccctgtag

SEQ ID NO: 161972 - DNA, 273 bp, synthetic construct
  misc_feature 1..273: note = Description of Artificial Sequence: Synthetic coding sequence
  source 1..273: mol_type = other DNA
atgctggatgtggccctcttcatgagcaatgccatgaggctgaaggctgtgctggagcagggccccagcagccactactacaccaccctggtgaccctcatcagcctgagcctgctgctgcaggtggtgattggagtgctgctggtggtgattggagaggagcccagcctgcagagcgacctgctgcccaggcacccctggctggccgagcggccccacgtgtccccaggccccccctgcattggaacaggcagctttgccaccaccaggtag

SEQ ID NO: 161973 - DNA, 1401 bp, synthetic construct
  misc_feature 1..1401: note = Description of Artificial Sequence: Synthetic coding sequence
  source 1..1401: mol_type = other DNA
atgcctggggacagcagccctggcaccctgcccctgtgggatgccagcctgagcccccccctgggccctgaccccggcggcttcagccgggccagccacgccggggacaagagccggcccccagcccctgagctgggcagccctggagctgtgcggccccgggtgggcagctgtgcccctggccccatggagctgcgggtgagcaacaccagctgtgaaaatggcagcctgctgcacctgtactgcagcagccaggaggtgctgtgccagatcgtgaatgacctgagccctgaggtgcccagcaatgccaccttccacagctggcaggagcgcatccggcagaactacggcttctacatcggcctgggcctggccttcctgagcagcttcctgattggcagcagcgtcatcctgaagaagaagggcctgctgcggctggtggccactggagccaccagggctgtggatggcggcttcggctacctgaaggatgccatgtggtgggccggcttcctgaccatggccgccggggaggtggccaactttggagcctatgcctttgccccagccaccgtggtgacccccctgggcgccctgtctgtgctgatcagcgccatcctgagcagctacttcctgcgggagagcctgaacctgctgggcaagctgggctgcgtcatctgtgtggccggcagcacagtgatggtgattcatgcccctgaggaggagaaggtgaccaccatcatggagatggccagcaagatgaaggacaccggcttcatcgtgtttgctgtgctgctgctggtgtcctgcctgatcctgatctttgtgattgcccccaggtatggccagaggaacatcctgatctacatcatcatctgcagcgtcatcggggccttctctgtggccgctgtgaagggcctgggcatcaccatcaagaacttcttccagggcctgcctgtggtgcgccaccccctgccctacatcctgagcctcatcctggccctgagcctgagcacccaggtgaacttcctgaacagagccctggacatcttcaacaccagcctggtgttccccatctactacgtgttcttcaccaccgtggtggtgaccagcagcatcatcctcttcaaggagtggtacagcatgtctgctgtggacattgctggcaccctgagcggctttgtgaccatcatcctgggcgtcttcatgctgcacgccttcaaggacctggacatcagctgtgccagcctgccccacatgcacaagaaccccccacccagccctgcccctgagcccaccgtcatccggctggaggacaagaatgtgctggtggacaacatcgagctggccagcaccagcagccctgaggagaagcccaaggtgttcatcatccacagctag

SEQ ID NO: 161974 - DNA, 1344 bp, synthetic construct
  misc_feature 1..1344: note = Description of Artificial Sequence: Synthetic coding sequence
  source 1..1344: mol_type = other DNA
atgcctggggacagcagccctggcaccctgcccctgtgggatgccagcctgagcccccccctgggccctgaccccggcggcttcagccgggccagccacgccggggacaagagccggcccccagcccctgagctgggcagccctggagctgtgcggccccgggtgggcagctgtgcccctggccccatggagctgcgggtgagcaacaccagctgtgaaaatggcagcctgctgcacctgtactgcagcagccaggaggtgctgtgccagatcgtgaatgacctgagccctgaggtgcccagcaatgccaccttccacagctggcaggagcgcatccggcagaactacggcttctacatcggcctgggcctggccttcctgagcagcttcctgattggcagcagcgtcatcctgaagaagaagggcctgctgcggctggtggccactggagccaccagggctgtggccgccggggaggtggccaactttggagcctatgcctttgccccagccaccgtggtgacccccctgggcgccctgtctgtgctgatcagcgccatcctgagcagctacttcctgcgggagagcctgaacctgctgggcaagctgggctgtgtgatctgtgtggccggcagcacagtgatggtgatccacgcccctgaggaggagaaggtgaccaccatcatggagatggccagcaagatgaaggacaccggcttcatcgtgtttgctgtgctgctgctggtgtcctgcctgatcctgatcttcgtcatcgcccccaggtatggccagaggaacatcctgatctacatcatcatctgcagcgtgattggagccttctctgtggccgctgtgaagggcctgggcatcaccatcaagaacttcttccagggcctgcctgtggtgcgccaccccctgccctacatcctgagcctcatcctggccctgagcctgagcacccaggtgaacttcctgaacagagccctggacatcttcaacaccagcctggtgttccccatctactacgtgttcttcaccaccgtggtggtgaccagcagcatcatcctcttcaaggagtggtacagcatgtctgctgtggacattgctggcaccctgagcggctttgtgaccatcatcctgggcgtcttcatgctgcacgccttcaaggacctggacatcagctgtgccagcctgccccacatgcacaagaaccccccacccagccctgcccctgagcccaccgtcatccggctggaggacaagaatgtgctggtggacaacatcgagctggccagcaccagcagccctgaggagaagcccaaggtgttcatcatccacagctag

SEQ ID NO: 161975 - DNA, 8415 bp, synthetic construct
  misc_feature 1..8415: note = Description of Artificial Sequence: Synthetic coding sequence
  source 1..8415: mol_type = other DNA
atgaatggagacatgcctcatgtgcccatcaccaccctggccggcatcgccagcctgacagacctgctgaaccagctgcccctgcccagccccctgcctgccaccaccaccaagagcctgctcttcaatgccagaattgctgaggaggtgaactgcctgctggcctgcagagatgacaacctggtgtcccagctggtgcacagcctgaaccaggtgtccacagaccacatcgagctgaaggacaacctgggcagtgatgatcctgagggggacatccctgtgctgctgcaggccgtgctggcccggagccccaacgtgttccgggagaagtccatgcagaaccgctacgtgcagagcggcatgatgatgagccagtacaagctgagccagaacagcatgcacagcagccctgccagcagcaactaccagcagaccaccatcagccacagccccagcagcagatttgtgcccccccagaccagcagcggcaaccgcttcatgccccagcagaacagccctgtgcccagcccctatgccccccagagccctgctggctacatgccctacagccaccccagcagctacaccacccacccccagatgcagcaggcctctgtgagcagccccatcgtggccggcggcctgaggaacatccatgacaacaaggtgtctggccccctgagcggcaacagcgccaaccaccacgccgacaaccccaggcatggcagcagcgaggactacctgcacatggtgcaccggctgagcagtgatgatggagacagcagcaccatgagaaatgctgccagcttccccctgcggagcccccagcctgtgtgcagccctgctggcagcgagggcacccccaagggcagcaggcctcctctcatcctgcagagccagagcctgccctgcagcagccccagagatgtgcccccagacatcctgctggacagccctgagaggaagcagaagaagcagaagaagatgaagctgggcaaggatgagaaggagcagagcgagaaggccgccatgtatgacatcatcagcagccccagcaaggacagcaccaagctgaccctgcggctgagccgggtgcgcagcagtgacatggaccagcaggaggacatgatcagcggcgtggagaacagcaatgtgtctgaaaatgacatccccttcaacgtgcagtacccaggccagaccagcaagacccccatcaccccccaggacatcaaccggcccctgaatgctgcccagtgcctgagccagcaggagcagacagccttcctgcctgccaaccaggtgcctgtgctgcagcagaacacctctgtggccgccaagcagccccagacctctgtggtgcagaaccagcagcagatcagccagcagggccccatctatgatgaggtggagctggatgccctggccgagattgagcgcatcgagcgggagagcgccatcgagcgggagcgcttcagcaaggaggtgcaggacaaggacaagcccctgaagaagaggaagcaggacagctacccccaggaggccggcggggccaccggcggcaacagacctgccagccaggagaccggcagcactggaaatggcagcaggcctgccctgatggtgtccattgacctgcaccaggccggccgggtggacagccaggccagcatcacccaggacagcgacagcatcaagaagccagaggagatcaagcagtgcaatgatgcccctgtgtctgtgctgcaggaggacatcgtgggcagcctgaagagcaccccagagaaccaccctgagacccccaagaagaagagtgaccctgagctgagcaagtctgagatgaagcagagcgagagccggctggccgagagcaagcccaatgaaaatcggctggtggagaccaagagcagcgagaacaagctggagaccaaggtggagacccagacagaggagctgaagcagaatgaaagcaggaccacagagtgcaagcagaatgaaagcaccatcgtggagcccaagcagaatgaaaatcggctgagtgacaccaagcccaatgacaacaagcagaacaacggccgctctgagaccaccaagagcaggcctgagacccccaagcagaagggggagagcaggcctgagacccccaagcagaagagtgatggccaccctgagacccccaagcagaagggagatggccggcctgagacccccaagcagaagggggagagcaggcctgagacccccaagcagaagaatgaaggccggcctgagacccccaagcacagacatgacaacagaagagacagcggcaagcccagcacagagaagaagccagaggtgtccaagcacaagcaggacaccaagagtgacagcccccggctgaagtctgagcgggcagaggccctgaagcagaggccagatggccgctctgtgtctgagagcctgcggcgggaccatgacaacaagcagaagagtgatgacagaggagagagcgagcggcacagaggagaccagagccgggtgagaagacctgagaccctgcggagcagcagcagaaatgagcacggcatcaagagtgacagcagcaagacagacaagctggagaggaagcacagacatgagagcggggacagccgggagcggcccagcagtggagagcagaagagcaggccagacagcccccgggtgaagcagggcgacagcaacaagagcagaagtgacaagctgggcttcaagagccccaccagcaaggatgacaagaggacagagggcaacaagagcaaggtggacaccaacaaggcccacccagacaacaaggccgagttccccagctacctgctgggcggccgcagcggggccctgaagaacttcgtcatccccaagatcaagagggacaaggatggaaatgtgacccaggagaccaagaagatggagatgaagggggagcccaaggacaaggtggagaagattggcctggtggaggacctgaacaagggggccaagcctgtggtggtgctgcagaagctgagcctggatgatgtgcagaagctgatcaaggaccgggaggacaagagccgcagcagcctgaagcccatcaagaacaagcccagcaagagcaacaagggcagcattgaccagagcgtgctgaaggagctgcccccagagctgctggccgagattgagagcaccatgcccctgtgtgagcgggtgaagatgaacaagaggaagaggagcacagtgaatgagaagcccaagtatgcagagatcagcagtgatgaggacaatgacagtgatgaggcctttgagagcagcaggaagaggcacaagaaggatgatgacaaggcctgggagtatgaggagcgggaccggcgcagcagcggggaccacagaagaagtggccacagccatgagggccgccgcagcagcggcggcggccgctacagaaacagaagccccagcgacagcgacatggaggactacagccccccacccagcctgtctgaggtggccaggaagatgaagaagaaggagaagcagaagaagaggaaggcctatgagcccaagctgaccccagaggagatgatggacagcagcaccttcaagcgcttcaccgccagcattgagaacatcctggacaacctggaggacatggacttcaccgcctttggagatgatgatgagatcccccaggagctgctgctgggcaagcaccagctgaatgagctgggcagcgagagcgccaagatcaaggccatgggcatcatggacaagctgagcacagacaagacagtgaaggtgctgaacatcctggagaagaacatccaggacggcagcaagctgagcaccctgctgaaccacaacaatgacacagaggaggaggagcggctgtggagggacctgatcatggagcgggtgaccaagtctgcagatgcctgcctgaccaccatcaacatcatgaccagccccaacatgcccaaggctgtgtacattgaagatgtgattgaaagagtcatccagtacaccaagttccacctgcagaacaccctgtacccccagtatgaccctgtgtaccgcctggacccccatggaggcggcctgctgagcagcaaggccaagagggccaagtgcagcacccacaagcagagggtgattgtgatgctgtacaacaaggtgtgtgacatcgtgagcagcctgtctgagctgctggagatccagctgctgacagacaccaccatcctgcaggtgtcctccatgggcatcacccccttctttgtggagaatgtgtctgagctgcagctgtgtgccatcaagctggtgacagctgtgttcagccgctatgagaagcaccggcagctgatcctggaggagatcttcaccagcctggcccggctgcccaccagcaagaggagcctgaggaacttccggctgaacagcagtgacatggatggagagcccatgtacatccagatggtgacagccctggtgctgcagctgatccagtgtgtggtgcacctgcccagcagcgagaaggacagcaatgctgaggaggacagcaacaagaagattgaccaggatgtggtgatcaccaacagctatgaaacagccatgaggacagcccagaacttcctgagcatcttcctgaagaagtgtggcagcaagcagggcgaggaggactaccggcccctgtttgaaaattttgtgcaggacctgctgagcacagtgaacaagccagagtggccagctgctgagctgctgctgagcctgctgggccgcctgctggtgcaccagttcagcaacaagagcacagagatggccctgcgggtggccagcctggactacctgggcaccgtggccgcccggctgaggaaggatgctgtgaccagcaagatggaccagggcagcattgaaagaatcctgaagcaggtgtctggaggagaagatgagatccagcagctgcagaaggccctgctggactacctggatgaaaatacagaaacagaccccagcctggtgttcagcaggaagttctacatcgcccagtggttccgggacaccaccctggagacagagaaggccatgaagagccagaaggatgaggagagcagcgagggcacccaccacgccaaggagattgagaccaccggccagatcatgcacagagcagaaaataggaagaagttcctgcggagcatcatcaagaccacccccagccagttcagcaccctgaagatgaacagcgacacagtggactatgatgatgcctgcctgattgtgcgctacctggcctccatgaggccctttgcccagagctttgacatctacctgacccagatcctgcgggtgctgggagaaaatgccatcgctgtgaggaccaaggccatgaagtgcctgtctgaggtggtggccgtggaccccagcatcctggcccggctggacatgcagaggggcgtgcacggccgcctgatggacaacagcacctctgtgcgggaggccgctgtggagctgctgggccgctttgtgctgtgccggccccagctggccgagcagtactatgacatgctgattgaaagaatcctggacaccggcatctctgtgaggaagagggtcatcaagatcctgcgggacatctgcatcgagcagcccaccttccccaagatcacagagatgtgtgtgaagatgatccggcgggtgaatgatgaggagggcatcaagaagctggtgaatgagaccttccagaagctgtggttcacccccaccccccacaatgacaaggaggccatgaccaggaagatcctgaacatcacagatgtggtggccgcctgccgggacaccggctatgactggtttgagcagctgctgcagaacctgctgaagtctgaggaggacagcagctacaagcctgtgaagaaggcctgcacccagctggtggacaacctggtggagcacatcctgaagtatgaggagagcctggccgacagcgacaacaagggcgtgaacagcggccgcctggtggcctgcatcaccaccctcttcctgttcagcaagatccggccccagctgatggtgaagcacgccatgaccatgcagccctacctgaccaccaagtgcagcacccagaatgacttcatggtgatctgcaatgtggccaagatcctggagctggtggtgcccctgatggagcaccccagcgagaccttcctggccaccatcgaggaggacctgatgaagctgatcatcaagtatggcatgacagtggtgcagcactgtgtgtcctgcctgggcgctgtggtgaacaaggtgacccagaacttcaagtttgtgtgggcctgcttcaaccgctactacggggccatcagcaagctgaagagccagcaccaggaggaccccaacaacaccagcctgctgaccaacaagccagccctgctgcggagcctcttcaccgtgggcgccctgtgccgccactttgattttgacctggaggacttcaagggcaacagcaaggtgaacatcaaggacaaggtgctggagctgctgatgtacttcaccaagcacagtgatgaggaggtgcagaccaaggccatcatcggcctgggctttgccttcatccagcaccccagcctgatgtttgagcaggaggtgaagaacctgtacaacaacatcctgagtgacaagaacagctctgtgaacctgaagatccaggtgctgaagaacctgcagacctacctgcaggaggaggacaccaggatgcagcaggccgaccgggactggaagaaggtggccaagcaggaggacctgaaggagatgggagatgtgagcagcggcatgagcagcagcatcatgcagctgtacctgaagcaggtgctggaggccttcttccacacccagagctctgtgcgccactttgccctgaatgtgattgccctgaccctgaaccagggcctcatccaccctgtgcagtgtgtgccctacctgattgccatgggcacagatcctgagcccgccatgaggaacaaggctgaccagcagctggtggagattgacaagaagtatgccggcttcatccacatgaaggctgtggccggcatgaagatgagctaccaggtgcagcaggccatcaacacctgcctgaaggaccctgtgcggggcttccggcaggatgagagcagcagcgccctgtgcagccacctgtacagcatgatccggggcaaccggcagcaccggcgggccttcctgatcagcctgctgaacctgtttgatgacacagccaagacagatgtgaccatgctgctgtacatcgctgacaacctggcctgcttcccctaccagacccaggaggagcccctcttcatcatgcaccacatcgacatcaccctgtctgtgtctggcagcaacctgctgcagagcttcaaggagagcatggtgaaggacaagaggaaggagaggaagagcagccccagcaaagaaaatgaaagcagtgacagcgaggaggaggtgtcccggcccaggaagagcaggaagagggtggacagcgacagcgacagcgacagtgaagatgacatcaacagcgtgatgaagtgcctgcctgagaacagcgcccccctcatcgagtttgccaacgtgtcccagggcatcctgctgctgctgatgctgaagcagcacctgaagaacctgtgtggcttcagtgacagcaagatccagaagtacagccccagcgagagcgccaaggtgtatgacaaggccatcaacaggaagacaggagtgcacttccaccccaagcagaccctggacttcctgcggagtgacatggccaacagcaagatcacagaggaggtgaagaggagcatcgtgaagcagtacctggacttcaagctgctgatggagcacctggaccctgatgaggaggaggaggagggggaggtgtctgccagcaccaatgccaggaacaaggccatcaccagcctgctgggcggcggcagccccaagaacaacacagctgctgagacagaagatgatgaaagtgatggagaagatcggggcggcggcaccagcggcagcctgcggcgcagcaagaggaacagcgacagcacagagctggccgcccagatgaatgaatctgtggatgtgatggatgtgattgccatctgctgccccaagtacaaggaccggccccagatcgcccgggtggtgcagaagaccagcagcggcttctctgtgcagtggatggccggcagctacagcggctcctggacagaggccaagagaagagatggcaggaagctggtgccctgggtggacaccatcaaggagagtgacatcatctacaagaagatcgccctgaccagcgccaacaagctgaccaacaaggtggtgcagaccctgcggagcctgtatgctgccaaggatggcaccagcagctag

SEQ ID NO: 161976 - DNA, 8094 bp, synthetic construct
  misc_feature 1..8094: note = Description of Artificial Sequence: Synthetic coding sequence
  source 1..8094: mol_type = other DNA
atgaatggagacatgcctcatgtgcccatcaccaccctggccggcatcgccagcctgacagacctgctgaaccagctgcccctgcccagccccctgcctgccaccaccaccaagagcctgctcttcaatgccagaattgctgaggaggtgaactgcctgctggcctgcagagatgacaacctggtgtcccagctggtgcacagcctgaaccaggtgtccacagaccacatcgagctgaaggacaacctgggcagtgatgatcctgagggggacatccctgtgctgctgcaggccgtgctggcccggagccccaacgtgttccgggagaagtccatgcagaaccgctacgtgcagagcggcatgatgatgagccagtacaagctgagccagaacagcatgcacagcagccctgccagcagcaactaccagcagaccaccatcagccacagccccagcagcagatttgtgcccccccagaccagcagcggcaaccgcttcatgccccagcagaacagccctgtgcccagcccctatgccccccagagccctgctggctacatgccctacagccaccccagcagctacaccacccacccccagatgcagcaggcctctgtgagcagccccatcgtggccggcggcctgaggaacatccatgacaacaaggtgtctggccccctgagcggcaacagcgccaaccaccacgccgacaaccccaggcatggcagcagcgaggactacctgcacatggtgcaccggctgagcagtgatgatggagacagcagcaccatgagaaatgctgccagcttccccctgcggagcccccagcctgtgtgcagccctgctggcagcgagggcacccccaagggcagcaggcctcctctcatcctgcagagccagagcctgccctgcagcagccccagagatgtgcccccagacatcctgctggacagccctgagaggaagcagaagaagcagaagaagatgaagctgggcaaggatgagaaggagcagagcgagaaggccgccatgtatgacatcatcagcagccccagcaaggacagcaccaagctgaccctgcggctgagccgggtgcgcagcagtgacatggaccagcaggaggacatgatcagcggcgtggagaacagcaatgtgtctgaaaatgacatccccttcaacgtgcagtacccaggccagaccagcaagacccccatcaccccccaggacatcaaccggcccctgaatgctgcccagtgcctgagccagcaggagcagacagccttcctgcctgccaaccaggtgcctgtgctgcagcagaacacctctgtggccgccaagcagccccagacctctgtggtgcagaaccagcagcagatcagccagcagggccccatctatgatgaggtggagctggatgccctggccgagattgagcgcatcgagcgggagagcgccatcgagcgggagcgcttcagcaaggaggtgcaggacaaggacaagcccctgaagaagaggaagcaggacagctacccccaggaggccggcggggccaccggcggcaacagacctgccagccaggagaccggcagcactggaaatggcagcaggcctgccctgatggtgtccattgacctgcaccaggccggccgggtggacagccaggccagcatcacccaggacagcgacagcatcaagaagccagaggagatcaagcagtgcaatgatgcccctgtgtctgtgctgcaggaggacatcgtgggcagcctgaagagcaccccagagaaccaccctgagacccccaagaagaagagtgaccctgagctgagcaagtctgagatgaagcagagcgagagccggctggccgagagcaagcccaatgaaaatcggctggtggagaccaagagcagcgagaacaagctggagaccaaggtggagacccagacagaggagctgaagcagaatgaaagcaggaccacagagtgcaagcagaatgaaagcaccatcgtggagcccaagcagaatgaaaatcggctgagtgacaccaagcccaatgacaacaagcagaacaacggccgctctgagaccaccaagagcaggcctgagacccccaagcagaagggggagagcaggcctgagacccccaagcagaagagtgatggccaccctgagacccccaagcagaagggagatggccggcctgagacccccaagcagaagggggagagcaggcctgagacccccaagcagaagaatgaaggccggcctgagacccccaagcacagacatgacaacagaagagacagcggcaagcccagcacagagaagaagccagaggtgtccaagcacaagcaggacaccaagagtgacagcccccggctgaagtctgagcgggcagaggccctgaagcagaggccagatggccgctctgtgtctgagagcctgcggcgggaccatgacaacaagcagaagagtgatgacagaggagagagcgagcggcacagaggagaccagagccgggtgagaagacctgagaccctgcggagcagcagcagaaatgagcacggcatcaagagtgacagcagcaagacagacaagctggagaggaagcacagacatgagagcggggacagccgggagcggcccagcagtggagagcagaagagcaggccagacagcccccgggtgaagcagggcgacagcaacaagagcagaagtgacaagctgggcttcaagagccccaccagcaaggatgacaagaggacagagggcaacaagagcaaggtggacaccaacaaggcccacccagacaacaaggccgagttccccagctacctgctgggcggccgcagcggggccctgaagaacttcgtcatccccaagatcaagagggacaaggatggaaatgtgacccaggagaccaagaagatggagatgaagggggagcccaaggacaaggtggagaagattggcctggtggaggacctgaacaagggggccaagcctgtggtggtgctgcagaagctgagcctggatgatgtgcagaagctgatcaaggaccgggaggacaagagccgcagcagcctgaagcccatcaagaacaagcccagcaagagcaacaagggcagcattgaccagagcgtgctgaaggagctgcccccagagctgctggccgagattgagagcaccatgcccctgtgtgagcgggtgaagatgaacaagaggaagaggagcacagtgaatgagaagcccaagtatgcagagatcagcagtgatgaggacaatgacagtgatgaggcctttgagagcagcaggaagaggcacaagaaggatgatgacaaggcctgggagtatgaggagcgggaccggcgcagcagcggggaccacagaagaagtggccacagccatgagggccgccgcagcagcggcggcggccgctacagaaacagaagccccagcgacagcgacatggaggactacagccccccacccagcctgtctgaggtggccaggaagatgaagaagaaggagaagcagaagaagaggaaggcctatgagcccaagctgaccccagaggagatgatggacagcagcaccttcaagcgcttcaccgccagcattgagaacatcctggacaacctggaggacatggacttcaccgcctttggagatgatgatgagatcccccaggagctgctgctgggcaagcaccagctgaatgagctgggcagcgagagcgccaagatcaaggccatgggcatcatggacaagctgagcacagacaagacagtgaaggtgctgaacatcctggagaagaacatccaggacggcagcaagctgagcaccctgctgaaccacaacaatgacacagaggaggaggagcggctgtggagggacctgatcatggagcgggtgaccaagtctgcagatgcctgcctgaccaccatcaacatcatgaccagccccaacatgcccaaggctgtgtacattgaagatgtgattgaaagagtcatccagtacaccaagttccacctgcagaacaccctgtacccccagtatgaccctgtgtaccgcctggacccccatggaggcggcctgctgagcagcaaggccaagagggccaagtgcagcacccacaagcagagggtgattgtgatgctgtacaacaaggtgtgtgacatcgtgagcagcctgtctgagctgctggagatccagctgctgacagacaccaccatcctgcaggtgtcctccatgggcatcacccccttctttgtggagaatgtgtctgagctgcagctgtgtgccatcaagctggtgacagctgtgttcagccgctatgagaagcaccggcagctgatcctggaggagatcttcaccagcctggcccggctgcccaccagcaagaggagcctgaggaacttccggctgaacagcagtgacatggatggagagcccatgtacatccagatggtgacagccctggtgctgcagctgatccagtgtgtggtgcacctgcccagcagcgagaaggacagcaatgctgaggaggacagcaacaagaagattgaccaggatgtggtgatcaccaacagctatgaaacagccatgaggacagcccagaacttcctgagcatcttcctgaagaagtgtggcagcaagcagggcgaggaggactaccggcccctgtttgaaaattttgtgcaggacctgctgagcacagtgaacaagccagagtggccagctgctgagctgctgctgagcctgctgggccgcctgctggtgcaccagttcagcaacaagagcacagagatggccctgcgggtggccagcctggactacctgggcaccgtggccgcccggctgaggaaggatgctgtgaccagcaagatggaccagggcagcattgaaagaatcctgaagcaggtgtctggaggagaagatgagatccagcagctgcagaaggccctgctggactacctggatgaaaatacagaaacagaccccagcctggtgttcagcaggaagttctacatcgcccagtggttccgggacaccaccctggagacagagaaggccatgaagagccagaaggatgaggagagcagcgagggcacccaccacgccaaggagattgagaccaccggccagatcatgcacagagcagaaaataggaagaagttcctgcggagcatcatcaagaccacccccagccagttcagcaccctgaagatgaacagcgacacagtggactatgatgatgcctgcctgattgtgcgctacctggcctccatgaggccctttgcccagagctttgacatctacctgacccagatcctgcgggtgctgggagaaaatgccatcgctgtgaggaccaaggccatgaagtgcctgtctgaggtggtggccgtggaccccagcatcctggcccggctggacatgcagaggggcgtgcacggccgcctgatggacaacagcacctctgtgcgggaggccgctgtggagctgctgggccgctttgtgctgtgccggccccagctggccgagcagtactatgacatgctgattgaaagaatcctggacaccggcatctctgtgaggaagagggtcatcaagatcctgcgggacatctgcatcgagcagcccaccttccccaagatcacagagatgtgtgtgaagatgatccggcgggtgaatgatgaggagggcatcaagaagctggtgaatgagaccttccagaagctgtggttcacccccaccccccacaatgacaaggaggccatgaccaggaagatcctgaacatcacagatgtggtggccgcctgccgggacaccggctatgactggtttgagcagctgctgcagaacctgctgaagtctgaggaggacagcagctacaagcctgtgaagaaggcctgcacccagctggtggacaacctggtggagcacatcctgaagtatgaggagagcctggccgacagcgacaacaagggcgtgaacagcggccgcctggtggcctgcatcaccaccctcttcctgttcagcaagatccggccccagctgatggtgaagcacgccatgaccatgcagccctacctgaccaccaagtgcagcacccagaatgacttcatggtgatctgcaatgtggccaagatcctggagctggtggtgcccctgatggagcaccccagcgagaccttcctggccaccatcgaggaggacctgatgaagctgatcatcaagtatggcatgacagtggtgcagcactgtgtgtcctgcctgggcgctgtggtgaacaaggtgacccagaacttcaagtttgtgtgggcctgcttcaaccgctactacggggccatcagcaagctgaagagccagcaccaggaggaccccaacaacaccagcctgctgaccaacaagccagccctgctgcggagcctcttcaccgtgggcgccctgtgccgccactttgattttgacctggaggacttcaagggcaacagcaaggtgaacatcaaggacaaggtgctggagctgctgatgtacttcaccaagcacagtgatgaggaggtgcagaccaaggccatcatcggcctgggctttgccttcatccagcaccccagcctgatgtttgagcaggaggtgaagaacctgtacaacaacatcctgagtgacaagaacagctctgtgaacctgaagatccaggtgctgaagaacctgcagacctacctgcaggaggaggacaccaggatgcagcaggccgaccgggactggaagaaggtggccaagcaggaggacctgaaggagatgggagatgtgagcagcggcatgagcagcagcatcatgcagctgtacctgaagcaggtgctggaggccttcttccacacccagagctctgtgcgccactttgccctgaatgtgattgccctgaccctgaaccagggcctcatccaccctgtgcagtgtgtgccctacctgattgccatgggcacagatcctgagcccgccatgaggaacaaggctgaccagcagctggtggagattgacaagaagtatgccggcttcatccacatgaaggctgtggccggcatgaagatgagctaccaggtgcagcaggccatcaacacctgcctgaaggaccctgtgcggggcttccggcaggatgagagcagcagcgccctgtgcagccacctgtacagcatgatccggggcaaccggcagcaccggcgggccttcctgatcagcctgctgaacctgtttgatgacacagccaagacagatgtgaccatgctgctgtacatcgctgacaacctggcctgcttcccctaccagacccaggaggagcccctcttcatcatgcaccacatcgacatcaccctgtctgtgtctggcagcaacctgctgcagagcttcaaggagagcatggtgaaggacaagaggaaggagaggaagagcagccccagcaaagaaaatgaaagcagtgacagcgaggaggaggtgtcccggcccaggaagagcaggaagagggtggacagcgacagcgacagcgacagtgaagatgacatcaacagcgtgatgaagtgcctgcctgagaacagcgcccccctcatcgagtttgccaacgtgtcccagggcatcctgctgctgctgatgctgaagcagcacctgaagaacctgtgtggcttcagtgacagcaagatccagaagtacagccccagcgagagcgccaaggtgtatgacaaggccatcaacaggaagacaggagtgcacttccaccccaagcagaccctggacttcctgcggagtgacatggccaacagcaagatcacagaggaggtgaagaggagcatcgtgaagcagtacctggacttcaagctgctgatggagcacctggaccctgatgaggaggaggaggagggggaggtgtctgccagcaccaatgccaggaacaaggccatcaccagcctgctgggcggcggcagccccaagaacaacacagctgctgagacagaagatgatgaaagtgatggagaagatcggggcggcggcaccagcggcgtgagaagaagaagaagccagaggatcagccagaggatcacctag

SEQ ID NO: 161977 - DNA, 867 bp, synthetic construct
  misc_feature 1..867: note = Description of Artificial Sequence: Synthetic coding sequence
  source 1..867: mol_type = other DNA
atggagcggccccagcctgacagcatgccccaggacctgtctgaggccctgaaggaggccaccaaggaggtgcacacccaggctgaaaatgctgagttcatgaggaacttccagaagggccaggtgaccagagatggcttcaagctggtgatggccagcctgtaccacatctacgtggccctggaggaggagattgaaagaaacaaggagagccctgtgtttgcccctgtgtacttccctgaggagctgcacaggaaggccgccctggagcaggacctggccttctggtacggcccccgctggcaggaggtgatcccctacaccccagccatgcagcgctacgtgaagaggctgcacgaggtgggccgcacagagcctgagctgctggtggcccacgcctacacccgctacctgggggacctgagcggcggccaggtgctgaagaagatcgcccagaaggccctggacctgcccagcagcggggagggcctggccttcttcaccttccccaacatcgccagcgccaccaagttcaagcagctgtaccgcagcaggatgaacagcctggagatgaccccagctgtgcggcagagggtcatcgaggaggccaagacagccttcctgctgaacatccagctgtttgaggagctgcaggagctgctgacccatgacaccaaggaccagagccccagccgggcccctggcctgcggcagagggccagcaacaaggtgcaggacagcgcccctgtggagaccccccggggcaagccacccctgaacaccaggagccaggcccccctgctgcgctgggtgctgaccctgtccttcctggtggccaccgtggccgtgggcctgtatgccatgtag

SEQ ID NO: 161978 - DNA, 4305 bp, synthetic construct
  misc_feature 1..4305: note = Description of Artificial Sequence: Synthetic coding sequence
  source 1..4305: mol_type = other DNA
atggaggaccacatgtttggagtgcagcagatccagcccaacgtcatctctgtgcggctcttcaagaggaaggtgggcggcctgggcttcctggtgaaggagcgggtgtccaagccccctgtgatcatcagtgacctgatccggggcggcgctgctgagcagagcggcctcatccaggccggggacatcatcctggccgtgaatggccggcccctggtggacctgtcctatgattctgccctggaggtgctgcggggcatcgccagcgagacccacgtggtgctgatcctgcggggccctgagggcttcaccacccacctggagaccaccttcaccggagatggcacccccaagaccatccgggtgacccagcccctgggcccccccaccaaggctgtggacctgagccaccagcccccagctgggaaggagcagcccctggccgtggatggagccagcggccctggaaatggcccccagcacgcctatgatgatggccaggaggccggcagcctgccccacgccaacggcctggccccccggcccccaggccaggaccctgccaagaaggccaccagggtgtccctgcagggcagaggagaaaataatgagctgctgaaggagattgagcctgtgctgagcctgctgaccagcggcagccggggcgtgaagggcggggccccagccaaggccgagatgaaggacatgggcatccaggtggaccgggacctggatggcaagagccacaagcccctgcccctgggcgtggagaatgacagagtcttcaatgacctgtggggcaaaggaaatgtgcctgtggtgctgaacaacccctacagcgagaaggagcagccccccaccagcggcaagcagagccccaccaagaatggcagccccagcaaatgtccccgcttcctgaaggtgaagaactgggagacagaggtggtgctgacagacaccctgcacctgaagagcaccctggagaccggctgcacagagtacatctgcatgggcagcatcatgcaccccagccagcacgcccggcggccagaagatgtgaggaccaagggccagctgttccccctggccaaggagttcatcgaccagtactacagcagcatcaagagatttggcagcaaggcccacatggagcggctggaggaggtgaacaaggagattgacaccaccagcacctaccagctgaaggacacagagctgatctacggggccaagcacgcctggagaaatgccagccgctgtgtgggccgcatccagtggagcaagctgcaggtgtttgatgcccgggactgcaccacagcccacggcatgttcaactacatctgcaaccacgtgaagtatgccaccaacaagggcaacctgcggagcgccatcaccatcttcccccagaggacagatggcaagcatgacttccgggtgtggaacagccagctgatccgctatgccggctacaagcagccagatggcagcaccctgggggaccctgccaacgtgcagttcacagagatctgcatccagcagggctggaagccaccccggggccgctttgatgtgctgcccctgctgctgcaggccaatggaaatgaccctgagctgttccagatccccccagagctggtgctggaggtgcccatccgccaccccaagtttgagtggttcaaggacctgggcctgaagtggtacggcctgcctgctgtgagcaacatgctgctggagattggaggcctggagttcagcgcctgccccttcagcggctggtacatgggcacagaaattggagtgcgggactactgtgacaacagccgctacaacatcctggaggaggtggccaagaagatgaacctggacatgaggaagaccagcagcctgtggaaggaccaggccctggtggagatcaacattgctgtgctgtacagcttccagagcgacaaggtgaccatcgtggaccaccacagcgccacagagagcttcatcaagcacatggagaatgagtaccgctgccggggcggctgcccagctgactgggtgtggatcgtgccccccatgagcggcagcatcacccctgtgttccaccaggagatgctgaactaccgcctgacccccagctttgagtaccagcctgacccctggaacacccacgtgtggaagggcaccaacggcacccccaccaagagaagagccatcggcttcaagaagctggccgaggccgtgaagttcagcgccaagctgatgggccaggccatggccaagagggtgaaggccaccatcctgtatgccacagagaccgggaagagccaggcctatgccaagaccctgtgtgagatcttcaagcacgcctttgatgccaaggtgatgtccatggaggagtatgacatcgtgcacctggagcacgagaccctggtgctggtggtgaccagcacctttggaaatggagaccccccagaaaatggagagaagtttggctgtgccctgatggagatgaggcaccccaacagcgtgcaggaggagaggaagagctacaaggtgcgcttcaacagcgtgtcctcctacagcgacagccagaagagcagtggagatggccctgacctgcgggacaactttgaatctgctggccccctggccaacgtgcgcttctctgtgtttggcctgggcagccgggcctacccccacttctgtgccttcggccatgctgtggacaccctgctggaggagctgggcggggagcgcatcctgaagatgagagaaggagatgagctgtgtggccaggaggaggccttccgcacctgggccaagaaggtgttcaaggccgcctgtgatgtgttctgtgtgggagatgatgtgaacatcgagaaggccaacaacagcctcatcagcaatgaccgctcctggaagaggaacaagttccggctgacctttgtggccgaggcccctgagctgacccagggcctgagcaatgtgcacaagaagagggtgtctgctgcccggctgctgagccggcagaacctgcagagccccaagagcagccgcagcaccatctttgtgcggctgcacaccaacggcagccaggagctgcagtaccagcccggggaccacctgggcgtcttccctggcaaccacgaggacctggtgaatgccctgattgagcggctggaggatgcccctcctgtgaaccagatggtgaaggtggagctgctggaggagaggaacacagccctgggcgtcatcagcaactggacagatgagctgcggctgcccccctgcaccatcttccaggccttcaagtactacctggacatcaccaccccacccacccccctgcagctgcagcagtttgccagcctggccaccagcgagaaggagaagcagaggctgctggtgctgagcaagggcctgcaggagtatgaggagtggaagtggggcaagaaccccaccatcgtggaggtgctggaggagttccccagcatccagatgcctgccaccctgctgctgacccagctgagcctgctgcagccccgctactacagcatcagcagcagcccagacatgtacccagatgaggtgcacctgactgtggccatcgtgtcctaccgcaccagagatggagagggccccatccaccacggcgtgtgcagctcctggctgaaccgcatccaggctgatgagctggtgccctgctttgtgcggggggcccccagcttccacctgcccaggaacccccaggtgccctgcatcctggtgggccctggcaccggcatcgcccccttccgctccttctggcagcagaggcagtttgacatccagcacaagggcatgaacccctgccccatggtgctggtgtttggctgccggcagagcaagattgaccacatctaccgggaggagaccctgcaggccaagaacaagggcgtcttccgggagctgtacacagcctacagccgggagccagacaagcccaagaagtatgtgcaggacatcctgcaggagcagctggccgagagcgtgtaccgggccctgaaggagcagggcggccacatctacgtgtgtggagatgtgaccatggctgctgatgtgctgaaggccatccagaggatcatgacccagcagggcaagctgtctgcagaagatgctggggtcttcatcagcaggatgagagatgacaaccgctaccacgaggacatcttcggcgtgaccctgcggacctatgaggtgaccaaccggctgcggtctgagagcatcgccttcatcgaggagagcaagaaggacacagatgaggtgttcagcagctag

SEQ ID NO: 161979 - DNA, 4407 bp, synthetic construct
  misc_feature 1..4407: note = Description of Artificial Sequence: Synthetic coding sequence
  source 1..4407: mol_type = other DNA
atggaggaccacatgtttggagtgcagcagatccagcccaacgtcatctctgtgcggctcttcaagaggaaggtgggcggcctgggcttcctggtgaaggagcgggtgtccaagccccctgtgatcatcagtgacctgatccggggcggcgctgctgagcagagcggcctcatccaggccggggacatcatcctggccgtgaatggccggcccctggtggacctgtcctatgattctgccctggaggtgctgcggggcatcgccagcgagacccacgtggtgctgatcctgcggggccctgagggcttcaccacccacctggagaccaccttcaccggagatggcacccccaagaccatccgggtgacccagcccctgggcccccccaccaaggctgtggacctgagccaccagcccccagctgggaaggagcagcccctggccgtggatggagccagcggccctggaaatggcccccagcacgcctatgatgatggccaggaggccggcagcctgccccacgccaacggcctggccccccggcccccaggccaggaccctgccaagaaggccaccagggtgtccctgcagggcagaggagaaaataatgagctgctgaaggagattgagcctgtgctgagcctgctgaccagcggcagccggggcgtgaagggcggggccccagccaaggccgagatgaaggacatgggcatccaggtggaccgggacctggatggcaagagccacaagcccctgcccctgggcgtggagaatgacagagtcttcaatgacctgtggggcaaaggaaatgtgcctgtggtgctgaacaacccctacagcgagaaggagcagccccccaccagcggcaagcagagccccaccaagaatggcagccccagcaaatgtccccgcttcctgaaggtgaagaactgggagacagaggtggtgctgacagacaccctgcacctgaagagcaccctggagaccggctgcacagagtacatctgcatgggcagcatcatgcaccccagccagcacgcccggcggccagaagatgtgaggaccaagggccagctgttccccctggccaaggagttcatcgaccagtactacagcagcatcaagagatttggcagcaaggcccacatggagcggctggaggaggtgaacaaggagattgacaccaccagcacctaccagctgaaggacacagagctgatctacggggccaagcacgcctggagaaatgccagccgctgtgtgggccgcatccagtggagcaagctgcaggtgtttgatgcccgggactgcaccacagcccacggcatgttcaactacatctgcaaccacgtgaagtatgccaccaacaagggcaacctgcggagcgccatcaccatcttcccccagaggacagatggcaagcatgacttccgggtgtggaacagccagctgatccgctatgccggctacaagcagccagatggcagcaccctgggggaccctgccaacgtgcagttcacagagatctgcatccagcagggctggaagccaccccggggccgctttgatgtgctgcccctgctgctgcaggccaatggaaatgaccctgagctgttccagatccccccagagctggtgctggaggtgcccatccgccaccccaagtttgagtggttcaaggacctgggcctgaagtggtacggcctgcctgctgtgagcaacatgctgctggagattggaggcctggagttcagcgcctgccccttcagcggctggtacatgggcacagaaattggagtgcgggactactgtgacaacagccgctacaacatcctggaggaggtggccaagaagatgaacctggacatgaggaagaccagcagcctgtggaaggaccaggccctggtggagatcaacattgctgtgctgtacagcttccagagcgacaaggtgaccatcgtggaccaccacagcgccacagagagcttcatcaagcacatggagaatgagtaccgctgccggggcggctgcccagctgactgggtgtggatcgtgccccccatgagcggcagcatcacccctgtgttccaccaggagatgctgaactaccgcctgacccccagctttgagtaccagcctgacccctggaacacccacgtgtggaagggcaccaacggcacccccaccaagagaagagccatcggcttcaagaagctggccgaggccgtgaagttcagcgccaagctgatgggccaggccatggccaagagggtgaaggccaccatcctgtatgccacagagaccgggaagagccaggcctatgccaagaccctgtgtgagatcttcaagcacgcctttgatgccaaggtgatgtccatggaggagtatgacatcgtgcacctggagcacgagaccctggtgctggtggtgaccagcacctttggaaatggagaccccccagaaaatggagagaagtttggctgtgccctgatggagatgaggcaccccaacagcgtgcaggaggagaggaagtacccagagcccctgcgcttcttccccaggaaaggaccacccctgcccaatggagacacagaggtgcacggcctggccgccgcccgggacagccagcacaggagctacaaggtgcgcttcaacagcgtgtcctcctacagcgacagccagaagagcagtggagatggccctgacctgcgggacaactttgaatctgctggccccctggccaacgtgcgcttctctgtgtttggcctgggcagccgggcctacccccacttctgtgccttcggccatgctgtggacaccctgctggaggagctgggcggggagcgcatcctgaagatgagagaaggagatgagctgtgtggccaggaggaggccttccgcacctgggccaagaaggtgttcaaggccgcctgtgatgtgttctgtgtgggagatgatgtgaacatcgagaaggccaacaacagcctcatcagcaatgaccgctcctggaagaggaacaagttccggctgacctttgtggccgaggcccctgagctgacccagggcctgagcaatgtgcacaagaagagggtgtctgctgcccggctgctgagccggcagaacctgcagagccccaagagcagccgcagcaccatctttgtgcggctgcacaccaacggcagccaggagctgcagtaccagcccggggaccacctgggcgtcttccctggcaaccacgaggacctggtgaatgccctgattgagcggctggaggatgcccctcctgtgaaccagatggtgaaggtggagctgctggaggagaggaacacagccctgggcgtcatcagcaactggacagatgagctgcggctgcccccctgcaccatcttccaggccttcaagtactacctggacatcaccaccccacccacccccctgcagctgcagcagtttgccagcctggccaccagcgagaaggagaagcagaggctgctggtgctgagcaagggcctgcaggagtatgaggagtggaagtggggcaagaaccccaccatcgtggaggtgctggaggagttccccagcatccagatgcctgccaccctgctgctgacccagctgagcctgctgcagccccgctactacagcatcagcagcagcccagacatgtacccagatgaggtgcacctgactgtggccatcgtgtcctaccgcaccagagatggagagggccccatccaccacggcgtgtgcagctcctggctgaaccgcatccaggctgatgagctggtgccctgctttgtgcggggggcccccagcttccacctgcccaggaacccccaggtgccctgcatcctggtgggccctggcaccggcatcgcccccttccgctccttctggcagcagaggcagtttgacatccagcacaagggcatgaacccctgccccatggtgctggtgtttggctgccggcagagcaagattgaccacatctaccgggaggagaccctgcaggccaagaacaagggcgtcttccgggagctgtacacagcctacagccgggagccagacaagcccaagaagtatgtgcaggacatcctgcaggagcagctggccgagagcgtgtaccgggccctgaaggagcagggcggccacatctacgtgtgtggagatgtgaccatggctgctgatgtgctgaaggccatccagaggatcatgacccagcagggcaagctgtctgcagaagatgctggggtcttcatcagcaggatgagagatgacaaccgctaccacgaggacatcttcggcgtgaccctgcggacctatgaggtgaccaaccggctgcggtctgagagcatcgccttcatcgaggagagcaagaaggacacagatgaggtgttcagcagctag

SEQ ID NO: 161980 - DNA, 1224 bp, synthetic construct
  misc_feature 1..1224: note = Description of Artificial Sequence: Synthetic coding sequence
  source 1..1224: mol_type = other DNA
atggaggaccacatgtttggagtgcagcagatccagcccaacgtcatctctgtgcggctcttcaagaggaaggtgggcggcctgggcttcctggtgaaggagcgggtgtccaagccccctgtgatcatcagtgacctgatccggggcggcgctgctgagcagagcggcctcatccaggccggggacatcatcctggccgtgaatggccggcccctggtggacctgtcctatgattctgccctggaggtgctgcggggcatcgccagcgagacccacgtggtgctgatcctgcggggccctgagggcttcaccacccacctggagaccaccttcaccggagatggcacccccaagaccatccgggtgacccagcccctgggcccccccaccaaggctgtggacctgagccaccagcccccagctgggaaggagcagcccctggccgtggatggagccagcggccctggaaatggcccccagcacgcctatgatgatggccaggaggccggcagcctgccccacgccaacggcctggccccccggcccccaggccaggaccctgccaagaaggccaccagggtgtccctgcagggcagaggagaaaataatgagctgctgaaggagattgagcctgtgctgagcctgctgaccagcggcagccggggcgtgaagggcggggccccagccaaggccgagatgaaggacatgggcatccaggtggaccgggacctggatggcaagagccacaagcccctgcccctgggcgtggagaatgacagagtcttcaatgacctgtggggcaaaggaaatgtgcctgtggtgctgaacaacccctacagcgagaaggagcagatgaggaagctgcgcatcacagagggctttggagcccagaggggcagccacaaccaccccccaccccaggagaacagccccccccagaggatggccgccccacccagcgtgcacgccagcagccgcagcaggacaggccgcctgcgctggttcagcctgacccccagcaccctgcgggcccactggaagagagatgccctgagcaccagcgcctgggcccccagctgcatcctgctgtccatgcagggcggcctgaagaccagcgcccagaaggacagcagcagcctgagccccaagagcctgctgatcaacaccatccaccagctgaaggacctggcccccaagcccacctggaagggctggaagaggtag

SEQ ID NO: 161981 - DNA, 3993 bp, synthetic construct
  misc_feature 1..3993: note = Description of Artificial Sequence: Synthetic coding sequence
  source 1..3993: mol_type = other DNA
atggaggaccacatgtttggagtgcagcagatccagcccaacgtcatctctgtgcggctcttcaagaggaaggtgggcggcctgggcttcctggtgaaggagcgggtgtccaagccccctgtgatcatcagtgacctgatccggggcggcgctgctgagcagagcggcctcatccaggccggggacatcatcctggccgtgaatggccggcccctggtggacctgtcctatgattctgccctggaggtgctgcggggcatcgccagcgagacccacgtggtgctgatcctgcggggccctgagggcttcaccacccacctggagaccaccttcaccggagatggcacccccaagaccatccgggtgacccagcccctgggcccccccaccaaggctgtggacctgagccaccagcccccagctgggaaggagcagcccctggccgtggatggagccagcggccctggaaatggcccccagcacgcctatgatgatggccaggaggccggcagcctgccccacgccaacggcctggccccccggcccccaggccaggaccctgccaagaaggccaccagggtgtccctgcagggcagaggagaaaataatgagctgctgaaggagattgagcctgtgctgagcctgctgaccagcggcagccggggcgtgaagggcggggccccagccaaggccgagatgaaggacatgggcatccaggtggaccgggacctggatggcaagagccacaagcccctgcccctgggcgtggagaatgacagagtcttcaatgacctgtggggcaaaggaaatgtgcctgtggtgctgaacaacccctacagcgagaaggagcagccccccaccagcggcaagcagagccccaccaagaatggcagccccagcaaatgtccccgcttcctgaaggtgaagaactgggagacagaggtggtgctgacagacaccctgcacctgaagagcaccctggagaccggctgcacagagtacatctgcatgggcagcatcatgcaccccagccagcacgcccggcggccagaagatgtgaggaccaagggccagctgttccccctggccaaggagttcatcgaccagtactacagcagcatcaagagatttggcagcaaggcccacatggagcggctggaggaggtgaacaaggagattgacaccaccagcacctaccagctgaaggacacagagctgatctacggggccaagcacgcctggagaaatgccagccgctgtgtgggccgcatccagtggagcaagctgcaggtgtttgatgcccgggactgcaccacagcccacggcatgttcaactacatctgcaaccacgtgaagtatgccaccaacaagggcaacctgcggagcgccatcaccatcttcccccagaggacagatggcaagcatgacttccgggtgtggaacagccagctgatccgctatgccggctacaagcagccagatggcagcaccctgggggaccctgccaacgtgcagttcacagaggaggtggccaagaagatgaacctggacatgaggaagaccagcagcctgtggaaggaccaggccctggtggagatcaacattgctgtgctgtacagcttccagagcgacaaggtgaccatcgtggaccaccacagcgccacagagagcttcatcaagcacatggagaatgagtaccgctgccggggcggctgcccagctgactgggtgtggatcgtgccccccatgagcggcagcatcacccctgtgttccaccaggagatgctgaactaccgcctgacccccagctttgagtaccagcctgacccctggaacacccacgtgtggaagggcaccaacggcacccccaccaagaggcgggccatcggcttcaagaagctggccgaggccgtgaagttcagcgccaagctgatgggccaggccatggccaagagggtgaaggccaccatcctgtatgccacagaaacaggcaagagccaggcctatgccaagaccctgtgtgagatcttcaagcacgcctttgatgccaaggtgatgtccatggaggagtatgacatcgtgcacctggagcacgagaccctggtgctggtggtgaccagcacctttggaaatggagaccccccagaaaatggagagaagtttggctgtgccctgatggagatgaggcaccccaacagcgtgcaggaggagaggaagagctacaaggtgcgcttcaacagcgtgagcagctacagcgacagccagaagagcagtggagatggccctgacctgcgggacaactttgagagcgctggccccctggccaacgtgcgcttctctgtgtttggcctgggcagccgggcctacccccacttctgtgcctttggacatgctgtggacaccctgctggaggagctgggcggggagcgcatcctgaagatgagagaaggagatgagctgtgtggccaggaggaggccttccgcacctgggccaagaaggtgttcaaggccgcctgtgatgtgttctgtgtgggagatgatgtgaacatcgagaaggccaacaacagcctcatcagcaatgaccgctcctggaagaggaacaagttccggctgacctttgtggccgaggcccctgagctgacccagggcctgagcaatgtgcacaagaagagggtgtctgctgcccggctgctgagccggcagaacctgcagagccccaagagcagccgcagcaccatctttgtgcggctgcacaccaacggcagccaggagctgcagtaccagcccggggaccacctgggcgtcttccctggcaaccacgaggacctggtgaatgccctgattgaaaggctggaggatgcccctcctgtgaaccagatggtgaaggtggagctgctggaggagaggaacacagccctgggcgtcatcagcaactggacagatgagctgcggctgcccccctgcaccatcttccaggccttcaagtactacctggacatcaccaccccacccacccccctgcagctgcagcagtttgccagcctggccaccagcgagaaggagaagcagaggctgctggtgctgagcaagggcctgcaggagtatgaggagtggaagtggggcaagaaccccaccatcgtggaggtgctggaggagttccccagcatccagatgcctgccaccctgctgctgacccagctgagcctgctgcagccccgctactacagcatcagcagcagcccagacatgtacccagatgaggtgcacctgactgtggccatcgtgtcctaccgcaccagagatggagagggccccatccaccacggcgtgtgcagctcctggctgaaccgcatccaggctgatgagctggtgccctgctttgtgcggggggcccccagcttccacctgcccaggaacccccaggtgccctgcatcctggtgggccctggcactggaattgcccccttccgctccttctggcagcagaggcagtttgacatccagcacaagggcatgaacccctgccccatggtgctggtgtttggctgccggcagagcaagattgaccacatctaccgggaggagaccctgcaggccaagaacaagggcgtcttccgggagctgtacacagcctacagccgggagccagacaagcccaagaagtatgtgcaggacatcctgcaggagcagctggccgagagcgtgtaccgggccctgaaggagcagggcggccacatctacgtgtgtggagatgtgaccatggccgcagatgtgctgaaggccatccagaggatcatgacccagcagggcaagctgtctgcagaagatgctggggtcttcatcagcaggatgagagatgacaaccgctaccacgaggacatctttggagtgaccctgcggacctatgaggtgaccaaccggctgcggtctgagagcatcgccttcatcgaggagagcaagaaggacacagatgaccaggtgttcaagacctag

SEQ ID NO: 161982 - DNA, 3621 bp, synthetic construct
  misc_feature 1..3621: note = Description of Artificial Sequence: Synthetic coding sequence
  source 1..3621: mol_type = other DNA
atggaggaccacatgtttggagtgcagcagatccagcccaacgtcatctctgtgcggctcttcaagaggaaggtgggcggcctgggcttcctggtgaaggagcgggtgtccaagccccctgtgatcatcagtgacctgatccggggcggcgctgctgagcagagcggcctcatccaggccggggacatcatcctggccgtgaatggccggcccctggtggacctgtcctatgattctgccctggaggtgctgcggggcatcgccagcgagacccacgtggtgctgatcctgcggggccctgagggcttcaccacccacctggagaccaccttcaccggagatggcacccccaagaccatccgggtgacccagcccctgggcccccccaccaaggctgtggacctgagccaccagcccccagctgggaaggagcagcccctggccgtggatggagccagcggccctggaaatggcccccagcacgcctatgatgatggccaggaggccggcagcctgccccacgccaacggcctggccccccggcccccaggccaggaccctgccaagaaggccaccagggtgtccctgcagggcagaggagaaaataatgagctgctgaaggagattgagcctgtgctgagcctgctgaccagcggcagccggggcgtgaagggcggggccccagccaaggccgagatgaaggacatgggcatccaggtggaccgggacctggatggcaagagccacaagcccctgcccctgggcgtggagaatgacagagtcttcaatgacctgtggggcaaaggaaatgtgcctgtggtgctgaacaacccctacagcgagaaggagcagccccccaccagcggcaagcagagccccaccaagaatggcagccccagcaaatgtccccgcttcctgaaggtgaagaactgggagacagaggtggtgctgacagacaccctgcacctgaagagcaccctggagaccggctgcacagagtacatctgcatgggcagcatcatgcaccccagccagcacgcccggcggccagaagatgtgaggaccaagggccagctgttccccctggccaaggagttcatcgaccagtactacagcagcatcaagagatttggcagcaaggcccacatggagcggctggaggaggtgaacaaggagattgacaccaccagcacctaccagctgaaggacacagagctgatctacggggccaagcacgcctggagaaatgccagccgctgtgtgggccgcatccagtggagcaagctgcaggtgtttgatgcccgggactgcaccacagcccacggcatgttcaactacatctgcaaccacgtgaagtatgccaccaacaagggcaacctgcggagcgccatcaccatcttcccccagaggacagatggcaagcatgacttccgggtgtggaacagccagctgatccgctatgccggctacaagcagccagatggcagcaccctgggggaccctgccaacgtgcagttcacagagatctgcatccagcagggctggaagccaccccggggccgctttgatgtgctgcccctgctgctgcaggccaatggaaatgaccctgagctgttccagatccccccagagctggtgctggaggtgcccatccgccaccccaagtttgagtggttcaaggacctgggcctgaagtggtacggcctgcctgctgtgagcaacatgctgctggagattggaggcctggagttcagcgcctgccccttcagcggctggtacatgggcacagaaattggagtgcgggactactgtgacaacagccgctacaacatcctggaggaggtggccaagaagatgaacctggacatgaggaagaccagcagcctgtggaaggaccaggccctggtggagatcaacattgctgtgctgtacagcttccagagcgacaaggtgaccatcgtggaccaccacagcgccacagagagcttcatcaagcacatggagaatgagtaccgctgccggggcggctgcccagctgactgggtgtggatcgtgccccccatgagcggcagcatcacccctgtgttccaccaggagatgctgaactaccgcctgacccccagctttgagtaccagcctgacccctggaacacccacgtgtggaagggcaccaacggcacccccaccaagagaagagccatcggcttcaagaagctggccgaggccgtgaagttcagcgccaagctgatgggccaggccatggccaagagggtgaaggccaccatcctgtatgccacagagaccgggaagagccaggcctatgccaagaccctgtgtgagatcttcaagcacgcctttgatgccaaggtgatgtccatggaggagtatgacatcgtgcacctggagcacgagaccctggtgctggtggtgaccagcacctttggaaatggagaccccccagaaaatggagagaagtttggctgtgccctgatggagatgaggcaccccaacagcgtgcaggaggagaggaagagctacaaggtgcgcttcaacagcgtgtcctcctacagcgacagccagaagagcagtggagatggccctgacctgcgggacaactttgaatctgctggccccctggccaacgtgcgcttctctgtgtttggcctgggcagccgggcctacccccacttctgtgccttcggccatgctgtggacaccctgctggaggagctgggcggggagcgcatcctgaagatgagagaaggagatgagctgtgtggccaggaggaggccttccgcacctgggccaagaaggtgttcaaggccgcctgtgatgtgttctgtgtgggagatgatgtgaacatcgagaaggccaacaacagcctcatcagcaatgaccgctcctggaagaggaacaagttccggctgacctttgtggccgaggcccctgagctgacccagggcctgagcaatgtgcacaagaagagggtgtctgctgcccggctgctgagccggcagaacctgcagagccccaagagcagccgcagcaccatctttgtgcggctgcacaccaacggcagccaggagctgcagtaccagcccggggaccacctgggcgtcttccctggcaaccacgaggacctggtgaatgccctgattgagcggctggaggatgcccctcctgtgaaccagatggtgaaggtggagctgctggaggagaggaacacagccctgggcgtcatcagcaactggacagatgagctgcggctgcccccctgcaccatcttccaggccttcaagtactacctggacatcaccaccccacccacccccctgcagctgcagcagtttgccagcctggccaccagcgagaaggagaagcagaggctgctggtgctgagcaagggcctgcaggagtatgaggagtggaagtggggcaagaaccccaccatcgtggaggtgctggaggagttccccagcatccagatgcctgccaccctgctgctgacccagctgagcctgctgcagccccgctactacagcatcagcagcagcccccacacccacaccctgtctgagacccggcccagccccctgcccctgagcagccagtgctgctag

SEQ ID NO: 161983 - DNA, 204 bp, synthetic construct
  misc_feature 1..204: note = Description of Artificial Sequence: Synthetic coding sequence
  source 1..204: mol_type = other DNA
caccccaacagcgtgcaggaggagaggaagtacccagagcccctgcgcttcttccccaggaaaggaccacccctgcccaatggagacacagaggtgcacggcctggccgccgcccgggacagccagcacaggagctacaaggtgcgcttcaacagcgtgtcctcctacagcgacagccagaagagcagtggagatggcccctag

SEQ ID NO: 161984 - DNA, 1521 bp, synthetic construct
  misc_feature 1..1521: note = Description of Artificial Sequence: Synthetic coding sequence
  source 1..1521: mol_type = other DNA
atgcccagcaagaccaagtacaacctggtggatgatggccatgacctgcgcatccccctgcacaatgaagatgccttccagcacggcatctgctttgaggccaagtatgtgggcagcctggatgtgccccggcccaacagccgggtggagatcgtggccgccatgaggcgcatccgctatgagttcaaggccaagaacatcaagaagaagaaggtgtccatcatggtgtctgtggatggagtgaaggtgatcctgaagaagaagaagaagctgctgctgctgcagaagaaggagtggacctgggatgagagcaagatgctggtgatgcaggaccccatctaccgcatcttctacgtgtcccatgacagccaggacctgaagatcttctcctacatcgccagagatggagccagcaacatcttccgctgcaatgtgttcaagagcaagaagaagagccaggccatgagaattgtgaggacagtgggccaggcctttgaggtgtgccacaagctgagcctgcagcacacccagcagaatgctgatggccaggaggatggagagagcgagaggaacagcaacagcagcggggaccccggccggcagctgactggagctgagcgggccagcacagccacagctgaggagacagacattgatgctgtggaggtgcccctgcctggaaatgatgtgctggagttcagccggggcgtgacagacctggatgctgtgggcaaggagggcggcagccacacaggcagcaaggtgagccacccccaggagcccatgctgacagccagccccaggatgctgctgcccagcagcagcagcaagcccccaggcctgggcacagagacccccctgagcacccaccaccagatgcagctgctgcagcagctgctgcagcagcagcagcagcagacccaggtggccgtggcccaggtgcacctgctgaaggaccagctggccgctgaggccgccgcccggctggaggcccaggcccgggtgcaccagctgctgctgcagaacaaggacatgctgcagcacatcagcctgctggtgaagcaggtgcaggagctggagctgaagctgagcggccagaatgccatgggcagccaggacagcctgctggagatcaccttccgcagcggggccctgcctgtgctgtgtgaccccaccacccccaagccagaggacctgcacagcccccccctgggcgccggcctggccgactttgcccaccctgctggcagccccctgggcagaagagactgcctggtgaagctggagtgcttccgcttcctgcccccagaggacaccccacctccagcccagggcgaggccctgctgggcggcctggagctgatcaagttccgggagagcggcatcgcctctgaatatgagagcaacacagatgaaagtgaggagcgggacagctggagccaggaggagctgccccggctgctgaatgtgctgcagaggcaggagctgggagatggcctggatgatgaaattgctgtgtag

SEQ ID NO: 161985 - DNA, 636 bp, synthetic construct
  misc_feature 1..636: note = Description of Artificial Sequence: Synthetic coding sequence
  source 1..636: mol_type = other DNA
atgagcctgagcagcctgtgccctgtgttttctgctgctgccagcagcctgcaggtgcacctgctgaaggaccagctggccgctgaggccgccgcccggctggaggcccaggcccgggtgcaccagctgctgctgcagaacaaggacatgctgcagcacatcagcctgctggtgaagcaggtgcaggagctggagctgaagctgagcggccagaatgccatgggcagccaggacagcctgctggagatcaccttccgcagcggggccctgcctgtgctgtgtgaccccaccacccccaagccagaggacctgcacagcccccccctgggcgccggcctggccgactttgcccaccctgctggcagccccctgggccggcgggactgcctggtgaagctggagtgcttccgcttcctgcccccagaggacaccccacctccagcccagggcgaggccctgctgggcggcctggagctgatcaagttccgggagagcggcatcgcctctgaatatgagagcaacacagatgagagcgaggagcgggacagctggagccaggaggagctgccccggctgctgaatgtgctgcagaggcaggagctgggagatggcctggatgatgaaattgctgtgtag

SEQ ID NO: 161986 - DNA, 1506 bp, synthetic construct
  misc_feature 1..1506: note = Description of Artificial Sequence: Synthetic coding sequence
  source 1..1506: mol_type = other DNA
atgcccagcaagaccaagtacaacctggtggatgatggccatgacctgcgcatccccctgcacaatgaagatgccttccagcacggcatctgctttgaggccaagtatgtgggcagcctggatgtgccccggcccaacagccgggtggagatcgtggccgccatgaggcgcatccgctatgagttcaaggccaagaacatcaagaagaagaaggtgtccatcatggtgtctgtggatggagtgaaggtgatcctgaagaagaagaagaagaagaaggagtggacctgggatgagagcaagatgctggtgatgcaggaccccatctaccgcatcttctacgtgtcccatgacagccaggacctgaagatcttctcctacatcgccagagatggagccagcaacatcttccgctgcaatgtgttcaagagcaagaagaagagccaggccatgagaattgtgaggacagtgggccaggcctttgaggtgtgccacaagctgagcctgcagcacacccagcagaatgctgatggccaggaggatggagagagcgagaggaacagcaacagcagcggggaccccggccggcagctgaccggggctgagcgggccagcacagccacagctgaggagacagacattgatgctgtggaggtgcccctgcctggaaatgatgtgctggagttcagcagaggagtgacagacctggatgctgtgggcaaggagggcggcagccacacaggcagcaaggtgagccacccccaggagcccatgctgacagccagccccaggatgctgctgcccagcagcagcagcaagcccccaggcctgggcacagagacccccctgagcacccaccaccagatgcagctgctgcagcagctgctgcagcagcagcagcagcagacccaggtggccgtggcccaggtgcacctgctgaaggaccagctggccgctgaggccgccgcccggctggaggcccaggcccgggtgcaccagctgctgctgcagaacaaggacatgctgcagcacatcagcctgctggtgaagcaggtgcaggagctggagctgaagctgagcggccagaatgccatgggcagccaggacagcctgctggagatcaccttccgcagcggggccctgcctgtgctgtgtgaccccaccacccccaagccagaggacctgcacagcccccccctgggcgccggcctggccgactttgcccaccctgctggcagccccctgggccggcgggactgcctggtgaagctggagtgcttccgcttcctgcccccagaggacaccccacctccagcccagggcgaggccctgctgggcggcctggagctgatcaagttccgggagagcggcatcgcctctgaatatgagagcaacacagatgagagcgaggagcgggacagctggagccaggaggagctgccccggctgctgaatgtgctgcagaggcaggagctgggagatggcctggatgatgaaattgctgtgtag

SEQ ID NO: 161987 - DNA, 2190 bp, synthetic construct
  misc_feature 1..2190: note = Description of Artificial Sequence: Synthetic coding sequence
  source 1..2190: mol_type = other DNA
atggcctgcccctggaagttcctgttcaagaccaagttccaccagtatgccatgaatggagagaaggacatcaacaacaacgtggagaaggccccctgtgccaccagcagccctgtgacccaggatgacctgcagtaccacaacctgagcaagcagcagaatgaaagcccccagcccctggtggagaccgggaagaagagccctgagagcctggtgaagctggatgccacccccctgagcagccccaggcatgtgcgcatcaagaactggggcagcggcatgaccttccaggacaccctgcaccacaaggccaagggcatcctgacctgccgcagcaagagctgcctgggcagcatcatgacccccaagagcctgacccggggcccccgggacaagcccaccccaccagatgagctgctgccccaggccatcgagtttgtgaaccagtactacggcagcttcaaggaggccaagattgaggagcacctggcccgggtggaggccgtgaccaaggagattgagaccaccggcacctaccagctgactggagatgagctgatctttgccaccaagcaggcctggagaaatgccccccgctgcatcggccgcatccagtggagcaacctgcaggtgtttgatgcccggagctgcagcacagcccgggagatgtttgagcacatctgccgccacgtgcgctacagcaccaacaatggaaacatccgcagcgccatcaccgtcttcccccagaggagtgatggcaagcatgacttccgggtgtggaatgcccagctgatccgctatgccggctaccagatgccagatggcagcatccggggggaccctgccaacgtggagttcacccagctgtgcatcgacctgggctggaagcccaagtatggccgctttgatgtggtgcccctggtgctgcaggccaacggccgggaccctgagctgtttgagatccccccagacctggtgctggaggtggccatggagcaccccaagtatgagtggttccgggagctggagctgaagtggtacgccctgcctgctgtggccaacatgctgctggaggtgggcggcctggagttccctggctgccccttcaacggctggtacatgggcacagaaattggagtgcgggacttctgtgatgtgcagcgctacaacatcctggaggaggtgggccgcaggatgggcctggagacccacaagctggccagcctgtggaaggaccaggccgtggtggagatcaacattgctgtgctgcacagcttccagaagcagaatgtgaccatcatggaccaccacagcgctgctgagagcttcatgaagtacatgcagaatgagtaccgcagcagaggaggctgcccagctgactggatctggctggtgccccccatgagcggcagcatcacccctgtgttccaccaggagatgctgaactacgtgctgagccccttctactactaccaggtggaggcctggaagacccacgtgtggcaggatgagaagaggcggcccaagaggcgggagatccccctgaaggtgctggtgaaggctgtgctgtttgcctgcatgctgatgaggaagaccatggccagccgggtgcgggtgaccatcctgtttgccacagaaacaggcaagtctgaggccctggcctgggacctgggcgccctcttcagctgtgccttcaaccccaagaagctgaagaagagcctcttcatgctgaaggagctgaacaacaagttccgctatgctgtgtttggcctgggcagctccatgtacccccgcttctgtgcctttgcccatgacatcgaccagaagctgagccacctgggcgccagccagctgacccccatgggagaaggagatgagctgagcggccaggaggatgccttccgctcctgggccgtgcagaccttcaaggccgcctgtgagacctttgatgtgcggggcaagcagcacatccagatccccaagctgtacaccagcaatgtgacctgggacccccaccactaccgcctggtgcaggacagccagcccctgcctgctgccagcaccagcccccgcatcccccccatcctggccagcagcagcggcctggcccaggccagccggcccagcgctgtgtctggcagcaatggctccatgacccccagcacccgggagtgtggggaggccgcctag

SEQ ID NO: 161988 - DNA, 3462 bp, synthetic construct
  misc_feature 1..3462: note = Description of Artificial Sequence: Synthetic coding sequence
  source 1..3462: mol_type = other DNA
atggcctgcccctggaagttcctgttcaagaccaagttccaccagtatgccatgaatggagagaaggacatcaacaacaacgtggagaaggccccctgtgccaccagcagccctgtgacccaggatgacctgcagtaccacaacctgagcaagcagcagaatgaaagcccccagcccctggtggagaccgggaagaagagccctgagagcctggtgaagctggatgccacccccctgagcagccccaggcatgtgcgcatcaagaactggggcagcggcatgaccttccaggacaccctgcaccacaaggccaagggcatcctgacctgccgcagcaagagctgcctgggcagcatcatgacccccaagagcctgacccggggcccccgggacaagcccaccccaccagatgagctgctgccccaggccatcgagtttgtgaaccagtactacggcagcttcaaggaggccaagattgaggagcacctggcccgggtggaggccgtgaccaaggagattgagaccaccggcacctaccagctgactggagatgagctgatctttgccaccaagcaggcctggagaaatgccccccgctgcatcggccgcatccagtggagcaacctgcaggtgtttgatgcccggagctgcagcacagcccgggagatgtttgagcacatctgccgccacgtgcgctacagcaccaacaatggaaacatccgcagcgccatcaccgtcttcccccagaggagtgatggcaagcatgacttccgggtgtggaatgcccagctgatccgctatgccggctaccagatgccagatggcagcatccggggggaccctgccaacgtggagttcacccagctgtgcatcgacctgggctggaagcccaagtatggccgctttgatgtggtgcccctggtgctgcaggccaacggccgggaccctgagctgtttgagatccccccagacctggtgctggaggtggccatggagcaccccaagtatgagtggttccgggagctggagctgaagtggtacgccctgcctgctgtggccaacatgctgctggaggtgggcggcctggagttccctggctgccccttcaacggctggtacatgggcacagaaattggagtgcgggacttctgtgatgtgcagcgctacaacatcctggaggaggtgggccgcaggatgggcctggagacccacaagctggccagcctgtggaaggaccaggccgtggtggagatcaacattgctgtgctgcacagcttccagaagcagaatgtgaccatcatggaccaccacagcgctgctgagagcttcatgaagtacatgcagaatgagtaccgcagcagaggaggctgcccagctgactggatctggctggtgccccccatgagcggcagcatcacccctgtgttccaccaggagatgctgaactacgtgctgagccccttctactactaccaggtggaggcctggaagacccacgtgtggcaggatgagaagaggcggcccaagaggcgggagatccccctgaaggtgctggtgaaggctgtgctgtttgcctgcatgctgatgaggaagaccatggccagccgggtgcgggtgaccatcctgtttgccacagaaacaggcaagtctgaggccctggcctgggacctgggcgccctcttcagctgtgccttcaaccccaaggtggtgtgcatggacaagtaccgcctgagctgcctggaggaggagcggctgctgctggtggtgaccagcacctttggaaatggagactgccctggaaatggagagaagctgaagaagagcctcttcatgctgaaggagctgaacaacaagttccgctatgctgtgtttggcctgggcagctccatgtacccccgcttctgtgcctttgcccatgacatcgaccagaagctgagccacctgggcgccagccagctgacccccatgggagaaggagatgagctgagcggccaggaggatgccttccgctcctgggccgtgcagaccttcaaggccgcctgtgagacctttgatgtgcggggcaagcagcacatccagatccccaagctgtacaccagcaatgtgacctgggacccccaccactaccgcctggtgcaggacagccagcccctggacctgagcaaggccctgagctccatgcacgccaagaatgtgttcaccatgaggctgaagagccggcagaacctgcagagccccaccagcagccgggccaccatcctggtggagctgagctgtgaagatggccagggcctgaactacctgcctggagagcacctgggcgtgtgccccggcaaccagcctgccctggtgcagggcatcctggagcgggtggtggatggccccaccccccaccagacagtgcggctggaggccctggatgaaagtggcagctactgggtgtctgacaagaggctgcccccctgcagcctgagccaggccctgacctacttcctggacatcaccaccccacccacccagctgctgctgcagaagctggcccaggtggccacagaggagcctgagcggcagaggctggaggccctgtgccagcccagcgagtacagcaagtggaagttcaccaacagccccaccttcctggaggtgctggaggagttccccagcctgcgggtgtctgctggcttcctgctgagccagctgcccatcctgaagccccgcttctacagcatcagcagcagccgggaccacacccccacagagatccacctgactgtggccgtggtgacctaccacaccagagatggccagggccccctgcaccacggcgtgtgcagcacctggctgaacagcctgaagccccaggaccctgtgccctgctttgtgagaaatgccagcggcttccacctgcctgaggaccccagccacccctgcatcctgattggccctggcaccggcatcgcccccttccgctccttctggcagcagaggctgcatgacagccagcacaagggcgtgcggggcggccgcatgaccctggtgtttggctgcagaagaccagatgaggaccacatctaccaggaggagatgctggagatggcccagaagggcgtgctgcatgctgtgcacacagcctacagccggctgcccgggaagcccaaggtgtatgtgcaggacatcctgcggcagcagctggccagcgaggtgctgcgggtgctgcacaaggagcccggccacctgtatgtgtgtggagatgtgaggatggccagagatgtggcccacaccctgaagcagctggtggccgccaagctgaagctgaatgaggagcaggtggaggactacttcttccagctgaagagccagaagcgctaccacgaggacatctttggagctgtgttcccctatgaggccaagaaggacagagtggccgtgcagcccagcagcctggagatgtctgccctgtag

SEQ ID NO: 161989 - DNA, 3345 bp, synthetic construct
  misc_feature 1..3345: note = Description of Artificial Sequence: Synthetic coding sequence
  source 1..3345: mol_type = other DNA
atggcctgcccctggaagttcctgttcaagaccaagttccaccagtatgccatgaatggagagaaggacatcaacaacaacgtggagaaggccccctgtgccaccagcagccctgtgacccaggatgacctgcagtaccacaacctgagcaagcagcagaatgaaagcccccagcccctggtggagaccgggaagaagagccctgagagcctggtgaagctggatgccacccccctgagcagccccaggcatgtgcgcatcaagaactggggcagcggcatgaccttccaggacaccctgcaccacaaggccaagggcatcctgacctgccgcagcaagagctgcctgggcagcatcatgacccccaagagcctgacccggggcccccgggacaagcccaccccaccagatgagctgctgccccaggccatcgagtttgtgaaccagtactacggcagcttcaaggaggccaagattgaggagcacctggcccgggtggaggccgtgaccaaggagattgagaccaccggcacctaccagctgactggagatgagctgatctttgccaccaagcaggcctggagaaatgccccccgctgcatcggccgcatccagtggagcaacctgcaggtgtttgatgcccggagctgcagcacagcccgggagatgtttgagcacatctgccgccacgtgcgctacagcaccaacaatggaaacatccgcagcgccatcaccgtcttcccccagaggagtgatggcaagcatgacttccgggtgtggaatgcccagctgtgcatcgacctgggctggaagcccaacggccgggaccctgagctgtttgagatccccccagacctggtgctggaggtggccatggagcaccccaagtatgagtggttccgggagctggagctgaagtggtacgccctgcctgctgtggccaacatgctgctggaggtgggcggcctggagttccctggctgccccttcaacggctggtacatgggcacagaaattggagtgcgggacttctgtgatgtgcagcgctacaacatcctggaggaggtgggccgcaggatgggcctggagacccacaagctggccagcctgtggaaggaccaggccgtggtggagatcaacattgctgtgctgcacagcttccagaagcagaatgtgaccatcatggaccaccacagcgctgctgagagcttcatgaagtacatgcagaatgagtaccgcagccggggcggctgcccagctgactggatctggctggtgccccccatgagcggcagcatcacccctgtgttccaccaggagatgctgaactacgtgctgagccccttctactactaccaggtggaggcctggaagacccacgtgtggcaggatgagaagagaagacccaagagaagagagatccccctgaaggtgctggtgaaggctgtgctgtttgcctgcatgctgatgaggaagaccatggccagccgggtgcgggtgaccatcctgtttgccacagagaccgggaagtctgaggccctggcctgggacctgggcgccctcttcagctgtgccttcaaccccaaggtggtgtgcatggacaagtaccgcctgagctgcctggaggaggagcggctgctgctggtggtgaccagcacctttggaaatggagactgccctggaaatggagagaagctgaagaagagcctcttcatgctgaaggagctgaacaacaagttccgctatgctgtgtttggcctgggcagctccatgtacccccgcttctgtgcctttgcccatgacatcgaccagaagctgagccacctgggcgccagccagctgacccccatgggagaaggagatgagctgagcggccaggaggatgccttccgctcctgggccgtgcagaccttcaaggccgcctgtgagacctttgatgtgcggggcaagcagcacatccagatccccaagctgtacaccagcaatgtgacctgggacccccaccactaccgcctggtgcaggacagccagcccctggacctgagcaaggccctgagctccatgcacgccaagaatgtgttcaccatgaggctgaagagccggcagaacctgcagagccccaccagcagccgggccaccatcctggtggagctgagctgtgaagatggccagggcctgaactacctgcccggggagcacctgggcgtgtgccccggcaaccagcctgccctggtgcagggcatcctggagcgggtggtggatggccccaccccccaccagacagtgcggctggaggccctggatgagagcggcagctactgggtgtctgacaagaggctgcccccctgcagcctgagccaggccctgacctacttcctggacatcaccaccccacccacccagctgctgctgcagaagctggcccaggtggccacagaggagcctgagcggcagaggctggaggccctgtgccagcccagcgagtacagcaagtggaagttcaccaacagccccaccttcctggaggtgctggaggagttccccagcctgcgggtgtctgctggcttcctgctgagccagctgcccatcctgaagccccgcttctacagcatcagcagcagccgggaccacacccccacagagatccacctgactgtggccgtggtgacctaccacaccagagatggccagggccccctgcaccacggcgtgtgcagcacctggctgaacagcctgaagccccaggaccctgtgccctgctttgtgagaaatgccagcggcttccacctgcctgaggaccccagccacccctgcatcctgattggccctggcactggaattgcccccttccgctccttctggcagcagaggctgcatgacagccagcacaagggcgtgcggggcggccgcatgaccctggtgtttggctgccggcggccagatgaggaccacatctaccaggaggagatgctggagatggcccagaagggcgtgctgcatgctgtgcacacagcctacagccggctgcccgggaagcccaaggtgtatgtgcaggacatcctgcggcagcagctggccagcgaggtgctgcgggtgctgcacaaggagcccggccacctgtatgtgtgtggagatgtgaggatggccagagatgtggcccacaccctgaagcagctggtggccgccaagctgaagctgaatgaggagcaggtggaggactacttcttccagctgaagagccagaagcgctaccacgaggacatctttggagctgtgttcccctatgaggccaagaaggacagagtggccgtgcagcccagcagcctggagatgtctgccctgtag

SEQ ID NO: 161990 - DNA, 3612 bp, synthetic construct
  misc_feature 1..3612: note = Description of Artificial Sequence: Synthetic coding sequence
  source 1..3612: mol_type = other DNA
atgggcaacctgaagtctgtggcccaggagcccggccccccctgtggcctgggcctgggcctgggcctgggcctgtgtgggaagcagggccctgccaccccagcccctgagcccagccgggccccagccagcctgctgcccccagcccctgagcacagcccccccagcagccccctgacccagcccccagagggccccaagttcccccgggtgaagaactgggaggtgggcagcatcacctatgacaccctgagcgcccaggcccagcaggacggcccctgcaccccccggcgctgcctgggcagcctggtgttccccaggaagctgcagggccggcccagccctggccccccagcccctgagcagctgctgagccaggcccgggacttcatcaaccagtactacagcagcatcaagaggagcggcagccaggcccacgagcagaggctgcaggaggtggaggccgaggtggccgccaccggcacctaccagctgcgggagagcgagctggtgtttggagccaagcaggcctggagaaatgccccccgctgtgtgggccgcatccagtggggcaagctgcaggtgtttgatgcccgggactgccgcagcgcccaggagatgttcacctacatctgcaaccacatcaagtatgccaccaacagaggcaacctgcggagcgccatcaccgtcttcccccagcgctgccccggccgcggggacttccgcatctggaacagccagctggtgcgctatgccggctaccggcagcaggacggctctgtgcggggggaccctgccaacgtggagatcacagagctgtgcatccagcacggctggaccccaggaaatggccgctttgatgtgctgcccctgctgctgcaggccccagatgatcctcctgagctgttcctgctgcccccagagctggtgctggaggtgcccctggagcaccccaccctggagtggtttgctgccctgggcctgcgctggtacgccctgcctgctgtgagcaacatgctgctggagattggaggcctggagttccctgctgcccccttcagcggctggtacatgagcacagagatcggcaccaggaacctgtgtgacccccaccgctacaacatcctggaggatgtggccgtgtgcatggacctggacaccaggaccaccagcagcctgtggaaggacaaggctgctgtggagatcaacgtggccgtgctgcacagctaccagctggccaaggtgaccatcgtggaccaccacgccgccacagccagcttcatgaagcacctggagaatgagcagaaggcccggggcggctgcccagctgactgggcctggatcgtgccccccatcagcggcagcctgacccctgtgttccaccaggagatggtgaactacttcctgagccctgccttccgctaccagcctgacccctggaagggcagcgctgccaagggcaccggcatcaccaggaagaagaccttcaaggaggtggccaatgctgtgaagatcagcgccagcctgatgggcaccgtgatggccaagagggtgaaggccaccatcctgtatggcagcgagaccggccgggcccagagctatgcccagcagctgggccgcctcttcaggaaggcctttgacccccgggtgctgtgcatggatgaatatgatgtggtgtccctggagcacgagaccctggtgctggtggtgaccagcacctttggaaatggagaccccccagaaaatggagagagctttgctgctgccctgatggagatgagcggcccctacaacagcagccccaggcctgagcagcacaagagctacaagatccgcttcaacagcatcagctgcagcgaccccctggtgtcctcctggaggaggaagaggaaggagagcagcaacacagacagcgctggggccctgggcaccctgcgcttctgtgtgtttggcctgggcagccgggcctacccccacttctgtgcctttgcccgggctgtggacacccggctggaggagctgggcggggagcggctgctgcagctgggccagggagatgagctgtgtggccaggaggaggccttccggggctgggcccaggccgccttccaggccgcctgtgagaccttctgtgtgggggaggatgccaaggctgctgcccgggacatcttcagccccaagaggtcctggaagaggcagcgctaccgcctgagcgcccaggccgagggcctgcagctgctgcccggcctcatccacgtgcacaggaggaagatgttccaggccaccatccgctctgtggagaacctgcagagcagcaagagcacccgggccaccatcctggtgcggctggacacaggaggccaggagggcctgcagtaccagcccggggaccacatcggcgtgtgcccccccaacagacctggcctggtggaggccctgctgagccgggtggaggaccccccagcccccacagagcctgtggccgtggagcagctggagaagggcagccctgggggccccccacctggctgggtgcgggacccccggctgcccccctgcaccctgcggcaggccctgaccttcttcctggacatcaccagcccccccagcccccagctgctgcggctgctgagcaccctggccgaggagccccgggagcagcaggagctggaggccctgagccaggacccccggcgctatgaggagtggaagtggttccgctgccccaccctgctggaggtgctggagcagttccccagcgtggccctgcctgcccccctgctgctgacccagctgcccctgctgcagccccgctactacagcgtgagcagcgcccccagcacccaccctggagagatccacctgactgtggccgtgctggcctaccgcacccaggacggcctgggccccctgcactatggagtgtgcagcacctggctgagccagctgaagccaggggaccctgtgccctgcttcatccggggggcccccagcttccggctgcccccagaccccagcctgccctgcatcctggtgggccctggcaccggcatcgcccccttccggggcttctggcaggagcggctgcatgacatcgagagcaagggcctgcagcccacccccatgaccctggtgtttggctgccgctgcagccagctggaccacctgtacagagatgaggtgcagaatgcccagcagaggggcgtgtttggccgggtgctgacagccttcagccgggagccagacaaccccaagacctacgtgcaggacatcctgaggacagagctggccgctgaggtgcaccgggtgctgtgcctggagcggggccacatgtttgtgtgtggagatgtgaccatggccaccaacgtgctgcagacagtgcagaggatcctggccacagaaggagacatggagctggatgaggccggagatgtgattggagtgctgcgggaccagcagcgctaccacgaggacatcttcggcctgaccctgcggacccaggaggtgaccagccgcatccgcacccagagcttcagcctgcaggagcggcagctgcggggagctgtgccctgggcctttgatcctcctggcagtgacaccaacagcccctag

SEQ ID NO: 161991 - DNA, 2994 bp, synthetic construct
  misc_feature 1..2994: note = Description of Artificial Sequence: Synthetic coding sequence
  source 1..2994: mol_type = other DNA
atgttcacctacatctgcaaccacatcaagtatgccaccaacagaggcaacctgcggagcgccatcaccgtcttcccccagcgctgccccggccgcggggacttccgcatctggaacagccagctggtgcgctatgccggctaccggcagcaggacggctctgtgcggggggaccctgccaacgtggagatcacagagctgtgcatccagcacggctggaccccaggaaatggccgctttgatgtgctgcccctgctgctgcaggccccagatgatcctcctgagctgttcctgctgcccccagagctggtgctggaggtgcccctggagcaccccaccctggagtggtttgctgccctgggcctgcgctggtacgccctgcctgctgtgagcaacatgctgctggagattggaggcctggagttccctgctgcccccttcagcggctggtacatgagcacagagatcggcaccaggaacctgtgtgacccccaccgctacaacatcctggaggatgtggccgtgtgcatggacctggacaccaggaccaccagcagcctgtggaaggacaaggctgctgtggagatcaacgtggccgtgctgcacagctaccagctggccaaggtgaccatcgtggaccaccacgccgccacagccagcttcatgaagcacctggagaatgagcagaaggcccggggcggctgcccagctgactgggcctggatcgtgccccccatcagcggcagcctgacccctgtgttccaccaggagatggtgaactacttcctgagccctgccttccgctaccagcctgacccctggaagggcagcgctgccaagggcaccggcatcaccaggaagaagaccttcaaggaggtggccaatgctgtgaagatcagcgccagcctgatgggcaccgtgatggccaagagggtgaaggccaccatcctgtatggcagcgagaccggccgggcccagagctatgcccagcagctgggccgcctcttcaggaaggcctttgacccccgggtgctgtgcatggatgaatatgatgtggtgtccctggagcacgagaccctggtgctggtggtgaccagcacctttggaaatggagaccccccagaaaatggagagagctttgctgctgccctgatggagatgagcggcccctacaacagcagccccaggcctgagcagcacaagagctacaagatccgcttcaacagcatcagctgcagcgaccccctggtgtcctcctggaggaggaagaggaaggagagcagcaacacagacagcgctggggccctgggcaccctgcgcttctgtgtgtttggcctgggcagccgggcctacccccacttctgtgcctttgcccgggctgtggacacccggctggaggagctgggcggggagcggctgctgcagctgggccagggagatgagctgtgtggccaggaggaggccttccggggctgggcccaggccgccttccaggccgcctgtgagaccttctgtgtgggggaggatgccaaggctgctgcccgggacatcttcagccccaagaggtcctggaagaggcagcgctaccgcctgagcgcccaggccgagggcctgcagctgctgcccggcctcatccacgtgcacaggaggaagatgttccaggccaccatccgctctgtggagaacctgcagagcagcaagagcacccgggccaccatcctggtgcggctggacacaggaggccaggagggcctgcagtaccagcccggggaccacatcggcgtgtgcccccccaacagacctggcctggtggaggccctgctgagccgggtggaggaccccccagcccccacagagcctgtggccgtggagcagctggagaagggcagccctgggggccccccacctggctgggtgcgggacccccggctgcccccctgcaccctgcggcaggccctgaccttcttcctggacatcaccagcccccccagcccccagctgctgcggctgctgagcaccctggccgaggagccccgggagcagcaggagctggaggccctgagccaggacccccggcgctatgaggagtggaagtggttccgctgccccaccctgctggaggtgctggagcagttccccagcgtggccctgcctgcccccctgctgctgacccagctgcccctgctgcagccccgctactacagcgtgagcagcgcccccagcacccaccctggagagatccacctgactgtggccgtgctggcctaccgcacccaggacggcctgggccccctgcactatggagtgtgcagcacctggctgagccagctgaagccaggggaccctgtgccctgcttcatccggggggcccccagcttccggctgcccccagaccccagcctgccctgcatcctggtgggccctggcaccggcatcgcccccttccggggcttctggcaggagcggctgcatgacatcgagagcaagggcctgcagcccacccccatgaccctggtgtttggctgccgctgcagccagctggaccacctgtacagagatgaggtgcagaatgcccagcagaggggcgtgtttggccgggtgctgacagccttcagccgggagccagacaaccccaagacctacgtgcaggacatcctgaggacagagctggccgctgaggtgcaccgggtgctgtgcctggagcggggccacatgtttgtgtgtggagatgtgaccatggccaccaacgtgctgcagacagtgcagaggatcctggccacagaaggagacatggagctggatgaggccggagatgtgattggagtgctgcgggaccagcagcgctaccacgaggacatcttcggcctgaccctgcggacccaggaggtgaccagccgcatccgcacccagagcttcagcctgcaggagcggcagctgcggggagctgtgccctgggcctttgatcctcctggcagtgacaccaacagcccctag

SEQ ID NO: 161992 - DNA, 1521 bp, synthetic construct
  misc_feature 1..1521: note = Description of Artificial Sequence: Synthetic coding sequence
  source 1..1521: mol_type = other DNA
atgagggaccccctgacagactgcccctacaacaaggtgtacaagaacctgaaggagttcagccagaatggagagaacttctgcaagcaggtgacctctgtgctgcagcagagggccaacctggagatctcctatgccaagggcctgcagaagctggccagcaagctgagcaaggccctgcagaacaccaggaagagctgtgtgagcagcgcctgggcctgggccagcgagggcatgaagagcacagctgacctgcaccagaagctgggcaaggccatcgagctggaggccatcaagcccacctaccaggtgctgaatgtgcaggagaagaagaggaagagcctggacaatgaggtggagaagacagccaacctggtgatcagcaactggaaccagcagatcaaggccaagaagaagctgatggtgtccaccaagaagcatgaggccctcttccagctggtggagagcagcaagcagagcatgacagagaaggagaagaggaagctgctgaacaagctgaccaagagcacagagaagctggagaaggaggatgagaactactaccagaagaacatggccggctacagcacccggctgaagtgggagaacaccctggagaactgctaccagagcatcctggagctggagaaggagcgcatccagctgctgtgcaacaacctgaaccagtacagccagcacatcagcctgtttggccagaccctgaccacctgccacacccagatccactgtgccatcagcaagattgatattgagaaggacatccaggccgtgatggaggagacagccatcctgagcacagagaacaagtctgagttcctgctgacagactactttgaggaggaccccaacagcgccatggacaaggagaggaggaagagcctgctgaagcccaagctgctgcggctgcagagggacatcgagaaggccagcaaggacaaggagggcctggagaggatgctgaagacctacagcagcaccagcagcttcagtgatgccaagagccagaaggacacagctgccctgatggatgagaacaacctgaagctggacctgctggaggccaacagctacaagctgagctccatgctggccgagctggagcagaggccccagcccagccacccctgcagcaacagcatcttccgctggagggagaaggagcacacccacagctatgtgaagatcagccggcccttcctgatgaagaggctggagaacatcgtgtccaaggccagcagcggcggccagagcaaccctggcagcagcaccccagcccctggagctgcccagctgagcagccggctgtgcaaggccctgtacagcttccaggcccggcaggatgatgagctgaacctggagaagggggacatcgtcatcatccacgagaagaaggagggcggctggtggtttggcagcctgaatggcaagaagggccacttccctgctgcctacgtggaggagctgcccagcaatgccggcaacacagccaccaaggcctag

SEQ ID NO: 161993 - DNA, 1287 bp, synthetic construct
  misc_feature 1..1287: note = Description of Artificial Sequence: Synthetic coding sequence
  source 1..1287: mol_type = other DNA
atgaagagcacagctgacctgcaccagaagctgggcaaggccatcgagctggaggccatcaagcccacctaccaggtgctgaatgtgcaggagaagaagaggaagagcctggacaatgaggtggagaagacagccaacctggtgatcagcaactggaaccagcagatcaaggccaagaagaagctgatggtgtccaccaagaagcatgaggccctcttccagctggtggagagcagcaagcagagcatgacagagaaggagaagaggaagctgctgaacaagctgaccaagagcacagagaagctggagaaggaggatgagaactactaccagaagaacatggccggctacagcacccggctgaagtgggagaacaccctggagaactgctaccagagcatcctggagctggagaaggagcgcatccagctgctgtgcaacaacctgaaccagtacagccagcacatcagcctgtttggccagaccctgaccacctgccacacccagatccactgtgccatcagcaagattgatattgagaaggacatccaggccgtgatggaggagacagccatcctgagcacagagaacaagtctgagttcctgctgacagactactttgaggaggaccccaacagcgccatggacaaggagaggaggaagagcctgctgaagcccaagctgctgcggctgcagagggacatcgagaaggccagcaaggacaaggagggcctggagaggatgctgaagacctacagcagcaccagcagcttcagtgatgccaagagccagaaggacacagctgccctgatggatgagaacaacctgaagctggacctgctggaggccaacagctacaagctgagctccatgctggccgagctggagcagaggccccagcccagccacccctgcagcaacagcatcttccgctggagggagaaggagcacacccacagctatgtgaagatcagccggcccttcctgatgaagaggctggagaacatcgtgtccaaggccagcagcggcggccagagcaaccctggcagcagcaccccagcccctggagctgcccagctgagcagccggctgtgcaaggccctgtacagcttccaggcccggcaggatgatgagctgaacctggagaagggggacatcgtcatcatccacgagaagaaggagggcggctggtggtttggcagcctgaatggcaagaagggccacttccctgctgcctacgtggaggagctgcccagcaatgccggcaacacagccaccaaggcctag

SEQ ID NO: 161994 - DNA, 1692 bp, synthetic construct
  misc_feature 1..1692: note = Description of Artificial Sequence: Synthetic coding sequence
  source 1..1692: mol_type = other DNA
atgagggaccccctgacagactgcccctacaacaaggtgtacaagaacctgaaggagttcagccagaatggagagaacttctgcaagcaggtgacctctgtgctgcagcagagggccaacctggagatctcctatgccaagggcctgcagaagctggccagcaagctgagcaaggccctgcagaacaccaggaagagctgtgtgagcagcgcctgggcctgggccagcgagggcatgaagagcacagctgacctgcaccagaagctgggcaaggccatcgagctggaggccatcaagcccacctaccaggtgctgaatgtgcaggagaagaagaggaagagcctggacaatgaggtggagaagacagccaacctggtgatcagcaactggaaccagcagatcaaggccaagaagaagctgatggtgtccaccaagaagcatgaggccctcttccagctggtggagagcagcaagcagagcatgacagagaaggagaagaggaagctgctgaacaagctgaccaagagcacagagaagctggagaaggaggatgagaactactaccagaagaacatggccggctacagcacccggctgaagtgggagaacaccctggagaactgctaccaggtgacccacagcatctgcctgtatgccttctgggtgaagagggcctggggcaaatgtgtgtctgacctgcgctaccaggacaccttcctgcccggcaacctgccccccctgtggtttggctatgacatcgtgaagaggctcatcatgaggctgtgcagcgtgtgcctgcagagcatcctggagctggagaaggagcgcatccagctgctgtgcaacaacctgaaccagtacagccagcacatcagcctgtttggccagaccctgaccacctgccacacccagatccactgtgccatcagcaagattgacatcgagaaggacatccaggccgtgatggaggagacagccatcctgagcacagagaacaagtctgagttcctgctgacagactactttgaggaggaccccaacagcgccatggacaaggagaggaggaagagcctgctgaagcccaagctgctgcggctgcagagggacatcgagaaggccagcaaggacaaggagggcctggagaggatgctgaagacctacagcagcaccagcagcttcagtgatgccaagagccagaaggacacagctgccctgatggatgagaacaacctgaagctggacctgctggaggccaacagctacaagctgagctccatgctggccgagctggagcagaggccccagcccagccacccctgcagcaacagcatcttccgctggagggagaaggagcacacccacagctatgtgaagatcagccggcccttcctgatgaagaggctggagaacatcgtgtccaaggccagcagcggcggccagagcaaccctggcagcagcaccccagcccctggggccgcccagctgagcagccggctgtgcaaggccctgtacagcttccaggcccggcaggatgatgagctgaacctggagaagggggacatcgtcatcatccacgagaagaaggagggcggctggtggtttggcagcctgaatggcaagaagggccacttccctgctgcctacgtggaggagctgcccagcaatgccggcaacacagccaccaaggcctag

SEQ ID NO: 161995 - DNA, 1692 bp, synthetic construct; identical to SEQ ID NO: 161994
  misc_feature 1..1692: note = Description of Artificial Sequence: Synthetic coding sequence
  source 1..1692: mol_type = other DNA

SEQ ID NO: 161996 - DNA, 939 bp, synthetic construct
  misc_feature 1..939: note = Description of Artificial Sequence: Synthetic coding sequence
  source 1..939: mol_type = other DNA
atgaccttcggcctgaggaagaggctgtctgaggagcggggcttcagcctgatgccccgggccatggccatcagcagcagcagctgtgagctgcccctggtggccgtgtgccaggtgaccagcaccccagacaagcagcagaacttcaagacctgtgccgagctggtgcgggaggccgcccggctgggcgcctgcctggccttcctgcctgaggcctttgacttcatcgcccgggaccctgctgagaccctgcacctgtctgagcccctgggcggcaagctgctggaggagtacacccagctggcccgggagtgtggcctgtggctgagcctgggcggcttccacgagcggggccaggactgggagcagacccagaagatctacaactgccacgtgctgctgaacagcaaaggagctgtggtggccacctacaggaagacccacctgtgtgatgtggagatccctggccagggccccatgtgtgagagcaacagcaccatgcctggccccagcctggagagccctgtgtccaccccagctgggaagattggcctggccgtgtgctatgacatgagatttcctgagctgagcctggccctggcccaggccggggctgagatcctgacctaccccagcgccttcggcagcatcaccggccctgcccactgggaggtgctgctgcgggcccgggccatcgagacccagtgctacgtggtggccgccgcccagtgtggccgccaccacgagaagagggccagctatggccacagcatggtggtggacccctggggcaccgtggtggcccgctgcagcgagggccctggcctgtgcctggccagaattgacctgaactacctgcggcagctgcggcggcacctgcccgtcttccagcacagaagaccagacctgtatggcaacctgggccaccccctgtcctag

SEQ ID NO: 161997 - DNA, 732 bp, synthetic construct
  misc_feature 1..732: note = Description of Artificial Sequence: Synthetic coding sequence
  source 1..732: mol_type = other DNA
atgctgggcttcatcacccggcccccccaccgcttcctgagcctgctgtgccccggcctgcgcatcccccagctgtctgtgctgtgtgcccagccccggccccgggccatggccatcagcagcagcagctgtgagctgcccctggtggccgtgtgccaggtgaccagcaccccagacaagcagcagaacttcaagacctgtgccgagctggtgcgggaggccgcccggctgggcgcctgcctggccttcctgcctgaggcctttgacttcatcgcccgggaccctgctgagaccctgcacctgtctgagcccctgggcggcaagctgctggaggagtacacccagctggccagagaatgtggcctgtggctgagcctgggcggcttccacgagcggggccaggactgggagcagacccagaagatctacaactgccacgtgctgctgaacagcaaaggagctgtggtggccacctacaggaagacccacctgtgtgatgtggagatccctggccagggccccatgtgtgagagcaacagcaccatgcctggccccagcctggagagccctgtgtccaccccagctgggaagattggcctggccgtgtgctatgacatgagatttcctgagctgagcctggccctggcccaggccggggctgagatcctgacctaccccagcgccttcggcagcatcactggacctgcccactgggagcctgtgagcagctag

SEQ ID NO: 161998 - DNA, 984 bp, synthetic construct
  misc_feature 1..984: note = Description of Artificial Sequence: Synthetic coding sequence
  source 1..984: mol_type = other DNA
atgctgggcttcatcacccggcccccccaccgcttcctgagcctgctgtgccccggcctgcgcatcccccagctgtctgtgctgtgtgcccagccccggccccgggccatggccatcagcagcagcagctgtgagctgcccctggtggccgtgtgccaggtgaccagcaccccagacaagcagcagaacttcaagacctgtgccgagctggtgcgggaggccgcccggctgggcgcctgcctggccttcctgcctgaggcctttgacttcatcgcccgggaccctgctgagaccctgcacctgtctgagcccctgggcggcaagctgctggaggagtacacccagctggccagagaatgtggcctgtggctgagcctgggcggcttccacgagcggggccaggactgggagcagacccagaagatctacaactgccacgtgctgctgaacagcaaaggagctgtggtggccacctacaggaagacccacctgtgtgatgtggagatccctggccagggccccatgtgtgagagcaacagcaccatgcctggccccagcctggagagccctgtgtccaccccagctgggaagattggcctggccgtgtgctatgacatgagatttcctgagctgagcctggccctggcccaggccggggctgagatcctgacctaccccagcgccttcggcagcatcactggacctgcccactgggaggtgctgctgcgggcccgggccatcgagacccagtgctacgtggtggccgccgcccagtgtggccgccaccacgagaagagggccagctatggccacagcatggtggtggacccctggggcaccgtggtggcccgctgcagcgagggccctggcctgtgcctggccagaattgacctgaactacctgcggcagctgcggcggcacctgcctgtgttccagcaccggcggccagacctgtatggcaacctgggccaccccctgtcctag

SEQ ID NO: 161999 - DNA, 876 bp, synthetic construct
  misc_feature 1..876: note = Description of Artificial Sequence: Synthetic coding sequence
  source 1..876: mol_type = other DNA
atggccatcagcagcagcagctgtgagctgcccctggtggccgtgtgccaggtgaccagcaccccagacaagcagcagaacttcaagacctgtgccgagctggtgcgggaggccgcccggctgggcgcctgcctggccttcctgcctgaggcctttgacttcatcgcccgggaccctgctgagaccctgcacctgtctgagcccctgggcggcaagctgctggaggagtacacccagctggccagagaatgtggcctgtggctgagcctgggcggcttccacgagcggggccaggactgggagcagacccagaagatctacaactgccacgtgctgctgaacagcaaaggagctgtggtggccacctacaggaagacccacctgtgtgatgtggagatccctggccagggccccatgtgtgagagcaacagcaccatgcctggccccagcctggagagccctgtgtccaccccagctgggaagattggcctggccgtgtgctatgacatgagatttcctgagctgagcctggccctggcccaggccggggctgagatcctgacctaccccagcgccttcggcagcatcactggacctgcccactgggaggtgctgctgcgggcccgggccatcgagacccagtgctacgtggtggccgccgcccagtgtggccgccaccacgagaagagggccagctatggccacagcatggtggtggacccctggggcaccgtggtggcccgctgcagcgagggccctggcctgtgcctggccagaattgacctgaactacctgcggcagctgcggcggcacctgcctgtgttccagcaccggcggccagacctgtatggcaacctgggccaccccctgtcctag

SEQ ID NO: 162000 - DNA, 822 bp, synthetic construct
  misc_feature 1..822: note = Description of Artificial Sequence: Synthetic coding sequence
  source 1..822: mol_type = other DNA
atgagcctgaccaacaccaagacaggcttctctgtgaaggacatcctggacctgcctgacaccaatgatgaggagggctctgtggccgagggccctgaggaggagaatgaaggacctgagcccgccaagagagctggccccctgggccagggcgccctggatgctgtgcagagcctgcccctgaagaaccccttctatgacagcagtgacaacccctacacccgctggctggccagcacagagggcctgcagtacagcctgcacggcctggccgccggggccccaccccaggacagcagcagcaagagccctgagcccagcgcagatgagagcccagacaatgacaaggagaccccaggcggcggcggagatgctgggaagaagaggaagagaagagtgctcttcagcaaggcccagacctatgagctggagcggcgcttccggcagcagcgctacctgagcgcccctgagcgggagcacctggccagcctcatccggctgacccccacccaggtgaagatctggttccagaaccaccgctacaagatgaagagggcccgggcagagaagggcatggaggtgacccccctgcccagccccaggagagtggccgtgcctgtgctggtgagagatggcaagccctgccacgccctgaaggcccaggacctggccgccgccaccttccaggccggcatccccttcagcgcctacagcgcccagagcctgcagcacatgcagtacaatgcccagtacagcagcgccagcaccccccagtaccccacagcccaccccctggtgcaggcccagcagtggacctggtag

SEQ ID NO: 162001 - DNA, 1065 bp, synthetic construct
  misc_feature 1..1065: note = Description of Artificial Sequence: Synthetic coding sequence
  source 1..1065: mol_type = other DNA
atgagcctgagccccaagcacaccacccccttctctgtgtctgacatcctgagccccatcgaggagacctacaagaagttcagcggggccatggatggagcccctcctggcctgggcgcccccctgggcgctgctgctgcctaccgggcccctcctcctggccccagcagccaggccgccaccgtggccggcatgcagcccagccacgccatggccggccacaatgctgctgctgctgctgctgctgctgctgctgctgctgctgctgctgccacctaccacatgcctcctggggtgtcccagttcccccacggggccatgggcagctactgcaatggaggcctgggcaacatgggagagctgcctgcctacacagatggcatgaggggcggggccgccaccggctggtatggagccaacccagacccccgctacagcagcatcagccgcttcatgggccccagcgctggggtgaatgtggccggcatgggcagcctgactggaattgctgatgctgccaagagcctgggccccctgcatgctgctgctgctgctgctgcccccaggaggaagagaagagtgctcttcagccaggcccaggtgtatgagctggagcggcgcttcaagcagcagaagtacctgagcgcccctgagcgggagcacctggcctccatgatccacctgacccccacccaggtgaagatctggttccagaaccaccgctacaagatgaagaggcaggccaaggacaaggccgcccagcagctgcagcaggagggcggcctgggccccccacctcctcctccacccagccccaggagagtggccgtgcctgtgctggtgaaggatggcaagccctgccagaatggagccagcacccccaccccaggccaggccggcccccagcccccagcccccaccccagcccctgagctggaggagctgagccccagccccccagccctgcacggccctgggggcggcctggccgccctggatgctgctgctggggagtacagcggcggcgtgctgggcgccaacctgctgtatggccgcacctggtag

SEQ ID NO: 162002 - DNA, 975 bp, synthetic construct
  misc_feature 1..975: note = Description of Artificial Sequence: Synthetic coding sequence
  source 1..975: mol_type = other DNA
atgttccccagccctgccctgacccccacccccttctctgtgaaggacatcctgaacctggagcagcagcagaggagcctggccgccgccggggagctgagcgcccggctggaggccaccctggcccccagcagctgcatgctggccgccttcaagccagaggcctatgccggccctgaggccgccgcccctggcctgcctgagctgcgggcagagctgggccgggcccccagccctgccaagtgtgccagcgccttccctgctgccccagccttctacccccgggcctacagcgaccctgaccctgccaaggaccccagggctgagaagaaggagctgtgtgccctgcagaaggctgtggagctggagaagacagaagctgacaatgctgagcggccccgggccaggagaagaaggaagccccgggtgctcttcagccaggcccaggtgtatgagctggagcggcgcttcaagcagcagcgctacctgagcgcccctgagcgggaccagctggcctctgtgctgaagctgaccagcacccaggtgaagatctggttccagaacagacgctacaagtgcaagaggcagaggcaggaccagaccctggagctggtgggcctgcccccacctcctcctcctccagccaggagaattgctgtgcctgtgctggtgagagatggcaagccctgcctgggggacagcgccccctatgccccagcctatggagtgggcctgaacccctacggctacaatgcctacccagcctacccaggctatggaggagctgcctgcagccctggctacagctgcacagctgcctacccagctggccccagccctgcccagcctgccacagctgctgccaacaacaactttgtgaactttggagtgggggacctgaatgctgtgcagagccctggcatcccccagagcaacagcggcgtgtccaccctgcacggcatccgggcctggtag

SEQ ID NO: 162003 - DNA, 339 bp, synthetic construct
  misc_feature 1..339: note = Description of Artificial Sequence: Synthetic coding sequence
  source 1..339: mol_type = other DNA
atgttccccagccctgccctgacccccacccccttctctgtgaaggacatcctgaacctggagcagcagcagaggagcctggccgccgccggggagctgagcgcccggctggaggccaccctggcccccagcagctgcatgctggccgccttcaagccagaggcctatgccggccctgaggccgccgcccctggcctgcctgagctgcgggcagagctgggccgggcccccagccctgccaagtgtgccagcgccttccctgctgccccagccttctacccccgggcctacagcgaccctgaccctgccaaggaccccagggctgagaagaaggcctag

SEQ ID NO: 162004 - DNA, 456 bp, synthetic construct
  misc_feature 1..456: note = Description of Artificial Sequence: Synthetic coding sequence
  source 1..456: mol_type = other DNA
atgttccccagccctgccctgacccccacccccttctctgtgaaggacatcctgaacctggagcagcagcagaggagcctggccgccgccggggagctgagcgcccggctggaggccaccctggcccccagcagctgcatgctggccgccttcaagccagaggcctatgccggccctgaggccgccgcccctggcctgcctgagctgcgggcagagctgggccgggcccccagccctgccaagtgtgccagcgccttccctgctgccccagccttctacccccgggcctacagcgaccctgaccctgccaaggaccccagggctgagaagaagggctgtgagctgccccggggccagaggcctcctgtgctcttcagcagcgccctgagccagcctgacttcctgcagatgctgtctgagacctgccgctggctgcctgtgcacctggccgagtag

SEQ ID NO: 162005 - DNA, 906 bp, synthetic construct
  misc_feature 1..906: note = Description of Artificial Sequence: Synthetic coding sequence
  source 1..906: mol_type = other DNA
atgctgctgagccctgtgaccagcacccccttctctgtgaaggacatcctgcggctggagcgggagaggagctgcccagctgccagcccccacccccgggtgaggaagagccctgagaacttccagtacctgaggatggatgctgagccccggggcagcgaggtgcacaatgctgggggcggcggcggggacaggaagctggatggcagcgagcccccaggcggcccctgtgaggccgtgctggagatggatgctgagaggatgggagagccccagcccggcctgaatgctgccagccccctgggcggcggcaccagggtgcctgagcggggcgtgggcaacagcggggacagcgtgcggggcggccgctctgagcagcccaaggcccggcagaggaggaagccccgggtgctcttcagccaggcccaggtgctggccctggagcggcgcttcaagcagcagcgctacctgagcgcccctgagcgggagcacctggccagcgccctgcagctgaccagcacccaggtgaagatctggttccagaacagacgctacaagtgcaagaggcagaggcaggacaagagcctggagctggccggccaccccctgaccccccggcgggtggccgtgcctgtgctggtgagagatggcaagccctgcctgggccctggccctggggccccagccttccccagcccctacagcgctgctgtgagcccctacagctgctacggcggctacagcggggccccctacggggccggctacggcacctgctacgccggggcccccagcggccctgccccccacacccccctggccagcgctggcttcggccacggcggccagaatgccaccccccagggccacctggccgccaccctgcagggcgtgcgggcctggtag

SEQ ID NO: 162006 - DNA, 660 bp, synthetic construct
  misc_feature 1..660: note = Description of Artificial Sequence: Synthetic coding sequence
  source 1..660: mol_type = other DNA
atggatgctgagaggatgggagagccccagcccggcctgaatgctgccagccccctgggcggcggcaccagggtgcctgagcggggcgtgggcaacagcggggacagcgtgcggggcggccgctctgagcagcccaaggcccggcagaggaggaagccccgggtgctcttcagccaggcccaggtgctggccctggagcggcgcttcaagcagcagcgctacctgagcgcccctgagcgggagcacctggccagcgccctgcagctgaccagcacccaggtgaagatctggttccagaacagacgctacaagtgcaagaggcagaggcaggacaagagcctggagctggccggccaccccctgaccccccggcgggtggccgtgcctgtgctggtgagagatggcaagccctgcctgggccctggccctggggccccagccttccccagcccctacagcgctgctgtgagcccctacagctgctacggcggctacagcggggccccctacggggccggctacggcacctgctacgccggggcccccagcggccctgccccccacacccccctggccagcgctggcttcggccacggcggccagaatgccaccccccagggccacctggccgccaccctgcagggcgtgcgggcctggtag

SEQ ID NO: 162007 - DNA, 720 bp, synthetic construct
  misc_feature 1..720: note = Description of Artificial Sequence: Synthetic coding sequence
  source 1..720: mol_type = other DNA
atggccaccagcggccgcctgtccttcaccgtgcgcagcctgctggacctgcctgagcaggatgcccagcacctgccccggcgggagcctgagccccgggccccccagcctgacccctgtgccgcctggctggacagcgagcggggccactaccccagcagtgatgagagcagcctggagaccagccccccagacagcagccagaggccttctgcccggcctgccagccctggcagtgatgctgagaagaggaagaagagaagagtgctcttcagcaaggcccagaccctggagctggagcggcgcttccggcagcagcgctacctgagcgcccctgagcgggagcagctggccagcctgctgcggctgacccccacccaggtgaagatctggttccagaaccaccgctacaagctgaagagggcccgggcccctggagctgctgagagcccagacctggccgccagcgctgagctgcatgctgcccctggcctgctgcggcgggtggtggtgcctgtgctggtgagagatggccagccctgtggcggcggcggcggcggggaggtgggcacagctgctgcccaggagaagtgtggggcccctcctgctgctgcctgccccctgcccggctacccagccttcggccctggcagcgccctgggcctcttccctgcctaccagcacctggccagccctgccctggtgtcctggaactggtag

SEQ ID NO: 162008 - DNA, 1002 bp, synthetic construct
  misc_feature 1..1002: note = Description of Artificial Sequence: Synthetic coding sequence
  source 1..1002: mol_type = other DNA
atggctgtgcggggggccaacaccctgaccagcttcagcatccaggccatcctgaacaagaaggaggagcggggcggcctggccgcccctgagggccggcctgcccctgggggcacagctgcctctgtggccgccgccccagctgtgtgctgctggaggctgtttggagagagagatgctggggccctgggcggcgctgaggacagcctgctggccagccctgctggcaccaggacagctgctggccgcacagctgagagccctgagggctgggacagcgacagcgccctgtctgaggagaatgaaagcagaagaagatgtgctgatgcccggggggccagcggggccggcctggccggcggcagcctgagcctgggccagcctgtgtgtgagctggccgccagcaaggacctggaggaggaggccgccggccgcagtgacagcgagatgtctgcctctgtgtctggggacaggagccccaggacagaagatgatggagtgggccccaggggggcccacgtgtctgccctgtgcagcggggccggcggcggcggcggcagcggccctgctggggtggccgaggaggaggaggagcctgctgcccccaagcccaggaagaagaggagcagagctgccttcagccacgcccaggtgtttgagctggagcggcgcttcaaccaccagcgctacctgagcggccctgagagagctgacctggccgccagcctgaagctgacagagacccaggtgaagatctggttccagaacagacgctacaagaccaagaggcggcagatggctgctgacctgctggccagcgccccagctgccaagaaggtggccgtgaaggtgctggtgagagatgaccagaggcagtacctgcctggagaggtgctgcggccccccagcctgctgcccctgcagcccagctactactacccctactactgcctgcccggctgggccctgagcacctgtgccgctgctgctggcacccagtag

SEQ ID NO: 162009 - DNA, 798 bp, synthetic construct
  misc_feature 1..798: note = Description of Artificial Sequence: Synthetic coding sequence
  source 1..798: mol_type = other DNA
atggagagcaacctgcagggcaccttcctgctgaacaacacccccctggcccagtttcctgagatgaaggcccctgtgtgccagtacagcgtgcagaacagcttctacaagctgagccccccaggcctgggcccccagctggccgccggcacccctcatggcatcacagacatcctgagcaggcctgtggccgcccccaacaacagcctgctgagcggctacccccacgtggccggctttggaggcctgagcagccagggcgtgtactacagcccccaggtgggcaacttcagcaaggctggaaatgagtaccccaccaggaccaggaactgctgggccgacaccggccaggactggaggggcggccggcagtgcagcaacaccccagaccccctgagtgacagcatccacaagaagaagcacacccggcccaccttcaccggccaccagatctttgccctggagaagacctttgagcagaccaagtacctggccggccctgagcgggcccggctggcctacagcctgggcatgacagagagccaggtgaaggtgtggttccagaacagaaggaccaagtggaggaagaagagcgccctggagcccagcagcagcaccccccgggcccctgggggcgctggggccggggccggcggggaccgggcccccagtgaaaatgaagatgatgagtacaacaagcccctggaccctgacagtgatgatgagaagatccggctgctgctgaggaagcacagagctgccttctctgtgctgagcctgggcgcccacagcgtgtag

SEQ ID NO: 162010 - DNA, 408 bp, synthetic construct
  misc_feature 1..408: note = Description of Artificial Sequence: Synthetic coding sequence
  source 1..408: mol_type = other DNA
atgcagcagggccagctggcccctggcagccggctgtgcagcggcccctggggcctgcctgagctgcagcctgctgcccccagcagcagcgctgcccagctgccctggggcgagagctggggcgaggaggccgacaccccagcctgcctgagcgccagcggcgtgtggttccagaacagaaggaccaagtggaggaagaagagcgccctggagcccagcagcagcaccccccgggcccctgggggcgctggggccggggccggcggggaccgggcccccagtgaaaatgaagatgatgagtacaacaagcccctggaccctgacagtgatgatgagaagatccggctgctgctgaggaagcacagagctgccttctctgtgctgagcctgggcgcccacagcgtgtag

SEQ ID NO: 162011 - DNA, 2928 bp, synthetic construct
  misc_feature 1..2928: note = Description of Artificial Sequence: Synthetic coding sequence
  source 1..2928: mol_type = other DNA
atgcgctggggccaccacctgccccgggcctcctggggcagcggcttcagaagagccctgcagaggccagatgaccgcatccccttcctgatccactggagctggcccctgcagggcgagcggccctttggaccaccccgggccttcatccgccaccacggcagctctgtggacagcgcccctcctcctggccgccacggccgcctcttccccagcgccagcgccacagaggccatccagaggcacagaagaaacctggccgagtggttcagccggctgccccgggaggagcggcagtttggccccacctttgccctggacacagtgcacgtggaccctgtgatccgggagagcaccccagatgagctgctgcggcccccagctgagctggccctggagcaccagcccccccaggccggcctgccccccctggccctgagccagctgttcaacccagatgcctgtggcagaagagtgcagacagtggtgctgtatggaacagtgggcaccgggaagagcaccctggtgaggaagatggtgctggactggtgctacggccgcctgcctgcctttgagctgctgatccccttcagctgtgaggacctgagcagcctgggccctgccccagccagcctgtgccagctggtggcccagcgctacacccccctgaaggaggtgctgcccctgatggctgctgctggcagccacctgctgtttgtgctgcacggcctggagcacctgaacctggacttccggctggccggcaccggcctgtgcagcgaccctgaggagccccaggagcctgctgccatcatcgtgaacctgctgaggaagtacatgctgccccaggccagcatcctggtgaccacccggcccagcgccatcggccgcatccccagcaaatatgtgggccgctacggggagatctgtggcttcagtgacaccaacctgcagaagctgtacttccagctgcggctgaaccagccctactgcggctatgctgtgggcggcagcggcgtgtctgccaccccagcccagagggaccacctggtgcagatgctgagcaggaacctggagggccaccaccagattgctgctgcctgcttcctgcccagctactgctggctggtgtgtgccaccctgcacttcctgcacgcccccaccccagctggccagaccctgaccagcatctacaccagcttcctgcggctgaacttctctggagagaccctggacagcacagaccccagcaacctgagcctgatggcctatgctgcccggaccatgggcaagctggcctatgagggcgtgagcagcaggaagacctacttctctgaagaagatgtgtgtggctgcctggaggccggcatcagaacagaggaggagttccagctgctgcacatcttcagaagagatgccctgcgcttcttcctggccccctgtgtggagcccggccgggccggcacctttgtgttcaccgtgcctgccatgcaggagtacctggccgccctgtacatcgtgctgggcctgaggaagaccaccctgcagaaggtgggcaaggaggtggccgagctggtgggccgggtgggagaagatgtgtccctggtgctgggcatcatggccaagctgctgcccctgcgggccctgcccctgctcttcaacctgatcaaggtggtgccccgggtgtttggaaggatggtgggcaagagccgggaggccgtggcccaggccatggtgctggagatgttccgggaggaggactactacaatgatgatgtgctggaccagatgggcgccagcatcctgggcgtggagggcccccggcggcacccagatgagcccccagaagatgaggtgtttgagctgttccccatgttcatgggcggcctgctgagcgcccacaacagagctgtgctggcccagctgggctgccccatcaagaacctggatgccctggagaatgcccaggccatcaagaagaagctgggcaagctgggccggcaggtgctgcccccatctgagctgctggaccacctgttcttccactatgagttccagaaccagcgcttctctgctgaggtgctgagcagcctgcggcagctgaacctggccggcgtgaggatgacccctgtgaagtgcaccgtggtggccgctgtgctgggcagcggcagacatgccctggatgaggtgaacctggccagctgccagctggaccctgctggcctgcggaccctgctgcctgtgttcctgcgggccaggaagctgggcctgcagctgaacagcctgggccctgaggcctgcaaggacctgcgggacctgctgctgcatgaccagtgccagatcaccaccctgcggctgagcaacaaccccctgacagctgctggggtggccgtgctgatggagggcctggccggcaacacctctgtgacccacctgagcctgctgcacacaggcctgggagatgagggcctggagctgctggccgcccagctggacaggaaccggcagctgcaggagctgaatgtggcctacaatggagctggggacacagctgccctggccctggcccgggccgcccgggagcaccccagcctggagctgctgcacctgtacttcaatgagctgagcagcgagggccggcaggtgctgcgggacctgggcggcgctgctgagggcggggcccgggtggtggtgtccctgacagagggcacagctgtgtctgagtactggagcgtcatcctgtctgaggtgcagaggaacctgaacagctgggaccgggcccgggtgcagaggcacctggagctgctgctgcgggacctggaggacagcagaggagccaccctgaacccctggaggaaggcccagctgctgcgggtggagggggaggtgcgggccctgctggagcagctgggcagcagcggcagctag

SEQ ID NO: 162012 - DNA, 345 bp, synthetic construct
  misc_feature 1..345: note = Description of Artificial Sequence: Synthetic coding sequence
  source 1..345: mol_type = other DNA
ggcatcagcaagctgaagatggtgaaccagtgcttcggcctgggagatggcacctgcctgctgagcatccagctggagggccccaagcacgtggccttcggctggccagaatgtcctgaggcccccctgcccaccctgcccccaccacccctgaaggagcccctgactgtgagcccccggggcagccacctgatgtctgccatgcctggggtgagccccagccgctgtgtgggcagcttccccagctgcctgatgctgacctgtggccaccggggctgcccccacatcggggccttcagcagcagcagctgccccctgtgccacaacggcatgatggcctggtag

SEQ ID NO: 162013 - DNA, 2928 bp, synthetic construct; identical to SEQ ID NO: 162011
  misc_feature 1..2928: note = Description of Artificial Sequence: Synthetic coding sequence
  source 1..2928: mol_type = other DNA

SEQ ID NO: 162014 - DNA, 2766 bp, synthetic construct
  misc_feature 1..2766: note = Description of Artificial Sequence: Synthetic coding sequence
  source 1..2766: mol_type = other DNA
atgcgctggggccaccacctgccccgggcctcctggggcagcggcttcagaagagccctgcagaggccagatgaccgcatccccttcctgatccactggagctggcccctgcagggcgagcggccctttggaccaccccgggccttcatccgccaccacggcagctctgtggacagcgcccctcctcctggccgccacggccgcctcttccccagcgccagcgccacagaggccatccagaggcacagaagaaacctggccgagtggttcagccggctgccccgggaggagcggcagtttggccccacctttgccctggacacagtgcacgtggaccctgtgatccgggagagcaccccagatgagctgctgcggcccccagctgagctggccctggagcaccagcccccccaggccggcctgccccccctggccctgagccagctgttcaacccagatgcctgtggcagaagagtgcagacagtggtgctgtatggaacagtgggcaccgggaagagcaccctggtgaggaagatggtgctggactggtgctacggccgcctgcctgcctttgagctgctgatccccttcagctgtgaggacctgagcagcctgggccctgccccagccagcctgtgccagctggtggcccagcgctacacccccctgaaggaggtgctgcccctgatggctgctgctggcagccacctgctgtttgtgctgcacggcctggagcacctgaacctggacttccggctggccggcaccggcctgtgcagcgaccctgaggagccccaggagcctgctgccatcatcgtgaacctgctgaggaagtacatgctgccccaggccagcatcctggtgaccacccggcccagcgccatcggccgcatccccagcaaatatgtgggccgctacggggagatctgtggcttcagtgacaccaacctgcagaagctgtacttccagctgcggctgaaccagccctactgcggctatgctgtgggcggcagcggcgtgtctgccaccccagcccagagggaccacctggtgcagatgctgagcaggaacctggagggccaccaccagattgctgctgcctgcttcctgcccagctactgctggctggtgtgtgccaccctgcacttcctgcacgcccccaccccagctggccagaccctgaccagcatctacaccagcttcctgcggctgaacttctctggagagaccctggacagcacagaccccagcaacctgagcctgatggcctatgctgcccggaccatgggcaagctggcctatgagggcgtgagcagcaggaagacctacttctctgaagaagatgtgtgtggctgcctggaggccggcatcagaacagaggaggagttccagctgctgcacatcttcagaagagatgccctgcgcttcttcctggccccctgtgtggagcccggccgggccggcacctttgtgttcaccgtgcctgccatgcaggagtacctggccgccctgtacatcgtgctgggcctgaggaagaccaccctgcagaaggtgggcaaggaggtggccgagctggtgggccgggtgggagaagatgtgtccctggtgctgggcatcatggccaagctgctgcccctgcgggccctgcccctgctcttcaacctgatcaaggtggtgccccgggtgtttggaaggatggtgggcaagagccgggaggccgtggcccaggccatggtgctggagatgttccgggaggaggactactacaatgatgatgtgctggaccagatgggcgccagcatcctgggcgtggagggcccccggcggcacccagatgagcccccagaagatgaggtgtttgagctgttccccatgttcatgggcggcctgctgagcgcccacaacagagctgtgctggcccagctgggctgccccatcaagaacctggatgccctggagaatgcccaggccatcaagaagaagctgggcaagctgggccggcaggtgctgcccccatctgagctgctggaccacctgttcttccactatgagttccagaaccagcgcttctctgctgaggtgctgagcagcctgcggcagctgaacctggccggcgtgaggatgacccctgtgaagtgcaccgtggtggccgctgtgctgggcagcggcagacatgccctggatgaggtgaacctggccagctgccagctggaccctgctggcctgcggaccctgctgcctgtgttcctgcgggccaggaagctgggcctgcagctgaacagcctgggccctgaggcctgcaaggacctgcgggacctgctgctgcatgaccagtgccagatcaccaccctgcggctgagcaacaaccccctgacagctgctggggtggccgtgctgatggagggcctggccggcaacacctctgtgacccacctgagcctgctgcacacaggcctgggagatgagggcctggagctgctggccgcccagctggacaggaaccggcagctgcaggagctgaatgtggcctacaatggagctggggacacagctgccctggccctggcccgggccgcccgggagcaccccagcctggagctgctgcagggcgtggccatccagatgtgctggaagctgcccctgctgccctatgcccacctgtggacccccaggatgcccagccactggtgcttcctgctgatcctgatgccacccctgccccagtggtatgatggcctggtggccccccggggccgctgcacctag

SEQ ID NO: 162015 - DNA, 2928 bp, synthetic construct; identical to SEQ ID NO: 162011
  misc_feature 1..2928: note = Description of Artificial Sequence: Synthetic coding sequence
  source 1..2928: mol_type = other DNA

SEQ ID NO: 162016 - DNA, 2766 bp, synthetic construct; identical to SEQ ID NO: 162014
  misc_feature 1..2766: note = Description of Artificial Sequence: Synthetic coding sequence
  source 1..2766: mol_type = other DNA

SEQ ID NO: 162017 - DNA, 3111 bp, synthetic construct
  misc_feature 1..3111: note = Description of Artificial Sequence: Synthetic coding sequence
  source 1..3111: mol_type = other DNA
atgaagatggccagcacccgctgcaagctggcccgctacctggaggacctggaggatgtggacctgaagaagttcaagatgcacctggaggactacccaccccagaagggctgcatccccctgccccggggccagacagagaaggctgaccacgtggacctggccaccctgatgattgacttcaacggggaggagaaggcctgggccatggctgtgtggatctttgctgccatcaacagaagagacctgtatgagaaggccaagagagatgagcccaagtggggcagtgacaatgcccgggtgagcaaccccaccgtcatctgccaggaggacagcattgaggaggagtggatgggcctgctggagtacctgagccgcatcagcatctgcaagatgaagaaggactacaggaagaagtacagaaaatatgtgcgcagccgcttccagtgcatcgaggacagaaatgcccggctgggggagagcgtgtccctgaacaagcgctacacccggctgcggctcatcaaggagcacaggagccagcaggagcgggagcaggagctgctggccatcggcaagaccaagacctgtgagagccctgtgagccccatcaagatggagctgctgtttgatcctgatgatgagcacagcgagcctgtgcacacagtggtgttccagggcgccgccggcatcggcaagaccatcctggccaggaagatgatgctggactgggccagcggcaccctgtaccaggacagatttgactacctgttctacatccactgccgggaggtgtccctggtgacccagaggagcctgggggacctgatcatgagctgctgcccagaccccaacccccccatccacaagatcgtgaggaagcccagccgcatcctcttcctgatggatggctttgatgagctgcagggcgcctttgatgagcacatcggccccctgtgcacagactggcagaaggccgagcggggggacatcctgctgagcagcctcatcaggaagaagctgctgcctgaggccagcctgctgatcaccaccaggcctgtggccctggagaagctgcagcacctgctggaccaccccaggcatgtggagatcctgggcttcagcgaggccaagaggaaggagtacttcttcaagtacttcagtgatgaggcccaggcccgggccgccttcagcctcatccaggagaatgaggtgctcttcaccatgtgcttcatccccctggtgtgctggatcgtgtgcaccggcctgaagcagcagatggagagcggcaagagcctggcccagaccagcaagaccaccacagctgtgtatgtgttcttcctgagcagcctgctgcagccccggggcggcagccaggagcacggcctgtgtgcccacctgtggggcctgtgcagcctggccgcagatggcatctggaaccagaagatcctgtttgaggagagtgacctgaggaaccacggcctgcagaaggcagatgtgtctgccttcctgaggatgaacctcttccagaaggaggtggactgtgagaagttctacagcttcatccacatgaccttccaggagttctttgctgccatgtactacctgctggaggaggagaaggagggccgcaccaacgtgcccggcagccggctgaagctgcccagcagagatgtgacagtgctgctggagaactacggcaagtttgagaagggctacctgatctttgtggtgcgcttcctgtttggcctggtgaaccaggagaggaccagctacctggagaagaagctgagctgcaagatcagccagcagatccggctggagctgctgaagtggattgaggtgaaggccaaggccaagaagctgcagatccagcccagccagctggagctgttctactgcctgtatgagatgcaggaggaggactttgtgcagagggccatggactacttccccaagattgagatcaacctgagcaccaggatggaccacatggtgtcctccttctgcatcgagaactgccaccgggtggagagcctgagcctgggcttcctgcacaacatgcccaaggaggaggaggaggaggagaaggagggccgccacctggacatggtgcagtgtgtgctgcccagcagcagccacgccgcctgcagccacggcctggtgaacagccacctgaccagcagcttctgccggggcctcttctctgtgctgagcaccagccagagcctgacagagctggacctgagtgacaacagcctgggggaccccggcatgagggtgctgtgtgagaccctgcagcaccctggctgcaacatccggcggctgtggctgggccgctgtggcctgagccatgagtgctgctttgacatcagcctggtgctgagcagcaaccagaagctggtggagctggacctgagtgacaatgccctgggggactttggcatccggctgctgtgtgtgggcctgaagcacctgctgtgcaacctgaagaagctgtggctggtgtcctgctgcctgaccagcgcctgctgccaggacctggcctctgtgctgagcaccagccacagcctgacccggctgtatgtgggggagaatgccctgggggacagcggcgtggccatcctgtgtgagaaggccaagaacccccagtgcaacctgcagaagctgggcctggtgaacagcggcctgacctctgtgtgctgcagcgccctgagctctgtgctgagcaccaaccagaacctgacccacctgtacctgcggggcaacaccctgggggacaagggcatcaagctgctgtgtgagggcctgctgcacccagactgcaagctgcaggtgctggagctggacaactgcaacctgaccagccactgctgctgggacctgagcaccctgctgaccagcagccagagcctgaggaagctgagcctgggcaacaatgacctgggggacctgggcgtgatgatgttctgtgaggtgctgaagcagcagagctgcctgctgcagaacctgggcctgtctgagatgtacttcaactatgagaccaagagcgccctggagaccctgcaggaggagaagccagagctgactgtggtgtttgagcccagctggtag

SEQ ID NO: 162018 - DNA, 2769 bp, synthetic construct
  misc_feature 1..2769: note = Description of Artificial Sequence: Synthetic coding sequence
  source 1..2769: mol_type = other DNA
atgaagatggccagcacccgctgcaagctggcccgctacctggaggacctggaggatgtggacctgaagaagttcaagatgcacctggaggactacccaccccagaagggctgcatccccctgccccggggccagacagagaaggctgaccacgtggacctggccaccctgatgattgacttcaacggggaggagaaggcctgggccatggctgtgtggatctttgctgccatcaacagaagagacctgtatgagaaggccaagagagatgagcccaagtggggcagtgacaatgcccgggtgagcaaccccaccgtcatctgccaggaggacagcattgaggaggagtggatgggcctgctggagtacctgagccgcatcagcatctgcaagatgaagaaggactacaggaagaagtacagaaaatatgtgcgcagccgcttccagtgcatcgaggacagaaatgcccggctgggggagagcgtgtccctgaacaagcgctacacccggctgcggctcatcaaggagcacaggagccagcaggagcgggagcaggagctgctggccatcggcaagaccaagacctgtgagagccctgtgagccccatcaagatggagctgctgtttgatcctgatgatgagcacagcgagcctgtgcacacagtggtgttccagggcgccgccggcatcggcaagaccatcctggccaggaagatgatgctggactgggccagcggcaccctgtaccaggacagatttgactacctgttctacatccactgccgggaggtgtccctggtgacccagaggagcctgggggacctgatcatgagctgctgcccagaccccaacccccccatccacaagatcgtgaggaagcccagccgcatcctcttcctgatggatggctttgatgagctgcagggcgcctttgatgagcacatcggccccctgtgcacagactggcagaaggccgagcggggggacatcctgctgagcagcctcatcaggaagaagctgctgcctgaggccagcctgctgatcaccaccaggcctgtggccctggagaagctgcagcacctgctggaccaccccaggcatgtggagatcctgggcttcagcgaggccaagaggaaggagtacttcttcaagtacttcagtgatgaggcccaggcccgggccgccttcagcctcatccaggagaatgaggtgctcttcaccatgtgcttcatccccctggtgtgctggatcgtgtgcaccggcctgaagcagcagatggagagcggcaagagcctggcccagaccagcaagaccaccacagctgtgtatgtgttcttcctgagcagcctgctgcagccccggggcggcagccaggagcacggcctgtgtgcccacctgtggggcctgtgcagcctggccgcagatggcatctggaaccagaagatcctgtttgaggagagtgacctgaggaaccacggcctgcagaaggcagatgtgtctgccttcctgaggatgaacctcttccagaaggaggtggactgtgagaagttctacagcttcatccacatgaccttccaggagttctttgctgccatgtactacctgctggaggaggagaaggagggccgcaccaacgtgcccggcagccggctgaagctgcccagcagagatgtgacagtgctgctggagaactacggcaagtttgagaagggctacctgatctttgtggtgcgcttcctgtttggcctggtgaaccaggagaggaccagctacctggagaagaagctgagctgcaagatcagccagcagatccggctggagctgctgaagtggattgaggtgaaggccaaggccaagaagctgcagatccagcccagccagctggagctgttctactgcctgtatgagatgcaggaggaggactttgtgcagagggccatggactacttccccaagattgagatcaacctgagcaccaggatggaccacatggtgtcctccttctgcatcgagaactgccaccgggtggagagcctgagcctgggcttcctgcacaacatgcccaaggaggaggaggaggaggagaaggagggccgccacctggacatggtgcagtgtgtgctgcccagcagcagccacgccgcctgcagccacggcctgggccgctgtggcctgagccatgagtgctgctttgacatcagcctggtgctgagcagcaaccagaagctggtggagctggacctgagtgacaatgccctgggggactttggcatccggctgctgtgtgtgggcctgaagcacctgctgtgcaacctgaagaagctgtggctggtgaacagcggcctgacctctgtgtgctgcagcgccctgagctctgtgctgagcaccaaccagaacctgacccacctgtacctgcggggcaacaccctgggggacaagggcatcaagctgctgtgtgagggcctgctgcacccagactgcaagctgcaggtgctggagctggacaactgcaacctgaccagccactgctgctgggacctgagcaccctgctgaccagcagccagagcctgaggaagctgagcctgggcaacaatgacctgggggacctgggcgtgatgatgttctgtgaggtgctgaagcagcagagctgcctgctgcagaacctgggcctgtctgagatgtacttcaactatgagaccaagagcgccctggagaccctgcaggaggagaagccagagctgactgtggtgtttgagcccagctggtag

SEQ ID NO: 162019 - DNA, 2940 bp, synthetic construct
  misc_feature 1..2940: note = Description of Artificial Sequence: Synthetic coding sequence
  source 1..2940: mol_type = other DNA
atgaagatggccagcacccgctgcaagctggcccgctacctggaggacctggaggatgtggacctgaagaagttcaagatgcacctggaggactacccaccccagaagggctgcatccccctgccccggggccagacagagaaggctgaccacgtggacctggccaccctgatgattgacttcaacggggaggagaaggcctgggccatggctgtgtggatctttgctgccatcaacagaagagacctgtatgagaaggccaagagagatgagcccaagtggggcagtgacaatgcccgggtgagcaaccccaccgtcatctgccaggaggacagcattgaggaggagtggatgggcctgctggagtacctgagccgcatcagcatctgcaagatgaagaaggactacaggaagaagtacagaaaatatgtgcgcagccgcttccagtgcatcgaggacagaaatgcccggctgggggagagcgtgtccctgaacaagcgctacacccggctgcggctcatcaaggagcacaggagccagcaggagcgggagcaggagctgctggccatcggcaagaccaagacctgtgagagccctgtgagccccatcaagatggagctgctgtttgatcctgatgatgagcacagcgagcctgtgcacacagtggtgttccagggcgccgccggcatcggcaagaccatcctggccaggaagatgatgctggactgggccagcggcaccctgtaccaggacagatttgactacctgttctacatccactgccgggaggtgtccctggtgacccagaggagcctgggggacctgatcatgagctgctgcccagaccccaacccccccatccacaagatcgtgaggaagcccagccgcatcctcttcctgatggatggctttgatgagctgcagggcgcctttgatgagcacatcggccccctgtgcacagactggcagaaggccgagcggggggacatcctgctgagcagcctcatcaggaagaagctgctgcctgaggccagcctgctgatcaccaccaggcctgtggccctggagaagctgcagcacctgctggaccaccccaggcatgtggagatcctgggcttcagcgaggccaagaggaaggagtacttcttcaagtacttcagtgatgaggcccaggcccgggccgccttcagcctcatccaggagaatgaggtgctcttcaccatgtgcttcatccccctggtgtgctggatcgtgtgcaccggcctgaagcagcagatggagagcggcaagagcctggcccagaccagcaagaccaccacagctgtgtatgtgttcttcctgagcagcctgctgcagccccggggcggcagccaggagcacggcctgtgtgcccacctgtggggcctgtgcagcctggccgcagatggcatctggaaccagaagatcctgtttgaggagagtgacctgaggaaccacggcctgcagaaggcagatgtgtctgccttcctgaggatgaacctcttccagaaggaggtggactgtgagaagttctacagcttcatccacatgaccttccaggagttctttgctgccatgtactacctgctggaggaggagaaggagggccgcaccaacgtgcccggcagccggctgaagctgcccagcagagatgtgacagtgctgctggagaactacggcaagtttgagaagggctacctgatctttgtggtgcgcttcctgtttggcctggtgaaccaggagaggaccagctacctggagaagaagctgagctgcaagatcagccagcagatccggctggagctgctgaagtggattgaggtgaaggccaaggccaagaagctgcagatccagcccagccagctggagctgttctactgcctgtatgagatgcaggaggaggactttgtgcagagggccatggactacttccccaagattgagatcaacctgagcaccaggatggaccacatggtgtcctccttctgcatcgagaactgccaccgggtggagagcctgagcctgggcttcctgcacaacatgcccaaggaggaggaggaggaggagaaggagggccgccacctggacatggtgcagtgtgtgctgcccagcagcagccacgccgcctgcagccacggcctggtgaacagccacctgaccagcagcttctgccggggcctcttctctgtgctgagcaccagccagagcctgacagagctggacctgagtgacaacagcctgggggaccccggcatgagggtgctgtgtgagaccctgcagcaccctggctgcaacatccggcggctgtggctgggccgctgtggcctgagccatgagtgctgctttgacatcagcctggtgctgagcagcaaccagaagctggtggagctggacctgagtgacaatgccctgggggactttggcatccggctgctgtgtgtgggcctgaagcacctgctgtgcaacctgaagaagctgtggctggtgaacagcggcctgacctctgtgtgctgcagcgccctgagctctgtgctgagcaccaaccagaacctgacccacctgtacctgcggggcaacaccctgggggacaagggcatcaagctgctgtgtgagggcctgctgcacccagactgcaagctgcaggtgctggagctggacaactgcaacctgaccagccactgctgctgggacctgagcaccctgctgaccagcagccagagcctgaggaagctgagcctgggcaacaatgacctgggggacctgggcgtgatgatgttctgtgaggtgctgaagcagcagagctgcctgctgcagaacctgggcctgtctgagatgtacttcaactatgagaccaagagcgccctggagaccctgcaggaggagaagccagagctgactgtggtgtttgagcccagctggtag

SEQ ID NO: 162020 - DNA, 2940 bp, synthetic construct; identical to SEQ ID NO: 162019
  misc_feature 1..2940: note = Description of Artificial Sequence: Synthetic coding sequence
  source 1..2940: mol_type = other DNA

SEQ ID NO: 162021 - DNA, 2940 bp, synthetic construct
  misc_feature 1..2940: note = Description of Artificial Sequence: Synthetic coding sequence
  source 1..2940: mol_type = other DNA
atgaagatggccagcacccgctgcaagctggcccgctacctggaggacctggaggatgtggacctgaagaagttcaagatgcacctggaggactacccaccccagaagggctgcatccccctgccccggggccagacagagaaggctgaccacgtggacctggccaccctgatgattgacttcaacggggaggagaaggcctgggccatggctgtgtggatctttgctgccatcaacagaagagacctgtatgagaaggccaagagagatgagcccaagtggggcagtgacaatgcccgggtgagcaaccccaccgtcatctgccaggaggacagcattgaggaggagtggatgggcctgctggagtacctgagccgcatcagcatctgcaagatgaagaaggactacaggaagaagtacagaaaatatgtgcgcagccgcttccagtgcatcgaggacagaaatgcccggctgggggagagcgtgtccctgaacaagcgctacacccggctgcggctcatcaaggagcacaggagccagcaggagcgggagcaggagctgctggccatcggcaagaccaagacctgtgagagccctgtgagccccatcaagatggagctgctgtttgatcctgatgatgagcacagcgagcctgtgcacacagtggtgttccagggcgccgccggcatcggcaagaccatcctggccaggaagatgatgctggactgggccagcggcaccctgtaccaggacagatttgactacctgttctacatccactgccgggaggtgtccctggtgacccagaggagcctgggggacctgatcatgagctgctgcccagaccccaacccccccatccacaagatcgtgaggaagcccagccgcatcctcttcctgatggatggctttgatgagctgcagggcgcctttgatgagcacatcggccccctgtgcacagactggcagaaggccgagcggggggacatcctgctgagcagcctcatcaggaagaagctgctgcctgaggccagcctgctgatcaccaccaggcctgtggccctggagaagctgcagcacctgctggaccaccccaggcatgtggagatcctgggcttcagcgaggccaagaggaaggagtacttcttcaagtacttcagtgatgaggcccaggcccgggccgccttcagcctcatccaggagaatgaggtgctcttcaccatgtgcttcatccccctggtgtgctggatcgtgtgcaccggcctgaagcagcagatggagagcggcaagagcctggcccagaccagcaagaccaccacagctgtgtatgtgttcttcctgagcagcctgctgcagccccggggcggcagccaggagcacggcctgtgtgcccacctgtggggcctgtgcagcctggccgcagatggcatctggaaccagaagatcctgtttgaggagagtgacctgaggaaccacggcctgcagaaggcagatgtgtctgccttcctgaggatgaacctcttccagaaggaggtggactgtgagaagttctacagcttcatccacatgaccttccaggagttctttgctgccatgtactacctgctggaggaggagaaggagggccgcaccaacgtgcccggcagccggctgaagctgcccagcagagatgtgacagtgctgctggagaactacggcaagtttgagaagggctacctgatctttgtggtgcgcttcctgtttggcctggtgaaccaggagaggaccagctacctggagaagaagctgagctgcaagatcagccagcagatccggctggagctgctgaagtggattgaggtgaaggccaaggccaagaagctgcagatccagcccagccagctggagctgttctactgcctgtatgagatgcaggaggaggactttgtgcagagggccatggactacttccccaagattgagatcaacctgagcaccaggatggaccacatggtgtcctccttctgcatcgagaactgccaccgggtggagagcctgagcctgggcttcctgcacaacatgcccaaggaggaggaggaggaggagaaggagggccgccacctggacatggtgcagtgtgtgctgcccagcagcagccacgccgcctgcagccacggcctgggccgctgtggcctgagccatgagtgctgctttgacatcagcctggtgctgagcagcaaccagaagctggtggagctggacctgagtgacaatgccctgggggactttggcatccggctgctgtgtgtgggcctgaagcacctgctgtgcaacctgaagaagctgtggctggtgtcctgctgcctgaccagcgcctgctgccaggacctggcctctgtgctgagcaccagccacagcctgacccggctgtatgtgggagaaaatgccctgggggacagcggcgtggccatcctgtgtgagaaggccaagaacccccagtgcaacctgcagaagctgggcctggtgaacagcggcctgacctctgtgtgctgcagcgccctgagctctgtgctgagcaccaaccagaacctgacccacctgtacctgcggggcaacaccctgggggacaagggcatcaagctgctgtgtgagggcctgctgcacccagactgcaagctgcaggtgctggagctggacaactgcaacctgaccagccactgctgctgggacctgagcaccctgctgaccagcagccagagcctgaggaagctgagcctgggcaacaatgacctgggggacctgggcgtgatgatgttctgtgaggtgctgaagcagcagagctgcctgctgcagaacctgggcctgtctgagatgtacttcaactatgagaccaagagcgccctggagaccctgcaggaggagaagccagagctgactgtggtgtttgagcccagctggtag

SEQ ID NO: 162022 - DNA, 3111 bp, synthetic construct; identical to SEQ ID NO: 162017
  misc_feature 1..3111: note = Description of Artificial Sequence: Synthetic coding sequence
  source 1..3111: mol_type = other DNA

SEQ ID NO: 162023 - DNA, 1512 bp, synthetic construct
  misc_feature 1..1512: note = Description of Artificial Sequence: Synthetic coding sequence
  source 1..1512: mol_type = other DNA
atggagtacatggccgagagcacagacaggagccctggccacatcctgtgctgtgaatgtggggtgcccatcagccccaacccagccaacatctgtgtggcctgcctgcggagcaaggtggacatcagccagggcatccccaagcaggtgtccatctccttctgcaagcagtgccagcgctacttccagcccccaggcacctggatccagtgtgccctggagagccgggagctgctggccctgtgcctgaagaagatcaaggcccccctgagcaaggtgcggctggtggatgctggctttgtgtggacagagccccacagcaagaggctgaaggtgaagctgaccatccagaaggaggtgatgaatggagccatcctgcagcaggtgtttgtggtggactatgtggtgcagagccagatgtgtggggactgccaccgggtggaggccaaggacttctggaaggctgtgatccaggtgcggcagaagaccctgcacaagaagaccttctactacctggagcagctgatcctgaagtatggcatgcaccagaacaccctgcgcatcaaggagatccatgatggcctggacttctactacagcagcaagcagcacgcccagaagatggtggagttcctgcagtgcaccgtgccctgccgctacaaggccagccagaggctcatcagccaggacatccacagcaacacctacaactacaagagcaccttctctgtggagatcgtgcccatctgcaaggacaacgtggtgtgcctgagccccaagctggcccagagcctgggcaacatgaaccagatctgtgtgtgcatccgggtgaccagcgccatccacctgattgaccccaacaccctgcaggtggccgacattgatggcagcaccttctggagccaccccttcaacagcctgtgccaccccaagcagctggaggagttcatcgtgatggagtgcagcatcgtgcaggacatcaagagagctgctggagctggcatgatcagcaagaagcacaccctgggggaggtgtgggtgcagaagaccagcgagatgaacacagacaagcagtacttctgcaggacccacctgggccacctgctgaaccctggggacctggtgctgggctttgacctggccaactgcaacctgaatgatgaacatgtgaacaagatgaacagcgacagagtgcctgatgtggtgctgatcaagaagagctatgacaggaccaagaggcagaggagaagaaactggaagctgaaggagctggcccgggagcgggagaacatggacacagatgatgagcggcagtaccaggacttcctggaggacctggaggaggatgaggccatcaggaagaatgtgaacatctacagagacagcgccatccctgtggagagtgacacagatgatgagggcgccccccgcatcagcctggccgagatgctggaggacctgcacatcagccaggatgccaccggggaggagggcgcctccatgctgacctag

SEQ ID NO: 162024 - DNA, 1512 bp, synthetic construct; identical to SEQ ID NO: 162023
  misc_feature 1..1512: note = Description of Artificial Sequence: Synthetic coding sequence
  source 1..1512: mol_type = other DNA

SEQ ID NO: 162025 - DNA, 471 bp, synthetic construct
  misc_feature 1..471: note = Description of Artificial Sequence: Synthetic coding sequence
  source 1..471: mol_type = other DNA
atggagtacatggccgagagcacagacaggagccctggccacatcctgtgctgtgaatgtggggtgcccatcagccccaacccagccaacatctgtgtggcctgcctgcggagcaaggtggacatcagccagggcatccccaagcaggtgtccatctccttctgcaagcagtgccagcgctacttccagcccccaggcacctggatccagtgtgccctggagagccgggagctgctggccctgtgcctgaagaagatcaaggcccccctgagcaaggtgcggctggtggatgctggctttgtgtggacagagccccacagcaagaggctgaaggtgaagctgaccatccagaaggaggtgatgaatggagccatcctgcagcaggtgtttgtggtggactatgtggtgcagagccagatgtgtggggactgccaccgggtggaggccaaggacttctggaaggctgtgtag

SEQ ID NO: 162026 - DNA, 657 bp, synthetic construct
  misc_feature 1..657: note = Description of Artificial Sequence: Synthetic coding sequence
  source 1..657: mol_type = other DNA
atggagtacatggccgagagcacagacaggagccctggccacatcctgtgctgtgaatgtggggtgcccatcagccccaacccagccaacatctgtgtggcctgcctgcggagcaaggtggacatcagccagggcatccccaagcaggtgtccatctccttctgcaagcagtgccagcgctacttccagcccccaggcacctggatccagtgtgccctggagagccgggagctgctggccctgtgcctgaagaagatcaaggcccccctgagcaaggtgcggctggtggatgctggctttgtgtggacagagccccacagcaagaggctgaaggtgaagctgaccatccagaaggaggtgatgaatggagccatcctgcagcaggtgtttgtggtggactatgtggtgcagagccagatgtgtggggactgccaccgggtggaggccaaggacttctggaaggctgtgatccaggtgcggcagaagaccctgcacaagaagaccttctactacctggagcagctgatcctgaagtatggcatgcaccagaacaccctgcgcatcaaggagatccatgatggcctggacttctactacagcagcaagcagcacgcccagaagatggtggagttcctgcagtgcaccgtgccctgctag

SEQ ID NO: 162027 - DNA, 297 bp, synthetic construct
  misc_feature 1..297: note = Description of Artificial Sequence: Synthetic coding sequence
  source 1..297: mol_type = other DNA
atggagtacatggccgagagcacagacaggagccctggccacatcctgtgctgtgaatgtggggtgcccatcagccccaacccagccaacatctgtgtggcctgcctgcggagcaaggtggacatcagccagggcatccccaagcaggtgtccatctccttctgcaagcagtgccagcgctacttccagcccccaggcacctggatccagtgtgccctggagagccgggagctgctggccctgtgcctgaagaagatcaaggcccccctgagcaaggtgcggctggtggatgcctag

SEQ ID NO: 162028 - DNA, 489 bp, synthetic construct
  misc_feature 1..489: note = Description of Artificial Sequence: Synthetic coding sequence
  source 1..489: mol_type = other DNA
atggagtacatggccgagagcacagacaggagccctggccacatcctgtgctgtgaatgtggggtgcccatcagccccaacccagccaacatctgtgtggcctgcctgcggagcaaggtggacatcagccagggcatccccaagcaggtgtccatctccttctgcaagcagtgccagcgctacttccagcccccaggcacctggatccagtgtgccctggagagccgggagctgctggccctgtgcctgaagaagatcaaggcccccctgagcaaggtgcggctggtggatgctggctttgtgtggacagagccccacagcaagaggctgaaggtgaagctgaccatccagaaggaggtgatgaatggagccatcctgcagcaggtgtttgtggtggactatgtggtgcagagccagatgtgtggggactgccaccgggtggaggccaaggacttctggaaggctgtgatccaggtgcggcagaagtag

SEQ ID NO: 162029 - DNA, 657 bp, synthetic construct; identical to SEQ ID NO: 162026
  misc_feature 1..657: note = Description of Artificial Sequence: Synthetic coding sequence
  source 1..657: mol_type = other DNA

SEQ ID NO: 162030 - DNA, 1152 bp, synthetic construct
  misc_feature 1..1152: note = Description of Artificial Sequence: Synthetic coding sequence
  source 1..1152: mol_type = other DNA
atgaatggagccatcctgcagcaggtgtttgtggtggactatgtggtgcagagccagatgtgtggggactgccaccgggtggaggccaaggacttctggaaggctgtgatccaggtgcggcagaagaccctgcacaagaagaccttctactacctggagcagctgatcctgaagtatggcatgcaccagaacaccctgcgcatcaaggagatccatgatggcctggacttctactacagcagcaagcagcacgcccagaagatggtggagttcctgcagtgcaccgtgccctgccgctacaaggccagccagaggctcatcagccaggacatccacagcaacacctacaactacaagagcaccttctctgtggagatcgtgcccatctgcaaggacaacgtggtgtgcctgagccccaagctggcccagagcctgggcaacatgaaccagatctgtgtgtgcatccgggtgaccagcgccatccacctgattgaccccaacaccctgcaggtggccgacattgatggcagcaccttctggagccaccccttcaacagcctgtgccaccccaagcagctggaggagttcatcgtgatggagtgcagcatcgtgcaggacatcaagagagctgctggagctggcatgatcagcaagaagcacaccctgggggaggtgtgggtgcagaagaccagcgagatgaacacagacaagcagtacttctgcaggacccacctgggccacctgctgaaccctggggacctggtgctgggctttgacctggccaactgcaacctgaatgatgaacatgtgaacaagatgaacagcgacagagtgcctgatgtggtgctgatcaagaagagctatgacaggaccaagaggcagaggagaagaaactggaagctgaaggagctggcccgggagcgggagaacatggacacagatgatgagcggcagtaccaggacttcctggaggacctggaggaggatgaggccatcaggaagaatgtgaacatctacagagacagcgccatccctgtggagagtgacacagatgatgagggcgccccccgcatcagcctggccgagatgctggaggacctgcacatcagccaggatgccaccggggaggagggcgcctccatgctgacctag

SEQ ID NO: 162031 - DNA, 2949 bp, synthetic construct
  misc_feature 1..2949: note = Description of Artificial Sequence: Synthetic coding sequence
  source 1..2949: mol_type = other DNA
atgagcagcaagatggtgatcagcgagcccggcctgaactgggacatcagccccaagaatggcctgaagaccttcttcagccgggagaactacaaggaccacagcatggcccccagcctgaaggagctgcgggtgctgagcaacagaagaattggagagaacctgaatgccagcgccagctctgtggagaatgaacctgctgtgagcagcgccacccaggccaaggagaaggtgaagaccaccatcggcatggtgctgctgcccaagccccgggtgccctacccccgcttcagccgcttcagccagcgggagcagaggagctatgtggacctgctggtgaagtatgccaagatcccagccaacagcaaggctgtgggcatcaacaagaatgactacctgcagtacctggacatgaagaagcacgtgaatgaggaggtgacagagttcctgaagttcctgcagaacagcgccaagaagtgtgcccaggactacaacatgctgagtgatgatgcccggctcttcacagagaagatcctgcgggcctgcatcgagcaggtgaagaagtacagcgagttctacaccctgcacgaggtgaccagcctgatgggcttcttccccttccgggtggagatgggcctgaagctggagaagaccctgctggccctgggctctgtgaagtatgtgaagacagtgttccccagcatgcccatcaagctgcagctgagcaaggatgacatcgccaccatcgagaccagcgagcagacagctgaggccatgcactatgacatcagcaaggaccccaatgctgagaagctggtgagccgctaccacccccagatcgccctgaccagccagagcctcttcaccctgctgaacaaccacggccccacctacaaggagcagtgggagatccctgtgtgcatccaggtgattcctgtggccggcagcaagcctgtgaaggtgatctacatcaacagccccctgccccagaagaagatgaccatgagggagaggaaccagatcttccacgaggtgcccctgaagttcatgatgagcaagaacacctctgtgcctgtgtctgctgtgttcatggacaagccagaggagttcatcagcgagatggacatgagctgtgaggtgaatgaatgtaggaagattgagagcctggagaacctgtacctggactttgatgatgatgtgacagagctggagaccttcggcgtgaccaccaccaaggtgtccaagagccccagccctgccagcaccagcacagtgcccaacatgacagatgcccccacagcccccaaggccggcaccaccaccgtggcccccagcgccccagacatcagcgccaacagccgcagcctgagccagatcctgatggagcagctgcagaaggagaagcagctggtgacaggcatggatggcggccctgaggagtgcaagaacaaggatgaccagggctttgagagctgtgagaaggtgagcaacagcgacaagcccctcatccaggacagcgacctgaagaccagtgatgccctgcagctggagaacagccaggagattgagaccagcaacaagaatgacatgaccatcgacatcctgcatgctgatggagagcggcccaacgtgctggagaacctggacaacagcaaggagaagacagtgggcagcgaggccgccaagacagaggacacagtgctgtgcagcagtgacacagatgaggagtgcctgatcatcgacacagagtgcaagaacaacagtgatggcaagacagctgtggtgggcagcaacctgagcagcaggcctgccagccccaacagcagcagcggccaggcctctgtgggcaaccagaccaacacagcctgcagccctgaggagagctgtgtgctgaagaagcccatcaagagggtgtacaagaagtttgatcctgtgggggagatcctgaagatgcaggatgagctgctgaagcccatcagcaggaaggtgcctgagctgcccctgatgaacctggagaacagcaagcagcccagcgtgtctgagcagctgagcggccccagcgacagcagctcctggcccaagagcggctggcccagcgccttccagaagcccaagggccgcctgccctatgagctgcaggactatgtggaggacaccagcgagtacctggccccccaggagggcaactttgtgtacaagctgttcagcctgcaggacctgctgctgctggtgcgctgcagcgtgcagagaattgagacccggcccaggagcaagaagaggaagaagatccggcggcagtttcctgtgtatgtgctgcccaaggtggagtaccaggcctgctatggagtggaggccctgacagaaagtgagctgtgccgcctgtggacagagagcctgctgcacagcaacagcagcttctacgtgggccacattgatgccttcaccagcaagctgttcctgctggaggagatcaccagcgaggagctgaaggagaagctgagcgccctgaagatcagcaacctcttcaacatcctgcagcacatcctgaagaagctgagcagcctgcaggagggcagctacctgctgagccatgctgctgaggacagcagcctgctgatctacaaggccagtgatggcaaggtgaccaggacagcctacaacctgtacaagacccactgcggcctgcccggggtgcccagcagcctgtctgtgccctgggtgcccctggaccccagcctgctgctgccctaccacatccaccacggccgcatcccctgcaccttcccccccaagagcctggacaccaccacccagcagaagattggaggcaccaggatgcccaccaggagccacaggaaccctgtgtccatggagaccaagagcagctgcctgcctgcccagcaggtggagacagaaggagtggccccccacaagaggaagatcacctag

SEQ ID NO: 162032 - DNA, 2538 bp, synthetic construct
  misc_feature 1..2538: note = Description of Artificial Sequence: Synthetic coding sequence
  source 1..2538: mol_type = other DNA
atgaagaagcacgtgaatgaggaggtgacagagttcctgaagttcctgcagaacagcgccaagaagtgtgcccaggactacaacatgctgagtgatgatgcccggctcttcacagagaagatcctgcgggcctgcatcgagcaggtgaagaagtacagcgagttctacaccctgcacgaggtgaccagcctgatgggcttcttccccttccgggtggagatgggcctgaagctggagaagaccctgctggccctgggctctgtgaagtatgtgaagacagtgttccccagcatgcccatcaagctgcagctgagcaaggatgacatcgccaccatcgagaccagcgagcagacagctgaggccatgcactatgacatcagcaaggaccccaatgctgagaagctggtgagccgctaccacccccagatcgccctgaccagccagagcctcttcaccctgctgaacaaccacggccccacctacaaggagcagtgggagatccctgtgtgcatccaggtgattcctgtggccggcagcaagcctgtgaaggtgatctacatcaacagccccctgccccagaagaagatgaccatgagggagaggaaccagatcttccacgaggtgcccctgaagttcatgatgagcaagaacacctctgtgcctgtgtctgctgtgttcatggacaagccagaggagttcatcagcgagatggacatgagctgtgaggtgaatgaatgtaggaagattgagagcctggagaacctgtacctggactttgatgatgatgtgacagagctggagacctttggagtgaccaccaccaaggtgtccaagagccccagccctgccagcaccagcacagtgcccaacatgacagatgcccccacagcccccaaggccggcaccaccaccgtggcccccagcgccccagacatcagcgccaacagccgcagcctgagccagatcctgatggagcagctgcagaaggagaagcagctggtgacaggcatggatggcggccctgaggagtgcaagaacaaggatgaccagggctttgagagctgtgagaaggtgagcaacagcgacaagcccctcatccaggacagcgacctgaagaccagtgatgccctgcagctggagaacagccaggagattgagaccagcaacaagaatgacatgaccatcgacatcctgcacgcagatggagagcggcccaacgtgctggagaacctggacaacagcaaggagaagacagtgggcagcgaggccgccaagacagaagatactgtgctgtgcagcagtgacacagatgaagaatgtctcatcatcgacacagagtgcaagaacaacagtgatggcaagacagctgtggtgggcagcaacctgagcagcaggcctgccagccccaacagcagcagcggccaggcctctgtgggcaaccagaccaacacagcctgcagccctgaggagagctgtgtgctgaagaagcccatcaagagggtgtacaagaagtttgatcctgtgggggagatcctgaagatgcaggatgagctgctgaagcccatcagcaggaaggtgcctgagctgcccctgatgaacctggagaacagcaagcagcccagcgtgtctgagcagctgagcggccccagcgacagcagctcctggcccaagagcggctggcccagcgccttccagaagcccaagggccgcctgccctatgagctgcaggactatgtggaggacaccagcgagtacctggccccccaggagggcaactttgtgtacaagctgttcagcctgcaggacctgctgctgctggtgcgctgcagcgtgcagagaattgagacccggcccaggagcaagaagaggaagaagatccggcggcagtttcctgtgtatgtgctgcccaaggtggagtaccaggcctgctacggcgtggaggccctgacagagagcgagctgtgccgcctgtggacagagagcctgctgcacagcaacagcagcttctacgtgggccacattgatgccttcaccagcaagctgttcctgctggaggagatcaccagcgaggagctgaaggagaagctgagcgccctgaagatcagcaacctcttcaacatcctgcagcacatcctgaagaagctgagcagcctgcaggagggcagctacctgctgagccacgccgctgaggacagcagcctgctgatctacaaggccagtgatggcaaggtgaccaggacagcctacaacctgtacaagacccactgcggcctgcccggggtgcccagcagcctgtctgtgccctgggtgcccctggaccccagcctgctgctgccctaccacatccaccacggccgcatcccctgcaccttcccccccaagagcctggacaccaccacccagcagaagattggaggcaccaggatgcccaccaggagccacagaaatcctgtgtccatggagaccaagagcagctgcctgcctgcccagcaggtggagacagagggcgtggccccccacaagaggaagatcacctag

SEQ ID NO: 162033 - DNA, 1017 bp, synthetic construct
  misc_feature 1..1017: note = Description of Artificial Sequence: Synthetic coding sequence
  source 1..1017: mol_type = other DNA
atgagcagcaagatggtgatcagcgagcccggcctgaactgggacatcagccccaagaatggcctgaagaccttcttcagccgggagaactacaaggaccacagcatggcccccagcctgaaggagctgcgggtgctgagcaacagaagaattggagagaacctgaatgccagcgccagctctgtggagaatgaacctgctgtgagcagcgccacccaggccaaggagaaggtgaagaccaccatcggcatggtgctgctgcccaagccccgggtgccctacccccgcttcagccgcttcagccagcgggagcagaggagctatgtggacctgctggtgaagtatgccaagatcccagccaacagcaaggctgtgggcatcaacaagaatgactacctgcagtacctggacatgaagaagcacgtgaatgaggaggtgacagagttcctgaagttcctgcagaacagcgccaagaagtgtgcccaggactacaacatgctgagtgatgatgcccggctcttcacagagaagatcctgcgggcctgcatcgagcaggtgaagaagtacagcgagttctacaccctgcacgaggtgaccagcctgatgggcttcttccccttccgggtggagatgggcctgaagctggagaagaccctgctggccctgggctctgtgaagtatgtgaagacagtgttccccagcatgcccatcaagctgcagctgagcaaggatgacatcgccaccatcgagaccagcgagcagacagctgaggccatgcactatgacatcagcaaggaccccaatgctgagaagctggtgagccgctaccacccccagatcgccctgaccagccagagcctcttcaccctgctgaacaaccacggccccacctacaaggagcagtgggagatccctgtgtgcatccaggtgattcctgtggccggcagcaagcctgtgaaggtgatctacatcaacagccccctgccccagaagaagatgaccatgagggagaggtag

SEQ ID NO: 162034 - DNA, 438 bp, synthetic construct
  misc_feature 1..438: note = Description of Artificial Sequence: Synthetic coding sequence
  source 1..438: mol_type = other DNA
atgagcagcaagatggtgatcagcgagcccggcctgaactgggacatcagccccaagaatggcctgaagaccttcttcagccgggagaactacaaggaccacagcatggcccccagcctgaaggagctgcgggtgctgagcaacagaagaattggagagaacctgaatgccagcgccagctctgtggagaatgaacctgctgtgagcagcgccacccaggccaaggagaaggtgaagaccaccatcggcatggtgctgctgcccaagccccgggtgccctacccccgcttcagccgcttcagccagcgggagcagaggagctatgtggacctgctggtgaagtatgccaagatcccagccaacagcaaggctgtgggcatcaacaagaatgactacctgcagtacctggacatgaagaagcacgtgaatgaggagtag

SEQ ID NO: 162035 - DNA, 300 bp, synthetic construct
  misc_feature 1..300: note = Description of Artificial Sequence: Synthetic coding sequence
  source 1..300: mol_type = other DNA
atgagcagcaagatggtgatcagcgagcccggcctgaactgggacatcagccccaagaatggcctgaagaccttcttcagccgggagaactacaaggaccacagcatggcccccagcctgaaggagctgcgggtgctgagcaacagaagaattggagagaacctgaatgccagcgccagctctgtggagaatgaacctgctgtgagcagcgccacccaggccaaggagaaggtgaagaccaccatcggcatggtgctgctgcccaagccccgggtgccctacccccgcttcagcaggtag

SEQ ID NO: 162036 - DNA, 285 bp, synthetic construct
  misc_feature 1..285: note = Description of Artificial Sequence: Synthetic coding sequence
  source 1..285: mol_type = other DNA
atgagcagcaagatggtgatcagcgagcccggcctgaactgggacatcagccccaagaatggcctgaagaccttcttcagccgggagaactacaaggaccacagcatggcccccagcctgaaggagctgcgggtgctgagcaacagaagaattggagagaacctgaatgccagcgccagctctgtggagaatgaacctgctgtgagcagcgccacccaggccaaggagaaggtgaagaccaccatcggcatggtgctgctgcccaagccccgggtgccctactag

SEQ ID NO: 162037 - DNA, 846 bp, synthetic construct
  misc_feature 1..846: note = Description of Artificial Sequence: Synthetic coding sequence
  source 1..846: mol_type = other DNA
atgggccagaagaagcagaggcctgcccgggccggccagccccacagcagcagtgatgctgcccaggccccagctgagcagccccacagcagcagtgatgctgcccaggccccctgcccccgggagcgctgcctgggcccccccaccaccccaggcccctaccgcagcatctacttcagcagccccaagggccacctgacccggctgggcctggagttctttgaccagcctgctgtgcccctggcccgggccttcctgggccaggtgctggtgcggcggctgcccaacggcacagagctgcggggccgcatcgtggagacagaggcctacctgggcccagaagatgaagctgcccacagccggggcggccggcagacccccaggaacagaggcatgttcatgaagccaggcaccctgtatgtgtacatcatctacggcatgtacttctgcatgaacatcagcagccagggagatggagcctgtgtgctgctgcgggccctggagcccctggagggcctggagaccatgaggcagctgcggagcaccctgaggaaaggaacagccagccgggtgctgaaggaccgggagctgtgcagcggccccagcaagctgtgccaggccctggccatcaacaagagctttgaccagagggacctggcccaggatgaggccgtgtggctggagcggggccccctggagcccagcgagcctgctgtggtggccgccgcccgggtgggcgtgggccacgccggggagtgggccaggaagcccctgcgcttctacgtgcggggcagcccctgggtgtctgtggtggacagagtggccgagcaggacacccaggcctag

SEQ ID NO: 162038 - DNA, 924 bp, synthetic construct
  misc_feature 1..924: note = Description of Artificial Sequence: Synthetic coding sequence
  source 1..924: mol_type = other DNA
atggaggccgacaaggatgacacccagcagatcctgaaggagcacagcccagatgagttcatcaaggatgagcagaacaagggcctgattgatgagatcaccaagaagaacatccagctgaagaaggagatccagaagctggagacagagctgcaggaggccaccaaggagttccagatcaaggaggacatccctgagaccaagatgaagttcctgtctgtggagaccccagaaaatgacagccagctgagcaacatcagctgcagcttccaggtgagcagcaaggtgccctatgagatccagaagggccaggccctgatcacctttgagaaggaggaggtggcccagaatgtggtgtccatgagcaagcaccacgtgcagatcaaggatgtgaacctggaggtgacagccaagcctgtgcccctgaacagcggcgtgcgcttccaggtgtatgtggaggtgtccaagatgaagatcaacgtgacagagatcccagacaccctgcgggaggaccagatgagggacaagctggagctgtccttcagcaagagcagaaatggaggaggagaggtggacagagtggactatgaccggcagagcggcagcgctgtgatcacctttgtggagattggagtggccgacaagatcctgaagaagaaggagtaccccctgtacatcaaccagacctgccaccgggtgacagtgagcccctacacagagatccacctgaagaagtaccagatcttcagcggcaccagcaagaggacagtgctgctgaccggcatggagggcatccagatggatgaggagatcgtggaggacctgatcaacatccacttccagagggccaagaatggaggaggagaggtggatgtggtgaagtgcagcctgggccagccccacatcgcctactttgaggagtag

SEQ ID NO: 162039 - DNA, 90 bp, synthetic construct
  misc_feature 1..90: note = Description of Artificial Sequence: Synthetic coding sequence
  source 1..90: mol_type = other DNA
atggaggccgacaaggatgacacccagcagatcctgaaggagcacagcccagatgagttcatcaaggatgagcagaacaagggcctgtag

SEQ ID NO: 162040 - DNA, 1185 bp, synthetic construct
  misc_feature 1..1185: note = Description of Artificial Sequence: Synthetic coding sequence
  source 1..1185: mol_type = other DNA
atgagccgggagatgcaggatgtggacctggccgaggtgaagcccctggtggagaagggggagaccatcaccggcctgctgcaggagtttgatgtgcaggagcaggacatcgagaccctgcacggctctgtgcacgtgaccctgtgtggcacccccaagggcaacagacctgtgatcctgacctaccatgacatcggcatgaaccacaagacctgctacaaccccctcttcaactatgaggacatgcaggagatcacccagcactttgctgtgtgccacgtggatgcccctggccagcaggatggagctgccagcttccctgctggctacatgtaccccagcatggaccagctggccgagatgctgcccggggtgctgcagcagtttggcctgaagagcatcatcggcatgggcactggagctggggcctacatcctgaccaggtttgccctgaacaaccctgagatggtggagggcctggtgctgatcaacgtgaacccctgtgccgagggctggatggactgggccgccagcaagatcagcggctggacccaggccctgcctgacatggtggtgagccacctgtttgggaaggaggagatgcagagcaatgtggaggtggtgcacacctaccggcagcacatcgtgaatgacatgaaccctggcaacctgcacctgttcatcaatgcctacaacagccggcgggacctggagattgagcggcccatgcctggcacccacacagtgaccctgcagtgcccagccctgctggtggtgggggacagcagccctgctgtggatgctgtggtggagtgcaacagcaagctggaccccaccaagaccaccctgctgaagatggctgactgtggcggcctgccccagatcagccagcctgccaagctggccgaggccttcaagtactttgtgcagggcatgggctacatgcccagcgcctccatgacccggctgatgaggagcaggacagccagcggcagctctgtgaccagcctggatggcaccaggagccgcagccacaccagcgagggcaccaggagccgcagccacaccagcgagggcaccaggagccgcagccacaccagcgagggcgcccacctggacatcacccccaacagcggggctgctggcaacagcgctggccccaagtccatggaggtgtcctgctag

SEQ ID NO: 162041 - DNA, 975 bp, synthetic construct
  misc_feature 1..975: note = Description of Artificial Sequence: Synthetic coding sequence
  source 1..975: mol_type = other DNA
atgagccgggagatgcaggatgtggacctggccgaggtgaagcccctggtggagaagggggagaccatcaccggcctgctgcaggagtttgatgtgcaggagcaggacatcgagaccctgcacggctctgtgcacgtgaccctgtgtggcacccccaagggcaacagacctgtgatcctgacctaccatgacatcggcatgaaccacaagacctgtgcctacatcctgaccaggtttgccctgaacaaccctgagatggtggagggcctggtgctgatcaacgtgaacccctgtgccgagggctggatggactgggccgccagcaagatcagcggctggacccaggccctgcctgacatggtggtgagccacctgtttgggaaggaggagatgcagagcaatgtggaggtggtgcacacctaccggcagcacatcgtgaatgacatgaaccctggcaacctgcacctgttcatcaatgcctacaacagccggcgggacctggagattgagcggcccatgcctggcacccacacagtgaccctgcagtgcccagccctgctggtggtgggggacagcagccctgctgtggatgctgtggtggagtgcaacagcaagctggaccccaccaagaccaccctgctgaagatggctgactgtggcggcctgccccagatcagccagcctgccaagctggccgaggccttcaagtactttgtgcagggcatgggctacatgcccagcgcctccatgacccggctgatgaggagcaggacagccagcggcagctctgtgaccagcctggatggcaccaggagccgcagccacaccagcgagggcaccaggagccgcagccacaccagcgagggcaccaggagccgcagccacaccagcgagggcgcccacctggacatcacccccaacagcggggctgctggcaacagcgctggccccaagtccatggaggtgtcctgctag

SEQ ID NO: 162042 - DNA, 1185 bp, synthetic construct; identical to SEQ ID NO: 162040
  misc_feature 1..1185: note = Description of Artificial Sequence: Synthetic coding sequence
  source 1..1185: mol_type = other DNA

SEQ ID NO: 162043 - DNA, 498 bp, synthetic construct
  misc_feature 1..498: note = Description of Artificial Sequence: Synthetic coding sequence
  source 1..498: mol_type = other DNA
atgagccgggagatgcaggatgtggacctggccgaggtgaagcccctggtggagaagggggagaccatcaccggcctgctgcaggagtttgatgtgcaggagcaggacatcgagaccctgcacggctctgtgcacgtgaccctgtgtggcacccccaagggcaacagacctgtgatcctgacctaccatgacatcggcatgaaccacaagacctgctacaaccccctcttcaactatgaggacatgcaggagatcacccagcactttgctgtgtgccacgtggatgcccctggccagcaggatggagctgccagcttccctgctggctacatgtaccccagcatggaccagctggccgagatgctgcccggggtgctgcagcagtttggcctgaagagcatcatcggcatgggcactggagctggggcctacatcctgaccaggtttgccctgaacaaccctgagatggtggagggcctggtgctgatcaacgtgtag

SEQ ID NO: 162044 - DNA, 477 bp, synthetic construct
  misc_feature 1..477: note = Description of Artificial Sequence: Synthetic coding sequence
  source 1..477: mol_type = other DNA
atgagccgggagatgcaggatgtggacctggccgaggtgaagcccctggtggagaagggggagaccatcaccggcctgctgcaggagtttgatgtgcaggagcaggacatcgagaccctgcacggctctgtgcacgtgaccctgtgtggcacccccaagggcaacagacctgtgatcctgacctaccatgacatcggcatgaaccacaagacctgctacaaccccctcttcaactatgaggacatgcaggagatcacccagcactttgctgtgtgccacgtggatgcccctggccagcaggatggagctgccagcttccctgctggctacatgtaccccagcatggaccagctggccgagatgctgcccggggtgctgcagcagtttggcctgaagagcatcatcggcatgggcactggagctggggcctacatcctgaccaggtttgccctgaacaaccctgagatggtggagtag

SEQ ID NO: 162045 - DNA, 402 bp, synthetic construct
  misc_feature 1..402: note = Description of Artificial Sequence: Synthetic coding sequence
  source 1..402: mol_type = other DNA
atgagccgggagatgcaggatgtggacctggccgaggtgaagcccctggtggagaagggggagaccatcaccggcctgctgcaggagtttgatgtgcaggagcaggacatcgagaccctgcacggctctgtgcacgtgaccctgtgtggcacccccaagggcaacagacctgtgatcctgacctaccatgacatcggcatgaaccacaagacctgctacaaccccctcttcaactatgaggacatgcaggagatcacccagcactttgctgtgtgccacgtggatgcccctggccagcaggatggagctgccagcttccctgctggctacatgtaccccagcatggaccagctggccgagatgctgcccggggtgctgcagcagtttggcctgaagagctag

SEQ ID NO: 162046 - DNA, 477 bp, synthetic construct; identical to SEQ ID NO: 162044
  misc_feature 1..477: note = Description of Artificial Sequence: Synthetic coding sequence
  source 1..477: mol_type = other DNA

SEQ ID NO: 162047 - DNA, 669 bp, synthetic construct
  misc_feature 1..669: note = Description of Artificial Sequence: Synthetic coding sequence
  source 1..669: mol_type = other DNA
atggactgggccgccagcaagatcagcggctggacccaggccctgcctgacatggtggtgagccacctgtttgggaaggaggagatgcagagcaatgtggaggtggtgcacacctaccggcagcacatcgtgaatgacatgaaccctggcaacctgcacctgttcatcaatgcctacaacagccggcgggacctggagattgagcggcccatgcctggcacccacacagtgaccctgcagtgcccagccctgctggtggtgggggacagcagccctgctgtggatgctgtggtggagtgcaacagcaagctggaccccaccaagaccaccctgctgaagatggctgactgtggcggcctgccccagatcagccagcctgccaagctggccgaggccttcaagtactttgtgcagggcatgggctacatgcccagcgcctccatgacccggctgatgaggagcaggacagccagcggcagctctgtgaccagcctggatggcaccaggagccgcagccacaccagcgagggcaccaggagccgcagccacaccagcgagggcaccaggagccgcagccacaccagcgagggcgcccacctggacatcacccccaacagcggggctgctggcaacagcgctggccccaagtccatggaggtgtcctgctag

SEQ ID NO: 162048 - DNA, 450 bp, synthetic construct
  misc_feature 1..450: note = Description of Artificial Sequence: Synthetic coding sequence
  source 1..450: mol_type = other DNA
atgagccgggagatgcaggatgtggacctggccgaggtgaagcccctggtggagaagggggagaccatcaccggcctgctgcaggagtttgatgtgcaggagcaggacatcgagaccctgcacggctctgtgcacgtgaccctgtgtggcaccccaccagccaagctggccgaggccttcaagtactttgtgcagggcatgggctacatgcccagcgcctccatgacccggctgatgaggagcaggacagccagcggcagctctgtgaccagcctggatggcaccaggagccgcagccacaccagcgagggcaccaggagccgcagccacaccagcgagggcaccaggagccgcagccacaccagcgagggcgcccacctggacatcacccccaacagcggggccgccggcaacagcgctggccccaagtccatggaggtgtcctgctag

SEQ ID NO: 162049 - DNA, 942 bp, synthetic construct
  misc_feature 1..942: note = Description of Artificial Sequence: Synthetic coding sequence
  source 1..942: mol_type = other DNA
atgcaggagatcacccagcactttgctgtgtgccacgtggatgcccctggccagcaggatggagctgccagcttccctgctggctacatgtaccccagcatggaccagctggccgagatgctgcccggggtgctgcagcagtttggcctgaagagcatcatcggcatgggcaccggggccggggcctacatcctgaccaggtttgccctgaacaaccctgagatggtggagggcctggtgctgatcaacgtgaacccctgtgccgagggctggatggactgggccgccagcaagatcagcggctggacccaggccctgcctgacatggtggtgagccacctgtttgggaaggaggagatgcagagcaatgtggaggtggtgcacacctaccggcagcacatcgtgaatgacatgaaccctggcaacctgcacctgttcatcaatgcctacaacagcagaagagacctggagattgaaagacccatgcctggcacccacacagtgaccctgcagtgcccagccctgctggtggtgggggacagcagccctgctgtggatgctgtggtggagtgcaacagcaagctggaccccaccaagaccaccctgctgaagatggctgactgtggcggcctgccccagatcagccagcctgccaagctggccgaggccttcaagtactttgtgcagggcatgggctacatgcccagcgcctccatgacccggctgatgaggagcaggacagccagcggcagctctgtgaccagcctggatggcaccaggagccgcagccacaccagcgagggcaccaggagccgcagccacaccagcgagggcaccaggagccgcagccacaccagcgagggcgcccacctggacatcacccccaacagcggggccgccggcaacagcgctggccccaagtccatggaggtgtcctgctag

SEQ ID NO: 162050 - DNA, 288 bp, synthetic construct
  misc_feature 1..288: note = Description of Artificial Sequence: Synthetic coding sequence
  source 1..288: mol_type = other DNA
atgagccgggagatgcaggatgtggacctggccgaggtgaagcccctggtggagaagggggagaccatcaccggcctgctgcaggagtttgatgtgcagaccaagccagccaccacccccagcagcaccaccaggacctgccgccgcagccccagcaccctgcccagcgccacctggacccccctggccagcaggacagcccagccccccagcccccagggcacctgcaccccaccctggatctcctggctgaagtgcttcctggagagcttcaacagcctgggctag

SEQ ID NO: 162051 - DNA, 1491 bp, synthetic construct
  misc_feature 1..1491: note = Description of Artificial Sequence: Synthetic coding sequence
  source 1..1491: mol_type = other DNA
atggctgatgaaagtgaaacagctgtgaagcccccagccccacccctgccccagatgatggagggcaatggaaatggacatgagcactgcagcgactgtgaaaatgaggaggacaacagctacaacagaggaggcctgagccctgccaatgacaccggggccaagaagaagaagaagaagcagaagaagaagaaggagaagggcagcgagacagattctgcccaggaccagcctgtgaagatgaacagcctgcctgctgagcgcatccaggagatccagaaggccatcgagctgttctctgtgggccagggccctgccaagaccatggaggaggccagcaagaggagctaccagttctgggacacccagcctgtgcccaagctgggggaggtggtgaacacccacggccctgtggagccagacaaggacaacatccggcaggagccctacaccctgccccagggcttcacctgggatgccctggacctgggggacagaggagtgctgaaggagctgtacaccctgctgaatgaaaactacgtggaggatgatgacaacatgttccgctttgactacagccctgagttcctgctgtgggccctgcggcccccaggctggctgccccagtggcactgcggcgtgcgggtggtgagcagcaggaagctggtgggcttcatcagcgccatcccagccaacatccacatctatgacacagagaagaagatggtggagatcaacttcctgtgtgtgcacaagaagctgcggagcaagagggtggcccctgtgctgatccgggagatcaccaggagagtgcacctggagggcatcttccaggccgtgtacacagctggggtggtgctgcccaagcctgtgggcacctgccgctactggcacaggagcctgaaccccaggaagctgattgaggtgaagttcagccacctgagcaggaacatgaccatgcagaggaccatgaagctgtaccgcctgcctgagacccccaagacagctggcctgcggcccatggagaccaaggacatccctgtggtgcaccagctgctgacccgctacctgaagcagttccacctgacccctgtgatgagccaggaggaggtggagcactggttctacccccaggagaacatcatcgacacctttgtggtggagaatgccaatggagaggtgacagacttcctgtccttctacaccctgcccagcaccatcatgaaccaccccacccacaagagcctgaaggccgcctacagcttctacaacgtgcacacccagacccccctgctggacctgatgtctgatgccctggtgctggccaagatgaagggctttgatgtgttcaatgccctggacctgatggagaacaagaccttcctggagaagctgaagtttggaattggagatggcaacctgcagtactacctgtacaactggaagtgccccagcatgggcgctgagaaggtgggcctggtgctgcagtag

SEQ ID NO: 162052 - DNA, 414 bp, synthetic construct
  misc_feature 1..414: note = Description of Artificial Sequence: Synthetic coding sequence
  source 1..414: mol_type = other DNA
atggctgatgaaagtgaaacagctgtgaagcccccagccccacccctgccccagatgatggagggcaatggaaatggacatgagcactgcagcgactgtgaaaatgaggaggacaacagctacaacagaggaggcctgagccctgccaatgacaccggggccaagaagaagaagaagaagcagaagaagaagaaggagaagggcagcgagacagattctgcccaggaccagcctgtgaagatgaacagcctgcctgctgagcgcatccaggagatccagaaggccatcgagctgttctctgtgggccagggccctgccaagaccatggaggaggccagcaagaggagctaccagttctgggacacccagcctgtgcccaagctggccaagaggacagtgcaccccccagagtag

SEQ ID NO: 162053 - DNA, 1491 bp, synthetic construct; identical to SEQ ID NO: 162051
  misc_feature 1..1491: note = Description of Artificial Sequence: Synthetic coding sequence
  source 1..1491: mol_type = other DNA

SEQ ID NO: 162054 - DNA, 1590 bp, synthetic construct
  misc_feature 1..1590: note = Description of Artificial Sequence: Synthetic coding sequence
  source 1..1590: mol_type = other DNA
atggctgaagattctgagagcgctgccagccagcagagcctggagctggatgaccaggacacctgtggcattgatggagacaatgaggaggagacagagcacgccaagggcagccctgggggctacctgggcgccaagaagaagaagaagaagcagaagaggaagaaggagaagcccaacagcggcggcaccaagagtgacagcgccagtgacagccaggagatcaagatccagcagcccagcaagcacaacaccatctggcagcagatctctgctggggccgccatgggcagcgccaccatggagggggagtggacaggcatgagaaatgaccacaagaaccccagcgtgcccatgcagaagctgcaggacatccagagggccatggagctgctgagcgcctgccagggccctgccaggaacattgatgaagctgccaagcaccgctaccagttctgggacacccagcctgtgcccaagctggatgaggtgatcaccagccacggggccattgaaccagacaaggacaacgtgcggcaggagccctacagcctgccccagggcttcatgtgggacaccctggacctgagtgatgctgaggtgctgaaggagctgtacaccctgctgaatgaaaattatgtggaggatgatgacaacatgttccgctttgactacagccctgagttcctgctgtgggccctgcggcccccaggctggctgctgcagtggcactgcggcgtgcgggtgagcagcaacaagaagctggtgggcttcatcagcgccatcccagccaacatccgcatctatgattctgtgaagaagatggtggagatcaacttcctgtgtgtgcacaagaagctgcggagcaagagggtggcccctgtgctgatccgggagatcacccggcgggtgaacctggagggcatcttccaggccgtgtacacagctggggtggtgctgcccaagcccatcgccacctgccgctactggcacaggagcctgaaccccaggaagctggtggaggtgaagttcagccacctgagcaggaacatgaccctgcagaggaccatgaagctgtaccgcctgcctgatgtgaccaagaccagcggcctgcggcccatggagcccaaggacatcaagtctgtgcgggagctgatcaacacctacctgaagcagttccacctggcccctgtgatggatgaggaggaggtggcccactggttcctgccccgggagcacatcatcgacacctttgtggtggagagccccaacgggaagctgacagacttcctgtccttctacaccctgcccagcacagtgatgcaccacccagcccacaagagcctgaaggccgcctacagcttctacaacatccacacagagacccccctgctggacctgatgtctgatgccctgatcctggccaagagcaagggctttgatgtgttcaatgccctggacctgatggagaacaagaccttcctggagaagctgaagtttggaattggagatggcaacctgcagtactacctgtacaactggcgctgccctggaacagattctgagaaggtgggcctggtgctgcagtag

SEQ ID NO: 162055 - DNA, 1458 bp, synthetic construct
  misc_feature 1..1458: note = Description of Artificial Sequence: Synthetic coding sequence
  source 1..1458: mol_type = other DNA
atgagaagaagaagaagcacccccaaggaggtgctggagggcatctgggagcccaagaggaagagaagaaacagaagagagaagagaagaaaccagatccctgaggcccccagccagaccaggcacctgatcccccggcggctgaagttcagcagcctgaggaacaccaccccatctggcagccgcttccagcgggagcagccctggaaccccagcgtgcccatgcagaagctgcaggacatccagagggccatggagctgctgagcgcctgccagggccctgccaggaacattgatgaagctgccaagcaccgctaccagttctgggacacccagcctgtgcccaagctggatgaggtgatcaccagccacggggccattgaaccagacaaggacaacgtgcggcaggagccctacagcctgccccagggcttcatgtgggacaccctggacctgagtgatgctgaggtgctgaaggagctgtacaccctgctgaatgaaaattatgtggaggatgatgacaacatgttccgctttgactacagccctgagttcctgctgtgggccctgcggcccccaggctggctgctgcagtggcactgcggcgtgcgggtgagcagcaacaagaagctggtgggcttcatcagcgccatcccagccaacatccgcatctatgattctgtgaagaagatggtggagatcaacttcctgtgtgtgcacaagaagctgcggagcaagagggtggcccctgtgctgatccgggagatcacccggcgggtgaacctggagggcatcttccaggccgtgtacacagctggggtggtgctgcccaagcccatcgccacctgccgctactggcacaggagcctgaaccccaggaagctggtggaggtgaagttcagccacctgagcaggaacatgaccctgcagaggaccatgaagctgtaccgcctgcctgatgtgaccaagaccagcggcctgcggcccatggagcccaaggacatcaagtctgtgcgggagctgatcaacacctacctgaagcagttccacctggcccctgtgatggatgaggaggaggtggcccactggttcctgccccgggagcacatcatcgacacctttgtggtggagagccccaacgggaagctgacagacttcctgtccttctacaccctgcccagcacagtgatgcaccacccagcccacaagagcctgaaggccgcctacagcttctacaacatccacacagagacccccctgctggacctgatgtctgatgccctgatcctggccaagagcaagggctttgatgtgttcaatgccctggacctgatggagaacaagaccttcctggagaagctgaagtttggaattggagatggcaacctgcagtactacctgtacaactggcgctgccctggaacagattctgagaaggtgggcctggtgctgcagtag

SEQ ID NO: 162056 - DNA, 1497 bp, synthetic construct
  misc_feature 1..1497: note = Description of Artificial Sequence: Synthetic coding sequence
  source 1..1497: mol_type = other DNA
atggctgaagattctgagagcgctgccagccagcagagcctggagctggatgaccaggacacctgtggcattgatggagacaatgaggaggagacagagcacgccaagggcagccctgggggctacctgggcgccaagaagaagaagaagaagcagaagaggaagaaggagaagcccaacagcggcggcaccaagagtgacagcgccagtgacagccaggagatcaagatccagcagcccagcaagaaccccagcgtgcccatgcagaagctgcaggacatccagagggccatggagctgctgagcgcctgccagggccctgccagaaatattgatgaggccgccaagcaccgctaccagttctgggacacccagcctgtgcccaagctggatgaagtcatcaccagccatggagccatcgagccagacaaggacaacgtgcggcaggagccctacagcctgccccagggcttcatgtgggacaccctggacctgagtgatgctgaggtgctgaaggagctgtacaccctgctgaatgaaaactacgtggaggatgatgacaacatgttccgctttgactacagccctgagttcctgctgtgggccctgcggcccccaggctggctgctgcagtggcactgcggcgtgcgggtgagcagcaacaagaagctggtgggcttcatcagcgccatcccagccaacatccgcatctatgacagcgtgaagaagatggtggagatcaacttcctgtgtgtgcacaagaagctgcggagcaagagggtggcccctgtgctgatccgggagatcaccaggagagtgaacctggagggcatcttccaggccgtgtacacagctggggtggtgctgcccaagcccatcgccacctgccgctactggcacaggagcctgaaccccaggaagctggtggaggtgaagttcagccacctgagcaggaacatgaccctgcagaggaccatgaagctgtaccgcctgcctgatgtgaccaagaccagcggcctgcggcccatggagcccaaggacatcaagtctgtgcgggagctgatcaacacctacctgaagcagttccacctggcccctgtgatggatgaggaggaggtggcccactggttcctgccccgggagcacatcatcgacacctttgtggtggagagccccaacgggaagctgacagacttcctgtccttctacaccctgcccagcacagtgatgcaccacccagcccacaagagcctgaaggccgcctacagcttctacaacatccacacagagacccccctgctggacctgatgtctgatgccctgatcctggccaagagcaaaggatttgatgtgttcaatgccctggacctgatggagaacaagaccttcctggagaagctgaagtttggaattggagatggcaacctgcagtactacctgtacaactggcgctgccccggcacagacagcgagaaggtgggcctggtgctgcagtag

SEQ ID NO: 162057 - DNA, 234 bp, synthetic construct
  misc_feature 1..234: note = Description of Artificial Sequence: Synthetic coding sequence
  source 1..234: mol_type = other DNA
atgtctgatgccctgatcctggccaagagcaaaggatttgatgtgttcaatgccctggacctgatggagaacaagaccttcctggagaagctgaagtttggaattggagatggcaacctgcagtactacctgtacaactggcgctgccccggcacagacagcgagaagggcagcggcaactttgtgaatgccaacgggaagctgctgcctgatgtgtgccggcggcccccatag

SEQ ID NO: 162058 - DNA, 1458 bp, synthetic construct
  misc_feature 1..1458: note = Description of Artificial Sequence: Synthetic coding sequence
  source 1..1458: mol_type = other DNA
atggccagcccctggaggggggcccacgaggtgctggagggcatctgggagcccaagaggaagagaagaaacagaagagagaagagaagaaaccagatccctgaggcccccagccagaccaggcacctgatcccccggcggctgaagttcagcagcctgaggaacaccaccccatctggcagccgcttccagcgggagcagccctggaaccccagcgtgcccatgcagaagctgcaggacatccagagggccatggagctgctgagcgcctgccagggccctgccaggaacattgatgaagctgccaagcaccgctaccagttctgggacacccagcctgtgcccaagctggatgaggtgatcaccagccacggggccattgaaccagacaaggacaacgtgcggcaggagccctacagcctgccccagggcttcatgtgggacaccctggacctgagtgatgctgaggtgctgaaggagctgtacaccctgctgaatgaaaattatgtggaggatgatgacaacatgttccgctttgactacagccctgagttcctgctgtgggccctgcggcccccaggctggctgctgcagtggcactgcggcgtgcgggtgagcagcaacaagaagctggtgggcttcatcagcgccatcccagccaacatccgcatctatgattctgtgaagaagatggtggagatcaacttcctgtgtgtgcacaagaagctgcggagcaagagggtggcccctgtgctgatccgggagatcacccggcgggtgaacctggagggcatcttccaggccgtgtacacagctggggtggtgctgcccaagcccatcgccacctgccgctactggcacaggagcctgaaccccaggaagctggtggaggtgaagttcagccacctgagcaggaacatgaccctgcagaggaccatgaagctgtaccgcctgcctgatgtgaccaagaccagcggcctgcggcccatggagcccaaggacatcaagtctgtgcgggagctgatcaacacctacctgaagcagttccacctggcccctgtgatggatgaggaggaggtggcccactggttcctgccccgggagcacatcatcgacacctttgtggtggagagccccaacgggaagctgacagacttcctgtccttctacaccctgcccagcacagtgatgcaccacccagcccacaagagcctgaaggccgcctacagcttctacaacatccacacagagacccccctgctggacctgatgtctgatgccctgatcctggccaagagcaagggctttgatgtgttcaatgccctggacctgatggagaacaagaccttcctggagaagctgaagtttggaattggagatggcaacctgcagtactacctgtacaactggcgctgccctggaacagattctgagaaggtgggcctggtgctgcagtag

SEQ ID NO: 162059 - DNA, 933 bp, synthetic construct
  misc_feature 1..933: note = Description of Artificial Sequence: Synthetic coding sequence
  source 1..933: mol_type = other DNA
atgttccgctttgactacagccctgagttcctgctgtgggccctgcggcccccaggctggctgctgcagtggcactgcggcgtgcgggtgagcagcaacaagaagctggtgggcttcatcagcgccatcccagccaacatccgcatctatgacagcgtgaagaagatggtggagatcaacttcctgtgtgtgcacaagaagctgcggagcaagagggtggcccctgtgctgatccgggagatcaccaggagagtgaacctggagggcatcttccaggccgtgtacacagctggggtggtgctgcccaagcccatcgccacctgccgctactggcacaggagcctgaaccccaggaagctggtggaggtgaagttcagccacctgagcaggaacatgaccctgcagaggaccatgaagctgtaccgcctgcctgatgtgaccaagaccagcggcctgcggcccatggagcccaaggacatcaagtctgtgcgggagctgatcaacacctacctgaagcagttccacctggcccctgtgatggatgaggaggaggtggcccactggttcctgccccgggagcacatcatcgacacctttgtggtggagagccccaacgggaagctgacagacttcctgtccttctacaccctgcccagcacagtgatgcaccacccagcccacaagagcctgaaggccgcctacagcttctacaacatccacacagagacccccctgctggacctgatgtctgatgccctgatcctggccaagagcaaaggatttgatgtgttcaatgccctggacctgatggagaacaagaccttcctggagaagctgaagtttggaattggagatggcaacctgcagtactacctgtacaactggcgctgccccggcacagacagcgagaaggtgggcctggtgctgcagtag

SEQ ID NO: 162060 - DNA, 459 bp, synthetic construct
  misc_feature 1..459: note = Description of Artificial Sequence: Synthetic coding sequence
  source 1..459: mol_type = other DNA
atggaggccgtgctgaatgagctggtgtctgtggaggacctgctgaagtttgagaagaagttccagagcgagaaggctgctggctctgtgtccaagagcacccagtttgaatatgcctggtgcctggtgcgcagcaagtacaatgatgacatcagaaaaggaattgtgctgctggaggagctgctgcccaagggcagcaaggaggagcagagggactatgtgttctacctggccgtgggcaactaccgcctgaaggagtatgagaaggccctgaagtatgtgcggggcctgctgcagacagagccccagaacaaccaggccaaggagctggagcggctgattgacaaggccatgaagaaggatggcctggtgggcatggccatcgtgggcggcatggccctgggcgtggccggcctggccggcctgattggcctggccgtgtccaagagcaagagctag

SEQ ID NO: 162061 - DNA, 2076 bp, synthetic construct
  misc_feature 1..2076: note = Description of Artificial Sequence: Synthetic coding sequence
  source 1..2076: mol_type = other DNA
atggccctgctgctgaccctgaccagcccagacctggagggcacctgggacacccgggacaaggatggcttcaaggcccaggagggcccccccctggccgtgcctgagttccctgtgtgtggcctgtaccgcatctacggcgtgtgtggcagcttcagcagcttcttcatcatccgctgcagcctgtgtgccctggagaccctgaagagcccccagcacgaccccctggagatccctgagcagagcctgaagctgatccccctggtgtctgggaagcgggagctgacccggggccagaaggccggggagaagcccctggccgccggccctggagaggaggagctgctgcggggcagcgccccccacgcccaggacacccagagcgaggagctgccccccagctgcaccatcagcggggagaagaagcccccagctgtgtctggagaggccactggagcagatgctggccgcctgtgccccccacccaggagccgggccccccacaaggacaggaccctggcccggagccggccccagacccagggcgaggactgcagcctgcctgtgggggaggtgaagattggcaagaggagctacagccctgcccctgggaagcagaagaagcccaatgccatgggcctggcccccaccagcagccctggggcccccaacagcgcccgggccacccacaaccctgtgccctgtggcagcggccggggcccctgccacctggccaacctgctgagcaccctggcccagagcaaccagaacagagaccacaagcagggccccccagaggtgacctgccagatcaggaagaagaccaggaccctgtacagaagtgaccagctggaggagctggagaagatcttccaggaggaccactacccagacagcgacaagaggcgggagatcgcccagacagtgggcgtgaccccccagaggatcatggtgaagggagctggcagcctggtggccggctggagcggcggcggccccaccatcgagaccctggagctgcagagcgagaggtctgctgtggcctgggtgtggttccagaacagaagagccaagtggaggaagatggagaagctgaatggcaaggagagcaaggacaacccagctgcccctggccctgccagcagccagtgcagcagcgctgctgagatcctgcctgctgtgcccatggagcccaagccagaccccttcccccaggagagccccctggacaccttccctgagccccccatgctgctgaccagtgaccagaccctggcccccacccagcccagcgagggcgcccagagggtggtgaccccacccctcttcagccccccacctgtgagaagagctgacctgcccttccccctgggccctgtgcacaccccccagctgatgcccctgctgatggatgtggccggcagtgacagcagccacaaggatggcccctgtggctcctggggcaccagcatcaccctgcccccaccctgcagctacctggaggagctggagccccaggactaccagcagagcaaccagcccggccccttccagttcagccaggccccccagcccccactcttccagagcccccagcccaagctgccctacctgcccaccttccccttctccatgcccagcagcctgaccctgcccccacctgaggacagcctcttcatgttcccctgtggccccagcggcggcaccagccagggctactgccctggggccagcagcggccagatcctgatgcagcccccagctggcaacattggaacagcctcctggagcgacccctgcctgcctgagctgcccttccctggccccttctgcccccaggccctgggccaccccccaggaggagatggctacttcccagacctcttccccaccccctgcccccaggccctgggccggcagcccagcagcgccctgtcctggatgcctgagggcgcccggcccggcaccggccccctgctgagcaaggccaaggaggagcccccagctgccagcctggaccagcccagcgccctggaggaggcccggggagatgacaagaacagccacgtgccctag

SEQ ID NO: 162062 - DNA, 699 bp, synthetic construct
  misc_feature 1..699: note = Description of Artificial Sequence: Synthetic coding sequence
  source 1..699: mol_type = other DNA
atggagcgctgccccagcctgggcgtgaccctgtatgccctggtggtggtgctgggcctgcgggccaccccagctgggggccagcactacctgcacatccggcctgcccccagcgacaacctgcccctggtggacctgattgagcacccagaccccatctttgaccccaaggagaaggacctgaatgagaccctgctgcggagcctgctgggcggccactatgaccccggcttcatggccaccagccccccagaagatagacctgggggcggcggcggcgctgctggaggagctgaggacctggccgagctggaccagctgctgcggcagaggccttctggggccatgcccagcgagatcaagggcctggagttcagcgagggcctggcccagggcaagaagcagaggctgagcaagaagctgcggaggaagctgcagatgtggctgtggagccagaccttctgccctgtgctgtatgcctggaatgacctgggcagccgcttctggccccgctacgtgaaggtgggcagctgcttcagcaagaggagctgcagcgtgcctgagggcatggtgtgcaagcccagcaagtctgtgcacctgactgtgctgcgctggcgctgccagaggagaggaggccagagatgtggctggatccccatccagtaccccatcatcagcgagtgcaagtgcagctgctag

SEQ ID NO: 162063 - DNA, 990 bp, synthetic construct
  misc_feature 1..990: note = Description of Artificial Sequence: Synthetic coding sequence
  source 1..990: mol_type = other DNA
atgggcacagctgctgctgctgctgctgctgctgctgctgctgctgctggggagggcgcccggagccccagccctgctgctgtgtccctgggcctgggcgtggccgtggtgagcagcctggtgaatggcagcacctttgtgctgcagaagaagggcatcgtgcgggccaagaggcggggcaccagctacctgacagacatcgtgtggtgggccggcaccatcgccatggctgtgggccagatcggcaacttcctggcctacacagctgtgcccaccgtgctggtgacccccctgggcgccctgggcgtgcccttcggcagcatcctggccagctacctgctgaaggagaagctgaacatcctgggcaagctgggctgcctgctgagctgtgccggctctgtggtgctgatcatccacagccccaagtctgagagcgtgaccacccaggccgagctggaggagaagctgaccaaccctgtgtttgtgggctacctgtgcatcgtgctgctgatgctgctgctgctgatcttctggatcgccccagcccacggccccaccaacatcatggtgtacatcagcatctgcagcctgctgggcagcttcaccgtgcccagcaccaagggcatcggcctggccgcccaggacatcctgcacaacaaccccagcagccagagggccctgtgcctgtgcctggtgctgctggccgtgctgggctgcagcatcatcgtgcagttccgctacatcaacaaggccctggagtgctttgacagctctgtgtttggagccatctactacgtggtgttcaccaccctggtgctgctggccagcgccatcctcttccgggagtggagcaatgtgggcctggtggacttcctgggcatggcctgtggcttcaccaccgtgtctgtgggcatcgtgctgatccaggtgttcaaggagttcaacttcaacctgggggagatgaacaagagcaacatgaagacagactag

SEQ ID NO: 162064 - DNA, 765 bp, synthetic construct
  misc_feature 1..765: note = Description of Artificial Sequence: Synthetic coding sequence
  source 1..765: mol_type = other DNA
atggctgtgggccagatcggcaacttcctggcctacacagctgtgcccaccgtgctggtgacccccctgggcgccctgggcgtgcccttcggcagcatcctggccagctacctgctgaaggagaagctgaacatcctgggcaagctgggctgcctgctgagctgtgccggctctgtggtgctgatcatccacagccccaagtctgagagcgtgaccacccaggccgagctggaggagaagctgaccaaccctgtgtttgtgggctacctgtgcatcgtgctgctgatgctgctgctgctgatcttctggatcgccccagcccacggccccaccaacatcatggtgtacatcagcatctgcagcctgctgggcagcttcaccgtgcccagcaccaagggcatcggcctggccgcccaggacatcctgcacaacaaccccagcagccagagggccctgtgcctgtgcctggtgctgctggccgtgctgggctgcagcatcatcgtgcagttccgctacatcaacaaggccctggagtgctttgacagctctgtgtttggagccatctactacgtggtgttcaccaccctggtgctgctggccagcgccatcctcttccgggagtggagcaatgtgggcctggtggacttcctgggcatggcctgtggcttcaccaccgtgtctgtgggcatcgtgctgatccaggtgttcaaggagttcaacttcaacctgggggagatgaacaagagcaacatgaagacagactag

SEQ ID NO: 162065 - DNA, 480 bp, synthetic construct
  misc_feature 1..480: note = Description of Artificial Sequence: Synthetic coding sequence
  source 1..480: mol_type = other DNA
atgctgctgctgctgatcttctggatcgccccagcccacggccccaccaacatcatggtgtacatcagcatctgcagcctgctgggcagcttcaccgtgcccagcaccaagggcatcggcctggccgcccaggacatcctgcacaacaaccccagcagccagagggccctgtgcctgtgcctggtgctgctggccgtgctgggctgcagcatcatcgtgcagttccgctacatcaacaaggccctggagtgctttgacagctctgtgtttggagccatctactacgtggtgttcaccaccctggtgctgctggccagcgccatcctcttccgggagtggagcaatgtgggcctggtggacttcctgggcatggcctgtggcttcaccaccgtgtctgtgggcatcgtgctgatccaggtgttcaaggagttcaacttcaacctgggggagatgaacaagagcaacatgaagacagactag

SEQ ID NO: 162066 - DNA, 765 bp, synthetic construct; identical to SEQ ID NO: 162064
  misc_feature 1..765: note = Description of Artificial Sequence: Synthetic coding sequence
  source 1..765: mol_type = other DNA

SEQ ID NO: 162067 - DNA, 1083 bp, synthetic construct
  misc_feature 1..1083: note = Description of Artificial Sequence: Synthetic coding sequence
  source 1..1083: mol_type = other DNA
atgagccagggccggggcaagtatgacttctacatcggcctgggcctggccatgagcagcagcatcttcatcggcggcagcttcatcctgaagaagaagggcctgctgcggctggccaggaagggctccatgagagctggccagggcggccacgcctacctgaaggagtggctgtggtgggccggcctgctgtccatgggcgctggggaggtggccaactttgctgcctatgcctttgccccagccaccctggtgacccccctgggcgccctgtctgtgctggtgtctgccatcctgagcagctacttcctgaatgaaaggctgaacctgcacggcaagattggctgcctgctgagcatcctgggcagcacagtgatggtgattcatgcccccaaggaggaggagattgagaccctgaatgagatgagccacaagctgggggaccccggctttgtggtgtttgccaccctggtggtgattgtggccctgatcctgatctttgtggtgggccccaggcatggccagaccaacatcctggtgtacatcaccatctgcagcgtcatcggggccttctctgtgtcctgtgtgaagggcctgggcatcgccatcaaggagctgtttgctgggaagcctgtgctgcggcaccccctggcctggatcctgctgctgagcctcatcgtgtgtgtgtccacccagatcaactacctgaacagagccctggacatcttcaacaccagcatcgtgacccccatctactacgtgttcttcaccacctctgtgctgacctgcagcgccatcctcttcaaggagtggcaggacatgcctgtggatgatgtgattggcaccctgagcggcttcttcaccatcatcgtgggcatcttcctgctgcacgccttcaaggatgtgtccttcagcctggccagcctgcctgtgtccttcaggaaggatgagaaggccatgaatggaaacctgagcaacatgtatgaggtgctgaacaacaatgaggagagcctgacctgtggcatcgagcagcacactggagaaaatgtgtccagaagaaatggaaacctgacagccttctag

SEQ ID NO: 162068 - DNA, 1026 bp, synthetic construct
  misc_feature 1..1026: note = Description of Artificial Sequence: Synthetic coding sequence
  source 1..1026: mol_type = other DNA
atgagccagggccggggcaagtatgacttctacatcggcctgggcctggccatgagcagcagcatcttcatcggcggcagcttcatcctgaagaagaagggcctgctgcggctggccaggaagggctccatgagagctgtgggcgctggggaggtggccaactttgctgcctatgcctttgccccagccaccctggtgacccccctgggcgccctgtctgtgctggtgtctgccatcctgagcagctacttcctgaatgaaaggctgaacctgcacggcaagattggctgcctgctgagcatcctgggcagcacagtgatggtgatccacgcccccaaggaggaggagattgagaccctgaatgagatgagccacaagctgggggaccccggctttgtggtgtttgccaccctggtggtgattgtggccctgatcctgatctttgtggtgggccccaggcatggccagaccaacatcctggtgtacatcaccatctgcagcgtgattggagccttctctgtgtcctgtgtgaagggcctgggcatcgccatcaaggagctgtttgctgggaagcctgtgctgcggcaccccctggcctggatcctgctgctgagcctgattgtgtgtgtgtccacccagatcaactacctgaacagagccctggacatcttcaacaccagcatcgtgacccccatctactacgtgttcttcaccacctctgtgctgacctgcagcgccatcctcttcaaggagtggcaggacatgcctgtggatgatgtgattggcaccctgagcggcttcttcaccatcatcgtgggcatcttcctgctgcacgccttcaaggatgtgtccttcagcctggccagcctgcctgtgtccttcaggaaggatgagaaggccatgaatggaaacctgagcaacatgtatgaggtgctgaacaacaatgaggagagcctgacctgtggcatcgagcagcacactggagaaaatgtgtccagaagaaatggaaacctgacagccttctag

SEQ ID NO: 162069 - DNA, 1083 bp, synthetic construct; identical to SEQ ID NO: 162067
  misc_feature 1..1083: note = Description of Artificial Sequence: Synthetic coding sequence
  source 1..1083: mol_type = other DNA

SEQ ID NO: 162070 - DNA, 1083 bp, synthetic construct; identical to SEQ ID NO: 162067
  misc_feature 1..1083: note = Description of Artificial Sequence: Synthetic coding sequence
  source 1..1083: mol_type = other DNA

SEQ ID NO: 162071 - DNA, 1026 bp, synthetic construct; identical to SEQ ID NO: 162068
  misc_feature 1..1026: note = Description of Artificial Sequence: Synthetic coding sequence
  source 1..1026: mol_type = other DNA

SEQ ID NO: 162072 - DNA, 180 bp, synthetic construct
  misc_feature 1..180: note = Description of Artificial Sequence: Synthetic coding sequence
  source 1..180: mol_type = other DNA
atgagccagggccggggcaagtatgacttctacatcggcctgggcctggccatgagcagcagcatcttcatcggcggcagcttcatcctgaagaagaagggcctgctgcggctggccaggaagggctccatgagagctggccagggcggccacgcctacctgaaggagtggctgtggtag

SEQ ID NO: 162073 - DNA, 900 bp, synthetic construct
  misc_feature 1..900: note = Description of Artificial Sequence: Synthetic coding sequence
  source 1..900: mol_type = other DNA
atggaggagctggagcagggcctgctgatgcagccctgggcctggctgcagctggccgagaacagcctgctggccaaggtgttcatcaccaagcagggctacgccctgctggtgtctgacctgcagcaggtgtggcatgagcaggtggacacctctgtggtgtcccagagggccaaggagctgaacaagaggctgacagcccccccagctgccttcctgtgccacctggacaacctgctgcggcccctgctgaaggatgctgcccaccccagcgaggccaccttcagctgtgactgtgtggctgatgccctgatcctgcgggtgcgctctgagctgagcggcctgcccttctactggaacttccactgcatgctggccagccccagcctggtgtcccagcacctgatccggcccctgatgggcatgagcctggccctgcagtgccaggtgcgggagctggccaccctgctgcacatgaaggacctggagatccaggactaccaggagagcggggccaccctcatccgggaccggctgaagacagagccctttgaggagaacagcttcctggagcagttcatgattgagaagctgcctgaggcctgcagcattggagatggcaagccctttgtgatgaacctgcaggacctgtacatggctgtgaccacccaggaggtgcaggtgggccagaagcaccagggcgctggggacccccacaccagcaacagcgccagcctgcagggcatcgacagccagtgtgtgaaccagcctgagcagctggtgtcctctgcccccaccctgagcgcccctgagaaggagagcacaggcaccagcggccccctgcagaggccccagctgagcaaggtgaagaggaagaagccccggggcctcttctcctag

SEQ ID NO: 162074 - DNA, 951 bp, synthetic construct
  misc_feature 1..951: note = Description of Artificial Sequence: Synthetic coding sequence
  source 1..951: mol_type = other DNA
atggaggagctggagcagggcctgctgatgcagccctgggcctggctgcagctggccgagaacagcctgctggccaaggtgttcatcaccaagcagggctacgccctgctggtgtctgacctgcagcaggtgtggcatgagcaggtggacacctctgtggtgtcccagagggccaaggagctgaacaagaggctgacagcccccccagctgccttcctgtgccacctggacaacctgctgcggcccctgctgaaggatgctgcccaccccagcgaggccaccttcagctgtgactgtgtggctgatgccctgatcctgcgggtgcgctctgagctgagcggcctgcccttctactggaacttccactgcatgctggccagccccagcctggtgtcccagcacctgatccggcccctgatgggcatgagcctggccctgcagtgccaggtgcgggagctggccaccctgctgcacatgaaggacctggagatccaggactaccaggagagcggggccaccctcatccgggaccggctgaagacagagccctttgaggagaacagcttcctggagcagttcatgattgagaagctgcctgaggcctgcagcattggagatggcaagccctttgtgatgaacctgcaggacctgtacatggctgtgaccacccaggaggtgcaggtgggccagaagcaccagggcgctggggacccccacaccagcaacagcgccagcctgcagggcatcgacagccagtgtgtgaaccagcctgagcagctggtgtcctctgcccccaccctgagcgcccctgagaaggagagcacagccctgtgccgggacctgagctgccagaggagccggggccgcagccagggcgtgtcctctgtgaacctgctgtggccccagctgctgaggatggacctggagaacagcttccaggccagcccctag

SEQ ID NO: 162075 - DNA, 690 bp, synthetic construct
  misc_feature 1..690: note = Description of Artificial Sequence: Synthetic coding sequence
  source 1..690: mol_type = other DNA
atggaggagctggagcagggcctgctgatgcagccctgggcctggctgcagctggccgagaacagcctgctggccaaggtgttcatcaccaagcagggctacgccctgctggtgtctgacctgcagcaggtgtggcatgagcaggtggacacctctgtggtgtcccagagggccaaggagctgaacaagaggctgacagcccccccagctgccttcctgtgccacctggacaacctgctgcggcccctgctgaaggatgctgcccaccccagcgaggccaccttcagctgtgactgtgtggctgatgccctgatcctgcgggtgcgctctgagctgagcggcctgcccttctactggaacttccactgcatgctggccagccccagcctggtgtcccagcacctgatccggcccctgatgggcatgagcctggccctgcagtgccaggtgcgggagctggccaccctgctgcacatgaaggacctggagatccaggactaccaggagagcggggccaccctcatccgggaccggctgaagacagagccctttgaggagaacagcttcctggagcagttcatgattgagaagctgcctgaggcctgcagcattggagatggcaagccctttgtgatgaacctgcaggacctgtacatggctgtgaccacccaggaggtgcaggtgggctag

SEQ ID NO: 162076 - DNA, 804 bp, synthetic construct
  misc_feature 1..804: note = Description of Artificial Sequence: Synthetic coding sequence
  source 1..804: mol_type = other DNA
atggccaactgtgagaggaccttcatcgccatcaagccagatggagtgcagaggggcctggtgggggagatcatcaagagatttgagcagaagggcttccggctggtgggcctgaagttcatgcaggccagcgaggacctgctgaaggagcactacgtggacctgaaggaccggcccttctttgctggcctggtgaagtacatgcacagcggccctgtggtggccatggtgtgggagggcctgaatgtggtgaagacaggccgggtgatgctgggggagaccaacccagctgacagcaagccaggcaccatccggggggacttctgcatccaggtgggccgcaccatggccaacctggagaggaccttcatcgccatcaagccagatggagtgcagaggggcctggtgggggagatcatcaagagatttgagcagaagggcttccggctggtggccatgaagttcctgcgggccagcgaggagcacctgaagcagcactacatcgacctgaaggaccggcccttcttccctggcctggtgaagtacatgaacagcggccctgtggtggccatggtgtgggagggcctgaatgtggtgaagacaggccgggtgatgctgggggagaccaacccagctgacagcaagccaggcaccatccggggggacttctgcatccaggtgggcaggaacatcatccacggcagtgacagcgtgaagtctgctgagaaggagatcagcctgtggttcaagccagaggagctggtggactacaagagctgtgcccatgactgggtgtatgaatag

SEQ ID NO: 162077 - DNA, 234 bp, synthetic construct
  misc_feature 1..234: note = Description of Artificial Sequence: Synthetic coding sequence
  source 1..234: mol_type = other DNA
atggtgtgggagggcctgaatgtggtgaagacaggccgggtgatgctgggggagaccaacccagctgacagcaagccaggcaccatccggggggacttctgcatccaggtgggcaggaacatcatccacggcagtgacagcgtgaagtctgctgagaaggagatcagcctgtggttcaagccagaggagctggtggactacaagagctgtgcccatgactgggtgtatgaatag

SEQ ID NO: 162078 - DNA, 234 bp, synthetic construct; identical to SEQ ID NO: 162077
  misc_feature 1..234: note = Description of Artificial Sequence: Synthetic coding sequence
  source 1..234: mol_type = other DNA

SEQ ID NO: 162079 - DNA, 459 bp, synthetic construct
  misc_feature 1..459: note = Description of Artificial Sequence: Synthetic coding sequence
  source 1..459: mol_type = other DNA
atggccaacctggagaggaccttcatcgccatcaagccagatggagtgcagaggggcctggtgggggagatcatcaagagatttgagcagaagggcttccggctggtggccatgaagttcctgcgggccagcgaggagcacctgaagcagcactacatcgacctgaaggaccggcccttcttccctggcctggtgaagtacatgaacagcggccctgtggtggccatggtgtgggagggcctgaatgtggtgaagacaggccgggtgatgctgggggagaccaacccagctgacagcaagccaggcaccatccggggggacttctgcatccaggtgggcaggaacatcatccacggcagtgacagcgtgaagtctgctgagaaggagatcagcctgtggttcaagccagaggagctggtggactacaagagctgtgcccatgactgggtgtatgaatag

SEQ ID NO: 162080 - DNA, 459 bp, synthetic construct; identical to SEQ ID NO: 162079
  misc_feature 1..459: note = Description of Artificial Sequence: Synthetic coding sequence
  source 1..459: mol_type = other DNA

SEQ ID NO: 162081 - DNA, 459 bp, synthetic construct; identical to SEQ ID NO: 162079
  misc_feature 1..459: note = Description of Artificial Sequence: Synthetic coding sequence
  source 1..459: mol_type = other DNA

SEQ ID NO: 162082 - DNA, 459 bp, synthetic construct; identical to SEQ ID NO: 162079
  misc_feature 1..459: note = Description of Artificial Sequence: Synthetic coding sequence
  source 1..459: mol_type = other DNA

SEQ ID NO: 162083 - DNA, 459 bp, synthetic construct; identical to SEQ ID NO: 162079
  misc_feature 1..459: note = Description of Artificial Sequence: Synthetic coding sequence
  source 1..459: mol_type = other DNA

SEQ ID NO: 162084 - DNA, 879 bp, synthetic construct
  misc_feature 1..879: note = Description of Artificial Sequence: Synthetic coding sequence
  source 1..879: mol_type = other DNA
atggtgctgctgagcaccctgggcatcgtgttccagggcgagggcccccccatcagcagctgtgacaccggcaccatggccaactgtgagaggaccttcatcgccatcaagccagatggagtgcagaggggcctggtgggggagatcatcaagagatttgagcagaagggcttccggctggtgggcctgaagttcatgcaggccagcgaggacctgctgaaggagcactacgtggacctgaaggaccggcccttctttgctggcctggtgaagtacatgcacagcggccctgtggtggccatggtgtgggagggcctgaatgtggtgaagacaggccgggtgatgctgggggagaccaacccagctgacagcaagccaggcaccatccggggggacttctgcatccaggtgggccgcaccatggccaacctggagaggaccttcatcgccatcaagccagatggagtgcagaggggcctggtgggggagatcatcaagagatttgagcagaagggcttccggctggtggccatgaagttcctgcgggccagcgaggagcacctgaagcagcactacatcgacctgaaggaccggcccttcttccctggcctggtgaagtacatgaacagcggccctgtggtggccatggtgtgggagggcctgaatgtggtgaagacaggccgggtgatgctgggggagaccaacccagctgacagcaagccaggcaccatccggggggacttctgcatccaggtgggcaggaacatcatccacggcagtgacagcgtgaagtctgctgagaaggagatcagcctgtggttcaagccagaggagctggtggactacaagagctgtgcccatgactgggtgtatgaatag

SEQ ID NO: 162085 - DNA, 1188 bp, synthetic construct
  misc_feature 1..1188: note = Description of Artificial Sequence: Synthetic coding sequence
  source 1..1188: mol_type = other DNA
atggtgtctgctgctggcctgtctggagatggcaagatgagaggagtgctgctggtgctgctgggcctgctgtacagcagcaccagctgtggggtgcagaaggccagcgtcttctacggccctgaccccaaggagggcctggtgtcctccatggagttcccctgggtggtgtccctgcaggacagccagtacacccacctggccttcggctgcatcctgtctgagttctgggtgctgagcatcgccagcgccatccagaacaggaaggacatcgtggtgattgtgggcatcagcaacatggaccccagcaagatcgcccacacagagtaccctgtgaacaccatcatcatccatgaagattttgacaacaacagcatgagcaacaacatcgccctgctgaagacagacacagccatgcactttggaaacctggtgcagagcatctgcttcctgggccgcatgctgcacaccccacctgtgctgcagaactgctgggtgtctggctggaaccccaccagcgccactggaaaccacatgaccatgtctgtgctgaggaagatctttgtgaaggacctggacatgtgccccctgtacaagctgcagaagacagaatgtggcagccacaccaaggaggagaccaagacagcctgcctgggggaccccggcagccccatgatgtgccagctgcagcagtttgacctgtgggtgctgcggggcgtgctgaactttggaggagagacctgccccggcctcttcctgtacaccaaggtggaggactacagcaagtggatcaccagcaaggccgagagagctggcccccccctgagcagcctgcaccactgggagaagctgatctccttcagccaccacggccccaatgccaccatgacccagaagacctacagcgacagcgagctgggccacgtgggcagctacctgcagggccagaggaggaccatcacccacagccggctgggcaacagcagccgggacagcctggatgtgcgggagaaggatgtgaaggagagcggccgcagccctgaggcctctgtgcagcccctgtactatgactactatggaggagaggtgggggagggccgcatctttgctggccagaacagactctaccagcctgaggagatcatcctggtgtcctttgtgctggtgttcttctgcagcagcatctag

SEQ ID NO: 162086 - DNA, 639 bp, synthetic construct
  misc_feature 1..639: note = Description of Artificial Sequence: Synthetic coding sequence
  source 1..639: mol_type = other DNA
atggagatctccatgcccccaccccagatctacgtggagaagaccctggccatcatcaagccagacatcgtggacaaggaggaggagatccaggacatcatcctgcggagcggcttcaccatcgtgcagaggaggaagctgcggctgagccctgagcagtgcagcaacttctacgtggagaagtatggcaagatgttcttccccaacctgacagcctacatgagcagcggccccctggtggccatgatcctggcccggcacaaggccatctcctactggctggagctgctgggccccaacaacagcctggtggccaaggagacccacccagacagcctgcgggccatctatggaacagatgacctgagaaatgccctgcacggcagcaatgactttgctgctgctgagcgggagatccgcttcatgtttcctgaggtgattgtggagcccatccccatcggccaggccgccaaggactacctgaacctgcacatcatgcccaccctgctggagggcctgacagagctgtgcaagcagaagccagctgaccccctcatctggctggccgactggctgctgaagaacaaccccaacaagcccaagctgtgccaccaccccatcgtggaggagccctactag

SEQ ID NO: 162087 - DNA, 561 bp, synthetic construct
  misc_feature 1..561: note = Description of Artificial Sequence: Synthetic coding sequence
  source 1..561: mol_type = other DNA
atggccagcatcctgcggagcccccaggccctgcagctgaccctggccctgatcaagccagatgctgtggcccaccccctcatcctggaggccgtgcaccagcagatcctgagcaacaagttcctgattgtgaggatgagggagctgctgtggaggaaggaggactgccagcgcttctaccgggagcacgagggccgcttcttctaccagaggctggtggagttcatggccagcggccccatccgggcctacatcctggcccacaaggatgccatccagctgtggaggaccctgatgggccccaccagggtcttccgggcccggcacgtggccccagacagcatccggggcagctttggcctgacagacaccaggaacaccacccacggcagtgacagcgtggtgtctgccagccgggagattgctgccttcttcccagacttcagcgagcagcgctggtatgaggaggaggagccccagctgcgctgtggccctgtgtgctacagccctgagggcggcgtgcactacgtggccggcaccggcggcctgggccctgcctag

SEQ ID NO: 162088 - DNA, 585 bp, synthetic construct
  misc_feature 1..585: note = Description of Artificial Sequence: Synthetic coding sequence
  source 1..585: mol_type = other DNA
atgacccagaacctgggcagcgagatggccagcatcctgcggagcccccaggccctgcagctgaccctggccctgatcaagccagatgctgtggcccaccccctcatcctggaggccgtgcaccagcagatcctgagcaacaagttcctgattgtgaggatgagggagctgctgtggaggaaggaggactgccagcgcttctaccgggagcacgagggccgcttcttctaccagaggctggtggagttcatggccagcggccccatccgggcctacatcctggcccacaaggatgccatccagctgtggaggaccctgatgggccccaccagggtcttccgggcccggcacgtggccccagacagcatccggggcagctttggcctgacagacaccaggaacaccacccacggcagtgacagcgtggtgtctgccagccgggagattgctgccttcttcccagacttcagcgagcagcgctggtatgaggaggaggagccccagctgcgctgtggccctgtgtgctacagccctgagggcggcgtgcactacgtggccggcaccggcggcctgggccctgcctag

SEQ ID NO: 162089 - DNA, 561 bp, synthetic construct; identical to SEQ ID NO: 162087
  misc_feature 1..561: note = Description of Artificial Sequence: Synthetic coding sequence
  source 1..561: mol_type = other DNA

SEQ ID NO: 162090 - DNA, 360 bp, synthetic construct
  misc_feature 1..360: note = Description of Artificial Sequence: Synthetic coding sequence
  source 1..360: mol_type = other DNA
atggccagcatcctgcggagcccccaggccctgcagctgaccctggccctgatcaagccagatgctgtggcccaccccctcatcctggaggccgtgcaccagcagatcctgagcaacaagttcctgattgtgaggatgagggagctgctgtggaggaaggaggactgccagcgcttctaccgggagcacgaggacagcgtggtgtctgccagccgggagattgctgccttcttcccagacttcagcgagcagcgctggtatgaggaggaggagccccagctgcgctgtggccctgtgtgctacagccctgagggcggcgtgcactacgtggccggcactggaggcctgggccctgcctag

SEQ ID NO: 162091 - DNA, 561 bp, synthetic construct; identical to SEQ ID NO: 162087
  misc_feature 1..561: note = Description of Artificial Sequence: Synthetic coding sequence
  source 1..561: mol_type = other DNA

SEQ ID NO: 162092 - DNA, 492 bp, synthetic construct
  misc_feature 1..492: note = Description of Artificial Sequence: Synthetic coding sequence
  source 1..492: mol_type = other DNA
atggccagcatcctgcggagcccccaggccctgcagctgaccctggccctgatcaagccagatgctgtggcccaccccctcatcctggaggccgtgcaccagcagatcctgagcaacaagttcctgattgtgaggatgagggagctgctgtggaggaaggaggactgccagcgcttctaccgggagcatgaagctggccagagcgagcccaccagcctgcccaccaggatgcccagcagcagcggcggccgctcctgggaccccccagagtgcagcgagcacgccatgtggccccagatcctgtctgtgggcgtgtctgccagcctgaccccagccaccccacccatggtgaggaccctgtggttccagcctgctgagcggctgcagcccagcagcctgacctctgtgaacagcgctggcatgaggaggaagagccccagctgtgctgtggccctgtgtgccatcgcccagcgggaggtgtccaccatgtag

SEQ ID NO: 162093 - DNA, 561 bp, synthetic construct; identical to SEQ ID NO: 162087
  misc_feature 1..561: note = Description of Artificial Sequence: Synthetic coding sequence
  source 1..561: mol_type = other DNA

SEQ ID NO: 162094 - DNA, 1131 bp, synthetic construct
  misc_feature 1..1131: note = Description of Artificial Sequence: Synthetic coding sequence
  source 1..1131: mol_type = other DNA
atgaaccacagcgagagatttgtgttcatcgccgagtggtatgaccccaatgccagcctgctgcggcgctatgagctgctcttctacccaggagatggctctgtggagatgcatgatgtgaagaaccacaggaccttcctgaagaggaccaagtatgacaacctgcacctggaggacctcttcatcggcaacaaggtgaatgtgttcagccggcagctggtgctgattgattatggagaccagtacacagcccggcagctgggcagcaggaaggagaagaccctggccctgatcaagccagatgccatcagcaaggccggggagatcatcgagatcatcaacaaggccggcttcaccatcaccaagctgaagatgatgatgctgagcaggaaggaggccctggacttccacgtggaccaccagagccggcccttcttcaatgaactcatccagttcatcaccaccggccccatcatcgccatggagatcctgagagatgatgccatctgtgagtggaagaggctgctgggccctgccaacagcggcgtggccaggacagatgccagcgagagcatccgggccctgtttggaacagatggcatcagaaatgctgcccacggccctgacagctttgccagcgctgcccgggagatggagctgttcttccccagcagcggcggctgcggccctgccaacacagccaagttcaccaactgcacctgctgcatcgtgaagccccatgctgtgtctgagggcctgctgggcaagatcctgatggccatcagagatgctggctttgagatcagcgccatgcagatgttcaacatggacagagtgaatgtggaggagttctatgaggtgtacaagggcgtggtgacagagtaccatgacatggtgacagagatgtacagcggcccctgtgtggccatggagatccagcagaacaatgccaccaagaccttccgggagttctgtggccctgctgaccctgagatcgcccggcacctgcggcccggcaccctgcgggccatctttgggaagaccaagatccagaatgctgtgcactgcacagacctgcctgaagatggcctgctggaggtgcagtacttcttcaagatcctggacaactag

SEQ ID NO: 162095 - DNA, 1023 bp, synthetic construct
  misc_feature 1..1023: note = Description of Artificial Sequence: Synthetic coding sequence
  source 1..1023: mol_type = other DNA
atgcatgatgtgaagaaccacaggaccttcctgaagaggaccaagtatgacaacctgcacctggaggacctcttcatcggcaacaaggtgaatgtgttcagccggcagctggtgctgattgattatggagaccagtacacagcccggcagctgggcagcaggaaggagaagaccctggccctgatcaagccagatgccatcagcaaggccggggagatcatcgagatcatcaacaaggccggcttcaccatcaccaagctgaagatgatgatgctgagcaggaaggaggccctggacttccacgtggaccaccagagccggcccttcttcaatgaactcatccagttcatcaccaccggccccatcatcgccatggagatcctgagagatgatgccatctgtgagtggaagaggctgctgggccctgccaacagcggcgtggccaggacagatgccagcgagagcatccgggccctgtttggaacagatggcatcagaaatgctgcccacggccctgacagctttgccagcgctgcccgggagatggagctgttcttccccagcagcggcggctgcggccctgccaacacagccaagttcaccaactgcacctgctgcatcgtgaagccccatgctgtgtctgagggcctgctgggcaagatcctgatggccatcagagatgctggctttgagatcagcgccatgcagatgttcaacatggacagagtgaatgtggaggagttctatgaggtgtacaagggcgtggtgacagagtaccatgacatggtgacagagatgtacagcggcccctgtgtggccatggagatccagcagaacaatgccaccaagaccttccgggagttctgtggccctgctgaccctgagatcgcccggcacctgcggcccggcaccctgcgggccatctttgggaagaccaagatccagaatgctgtgcactgcacagacctgcctgaagatggcctgctggaggtgcagtacttcttcaagatcctggacaactag

SEQ ID NO: 162096 - DNA, 1416 bp, synthetic construct
  misc_feature 1..1416: note = Description of Artificial Sequence: Synthetic coding sequence
  source 1..1416: mol_type = other DNA
atgcagagcaacaagaccttcaacctggagaagcagaaccacacccccaggaagcaccaccagcaccaccaccagcagcagcaccaccagcagcagcagcagcagcccccacctccacccatcccagccaacggccagcaggccagcagccagaatgaaggcctgaccatcgacctgaagaacttcaggaagccaggagagaagaccttcacccagaggagccggctgtttgtgggcaacctgcccccagacatcacagaggaggagatgaggaagctgtttgagaagtatggcaaggccggggaggtgttcatccacaaggacaagggcttcggcttcatccggctggagaccaggaccctggccgagatcgccaaggtggagctggacaacatgcccctgcggggcaagcagctgcgggtgcgctttgcctgccacagcgccagcctgactgtgaggaacctgccccagtatgtgtccaatgagctgctggaggaggccttctctgtgtttggccaggtggagagagctgtggtgattgtggatgaccggggccggcccagcggcaagggcatcgtggagttcagcggcaagccagctgccaggaaggccctggaccgctgcagcgagggcagcttcctgctgaccaccttccccaggcctgtgacagtggagcccatggaccagctggatgatgaggagggcctgcctgagaagctggtgatcaagaaccagcagttccacaaggagcgggagcagccccccaggtttgcccagcccggcagctttgaatatgaatatgccatgcgctggaaggccctgattgagatggagaagcagcagcaggaccaggtggacaggaacatcaaggaggcccgggagaagctggagatggagatggaggccgcccggcatgagcaccaggtgatgctgatgaggcaggacctgatgaggcggcaggaggagctgcggaggatggaggagctgcacaaccaggaggtgcagaagaggaagcagctggagctgcggcaggaggaggagaggagaagaagagaggaggagatgaggcggcagcaggaggagatgatgaggcggcagcaggagggcttcaagggcaccttcccagatgcccgggagcaggagatccgcatgggccagatggccatgggcggggccatgggcatcaacaacagaggagccatgcccccagcccctgtgcctgctggcaccccagcccctcctggccctgccaccatgatgccagatggcaccctgggcctgaccccacccaccacagaaagatttggccaggccgccaccatggagggcatcggggccatcggcggcaccccaccagccttcaacagagctgcccctggagctgagtttgcccccaacaagagaagacgctactag

SEQ ID NO: 162097 - DNA, 1416 bp, synthetic construct; identical to SEQ ID NO: 162096
  misc_feature 1..1416: note = Description of Artificial Sequence: Synthetic coding sequence
  source 1..1416: mol_type = other DNA

SEQ ID NO: 162098 - DNA, 1416 bp, synthetic construct; identical to SEQ ID NO: 162096
  misc_feature 1..1416: note = Description of Artificial Sequence: Synthetic coding sequence
  source 1..1416: mol_type = other DNA

SEQ ID NO: 162099 - DNA, 747 bp, synthetic construct
  misc_feature 1..747: note = Description of Artificial Sequence: Synthetic coding sequence
  source 1..747: mol_type = other DNA
atgcagagcaacaagaccttcaacctggagaagcagaaccacacccccaggaagcaccaccagcaccaccaccagcagcagcaccaccagcagcagcagcagcagcccccacctccacccatcccagccaacggccagcaggccagcagccagaatgaaggcctgaccatcgacctgaagaacttcaggaagccaggagagaagaccttcacccagaggagccggctgtttgtgggcaacctgcccccagacatcacagaggaggagatgaggaagctgtttgagaagtatggcaaggccggggaggtgttcatccacaaggacaagggcttcggcttcatccggctggagaccaggaccctggccgagatcgccaaggtggagctggacaacatgcccctgcggggcaagcagctgcgggtgcgctttgcctgccacagcgccagcctgactgtgaggaacctgccccaggagcgggagcagccccccaggtttgcccagcccggcagctttgaatatgaatatgccatgcgctggaaggccctgattgagatggagaagcagcagcaggaccaggtggacaggaacatcaaggaggcccgggagaagctggagatggagatggaggccgcccggcatgagcaccaggtgatgctgatgaggcaggacctgatgaggcggcaggaggagctgcggaggatggaggagctgcacaaccaggaggtgcagaagaggaagcagctgtag

SEQ ID NO: 162100 - DNA, 708 bp, synthetic construct
  misc_feature 1..708: note = Description of Artificial Sequence: Synthetic coding sequence
  source 1..708: mol_type = other DNA
tgaccagacatcacagaggaggagatgaggaagctgtttgagaagtatggcaaggccggggaggtgttcatccacaaggacaagggcttcggcttcatccggctggtggagagagctgtggtgattgtggatgaccggggccggcccagcggcaagggcatcgtggagttcagcggcaagccagctgccaggaaggccctggaccgctgcagcgagggcagcttcctgctgaccaccttccccaggcctgtgacagtggagcccatggaccagctggatgatgaggagggcctgcctgagaagctggtgatcaagaaccagcagttccacaaggagcgggagcagccccccaggtttgcccagcccggcagctttgaatatgaatatgccatgcgctggaaggccctgattgagatggagaagcagcagcaggaccaggtggacaggaacatcaaggaggcccgggagaagctggagatggagatggaggccgcccggcatgagcaccaggtgatgctgatgaggcaggacctgatgaggcggcaggaggagctgcggaggatggaggagctgcacaaccaggaggtgcagaagaggaagcagctggagctgcggcaggaggaggagaggagaagaagagaggaggagatgaggcggcagcaggaggagatgatgaggcggcagcaggagggcttcaagggcacctag

SEQ ID NO: 162101 - DNA, 375 bp, synthetic construct
  misc_feature 1..375: note = Description of Artificial Sequence: Synthetic coding sequence
  source 1..375: mol_type = other DNA
atgcagagcaacaagaccttcaacctggagaagcagaaccacacccccaggaagcaccaccagcaccaccaccagcagcagcaccaccagcagcagcagcagcagcccccacctccacccatcccagccaacggccagcaggccagcagccagaatgaaggcctgaccatcgacctgaagaacttcaggaagccaggagagaagaccttcacccagaggagccggctgtttgtgggcaacctgcccccagacatcacagaggaggagatgaggaagctgtttgagaagtatggcaaggagaccaggaccctggccgagatcgccaaggtggagctggacaacatgcccctgcggggcaagcagctgcgggtgtag

SEQ ID NO: 162102 - DNA, 201 bp, synthetic construct
  misc_feature 1..201: note = Description of Artificial Sequence: Synthetic coding sequence
  source 1..201: mol_type = other DNA
atgcagagcaacaagaccttcaacctggagaagcagaaccacacccccaggaagcaccaccagcaccaccaccagcagcagcaccaccagcagcagcagcagcagcccccacctccacccatcccagccaacggccagcaggccagcagccagaatgaaggcctgaccatcgacctgaagaacttcaggaagccaggatag

SEQ ID NO: 162103 - DNA, 624 bp, synthetic construct
  misc_feature 1..624: note = Description of Artificial Sequence: Synthetic coding sequence
  source 1..624: mol_type = other DNA
atgcagagcaacaagaccttcaacctggagaagcagaaccacacccccaggaagcaccaccagcaccaccaccagcagcagcaccaccagcagcagcagcagcagcccccacctccacccatcccagccaacggccagcaggccagcagccagaatgaaggcctgaccatcgacctgaagaacttcaggaagccaggagagaagaccttcacccagaggagccggctgtttgtgggcaacctgcccccagacatcacagaggaggagatgaggaagctgtttgagaagtatggcaaggccggggaggtgttcatccacaaggacaagggcttcggcttcatccggctggagaccaggaccctggccgagatcgccaaggtggagctggacaacatgcccctgcggggcaagcagctgcgggtgcgctttgcctgccacagcgccagcctgactgtgaggaacctgccccagtatgtgtccaatgagctgctggaggaggccttctctgtgtttggccaggtggagagagctgtggtgattgtggatgaccggggccggcccagcggcaagggcatcgtggagttcagcggcaagccagctgccaggaaggccctggacagatag

SEQ ID NO: 162104 - DNA, 1149 bp, synthetic construct
  misc_feature 1..1149: note = Description of Artificial Sequence: Synthetic coding sequence
  source 1..1149: mol_type = other DNA
atgaggaagctgtttgagaagtatggcaaggccggggaggtgttcatccacaaggacaagggcttcggcttcatccggctggagaccaggaccctggccgagatcgccaaggtggagctggacaacatgcccctgcggggcaagcagctgcgggtgcgctttgcctgccacagcgccagcctgactgtgaggaacctgccccagtatgtgtccaatgagctgctggaggaggccttctctgtgtttggccaggtggagagagctgtggtgattgtggatgaccggggccggcccagcgggaaaggaattgtggagttcagcggcaagccagctgccaggaaggccctggaccgctgcagcgagggcagcttcctgctgaccaccttccccaggcctgtgacagtggagcccatggaccagctggatgatgaggagggcctgcctgagaagctggtgatcaagaaccagcagttccacaaggagcgggagcagcccccaagatttgcccagcccggcagctttgaatatgaatatgccatgcgctggaaggccctgattgagatggagaagcagcagcaggaccaggtggacaggaacatcaaggaggcccgggagaagctggagatggagatggaggccgcccggcatgagcaccaggtgatgctgatgaggcaggacctgatgaggcggcaggaggagctgcggaggatggaggagctgcacaaccaggaggtgcagaagaggaagcagctggagctgcggcaggaggaggagaggagaagaagagaggaggagatgaggcggcagcaggaggagatgatgaggcggcagcaggagggcttcaagggcaccttcccagatgcccgggagcaggagatccgcatgggccagatggccatgggcggggccatgggcatcaacaacagaggagccatgcccccagcccctgtgcctgctggcaccccagcccctcctggccctgccaccatgatgccagatggcaccctgggcctgaccccacccaccacagagcgcttcggccaggccgccaccatggagggcattggagccatcggcggcaccccaccagccttcaacagagctgcccctggagctgagtttgcccccaacaagagaagacgctactag

SEQ ID NO: 162105 - DNA, 3048 bp, synthetic construct
  misc_feature 1..3048: note = Description of Artificial Sequence: Synthetic coding sequence
  source 1..3048: mol_type = other DNA
atgggcgctgagcggcggctgctgagcatcaaggaggccttccggctggcccagcagccccaccagaaccaggccaagctggtggtggccctgagcaggacctaccgcaccatggatgacaagacagtgttccacgaggagttcatccactacctgaagtatgtgatggtggtgtacaagcgggagcctgctgtggagcgggtgattgaatttgctgccaagtttgtgaccagcttccaccagagcgacatggaggatgatgaggaggaggaggatggcggcctgctgaactacctgttcaccttcctgctgaagagccatgaggccaacagcaatgctgtgcgcttccgggtgtgcctgctgatcaacaagctgctgggctccatgccagaaaatgcccagattgatgatgatgtgtttgacaagatcaacaaggccatgctgatccggctgaaggacaagatccccaacgtgcgcatccaggccgtgctggccctgagccggctgcaggaccccaaggatgatgagtgccctgtggtgaatgcctatgccaccctgattgaaaatgacagcaaccctgaggtgcggcgggctgtgctgagctgcatcgcccccagcgccaagaccctgcccaagatcgtgggccgcaccaaggatgtgaaggaggccgtgaggaagctggcctaccaggtgctggccgagaaggtgcacatgagggccatgagcatcgcccagagggtgatgctgctgcagcagggcctgaatgacagaagtgatgctgtgaagcaggccatgcagaagcacctgctgcagggctggctgcgcttcagcgagggcaacatcctggagctgctgcaccggctggatgtggagaacagcagcgaggtggccgtgtctgtgctgaatgccctcttcagcatcacccccctgtctgagctggtgggcctgtgcaagaacaatgatggcaggaagctgatccctgtggagaccctgaccccagaaattgccctgtactggtgtgccctgtgtgagtacctgaagagcaaaggagatgaaggagaggagttcctggagcagatcctgcctgagcctgtggtgtatgctgactacctgctgagctacatccagagcatccctgtggtgaatgaggagcacagaggagacttctcctacatcggcaacctgatgaccaaggagttcatcggccagcagctgatcctgatcatcaagagcctggacaccagcgaggagggcggcaggaagaagctgctggccgtgctgcaggagatcctgatcctgcccaccatccccatcagcctggtgtccttcctggtggagcggctgctgcacatcatcattgatgacaacaagaggacccagatcgtgacagagatcatcagcgagatccgggcccccatcgtgacagtgggcgtgaacaatgaccctgcagatgtgaggaagaaggagctgaagatggccgagatcaaggtgaagctgattgaggccaaggaggccctggagaactgcatcaccctgcaggacttcaacagagccagcgagctgaaggaggagatcaaggccctggaggatgcccgcatcaacctgctgaaggagacagagcagctggagatcaaggaggtgcacatcgagaagaatgatgctgagaccctgcagaagtgcctgatcctgtgctatgagctgctgaagcagatgagcatcagcacaggcctgagcgccaccatgaatggcatcatcgagagcctcatcctgcccggcatcatcagcatccaccctgtggtgaggaacctggccgtgctgtgcctgggctgctgcggcctgcagaaccaggactttgccaggaagcactttgtgctgctgctgcaggtgctgcagattgatgatgtgaccatcaagatcagcgccctgaaggccatctttgaccagctgatgaccttcggcatcgagcccttcaagaccaagaagatcaagaccctgcactgtgagggcacagagatcaacagtgatgatgagcaggagagcaaggaggtggaggagacagccacagccaagaatgtgctgaagctgctgagtgacttcctggacagcgaggtgtctgagctgaggactggagctgctgagggcctggccaagctgatgttttctggcctgctggtgagcagccgcatcctgagccgcctcatcctgctgtggtacaaccctgtgacagaggaggatgtgcagctgcggcactgcctgggcgtcttcttccctgtgtttgcctatgccagcaggaccaaccaggagtgctttgaggaggccttcctgcccaccctgcagaccctggccaatgccccagccagcagccccctggccgagattgacatcaccaacgtggccgagctgctggtggacctgacccggcccagcggcctgaacccccaggccaagaccagccaggactaccaggccctgactgtgcatgacaacctggccatgaagatctgcaatgagatcctgaccagcccctgcagccctgagatccgggtgtacaccaaggccctgagcagcctggagctgagcagccacctggccaaggacctgctggtgctgctgaatgagatcctggagcaggtgaaggacaggacctgcctgcgggccctggagaagatcaagatccagctggagaagggcaacaaggagtttggagaccaggccgaggccgcccaggatgccaccctgaccaccaccaccttccagaatgaagatgagaagaacaaggaggtgtacatgacccccctgcggggcgtgaaggccacccaggccagcaagagcacccagctgaagaccaacagaggccagaggaaggtgacagtgtctgcccggaccaacagacgctgccagacagctgaggccgacagcgagagtgaccacgaggtgcctgagcctgagagcgagatgaagatgaggctgccccggcgggccaagacagctgccctggagaagagcaagctgaacctggcccagttcctgaatgaagacctgtcctag

SEQ ID NO: 162106 - DNA, 951 bp, synthetic construct
  misc_feature 1..951: note = Description of Artificial Sequence: Synthetic coding sequence
  source 1..951: mol_type = other DNA
atgtctggggacagcagcggccggggccctgagggccggggccggggccgggacccccaccgggacaggaccaggagccgcagccgcagccgcagccccctgagccccaggagcagaagaggcagcgcccgggagcggcgggaggcccctgagcggcccagcctggaggacacagagcccagcgacagcggagatgagatgatggaccctgccagcctggaggccgaggccgaccagggcctgtgccggcagatccgccaccagtaccgggccctgatcaacagcgtgcagcagaaccgggaggacatcctgaatgctggggacaagctgacagaggtgctggaggaggccaacaccctcttcaatgaggtgtcccgggcccgggaggccgtgctggatgcccacttcctggtgctggccagtgacctgggcaaggagaaggccaagcagctgcggagtgacctgagcagctttgacatgctgcgctacgtggagaccctgctgacccacatgggcgtgaaccccctggaggccgaggagctgatcagagatgaggacagcccagactttgagttcatcgtgtatgacagctggaagatcactggaagaacagctgagaacaccttcaacaagacccacaccttccacttcctgctgggcagcatctatggagaatgtcctgtgcccaagccccgggtggaccggcccaggaaggtgcctgtgatccaggaggagcgggccatgcctgcccagctgcggaggatggaggagagccaccaggaggccacagagaaggaggtggagcgcatcctgggcctgctgcagacctacttccgggaggaccgggacagcctgaccctgagcccccggctggagtgcagcggcaccatcagcacccactgcaacctgcacctgctggacagcagcaacagccctgccagcgccagctag

SEQ ID NO: 162107 - DNA, 1158 bp, synthetic construct
  misc_feature 1..1158: note = Description of Artificial Sequence: Synthetic coding sequence
  source 1..1158: mol_type = other DNA
atgtctggggacagcagcggccggggccctgagggccggggccggggccgggacccccaccgggacaggaccaggagccgcagccgcagccgcagccccctgagccccaggagcagaagaggcagcgcccgggagcggcgggaggcccctgagcggcccagcctggaggacacagagcccagcgacagcggagatgagatgatggaccctgccagcctggaggccgaggccgaccagggcctgtgccggcagatccgccaccagtaccgggccctgatcaacagcgtgcagcagaaccgggaggacatcctgaatgctggggacaagctgacagaggtgctggaggaggccaacaccctcttcaatgaggtgtcccgggcccgggaggccgtgctggatgcccacttcctggtgctggccagtgacctgggcaaggagaaggccaagcagctgcggagtgacctgagcagctttgacatgctgcgctacgtggagaccctgctgacccacatgggcgtgaaccccctggaggccgaggagctgatcagagatgaggacagcccagactttgagttcatcgtgtatgacagctggaagatcactggaagaacagctgagaacaccttcaacaagacccacaccttccacttcctgctgggcagcatctatggagaatgtcctgtgcccaagccccgggtggaccggcccaggaaggtgcctgtgatccaggaggagcgggccatgcctgcccagctgcggaggatggaggagagccaccaggaggccacagagaaggaggtggagcgcatcctgggcctgctgcagacctacttccgggaggaccctgacacccccatgtccttctttgattttgtggtggacccccacagcttccccaggacagtggagaacatcttccacgtgtccttcatcatcagagatggctttgcccgcatccggctggaccaggaccggctgcctgtgattgagcctgtgtccatcaatgaagaaaatgaaggatttgagcacaacacccaggtgaggaaccagggcatcatcgccctgagctacagagactgggaggagatcgtgaagacctttgagatcagcgagcccgtcatcacccccagccagaggcagcagaagcccagcgcctag

SEQ ID NO: 162108 - DNA, 519 bp, synthetic construct
  misc_feature 1..519: note = Description of Artificial Sequence: Synthetic coding sequence
  source 1..519: mol_type = other DNA
atgctgcgctacgtggagaccctgctgacccacatgggcgtgaaccccctggaggccgaggagctgatcagagatgaggacagcccagactttgagttcatcgtgtatgacagctggaagatcaccggccgcacagctgagaacaccttcaacaagacccacaccttccacttcctgctgggcagcatctacggggagtgccctgtgcccaagccccgggtggaccggcccaggaaggtgcctgtgatccaggaggagcgggccatgcctgcccagctgcggaggatggaggagagccaccaggaggccacagagaaggaggtggagcgcatcctgggcctgctgcagacctacttcagagaagatcctgacacccccatgtccttctttgattttgtggtggacccccacagcttccccaggacagtggagaacatcttccacgtgtccttcatcatcagagatggctttgcccgcatccggctggaccaggaccggctgcccgtcatcggcaagtag

SEQ ID NO: 162109 - DNA, 2574 bp, synthetic construct
  misc_feature 1..2574: note = Description of Artificial Sequence: Synthetic coding sequence
  source 1..2574: mol_type = other DNA
atggccaaggccaagaaggtgggcgcccggaggaaggccagcggggccccagctggggcccggggcggccctgccaaggccaacagcaacccctttgaggtgaaggtgaaccggcagaagttccagatcctgggcaggaagaccaggcatgatgtgggcctgcccggggtgtcccgggcccgggccctgaggaagaggacccagaccctgctgaaggagtacaaggagcgggacaagagcaatgtgttccgggacaagagatttggagagtacaacagcaacatgagccctgaggagaagatgatgaagagatttgccctggagcagcagaggcaccacgagaagaagagcatctacaacctgaatgaagatgaggagctgacccactacggccagagcctggccgacatcgagaagcacaatgacatcgtggacagcgacagtgatgctgaagatcggggcaccctgtctgctgagctgacagctgcccactttggaggcggcggcggcctgctgcacaagaagacccagcaggagggggaggagcgggagaagcccaagagcaggaaggagctgattgaggagctgattgccaagagcaagcaggagaagcgggagcggcaggcccagcgggaggatgccctggagctgacagagaagctggaccaggactggaaggagatccagaccctgctgagccacaagacccccaagtctgagaacagagacaagaaggagaagcccaagccagatgcctatgacatgatggtgcgggagctgggctttgagatgaaggcccagcccagcaacaggatgaagacagaggccgagctggccaaggaggagcaggagcacctgaggaagctggaggccgagcggctgcggaggatgctgggcaaggatgaagatgaaaatgtgaagaagcccaagcacatgtctgcagatgacctgaatgatggctttgtgctggacaaggatgaccggcggctgctgagctacaaggatggcaagatgaatgtggaggaggatgtgcaggaggagcagagcaaggaggccagtgaccctgagagcaatgaggaggagggggacagcagtggaggagaggacacagaggagagtgacagcccagacagccacctggacctggagagcaatgtggagagcgaggaggagaatgagaagccagccaaggagcagaggcagaccccaggcaagggcctcatcagcggcaaggagcgggccggcaaggccaccagagatgagctgccctacacctttgctgcccctgagagctatgaggagctgcggagcctgctgctgggccgctccatggaggagcagctgctggtggtggagcgcatccagaagtgcaaccaccccagcctggccgagggcaacaaggccaagctggagaagctgtttggcttcctgctggagtatgtgggggacctggccacagatgatcctccagacctgactgtgattgacaagctggtggtgcacctgtaccacctgtgccagatgtttcctgagagcgccagtgatgccatcaagtttgtgctgagagatgccatgcatgagatggaggagatgattgagaccaagggccgggccgccctgcccggcctggatgtgctgatctacctgaagatcaccggcctgctcttccccaccagtgacttctggcaccctgtggtgaccccagccctggtgtgcctgagccagctgctgaccaagtgccccatcctgagcctgcaggatgtggtgaagggcctgtttgtgtgctgcctcttcctggagtatgtggccctgagccagcgcttcatccctgagctgatcaacttcctgctgggcatcctgtacatcgccacccccaacaaggccagccagggcagcaccctggtgcaccccttccgggccctgggcaagaacagcgagctgctggtggtgtctgcccgggaggatgtggccacctggcagcagagcagcctgagcctgcgctgggccagccggctgcgggcccccaccagcacagaggccaaccacatccggctgagctgcctggccgtgggcctggccctgctgaagagatgtgtgctgatgtatggcagcctgcccagcttccacgccatcatgggccccctgcaggccctgctgacagaccacctggccgactgcagccacccccaggagctgcaggagctgtgccagagcaccctgacagagatggagagccagaagcagctgtgccggcccctgacctgtgagaagagcaagcctgtgcccctgaagctgttcaccccccggctggtgaaggtgctggagtttggaaggaagcagggcagcagcaaggaggagcaggagaggaagaggctcatccacaagcacaagcgggagttcaagggagctgtgcgggagatcaggaaggacaaccagttcctggccaggatgcagctgtctgagatcatggagagagatgctgagaggaagaggaaggtgaagcagctgttcaacagcctggccacccaggagggggagtggaaggccctgaagaggaagaagttcaagaagtag

SEQ ID NO: 162110 - DNA, 2421 bp, synthetic construct
  misc_feature 1..2421: note = Description of Artificial Sequence: Synthetic coding sequence
  source 1..2421: mol_type = other DNA
atggccaaggccaagaaggtgggcgcccggaggaaggccagcggggccccagctggggcccggggcggccctgccaaggccaacagcaacccctttgaggtgaaggtgaaccggcagaagttccagatcctgggcaggaagaccaggcatgatgtgggcctgcccggggtgtcccgggcccgggccctgaggaagaggacccagaccctgctgaaggagtacaaggagcgggacaagagcaatgtgttccgggacaagagatttggagagtacaacagcaacatgagccctgaggagaagatgatgaagagatttgccctggagcagcagaggcaccacgagaagaagagcatctacaacctgaatgaagatgaggagctgacccactacggccagagcctggccgacatcgagaagcacaatgacatcgtggacagcgacagtgatgctgaagatcggggcaccctgtctgctgagctgacagctgcccactttggaggcggcggcggcctgctgcacaagaagacccagcaggagggggaggagcgggagaagcccaagagcaggaaggagctgattgaggagctgattgccaagagcaagcaggagaagcgggagcggcaggcccagcgggaggatgccctggagctgacagagaagctggaccaggactggaaggagatccagaccctgctgagccacaagacccccaagtctgagaacagagacaagaaggagaagcccaagccagatgcctatgacatgatggtgcgggagctgggctttgagatgaaggcccagcccagcaacaggatgaagacagaggccgagctggccaaggaggagcaggagcacctgaggaagctggaggccgagcggctgcggaggatgctgggcaaggatgaagatgaaaatgtgaagaagcccaagcacatgtctgcagatgacctgaatgatggctttgtgctggacaaggatgaccggcggctgctgagctacaaggatggcaagatgaatgtggaggaggatgtgcaggaggagcagagcaaggaggccagtgaccctgagagcaatgaggaggagggggacagcagtggaggagaggacacagaggagagtgacagcccagacagccacctggacctggagagcaatgtggagagcgaggaggagaatgagaagccagccaaggagcagaggcagaccccaggcaagggcctcatcagcggcaaggagcgggccggcaaggccaccagagatgagctgccctacacctttgctgcccctgagagctatgaggagctgcggagcctgctgctgggccgctccatggaggagcagctgctggtggtggagcgcatccagaagtgcaaccaccccagcctggccgagggcaacaaggccaagctggagaagctgtttggcttcctgctggagtatgtgggggacctggccacagatgatcctccagacctgactgtgattgacaagctggtggtgcacctgtaccacctgtgccagatgtttcctgagagcgccagtgatgccatcaagtttgtgctgagagatgccatgcatgagatggaggagatgattgagaccaagggccgggccgccctgcccggcctggatgtgctgatctacctgaagatcaccggcctgctcttccccaccagtgacttctggcaccctgtggtgaccccagccctggtgtgcctgagccagctgctgaccaagtgccccatcctgagcctgcaggatgtggtgaagggcctgtttgtgtgctgcctcttcctggagtatgtggccctgagccagcgcttcatccctgagctgatcaacttcctgctgggcatcctgtacatcgccacccccaacaaggccagccagggcagcaccctggtgcaccccttccgggccctgggcaagaacagcgagctgctggtggtgtctgcccgggaggatgtggccacctggcagcagagcagcctgagcctgcgctgggccagccggctgcgggcccccaccagcacagaggccaaccacatccggctgagctgcctggccgtgggcctggccctgctgaagagatgtgtgctgatgtatggcagcctgcccagcttccacgccatcatgggccccctgcaggccctgctgacagaccacctggccgactgcagccacccccaggagctgcaggagctgtgccagagcaccctgacagagatggagagccagaagcagctgtgccggcccctgacctgtgagaagagcaagcctgtgcccctgaagctgttcaccccccggctggtgagcaacagccggccccaggtgatccacctgccctggccacccaactaccgctgtgagccccagcacccagccaagaaggtgatcttcttccgggtcatcatgctgtag

SEQ ID NO: 162111 - DNA, 2574 bp, synthetic construct; identical to SEQ ID NO: 162109
  misc_feature 1..2574: note = Description of Artificial Sequence: Synthetic coding sequence
  source 1..2574: mol_type = other DNA

SEQ ID NO: 162112 - DNA, 1728 bp, synthetic construct
  misc_feature 1..1728: note = Description of Artificial Sequence: Synthetic coding sequence
  source 1..1728: mol_type = other DNA
atgaagagatttgccctggagcagcagaggcaccacgagaagaagagcatctacaacctgaatgaagatgaggagctgacccactacggccagagcctggccgacatcgagaagcacaatgacatcgtggacagcgacagtgatgctgaggaccggggcaccctgtctgctgagctgacagctgcccactttggaggcggcggcggcctgctgcacaagaagacccagcaggagggggaggagcgggagaagcccaagagcaggaaggagctgattgaggagctgattgccaagagcaagcaggagaagcgggagcggcaggcccagagagaagatgccctggagctgacagagaagctggaccaggactggaaggagatccagaccctgctgagccacaagacccccaagtcagaaaatagagacaagaaggagaagcccaagccagatgcctatgacatgatggtgcgggagctgggctttgagatgaaggcccagcccagcaacaggatgaagacagaagctgagctggccaaggaggagcaggagcacctgaggaagctggaggccgagcggctgcggaggatgctgggcaaggatgaagatgaaaatgtgaagaagcccaagcacatgtctgcagatgacctgaatgatggctttgtgctggacaaggatgaccggcggctgctgagctacaaggatggcaagatgaatgtggaggaggatgtgcaggaggagcagagcaaggaggccagtgaccctgagagcaatgaggaggagggggacagcagtggaggagaggacacagaggagagtgacagcccagacagccacctggacctggagagcaatgtggagagcgaggaggagaatgagaagccagccaaggagcagaggcagacccctgggaagggcctcatcagcggcaaggagagagctgggaaggccaccagagatgagctgccctacacctttgctgcccctgagagctatgaggagctgcggagcctgctgctgggccgctccatggaggagcagctgctggtggtggagcgcatccagaagtgcaaccaccccagcctggccgagggcaacaaggccaagctggagaagctgtttggcttcctgctggagtatgtgggggacctggccacagatgaccccccagacctgaccgtcatcgacaagctggtggtgcacctgtaccacctgtgccagatgtttcctgagagcgccagtgatgccatcaagtttgtgctgagagatgccatgcatgagatggaggagatgattgagaccaagggccgggccgccctgcccggcctggatgtgctgatctacctgaagatcaccggcctgctcttccccaccagtgacttctggcaccctgtggtgaccccagccctggtgtgcctgagccagctgctgaccaagtgccccatcctgagcctgcaggatgtggtgaagggcctgtttgtgtgctgcctcttcctggagtatgtggccctgagccagcgcttcatccctgagctgatcaacttcctgctgggcatcctgtacatcgccacccccaacaaggccagccagggcagcaccctggtgcaccccttccgggccctgggcaagaacagcgagctgctggtggtgtctgccagagaagatgtggccacctggcagcagagcagcctgagcctgcgctggtggagccgcatcccagacctgaggtag

SEQ ID NO: 162113 - DNA, 2304 bp, synthetic construct
  misc_feature 1..2304: note = Description of Artificial Sequence: Synthetic coding sequence
  source 1..2304: mol_type = other DNA
atgggcagaagaagccggggccggcggctgcagcagcagcagaggccagaagatgctgaagatggagctgagggcggcggcaagagaggagaggccggctgggagggcggctacccagaaattgtgaaggagaacaagctgtttgagcactactaccaggagctgaagatcgtgcctgagggggagtggggccagttcatggatgccctgcgggagcccctgcctgccaccctgcgcatcaccggctacaagagccacgccaaggagatcctgcactgcctgaagaacaagtacttcaaggagctggaggacctggaggtggatggccagaaggtggaggtgccccagcccctgtcctggtacccagaggagctggcctggcacaccaacctgagcaggaagatcctgaggaagagcccccacctggagaagttccaccagttcctggtgtctgaaacagaaagtggcaacatcagccggcaggaggccgtgtccatgatcccccccctgctgctgaatgtgcggccccaccacaagatcctggacatgtgtgccgcccctggcagcaagaccacccagctgattgagatgctgcacgccgacatgaatgtgcccttccctgagggcttcgtcatcgccaatgatgtggacaacaagcgctgctacctgctggtgcaccaggccaagaggctgagcagcccctgcatcatggtggtgaaccatgatgccagcagcatcccccggctgcagattgatgtggatggcaggaaggagatcctcttctatgaccgcatcctgtgtgatgtgccctgcagcggagatggcaccatgaggaagaacattgatgtgtggaagaagtggaccaccctgaacagcctgcagctgcacggcctgcagctgcgcatcgccaccagaggagctgagcagctggccgagggcggccgcatggtgtacagcacctgcagcctgaaccccattgaagatgaggccgtcatcgccagcctgctggagaagtctgagggcgccctggagctggctgatgtgtccaatgagctgcccggcctgaagtggatgcctggcatcacccagtggaaggtgatgaccaaggatggccagtggttcacagactgggatgctgtgccccacagccgccacacccagatccggcccaccatgttcccccccaaggaccctgagaagctgcaggccatgcacctggagcgctgcctgcgcatcctgccccaccaccagaacacaggaggcttctttgtggccgtgctggtgaagaagagctccatgccctggaacaagaggcagcccaagctgcagggcaagtctgctgagacccgggagagcacccagctgagccctgctgacctgacagagggcaagcccacagaccccagcaagctggagagccccagcttcaccggcactggagacacagagatcgcccacgccacagaggacctggagaacaacggcagcaagaaggatggagtgtgtggccccccacccagcaagaagatgaagctgtttggcttcaaggaggacccctttgtgttcatcccagaagatgaccccctcttcccccccatcgagaagttctacgccctggaccccagcttccccaggatgaacctgctgaccaggaccacagagggcaagaagaggcagctgtacatggtgtccaaggagctgagaaatgtgctgctgaacaacagcgagaagatgaaggtgatcaacacaggcatcaaggtgtggtgcaggaacaacagcggggaggagtttgactgtgccttccggctggcccaggagggcatctacaccctgtaccccttcatcaacagccgcatcatcaccgtgtccatggaggatgtgaagatcctgctgacccaggagaaccccttcttcaggaagctgagcagcgagacctacagccaggccaaggacctggccaagggcagcatcgtgctgaagtatgagccagattctgccaacccagatgccctgcagtgccccatcgtgctgtgtggctggaggggcaaggccagcatccgcacctttgtgcccaagaatgaaaggctgcactacctgaggatgatgggcctggaggtgctgggggagaagaagaaggagggcgtcatcctgaccaatgaatctgctgccagcacaggccagcctgacaatgatgtgacagagggccagagagctggggagcccaacagcccagatgctgaggaggccaacagcccagatgtgacagctggctgtgaccctgctggggtgcaccccccaagatag

SEQ ID NO: 162114 - DNA, 1596 bp, synthetic construct
  misc_feature 1..1596: note = Description of Artificial Sequence: Synthetic coding sequence
  source 1..1596: mol_type = other DNA
atggtggtgaaccatgatgccagcagcatcccccggctgcagattgatgtggatggcaggaaggagatcctcttctatgaccgcatcctgtgtgatgtgccctgcagcggagatggcaccatgaggaagaacattgatgtgtggaagaagtggaccaccctgaacagcctgcagctgcacggcctgcagctgcgcatcgccaccagaggagctgagcagctggccgagggcggccgcatggtgtacagcacctgcagcctgaaccccattgaagatgaggccgtcatcgccagcctgctggagaagtctgagggcgccctggagctggctgatgtgtccaatgagctgcccggcctgaagtggatgcctggcatcacccagtggaaggtgatgaccaaggatggccagtggttcacagactgggatgctgtgccccacagccgccacacccagatccggcccaccatgttcccccccaaggaccctgagaagctgcaggccatgcacctggagcgctgcctgcgcatcctgccccaccaccagaacacaggaggcttctttgtggccgtgctggtgaagaagagctccatgccctggaacaagaggcagcccaagctgcagggcaagtctgctgagacccgggagagcacccagctgagccctgctgacctgacagagggcaagcccacagaccccagcaagctggagagccccagcttcaccggcactggagacacagagatcgcccacgccacagaggacctggagaacaacggcagcaagaaggatggagtgtgtggccccccacccagcaagaagatgaagctgtttggcttcaaggaggacccctttgtgttcatcccagaagatgaccccctcttcccccccatcgagaagttctacgccctggaccccagcttccccaggatgaacctgctgaccaggaccacagagggcaagaagaggcagctgtacatggtgtccaaggagctgagaaatgtgctgctgaacaacagcgagaagatgaaggtgatcaacacaggcatcaaggtgtggtgcaggaacaacagcggggaggagtttgactgtgccttccggctggcccaggagggcatctacaccctgtaccccttcatcaacagccgcatcatcaccgtgtccatggaggatgtgaagatcctgctgacccaggagaaccccttcttcaggaagctgagcagcgagacctacagccaggccaaggacctggccaagggcagcatcgtgctgaagtatgagccagattctgccaacccagatgccctgcagtgccccatcgtgctgtgtggctggaggggcaaggccagcatccgcacctttgtgcccaagaatgaaaggctgcactacctgaggatgatgggcctggaggtgctgggggagaagaagaaggagggcgtcatcctgaccaatgaatctgctgccagcacaggccagcctgacaatgatgtgacagagggccagagagctggggagcccaacagcccagatgctgaggaggccaacagcccagatgtgacagctggctgtgaccctgctggggtgcaccccccaagatag

SEQ ID NO: 162115 - DNA, 2199 bp, synthetic construct
  misc_feature 1..2199: note = Description of Artificial Sequence: Synthetic coding sequence
  source 1..2199: mol_type = other DNA
atgggcagaagaagccggggccggcggctgcagcagcagcagaggccagaagatgctgaagatggagctgagggcggcggcaagagaggagaggccggctgggagggcggctacccagaaattgtgaaggagaacaagctgtttgagcactactaccaggagctgaagatcgtgcctgagggggagtggggccagttcatggatgccctgcgggagcccctgcctgccaccctgcgcatcaccggctacaagcgctacccagaggagctggcctggcacaccaacctgagcaggaagatcctgaggaagagcccccacctggagaagttccaccagttcctggtgtctgaaacagagagcggcaacatcagccggcaggaggccgtgtccatgatcccccccctgctgctgaatgtgcggccccaccacaagatcctggacatgtgtgccgcccctggcagcaagaccacccagctgattgagatgctgcatgctgacatgaatgtgcccttccctgagggctttgtgattgccaatgatgtggacaacaagcgctgctacctgctggtgcaccaggccaagaggctgagcagcccctgcatcatggtggtgaaccatgatgccagcagcatcccccggctgcagattgatgtggatggcaggaaggagatcctcttctatgaccgcatcctgtgtgatgtgccctgcagcggagatggcaccatgaggaagaacattgatgtgtggaagaagtggaccaccctgaacagcctgcagctgcacggcctgcagctgagaattgccaccagaggagctgagcagctggccgagggcggccgcatggtgtacagcacctgcagcctgaaccccattgaagatgaagctgtgattgccagcctgctggagaagtctgagggcgccctggagctggctgatgtgtccaatgagctgcccggcctgaagtggatgcctggcatcacccagtggaaggtgatgaccaaggatggccagtggttcacagactgggatgctgtgccccacagccgccacacccagatccggcccaccatgtttcctcccaaggaccctgagaagctgcaggccatgcacctggagcgctgcctgcgcatcctgccccaccaccagaacacaggaggcttctttgtggccgtgctggtgaagaagagctccatgccctggaacaagaggcagcccaagctgcagggcaagtctgctgagacccgggagagcacccagctgagccctgctgacctgacagagggcaagcccacagaccccagcaagctggagagccccagcttcaccggcaccggggacacagaaattgcccacgccacagaggacctggagaacaacggcagcaagaaggatggagtgtgtggccccccacccagcaagaagatgaagctgtttggcttcaaggaggacccctttgtgttcatcccagaagatgaccccctcttcccccccatcgagaagttctacgccctggaccccagcttccccaggatgaacctgctgaccaggaccacagagggcaagaagaggcagctgtacatggtgtccaaggagctgagaaatgtgctgctgaacaacagcgagaagatgaaggtgatcaacacaggcatcaaggtgtggtgcaggaacaacagcggggaggagtttgactgtgccttccggctggcccaggagggcatctacaccctgtaccccttcatcaacagccgcatcatcaccgtgtccatggaggatgtgaagatcctgctgacccaggagaaccccttcttcaggaagctgagcagcgagacctacagccaggccaaggacctggccaagggcagcatcgtgctgaagtatgagccagacagcgccaacccagatgccctgcagtgccccatcgtgctgtgtggctggaggggcaaggccagcatccgcacctttgtgcccaagaatgaaaggctgcactacctgaggatgatgggcctggaggtgctgggggagaagaagaaggagggcgtcatcctgaccaatgaatctgctgccagcacaggccagcctgacaatgatgtgacagagggccagagagctggggagcccaacagcccagatgctgaggaggccaacagcccagatgtgacagctggctgtgaccctgctggggtgcacccccccaggtag

SEQ ID NO: 162116 - DNA, 1785 bp, synthetic construct
  misc_feature 1..1785: note = Description of Artificial Sequence: Synthetic coding sequence
  source 1..1785: mol_type = other DNA
atggtgctgctgcacgtgctgtttgagcacgctgtgggctacgccctgctggccctgaaggaggtggaggagatcagcctgctgcagccccaggtggaggagagcgtgctgaacctgggcaagttccacagcatcgtgcggctggtggccttctgcccctttgccagcagccaggtggccctggagaatgccaatgctgtgtctgagggcgtggtgcatgaggacctgcggctgctgctggagacccacctgcccagcaagaagaagaaggtgctgctgggcgtgggggaccccaagatcggggccgccatccaggaggagctgggctacaactgccagacaggaggagtgattgctgagatcctgcggggcgtgcggctgcacttccacaacctggtgaagggcctgacagacctgagcgcctgcaaggcccagctgggcctgggccacagctacagccgggccaaggtgaagttcaacgtgaacagagtggacaacatgatcatccagagcatcagcctgctggaccagctggacaaggacatcaacaccttctccatgagggtgcgggagtggtacggctaccacttccctgagctggtgaagatcatcaatgacaatgccacctactgccgcctggcccagttcatcggcaacagaagagagctgaatgaagacaagctggagaagctggaggagctgaccatggatggagccaaggccaaggccatcctggatgccagccgcagctccatgggcatggacatcagcgccatcgacctgatcaacatcgagagcttcagcagccgggtggtgtccctgtctgagtaccggcagagcctgcacacctacctgcggagcaagatgagccaggtggcccccagcctgagcgccctgattggagaggccgtgggcgcccggctgattgcccacgccggcagcctgaccaacctggccaagtacccagccagcacagtgcagatcctgggcgctgagaaggccctcttccgggccctgaagacccggggcaacacccccaagtatggcctcatcttccacagcaccttcatcggccgggctgctgccaagaacaagggccgcatcagccgctacctggccaacaagtgcagcatcgccagcagaattgactgcttcagcgaggtgcccacctctgtgtttggagagaagctgcgggagcaggtggaggagcggctgtccttctatgagaccggggagatccccaggaagaacctggatgtgatgaaggaggccatggtgcaggccgaggaggccgctgctgagatcaccaggaagctggagaagcaggagaagaagaggctgaagaaggagaagaagaggctggccgccctggccctggccagcagcgagaacagcagcagcaccccagaagaatgtgaggagatgtctgagaagcccaagaagaagaagaagcagaagccccaggaggtgccccaggagaatggcatggaggaccccagcatctccttcagcaagcccaagaagaagaagagcttcagcaaggaggagctgatgagcagtgacctggaggagacagctggcagcaccagcatccccaagaggaagaagagcacccccaaggaggagaccgtgaatgaccctgaggaggccggccacaggagcggcagcaagaagaagaggaagttcagcaaggaggagcctgtgagcagcggccctgaggaggccgtgggcaagagcagcagcaagaagaagaagaagttccacaaggccagccaggaggactag

SEQ ID NO: 162117 - DNA, 678 bp, synthetic construct
  misc_feature 1..678: note = Description of Artificial Sequence: Synthetic coding sequence
  source 1..678: mol_type = other DNA
atggacatcagcgccatcgacctgatcaacatcgagagcttcagcagccgggtggtgtccctgtctgagtaccggcagagcctgcacacctacctgcggagcaagatgagccaggtggcccccagcctgagcgccctgattggagaggccgtgggcgcccggctcatcgcccatgctggcagcctgaccaacctggccaagtacccagccagcacagtgcagatcctgggcgctgagaaggccctcttccgggccctgaagacccggggcaacacccccaagtatggcctcatcttccacagcaccttcatcggccgggccgccgccaagaacaagggccgcatcagccgctacctggccaacaagtgcagcatcgccagcagaattgactgcttcagcgaggtgcccacctctgtgtttggagagaagctgcgggagcaggtggaggagcggctgtccttctatgaaacaggagagatccccaggaagaacctggatgtgatgaaggaggccatggtgcaggccgaggaggccgctgctgagatcaccaggaagctggagaagcaggagaagaagaggctgaagaaggagaagaagaggctggccgccctggccctggccagcagcgagaacagcagcagcaccccagaggagtgtgaggagggggaccgctgctag

SEQ ID NO: 162118 - DNA, 660 bp, synthetic construct
  misc_feature 1..660: note = Description of Artificial Sequence: Synthetic coding sequence
  source 1..660: mol_type = other DNA
tgactcatcaacatcgagagcttcagcagccgggtggtgtccctgtctgagtaccggcagagcctgcacacctacctgcggagcaagatgagccaggtggcccccagcctgagcgccctgattggagaggccgtgggcgcccggctcatcgcccatgctggcagcctgaccaacctggccaagtacccagccagcacagtgcagatcctgggcgctgagaaggccctcttccgggccctgaagacccggggcaacacccccaagtatggcctcatcttccacagcaccttcatcggccgggccgccgccaagaacaagggccgcatcagccgctacctggccaacaagtgcagcatcgccagcagaattgactgcttcagcgaggtgcccacctctgtgtttggagagaagctgcgggagcaggtggaggagcggctgtccttctatgaaacaggagagatccccaggaagaacctggatgtgatgaaggaggccatggtgcaggccgaggaggccgctgctgagatcaccaggaagctggagaagcaggagaagaagaggctgaagaaggagaagaagaggctggccgccctggccctggccagcagcgagaacagcagcagcaccccagaggagtgtgaggagggggaccgctgctag

SEQ ID NO: 162119 - DNA, 846 bp, synthetic construct
  misc_feature 1..846: note = Description of Artificial Sequence: Synthetic coding sequence
  source 1..846: mol_type = other DNA
atggtgctgctgcacgtgctgtttgagcacgctgtgggctacgccctgctggccctgaaggaggtggaggagatcagcctgctgcagccccaggtggaggagagcgtgctgaacctgggcaagttccacagcatcgtgcggctggtggccttctgcccctttgccagcagccaggtggccctggagaatgccaatgctgtgtctgagggcgtggtgcatgaggacctgcggctgctgctggagacccacctgcccagcaagaagaagaaggtgctgctgggcgtgggggaccccaagatcggggccgccatccaggaggagctgggctacaactgccagacaggaggagtgattgctgagatcctgcggggcgtgcggctgcacttccacaacctggtgaagggcctgacagacctgagcgcctgcaaggcccagctgggcctgggccacagctacagccgggccaaggtgaagttcaacgtgaacagagtggacaacatgatcatccagagcatcagcctgctggaccagctggacaaggacatcaacaccttctccatgagggtgcggcagagccgctgtggggagggcaaggctgtggccctgtggttcctgatgaagcagctgggccagggcgtgacagtggccctgtgccgggagtggtacggctaccacttccctgagctggtgaagatcatcaatgacaatgccacctactgccgcctggcccagttcatcggcaacagaagagagctgaatgaagacaagctggagaagctggaggagctgaccatggatggagccaaggccaaggccatcctggatgccagccgcagctccatgtag

SEQ ID NO: 162120 - DNA, 402 bp, synthetic construct
  misc_feature 1..402: note = Description of Artificial Sequence: Synthetic coding sequence
  source 1..402: mol_type = other DNA
atgaggaagcacgtgctggccgccagcttctccatgctgagcctgctggtgatcatgggagacacagacagcaagacagacagcagcttcatcatggacagcgacccccggcgctgcatgaggcaccactacgtggacagcatcagccaccccctgtacaagtgcagcagcaagatggtgctgctggcccgctgtgagggccactgcagccaggccagccgctctgagcccctggtgtccttcagcacagtgctgaagcagcccttccgcagcagctgccactgctgccggccccagaccagcaagctgaaggccctgcggctgcgctgcagcggcggcatgaggctgacagccacctaccgctacatcctgagctgccactgtgaggagtgcaacagctag

SEQ ID NO: 162121 - DNA, 7416 bp, synthetic construct
  misc_feature 1..7416: note = Description of Artificial Sequence: Synthetic coding sequence
  source 1..7416: mol_type = other DNA
atgcctgccctgcggcctgccctgctgtgggccctgctggccctgtggctgtgctgtgccgccccagcccacgccctgcagtgcagagatggctatgagccctgtgtgaatgaaggcatgtgtgtgacctaccacaacggcaccggctactgcaagtgcccagagggcttcctgggggagtactgccagcaccgggacccctgtgagaagaaccgctgccagaatggaggcacctgtgtggcccaggccatgctgggcaaggccacctgccgctgtgccagcggcttcaccggggaggactgccagtacagcaccagccacccctgctttgtgtcccggccctgcctgaatggaggcacctgccacatgctgagccgggacacctatgagtgcacctgccaggtgggcttcaccgggaaggagtgccagtggacagatgcctgcctgagccacccctgtgccaacggcagcacctgcaccaccgtggccaaccagttcagctgcaagtgcctgaccggcttcaccggccagaagtgtgaaacagatgtgaatgaatgtgacatccctggccactgccagcacggcggcacctgcctgaacctgcccggcagctaccagtgccagtgcccccagggcttcaccggccagtactgtgacagcctgtatgtgccctgtgcccccagcccctgtgtgaatggaggcacctgccggcagacaggagacttcacctttgagtgcaactgcctgcccggctttgagggcagcacctgtgaaagaaatattgatgactgccccaaccaccgctgccagaatggaggagtgtgtgtggatggagtgaacacctacaactgccgctgccccccccagtggacaggccagttctgcacagaagatgtggatgaatgtctgctgcagcccaatgcctgccagaatggaggcacctgtgccaacagaaatggaggctacggctgtgtgtgtgtgaatggctggagcggagatgactgcagtgaaaatattgatgactgtgcctttgccagctgcaccccaggcagcacctgcatcgacagagtggccagcttcagctgcatgtgcccagagggcaaggccggcctgctgtgccacctggatgatgcctgcatcagcaacccctgccacaagggggccctgtgtgacaccaaccccctgaatggccagtacatctgcacctgcccccagggctacaagggagctgactgcacagaagatgtggatgaatgtgccatggccaacagcaacccctgtgaacatgctggaaaatgtgtgaacacagatggagccttccactgtgaatgtctgaagggctacgccggcccccgctgtgagatggacatcaatgaatgccacagcgacccctgccagaatgatgccacctgcctggacaagattggaggcttcacctgcctgtgcatgcctggcttcaagggcgtgcactgtgagctggagatcaatgaatgccagagcaacccctgtgtgaacaacggccagtgtgtggacaaggtgaaccgcttccagtgcctgtgccccccaggcttcaccggccctgtgtgccagattgatattgatgactgcagcagcaccccctgcctgaatggagccaagtgcatcgaccaccccaacggctatgagtgccagtgtgccaccggcttcaccggggtgctgtgtgaagaaaatattgacaactgtgaccctgacccctgccaccacggccagtgccaggacggcatcgacagctacacctgcatctgcaaccctggctacatgggcgccatctgcagcgaccagattgatgagtgctacagcagcccctgcctgaatgatggccgctgcatcgacctggtgaatggctaccagtgcaactgccagcccggcaccagcggcgtgaactgtgagatcaactttgatgactgtgccagcaacccctgcatccacggcatctgcatggatggcatcaaccgctacagctgtgtgtgcagccctggcttcaccggccagcgctgcaacattgatattgatgaatgtgccagcaacccctgcaggaaaggagccacctgcatcaatggagtgaatggcttccgctgcatctgcccagagggcccccaccaccccagctgctacagccaggtgaatgaatgtctgagcaacccctgcatccacggcaactgcacaggaggcctgagcggctacaagtgcctgtgtgatgctggctgggtgggcatcaactgtgaggtggacaagaatgaatgtctgagcaacccctgccagaatggaggcacctgtgacaacctggtgaatggctaccgctgcacctgcaagaagggcttcaagggctacaactgccaggtgaacattgatgaatgtgccagcaacccctgcctgaaccagggcacctgctttgatgacatcagcggctacacctgccactgtgtgctgccctacaccgggaagaactgccagacagtgctggccccctgcagccccaacccctgtgaaaatgctgctgtgtgcaaggagagccccaactttgagagctacacctgcctgtgtgcccctggctggcagggccagcgctgcaccatcgacattgatgagtgcatcagcaagccctgcatgaaccacggcctgtgccacaacacccagggcagctacatgtgtgagtgccccccaggcttcagcggcatggactgtgaggaggacattgatgactgcctggccaacccctgccagaatggaggcagctgcatggatggagtgaacaccttcagctgcctgtgcctgcccggcttcaccggggacaagtgccagacagacatgaatgaatgtctgtctgagccctgcaagaatggaggcacctgcagcgactatgtgaacagctacacctgcaagtgccaggccggctttgatggagtgcactgtgagaacaacatcaatgaatgtacagagagcagctgcttcaacggcggcacctgtgtggatggcatcaacagcttcagctgcctgtgccctgtgggcttcaccggcagcttctgcctgcacgagatcaatgaatgtagcagccacccctgcctgaatgaaggcacctgtgtggatggcctgggcacctaccgctgcagctgccccctgggctacaccgggaagaactgccagaccctggtgaacctgtgcagccgcagcccctgcaagaacaagggcacctgtgtgcagaagaaggccgagagccagtgcctgtgccccagcggctgggccggggcctactgtgatgtgcccaacgtgtcctgtgacattgctgccagcagaagaggagtgctggtggagcacctgtgccagcacagcggcgtgtgcatcaatgccggcaacacccactactgccagtgccccctgggctacacaggcagctactgtgaggagcagctggatgaatgtgccagcaacccctgccagcacggggccacctgcagcgacttcatcggcggctaccgctgtgaatgtgtgcccggctaccagggcgtgaactgtgaatatgaggtggatgagtgccagaaccagccctgccagaatggaggcacctgcatcgacctggtgaaccacttcaagtgcagctgccccccaggcacccggggcctgctgtgtgaggagaacattgatgactgtgcccggggcccccactgcctgaatggaggccagtgcatggacagaattggaggctacagctgccgctgcctgcccggctttgctggggagcgctgtgagggggacatcaatgaatgtctgagcaacccctgcagcagcgagggcagcctggactgcatccagctgaccaatgactacctgtgtgtgtgccgcagcgccttcaccggccgccactgtgagacctttgtggatgtgtgcccccagatgccctgcctgaatggaggcacctgtgctgtggccagcaacatgccagatggcttcatctgccgctgccccccaggcttcagcggggcccgctgccagagcagctgtggccaggtgaagtgcaggaaaggagagcagtgtgtgcacacagccagcggcccccgctgcttctgccccagcccccgggactgtgagagcggctgtgccagcagcccctgccagcacggcggcagctgccacccccagaggcagcccccctactacagctgccagtgtgccccacccttcagcggcagccgctgtgagctgtacacagccccacccagcaccccaccagccacctgcctgagccagtactgtgccgacaaggccagagatggagtgtgtgatgaggcctgcaacagccacgcctgccagtgggatggaggagactgcagcctgaccatggagaacccctgggccaactgcagcagccccctgccctgctgggactacatcaacaaccagtgtgatgagctgtgcaacacagtggagtgcctgtttgacaactttgagtgccagggcaacagcaagacctgcaagtatgacaagtactgtgccgaccacttcaaggacaaccactgtgaccagggctgcaacagcgaggagtgtggctgggatggcctggactgtgccgctgaccagcctgagaacctggccgagggcaccctggtgattgtggtgctgatgcctcctgagcagctgctgcaggatgcccggagcttcctgcgggccctgggcaccctgctgcacaccaacctgcgcatcaagagggacagccagggcgagctgatggtgtacccctactatggagagaagtctgctgccatgaagaagcagaggatgaccaggaggagcctgcctggagagcaggagcaggaggtggccggcagcaaggtgttcctggagattgacaaccggcagtgtgtgcaggacagcgaccactgcttcaagaacacagatgctgctgctgccctgctggccagccacgccatccagggcaccctgagctaccccctggtgtctgtggtgtctgagagcctgaccccagagaggacccagctgctgtacctgctggccgtggccgtggtgatcatcctcttcatcatcctgctgggcgtcatcatggccaagaggaagaggaagcacggcagcctgtggctgcctgagggcttcaccctgcggagagatgccagcaaccacaagaggcgggagcctgtgggccaggatgctgtgggcctgaagaacctgtctgtgcaggtgtctgaggccaacctgattggcaccggcaccagcgagcactgggtggatgatgagggcccccagcccaagaaggtgaaggccgaggatgaggccctgctgtctgaggaggatgaccccatcgaccggcggccctggacccagcagcacctggaggccgctgacatccggaggacccccagcctggccctgaccccaccccaggccgagcaggaggtggatgtgctggatgtgaatgtgcggggcccagatggctgcacccccctgatgctggccagcctgcggggcggcagcagtgacctgagtgatgaagatgaagatgctgaggacagcagcgccaacatcatcacagacctggtgtaccagggcgccagcctgcaggcccagacagacagaactggagagatggccctgcacctggccgcccgctacagcagagcagatgctgccaagaggctgctggatgctggagcagatgccaatgcccaggacaacatgggccgctgccccctgcacgccgctgtggccgcagatgcccagggcgtcttccagatcctgatccggaacagagtgacagacctggatgccaggatgaatgatggcaccacccccctcatcctggccgcccggctggccgtggagggcatggtggccgagctgatcaactgccaggctgatgtgaatgctgtggatgaccacggcaagagcgccctgcactgggccgctgctgtgaacaacgtggaggccaccctgctgctgctgaagaatggagccaacagagacatgcaggacaacaaggaggagacccccctcttcctggccgcccgggagggcagctatgaagctgccaagatcctgctggaccactttgccaacagagacatcacagaccacatggaccggctgcccagagatgtggcccgggacaggatgcaccacgacatcgtgcggctgctggatgagtacaacgtgacccccagccccccaggcaccgtgctgaccagcgccctgagccctgtgatctgtggccccaacagaagcttcctgagcctgaagcacacccccatgggcaagaagagccggcggcccagcgccaagagcaccatgcccaccagcctgcccaacctggccaaggaggccaaggatgccaagggcagcaggaggaagaagagcctgtctgagaaggtgcagctgtctgagagctctgtgaccctgagccctgtggacagcctggagagcccccacacctacgtgtctgacaccaccagcagccccatgatcaccagccctggcatcctgcaggccagccccaaccccatgctggccacagctgcccccccagcccctgtgcacgcccagcacgccctgtccttcagcaacctgcacgagatgcagcccctggcccacggggccagcacagtgctgcccagcgtgtcccagctgctgagccaccaccacatcgtgtccccaggcagcggcagcgctggcagcctgagccggctgcaccctgtgcctgtgcctgctgactggatgaacaggatggaggtgaatgagacccagtacaatgagatgtttggcatggtgctggccccagctgagggcacccaccctggcatcgccccccagagccggcccccagagggcaagcacatcaccaccccccgggagcccctgccccccatcgtgaccttccagctgatccccaagggcagcatcgcccagcctgctggggccccccagccccagagcacctgccccccagctgtggccggccccctgcccaccatgtaccagatccctgagatggcccggctgcccagcgtggccttccccacagccatgatgccccagcaggacggccaggtggcccagaccatcctgcctgcctaccaccccttccctgcctctgtgggcaagtaccccaccccacccagccagcacagctatgccagcagcaatgctgctgagaggacccccagccacagcggccacctgcagggcgagcacccctacctgacccccagccctgagagcccagaccagtggagcagcagcagcccccacagcgccagtgactggagcgatgtgaccaccagccccaccccaggaggagctgggggcggccagaggggccctggcacccacatgtctgagcccccccacaacaacatgcaggtgtatgcctag

SEQ ID NO: 162122 - DNA, 711 bp, synthetic construct
  misc_feature 1..711: note = Description of Artificial Sequence: Synthetic coding sequence
  source 1..711: mol_type = other DNA
atgtgtgtgacctaccacaatggaacaggctactgcaagtgcccagagggcttcctgggggagtactgccagcaccgggacccctgtgagaagaaccgctgccagaatggaggcacctgtgtggcccaggccatgctgggcaaggccacctgccgctgtgccagcggcttcaccggggaggactgccagtacagcaccagccacccctgctttgtgtcccggccctgcctgaatggaggcacctgccacatgctgagccgggacacctatgaatgtacctgccaggtgggcttcaccgggaaggagtgccagtggacagatgcctgcctgagccacccctgtgccaacggcagcacctgcaccaccgtggccaaccagttcagctgcaagtgcctgaccggcttcaccggccagaagtgtgaaacagatgtgaatgaatgtgacatccctggccactgccagcacggcggcacctgcctgaacctgcccggcagctaccagtgccagtgcccccagggcttcaccggccagtactgtgacagcctgtatgtgccctgtgcccccagcccctgtgtgaatggaggcacctgccggcagacaggagacttcacctttgagtgcaactgcctgcctgagaccgtgagaagaggaacagagctgtgggagcgggaccggcaggtgtggaatggcaaggagcatgatgaaaattag

SEQ ID NO: 162123 - DNA, 720 bp, synthetic construct
  misc_feature 1..720: note = Description of Artificial Sequence: Synthetic coding sequence
  source 1..720: mol_type = other DNA
tgcagagatggctatgagccctgtgtgaatgaaggcatgtgtgtgacctaccacaatggaacaggctactgcaagtgcccagagggcttcctgggggagtactgccagcaccgggacccctgtgagaagaaccgctgccagaatggaggcacctgtgtggcccaggccatgctgggcaaggccacctgccgctgtgccagcggcttcaccggggaggactgccagtacagcaccagccacccctgctttgtgtcccggccctgcctgaatggaggcacctgccacatgctgagccgggacacctatgaatgtacctgccaggtgggcttcaccgggaaggagtgccagtggacagatgcctgcctgagccacccctgtgccaacggcagcacctgcaccaccgtggccaaccagttcagctgcaagtgcctgaccggcttcaccggccagaagtgtgaaacagatgtgaatgaatgtgacatccctggccactgccagcacggcggcacctgcctgaacctgcccggcagctaccagtgccagtgcccccagggcttcaccggccagtactgtgacagcctgtatgtgccctgtgcccccagcccctgtgtgaatggaggcacctgccggcagacaggagacttcacctttgagtgcaactgcctgcctgcctgctggcccaggaccccagacctgcggctgctgctgggggagaagtag

SEQ ID NO: 162124 - DNA, 672 bp, synthetic construct
  misc_feature 1..672: note = Description of Artificial Sequence: Synthetic coding sequence
  source 1..672: mol_type = other DNA
atgtggatctgccctgggggcggcggcggcggcggcggcggcggggaccgggaggatgcccggccccccctgtgctgcggccgctgctggaggagcggctgtgccgcccggccccccaggatggtgtccatcggcctgcggggagctgtgcggggggcccggggctgccacctgggccggcccttcagccccagcgtgctgctgtgtgtgggccggcccggcagcgctgctggagctgagcggggccacagcctgggcagccaggagtttggccacagaagaggccccctgccctggtgcccagccaacagaagaggcagcccccccagcgccccccggggccctggccccctgacccggctgctgggccggcgggaggccggcagcaagagccagaagctgctcttccgcagcgcccgggtgcagggcggcggccagttctgccccagcggcagcgccttcctgggcgtggagcgggagcccacagctggcctgggcggcgctgagaggagaaatgcccgcttctggagaggagagcggggccagggccggcaggccaagaggcctgcccccagccagcctgccagccccctgcccggcggcggcacctgggccggctgtgtgggcctggtgtggatgggcaccggcttctgtggggcccctgagttctag

SEQ ID NO: 162125 - DNA, 2592 bp, synthetic construct
  misc_feature 1..2592: note = Description of Artificial Sequence: Synthetic coding sequence
  source 1..2592: mol_type = other DNA
atgtgtgtgacctaccacaatggaacaggctactgcaagtgcccagagggcttcctgggggagtactgccagcaccgggacccctgtgagaagaaccgctgccagaatggaggcacctgtgtggcccaggccatgctgggcaaggccacctgccgctgtgccagcggcttcaccggggaggactgccagtacagcaccagccacccctgctttgtgtcccggccctgcctgaatggaggcacctgccacatgctgagccgggacacctatgaatgtacctgccaggtgggcttcaccgggaaggagtgccagtggacagatgcctgcctgagccacccctgtgccaacggcagcacctgcaccaccgtggccaaccagttcagctgcaagtgcctgaccggcttcaccggccagaagtgtgaaacagatgtgaatgaatgtgacatccctggccactgccagcacggcggcacctgcctgaacctgcccggcagctaccagtgccagtgcccccagggcttcaccggccagtactgtgacagcctgtatgtgccctgtgcccccagcccctgtgtgaatggaggcacctgccggcagacaggagacttcacctttgagtgcaactgcctgcccggctttgagggcagcacctgtgagaggaacattgatgactgccccaaccaccgctgccagaatggaggagtgtgtgtggatggagtgaacacctacaactgccgctgccccccccagtggacaggccagttctgcacagaagatgtggatgagtgcctgctgcagcccaatgcctgccagaatggaggcacctgtgccaacagaaatggaggctacggctgtgtgtgtgtgaatggctggagcggagatgactgcagcgagaacattgatgactgtgcctttgccagctgcaccccaggcagcacctgcatcgacagagtggccagcttcagctgcatgtgcccagagggcaaggccggcctgctgtgccacctggatgatgcctgcatcagcaacccctgccacaagggggccctgtgtgacaccaaccccctgaatggccagtacatctgcacctgcccccagggctacaagggagctgactgcacagaagatgtggatgaatgtgccatggccaacagcaacccctgtgagcacgccgggaaatgtgtgaacacagatggagccttccactgtgagtgcctgaagggctacgccggcccccgctgtgagatggacatcaatgaatgccacagcgacccctgccagaatgatgccacctgcctggacaagattggaggcttcacctgcctgtgcatgcctggcttcaagggcgtgcactgtgagctggagatcaatgaatgccagagcaacccctgtgtgaacaacggccagtgtgtggacaaggtgaaccgcttccagtgcctgtgccccccaggcttcaccggccctgtgtgccagattgatattgatgactgcagcagcaccccctgcctgaatggagccaagtgcatcgaccaccccaacggctatgagtgccagtgtgccaccggcttcaccggggtgctgtgtgaggagaacatcgacaactgtgaccctgacccctgccaccacggccagtgccaggacggcatcgacagctacacctgcatctgcaaccctggctacatgggcgccatctgcagcgaccagattgatgagtgctacagcagcccctgcctgaatgatggccgctgcatcgacctggtgaatggctaccagtgcaactgccagcccggcaccagcggcgtgaactgtgagatcaactttgatgactgtgccagcaacccctgcatccacggcatctgcatggatggcatcaaccgctacagctgtgtgtgcagccctggcttcaccggccagcgctgcaacatcgacattgatgaatgtgccagcaacccctgcaggaagggggccacctgcatcaacggggtgaatggcttccgctgcatctgcccagagggcccccaccaccccagctgctacagccaggtgaatgaatgtctgagcaacccctgcatccacggcaactgcaccggcggcctgagcggctacaagtgcctgtgtgatgctggctgggtgggcatcaactgtgaggtggacaagaatgaatgtctgagcaacccctgccagaatggaggcacctgtgacaacctggtgaatggctaccgctgcacctgcaagaagggcttcaagggctacaactgccaggtgaacattgatgaatgtgccagcaacccctgcctgaaccagggcacctgctttgatgacatcagcggctacacctgccactgtgtgctgccctacacaggaggctcctggagataccagcagggccctgagggcatcctggacctggccctgtctgtgcctgagagccagtgccccggcctgtggggctgcaatgccccaccccgggcccacagctctgtggtgctgcctgccttcacagactggatcctgagctttgaggagaccctgtggccacccaagatgcaggtggtggacagccacctgcccaccctgtacttcagcatctag

SEQ ID NO: 162126 - DNA, 6966 bp, synthetic construct
  misc_feature 1..6966: note = Description of Artificial Sequence: Synthetic coding sequence
  source 1..6966: mol_type = other DNA
atgggccctggggcccggggcagaagaagaagaagaagacccatgagccccccacctcctcctcctcctgtgcgggccctgcccctgctgctgctgctggccggccctggagctgctgccccaccctgcctggatggcagcccctgtgccaatggaggccgctgcacccagctgcccagccgggaggccgcctgcctgtgccccccaggctgggtgggggagcgctgccagctggaggacccctgccacagcggcccctgtgccggccggggcgtgtgccagagctctgtggtggccggcacagcccgcttcagctgccgctgcccccggggcttccggggccctgactgcagcctgcctgacccctgcctgagcagcccctgtgcccacggggcccgctgcagcgtgggcccagatggccgcttcctgtgcagctgccccccaggctaccagggccgcagctgccgcagtgatgtggatgaatgtcgggtgggggagccctgccgccacggcggcacctgcctgaacaccccaggcagcttccgctgccagtgcccagctggctacacaggccccctgtgtgaaaatcctgctgtgccctgtgcccccagcccctgcagaaatggaggcacctgccggcagagcggggacctgacctatgactgtgcctgcctgcccggctttgagggccagaactgtgaggtgaatgtggatgactgccccggccaccgctgcctgaatggaggcacctgtgtggatggagtgaacacctacaactgccagtgccccccagagtggacaggccagttctgcacagaagatgtggatgagtgccagctgcagcccaatgcctgccacaatggaggcacctgcttcaacaccctgggcggccacagctgtgtgtgtgtgaatggctggacaggagagagctgcagccagaacattgatgactgtgccacagctgtgtgcttccatggagccacctgccacgacagagtggccagcttctactgtgcctgccccatgggcaagacaggcctgctgtgccacctggatgatgcctgtgtgagcaacccctgccatgaagatgccatctgtgacaccaaccctgtgaatggccgggccatctgcacctgccccccaggcttcaccggcggggcctgtgaccaggatgtggatgagtgcagcattggagccaacccctgtgagcacctgggccgctgtgtgaacacccagggcagcttcctgtgccagtgtggccggggctacacaggcccccgctgtgaaacagatgtgaatgaatgtctgagcggcccctgcaggaaccaggccacctgcctggaccgcatcggccagttcacctgcatctgcatggccggcttcaccggcacctactgtgaggtggacattgatgagtgccagagcagcccctgtgtgaatggaggagtgtgcaaggacagagtgaatggcttcagctgcacctgccccagcggcttcagcggcagcacctgccagctggatgtggatgaatgtgccagcaccccctgcagaaatggagccaagtgtgtggaccagccagatggctatgagtgccgctgtgccgagggctttgagggcaccctgtgtgacagaaatgtggatgactgcagcccagacccctgccaccacggccgctgtgtggatggcatcgccagcttcagctgtgcctgtgcccctggctacacaggcacccgctgtgagagccaggtggatgaatgtcgcagccagccctgcagacatggaggcaagtgcctggacctggtggacaagtacctgtgccgctgccccagcggcaccactggagtgaactgtgaggtgaacattgatgactgtgccagcaacccctgcacctttggagtgtgcagagatggcatcaacagatatgactgtgtgtgccagcccggcttcaccggccccctgtgcaatgtggagatcaatgaatgtgccagcagcccctgtggggagggcggcagctgtgtggatggagaaaatggcttccgctgcctgtgccccccaggcagcctgccccccctgtgcctgccccccagccacccctgtgcccacgagccctgcagccacggcatctgctatgatgcccctgggggcttccgctgtgtgtgtgagcccggctggagcggcccccgctgcagccagagcctggccagagatgcctgtgagagccagccctgcagagctgggggcacctgcagcagtgatggcatgggcttccactgcacctgccccccaggagtgcagggccggcagtgtgagctgctgagcccctgcacccccaacccctgtgagcacggcggccgctgtgagagcgcccctggccagctgcctgtgtgcagctgcccccagggctggcagggcccccgctgccagcaggatgtggatgaatgtgccggccctgccccctgtggcccccacggcatctgcaccaacctggccggcagcttcagctgcacctgccacggcggctacacaggccccagctgtgaccaggacatcaatgactgtgaccccaacccctgcctgaatggaggcagctgccaggatggagtgggcagcttcagctgcagctgcctgcccggctttgctggcccccgctgtgccagagatgtggatgagtgcctgagcaacccctgtggccctggcacctgcacagaccacgtggccagcttcacctgcacctgccccccaggctacggcggcttccactgtgagcaggacctgcctgactgcagccccagcagctgcttcaatggaggcacctgtgtggatggagtgaacagcttcagctgcctgtgccggcccggctacacaggagcccactgccagcatgaagctgacccctgcctgagccggccctgcctgcatggaggagtgtgcagcgctgcccaccctggcttccgctgcacctgcctggagagcttcaccggcccccagtgccagaccctggtggactggtgcagccggcagccctgccagaatggaggccgctgtgtgcagacaggagcctactgcctgtgccccccaggctggagcggccgcctgtgtgacatccgcagcctgccctgccgggaggccgccgcccagattggagtgcggctggagcagctgtgccaggccggcggccagtgtgtggatgaggacagcagccactactgtgtgtgcccagagggccgcacaggcagccactgtgagcaggaggtggacccctgcctggcccagccctgccagcacggcggcacctgccggggctacatgggcggctacatgtgtgaatgtctgcccggctacaatggagacaactgtgaagatgatgtggatgaatgtgccagccagccctgccagcacggcggcagctgcatcgacctggtggcccgctacctgtgcagctgccccccaggcaccctgggcgtgctgtgtgagatcaatgaagatgactgtggccctggcccccccctggacagcggcccccgctgcctgcacaacggcacctgtgtggacctggtgggcggcttccgctgcacctgccccccaggctacacaggcctgcgctgtgaggccgacatcaatgaatgtagaagtggggcctgccacgccgcccacacccgggactgcctgcaggaccccggcggcggcttccgctgcctgtgccacgccggcttcagcggcccccgctgccagacagtgctgagcccctgtgagagccagccctgccagcacggcggccagtgccggcccagccctggccctgggggcggcctgaccttcacctgccactgtgcccagcccttctggggcccccgctgtgagcgggtggcccggagctgccgggagctgcagtgccctgtgggcgtgccctgccagcagaccccccggggcccccgctgtgcctgccccccaggcctgagcggccccagctgccgctccttccctggcagccccccaggggccagcaatgccagctgtgccgccgccccctgcctgcacggcggcagctgcaggcctgcccccctggcccccttcttccgctgtgcctgtgcccagggctggacaggcccccgctgtgaggccccagctgctgcccctgaggtgtctgaggagccccgctgcccccgggccgcctgccaggccaagagaggagaccagagatgtgaccgggagtgcaacagccctggctgcggctgggatggaggagactgcagcctgtctgtgggggacccctggaggcagtgtgaggccctgcagtgctggaggctcttcaacaacagccgctgtgaccctgcctgcagcagccctgcctgcctgtatgacaactttgactgccacgccggcggccgggagaggacctgcaaccctgtgtatgagaagtactgtgccgaccactttgctgatggccgctgtgaccagggctgcaacacagaggagtgtggctgggatggcctggactgtgccagcgaggtgcctgccctgctggcccggggcgtgctggtgctgactgtgctgctgcccccagaggagctgctgcggagcagcgctgacttcctgcagaggctgagcgccatcctgcggaccagcctgcgcttccggctggatgcccacggccaggccatggtgttcccctaccaccggcccagccctggcagcgagccccgggcccggcgggagctggcccctgaggtgattggctctgtggtgatgctggagattgacaaccggctgtgcctgcagagcccagaaaatgaccactgcttcccagatgcccagagcgctgctgactacctgggcgccctgtctgctgtggagcggctggacttcccctaccccctgagagatgtgcggggggagcccctggagcccccagagcccagcgtgcccctgctgcccctgctggtggccggggctgtgctgctgctggtgatcctggtgctgggcgtgatggtggcccggaggaagcgggagcacagcaccctgtggttccctgagggcttcagcctgcacaaggatgtggccagcggccacaagggcagaagagagcctgtgggccaggatgccctgggcatgaagaacatggccaagggggagagcctgatgggagaggtggccacagactggatggacacagaatgtcctgaggccaagaggctgaaggtggaggagcccggcatgggcgctgaggaggccgtggactgccggcagtggacccagcaccacctggtggccgctgacatccgggtggccccagccatggccctgaccccaccccagggagatgctgatgctgatggcatggatgtgaatgtgcggggcccagatggcttcacccccctgatgctggccagcttctgtggcggggccctggagcccatgcccacagaggaggatgaagcagatgacaccagcgccagcatcatcagtgacctgatctgccagggcgcccagctgggcgccaggacagacagaactggagaaacagccctgcacctggccgcccgctatgcccgggcagatgctgccaagaggctgctggatgctggagctgacaccaatgcccaggaccacagcggccgcacccccctgcacacagctgtgacagcagatgcccagggcgtcttccagatcctgatccggaacagaagcacagacctggatgccaggatggctgatggcagcacagccctgatcctggccgcccggctggccgtggagggcatggtggaggagctgattgccagccatgctgatgtgaatgctgtggatgagctgggcaagagcgccctgcactgggccgctgctgtgaacaacgtggaggccaccctggccctgctgaagaatggagccaacaaggacatgcaggacagcaaggaggagacccccctcttcctggccgcccgggagggcagctatgaagctgccaagctgctgctggaccactttgccaaccgggagatcacagaccacctggaccggctgcccagagatgtggcccaggagcggctgcaccaggacatcgtgcggctgctggaccagcccagcggccccaggagccccccaggcccccacggcctgggccccctgctgtgccccccaggggccttcctgcccggcctgaaggccgcccagagcggcagcaagaagagccggcggcccccaggcaaggccggcctgggcccccagggcccccggggccggggcaagaagctgaccctggcctgccccggccccctggccgacagctctgtgaccctgagccctgtggacagcctggacagcccccggccctttggaggccccccagccagccctgggggcttccccctggagggcccctatgctgctgccacagccacagctgtgtccctggcccagctgggcggccctggccgggccggcctgggccggcagcccccaggcggctgtgtgctgagcctgggcctgctgaaccctgtggccgtgcccctggactgggcccggctgcccccaccagcccctcctggccccagcttcctgctgcccctggcccctggcccccagctgctgaaccctggcacccctgtgagcccccaggagcggcccccaccctacctggccgtgcccggccatggagaggagtacccagctgctggggcccacagcagcccccccaaggcccgcttcctgcgggtgcccagcgagcacccctacctgacccccagccctgagagccctgagcactgggccagccccagcccccccagcctgagtgactggagcgagagcacccccagccctgccacagccactggagccatggccaccaccaccggggccctgcctgcccagcccctgcccctgtctgtgcccagcagcctggcccaggcccagacccagctgggcccccagcctgaggtgacccccaagaggcaggtgctggcctag

SEQ ID NO: 162127 - DNA, 3867 bp, synthetic construct
  misc_feature 1..3867: note = Description of Artificial Sequence: Synthetic coding sequence
  source 1..3867: mol_type = other DNA
gctgccatgggccctggggcccggggcagaagaagaagaagaagacccatgagccccccacctcctcctcctcctgtgcgggccctgcccctgctgctgctgctggccggccctggagctgctgccccaccctgcctggatggcagcccctgtgccaatggaggccgctgcacccagctgcccagccgggaggccgcctgcctgtgccccccaggctgggtgggggagcgctgccagctggaggacccctgccacagcggcccctgtgccggccggggcgtgtgccagagctctgtggtggccggcacagcccgcttcagctgccgctgcccccggggcttccggggccctgactgcagcctgcctgacccctgcctgagcagcccctgtgcccacggggcccgctgcagcgtgggcccagatggccgcttcctgtgcagctgccccccaggctaccagggccgcagctgccgcagtgatgtggatgaatgtcgggtgggggagccctgccgccacggcggcacctgcctgaacaccccaggcagcttccgctgccagtgcccagctggctacacaggccccctgtgtgaaaatcctgctgtgccctgtgcccccagcccctgcagaaatggaggcacctgccggcagagcggggacctgacctatgactgtgcctgcctgcccggctttgagggccagaactgtgaggtgaatgtggatgactgccccggccaccgctgcctgaatggaggcacctgtgtggatggagtgaacacctacaactgccagtgccccccagagtggacaggccagttctgcacagaagatgtggatgagtgccagctgcagcccaatgcctgccacaatggaggcacctgcttcaacaccctgggcggccacagctgtgtgtgtgtgaatggctggacaggagagagctgcagccagaacattgatgactgtgccacagctgtgtgcttccatggagccacctgccacgacagagtggccagcttctactgtgcctgccccatgggcaagacaggcctgctgtgccacctggatgatgcctgtgtgagcaacccctgccatgaagatgccatctgtgacaccaaccctgtgaatggccgggccatctgcacctgccccccaggcttcaccggcggggcctgtgaccaggatgtggatgagtgcagcattggagccaacccctgtgagcacctgggccgctgtgtgaacacccagggcagcttcctgtgccagtgtggccggggctacacaggcccccgctgtgaaacagatgtgaatgaatgtctgagcggcccctgcaggaaccaggccacctgcctggaccgcatcggccagttcacctgcatctgcatggccggcttcaccggcacctactgtgaggtggacattgatgagtgccagagcagcccctgtgtgaatggaggagtgtgcaaggacagagtgaatggcttcagctgcacctgccccagcggcttcagcggcagcacctgccagctggatgtggatgaatgtgccagcaccccctgcagaaatggagccaagtgtgtggaccagccagatggctatgagtgccgctgtgccgagggctttgagggcaccctgtgtgacagaaatgtggatgactgcagcccagacccctgccaccacggccgctgtgtggatggcatcgccagcttcagctgtgcctgtgcccctggctacacaggcacccgctgtgagagccaggtggatgaatgtcgcagccagccctgcagacatggaggcaagtgcctggacctggtggacaagtacctgtgccgctgccccagcggcaccactggagtgaactgtgaggtgaacattgatgactgtgccagcaacccctgcacctttggagtgtgcagagatggcatcaacagatatgactgtgtgtgccagcccggcttcaccggccccctgtgcaatgtggagatcaatgaatgtgccagcagcccctgtggggagggcggcagctgtgtggatggagaaaatggcttccgctgcctgtgccccccaggcagcctgccccccctgtgcctgccccccagccacccctgtgcccacgagccctgcagccacggcatctgctatgatgcccctgggggcttccgctgtgtgtgtgagcccggctggagcggcccccgctgcagccagagcctggccagagatgcctgtgagagccagccctgcagagctgggggcacctgcagcagtgatggcatgggcttccactgcacctgccccccaggagtgcagggccggcagtgtgagctgctgagcccctgcacccccaacccctgtgagcacggcggccgctgtgagagcgcccctggccagctgcctgtgtgcagctgcccccagggctggcaggacccctgcctgaatggaggcagctgccaggatggagtgggcagcttcagctgcagctgcctgcccggctttgctggcccccgctgtgccagagatgtggatgagtgcctgagcaacccctgtggccctggcacctgcacagaccacgtggccagcttcacctgcacctgccccccaggctacggcggcttccactgtgagcaggacctgcctgactgcagccccagcagctgcttcaatggaggcacctgtgtggatggagtgaacagcttcagctgcctgtgccggcccggctacacaggagcccactgccagcatgaagctgacccctgcctgagccggccctgcctgcatggaggagtgtgcagcgctgcccaccctggcttccgctgcacctgcctggagagcttcaccggcccccagtgccagaccctggtggactggtgcagccggcagccctgccagaatggaggccgctgtgtgcagacaggagcctactgcctgtgccccccaggctggagcggccgcctgtgtgacatccgcagcctgccctgccgggaggccgccgcccagattggagtgcggctggagcagctgtgccaggccggcggccagtgtgtggatgaggacagcagccactactgtgtgtgcccagagggccgcacaggcagccactgtgagcaggaggtggacccctgcctggcccagccctgccagcacggcggcacctgccggggctacatgggcggctacatgtgtgaatgtctgcccggctacaatggagacaactgtgaagatgatgtggatgaatgtgccagccagccctgccagcacggcggcagctgcatcgacctggtggcccgctacctgtgcagctgccccccaggcaccctgggcgtgctgtgtgagatcaatgaagatgactgtggccctggcccccccctggacagcggcccccgctgcctgcacaacggcacctgtgtggacctggtgggcggcttccgctgcacctgccccccaggctacacaggcctgcgctgtgaggccgacatcaatgaatgtagaagtggggcctgccacgccgcccacacccgggactgcctgcaggaccccggcggcggcttccgctgcctgtgccacgccggcttcagcggcccccgctgccagacagtgctgagcccctgtgagagccagccctgccagcacggcggccagtgccggcccagccctggccctgggggcggcctgaccttcacctgccactgtgcccagcccttctggggcccccgctgtgagcgggtggcccggagctgccgggagctgcagtgccctgtgggcgtgccctgccagcagaccccccggggcccccgctgtgcctgccccccaggcctgagcggccccagctgccgctccttccctggcagccccccaggggccagcaatgccagctag

SEQ ID NO: 162128 - DNA, 6012 bp, synthetic construct
  misc_feature 1..6012: note = Description of Artificial Sequence: Synthetic coding sequence
  source 1..6012: mol_type = other DNA
atgcagccccccagcctgctgctgctgctgctgctgctgctgctgctgtgtgtgtctgtggtgcggccccggggcctgctgtgtggcagcttccctgagccctgtgccaatggaggcacctgcctgagcctgagcctgggccagggcacctgccagtgtgcccctggcttcctgggggagacctgccagttcccagacccctgccagaatgcccagctgtgccagaatggaggcagctgccaggccctgctgcctgcccccctgggcctgcccagcagccccagccccctgacccccagcttcctgtgcacctgcctgcccggcttcaccggggagcgctgccaggccaagctggaggacccctgccccccatccttctgcagcaagaggggccgctgccacatccaggccagcggccggccccagtgcagctgcatgcctggctggacaggagagcagtgccagctgcgggacttctgcagcgccaacccctgtgtgaatggaggagtgtgcctggccacctacccccagatccagtgccactgccccccaggctttgagggccacgcctgtgaaagagatgtgaatgaatgcttccaggaccccggcccctgccccaagggcaccagctgccacaacaccctgggcagcttccagtgcctgtgccctgtgggccaggagggcccccgctgtgagctgcgggccggcccctgccccccccggggctgcagcaatggaggcacctgccagctgatgcctgagaaggacagcaccttccacctgtgcctgtgccccccaggcttcatcggccctgactgtgaggtgaacccagacaactgtgtgagccaccagtgccagaatggaggcacctgccaggacggcctggacacctacacctgcctgtgcccagagacctggacaggctgggactgcagtgaagatgtggatgaatgtgagacccagggccccccccactgcagaaatggaggcacctgccagaacagcgctggcagcttccactgtgtgtgtgtgtctggctggggcggcaccagctgtgaggagaacctggatgactgcatcgccgccacctgtgcccctggcagcacctgcatcgacagagtgggcagcttcagctgcctgtgccccccaggccgcacaggcctgctgtgccacctggaggacatgtgcctgagccagccctgccacggagatgcccagtgcagcaccaaccccctgaccggcagcaccctgtgcctgtgccagcccggctacagcggccccacctgccaccaggacctggatgaatgtctgatggcccagcagggccccagcccctgtgagcacggcggcagctgcctgaacaccccaggcagcttcaactgcctgtgccccccaggctacacaggcagccgctgtgaggccgaccacaatgaatgtctgagccagccctgccaccctggcagcacctgcctggacctgctggccaccttccactgcctgtgccccccaggcctggagggccagctgtgtgaggtggagaccaatgaatgtgccagcgccccctgcctgaaccacgccgactgccacgacctgctgaatggcttccagtgcatctgcctgcccggcttcagcggcacccgctgtgaggaggacattgatgagtgccgcagcagcccctgtgccaacggcggccagtgccaggaccagcccggggccttccactgcaagtgcctgcccggctttgagggcccccgctgccagacagaggtggatgagtgcctgagtgacccctgccctgtgggcgccagctgcctggacctgcccggggccttcttctgcctgtgccccagcggcttcaccggccagctgtgtgaggtgcccctgtgtgcccccaacctgtgccagcccaagcagatctgcaaggaccagaaggacaaggccaactgcctgtgcccagatggcagccctggctgtgcccctcctgaggacaactgcacctgccaccacggccactgccagaggagcagctgtgtgtgtgatgtgggctggacaggcccagaatgtgaggccgagctgggcggctgcatcagcgccccctgtgcccacggcggcacctgctacccccagcccagcggctacaactgcacctgccccaccggctacacaggccccacctgcagcgaggagatgacagcctgccacagcggcccctgcctgaatggaggcagctgcaaccccagccctgggggctactactgcacctgcccccccagccacacaggcccccagtgccagaccagcacagactactgtgtgtctgccccctgcttcaacggcggcacctgtgtgaaccggcccggcaccttcagctgcctgtgtgccatgggcttccagggcccccgctgtgagggcaagctgcggcccagctgtgccgacagcccctgcaggaacagagccacctgccaggacagcccccagggcccccgctgcctgtgccccaccggctacacaggaggcagctgccagaccctgatggacctgtgtgcccagaagccctgccccaggaacagccactgcctgcagacaggccccagcttccactgcctgtgcctgcagggctggacaggccccctgtgcaacctgcccctgagcagctgccagaaggccgccctgagccagggcattgatgtgagcagcctgtgccacaatggaggcctgtgtgtggacagcggccccagctacttctgccactgccccccaggcttccagggcagcctgtgccaggaccacgtgaacccctgtgagagccggccctgccagaatggagccacctgcatggcccagcccagcggctacctgtgccagtgtgcccctggctatgatggccagaactgcagcaaggagctggatgcctgccagagccagccctgccacaaccacggcacctgcacccccaagccaggcggcttccactgtgcctgccccccaggctttgtgggcctgcgctgtgaaggagatgtggatgaatgtctggaccagccctgccaccccaccggcacagctgcctgccacagcctggccaatgccttctactgccagtgcctgcccggccacacaggccagtggtgtgaggtggagattgacccctgccacagccagccctgcttccatggaggcacctgtgaggccacagctggcagccccctgggcttcatctgccactgccccaagggctttgagggccccacctgcagccaccgggcccccagctgtggcttccaccactgccaccacggcggcctgtgcctgcccagccccaagccaggcttccccccaagatgtgcctgcctgagcggctacggcggccctgactgcctgaccccaccagcccccaagggctgcggcccccccagcccctgcctgtacaacggcagctgcagcgagaccaccggcctgggcggccctggcttccgctgcagctgcccccacagcagccctggcccccgctgccagaagccaggggccaagggctgtgagggccgctctggagatggagcctgtgatgctggctgcagcggccctgggggcaactgggatggaggagactgcagcctgggcgtgcctgacccctggaagggctgccccagccacagccgctgctggctgctcttcagagatggccagtgccacccccagtgtgacagtgaagaatgtctgtttgatggctatgactgtgagaccccaccagcctgcaccccagcctatgaccagtactgccacgaccacttccacaacggccactgtgagaagggctgcaacacagcagaatgtggctgggatggaggagactgcaggccagaagatggagaccctgagtggggccccagcctggccctgctggtggtgctgagccccccagccctggaccagcagctgtttgccctggcccgggtgctgagcctgaccctgcgggtgggcctgtgggtgaggaaggacagagatggccgggacatggtgtacccctacccaggggcccgggcagaggagaagctgggcggcacccgggaccccacctaccaggagagagctgccccccagacccagcccctgggcaaggagacagacagcctgtctgctggctttgtggtggtgatgggcgtggacctgagccgctgtggccctgaccacccagccagccgctgcccctgggaccccggcctgctgctgcgcttcctggccgccatggctgctgtgggcgccctggagcccctgctgcccggccccctgctggccgtgcacccccacgccggcacagcccccccagccaaccagctgccctggcctgtgctgtgcagccctgtggccggggtcatcctgctggccctgggcgccctgctggtgctgcagctgatcagaagaagaagaagagagcacggggccctgtggctgcccccaggcttcacccggcggcccaggacccagagcgccccccacagaagaagaccacccctgggggaggacagcatcggcctgaaggccctgaagcccaaggccgaggtggatgaagatggagtggtgatgtgcagcggccctgaggagggggaggaggtgggccaggccgaggagactggaccacccagcacctgccagctgtggagcctgagcggcggctgtggggccctgccccaggccgccatgctgaccccaccccaggagagcgagatggaggccccagacctggacacccggggcccagatggagtgacccccctgatgtctgctgtgtgctgcggggaggtgcagagcggcaccttccagggcgcctggctgggctgcccagagccctgggagcccctgctggatggaggagcctgcccccaggcccacacagtgggcactggagagacccccctgcacctggccgcccgcttcagccggcccacagctgcccggcggctgctggaggccggggccaaccccaaccagcctgaccgggccggccgcacccccctgcatgctgctgtggccgcagatgcccgggaggtgtgccagctgctgctgcggagccggcagacagctgtggatgccaggacagaagatggcaccacccccctgatgctggccgcccggctggccgtggaggacctggtggaggagctgattgctgcccaggctgatgtgggcgcccgggacaagtggggcaagacagccctgcactgggccgctgctgtgaacaatgcccgggccgcccggagcctgctgcaggccggggctgacaaggatgcccaggacaaccgggagcagacccccctcttcctggccgcccgggagggcgctgtggaggtggcccagctgctgctgggcctgggcgccgcccgggagctgcgggaccaggccggcctggccccagcagatgtggcccaccagaggaaccactgggacctgctgaccctgctggagggcgccggccccccagaggcccggcacaaggccaccccaggccgggaggccggccccttcccccgggccaggacagtgtctgtgtctgtgccccctcatggaggaggagccctgccccgctgcaggaccctgtctgctggggccggcccccggggcggcggggcctgcctgcaggcccggacctggagcgtggacctggccgcccggggcggcggggcctacagccactgccgcagcctgtctggagtgggcgccggcggcggccccaccccccggggccgccgcttctctgctggcatgaggggcccccggcccaacccagccatcatgaggggccgctatggagtggccgccggccggggcggccgggtgtccacagatgactggccctgtgactgggtggccctgggcgcctgtggcagcgccagcaacatccccatccccccaccctgcctgacccccagccctgagcggggcagcccccagctggactgtggccccccagccctgcaggagatgcccatcaaccagggcggggagggcaagaagtag

SEQ ID NO: 162129 - DNA, 3147 bp, synthetic construct
  misc_feature 1..3147: note = Description of Artificial Sequence: Synthetic coding sequence
  source 1..3147: mol_type = other DNA
tgtgcccctggctatgatggccagaactgcagcaaggagctggatgcctgccagagccagccctgccacaaccacggcacctgcacccccaagccaggcggcttccactgtgcctgccccccaggctttgtgggcctgcgctgtgaaggagatgtggatgagtgcctggaccagccctgccaccccactggaacagctgcctgccacagcctggccaatgccttctactgccagtgcctgcccggccacacaggccagtggtgtgaggtggagattgacccctgccacagccagccctgcttccacggcggcacctgtgaggccacagctggcagccccctgggcttcatctgccactgccccaagggctttgagggccccacctgcagccaccgggcccccagctgtggcttccaccactgccaccacggcggcctgtgcctgcccagccccaagccaggcttccccccaagatgtgcctgcctgagcggctatggaggccctgactgcctgaccccaccagcccccaagggctgcggcccccccagcccctgcctgtacaacggcagctgcagcgagaccaccggcctgggcggccctggcttccgctgcagctgcccccacagcagccctggcccccgctgccagaagccaggggccaagggctgtgagggccgctctggagatggagcctgtgatgctggctgcagcggccctgggggcaactgggatggaggagactgcagcctgggcgtgcctgacccctggaagggctgccccagccacagccgctgctggctgctcttcagagatggccagtgccacccccagtgtgacagcgaggagtgcctgtttgatggctatgactgtgagaccccaccagcctgcaccccagcctatgaccagtactgccacgaccacttccacaacggccactgtgagaagggctgcaacacagcagaatgtggctgggatggaggagactgcaggccagaagatggagaccctgagtggggccccagcctggccctgctggtggtgctgagccccccagccctggaccagcagctgtttgccctggcccgggtgctgagcctgaccctgcgggtgggcctgtgggtgaggaaggacagagatggccgggacatggtgtacccctacccaggggcccgggcagaggagaagctgggcggcacccgggaccccacctaccaggagcgggccgccccccagacccagcccctgggcaaggagacagacagcctgtctgctggctttgtggtggtgatgggcgtggacctgagccgctgtggccctgaccacccagccagccgctgcccctgggaccccggcctgctgctgcgcttcctggccgccatggctgctgtgggcgccctggagcccctgctgcccggccccctgctggccgtgcacccccatgctggaacagcccccccagccaaccagctgccctggcctgtgctgtgcagccctgtggccggggtcatcctgctggccctgggcgccctgctggtgctgcagctgatcagaagaagaagaagagaacatggagccctgtggctgcccccaggcttcacccggcggcccaggacccagagcgccccccacagaagaagaccacccctgggagaagattccatcggcctgaaggccctgaagcccaaggccgaggtggatgaagatggagtggtgatgtgcagcggccctgaggagggggaggaggtgggccaggccgaggagaccggcccccccagcacctgccagctgtggagcctgagcggcggctgtggggccctgccccaggccgccatgctgaccccaccccaggagagcgagatggaggccccagacctggacacccggggcccagatggagtgacccccctgatgtctgctgtgtgctgcggggaggtgcagagcggcaccttccagggcgcctggctgggctgcccagagccctgggagcccctgctggatggaggagcctgcccccaggcccacacagtgggcaccggggagacccccctgcacctggccgcccgcttcagccggcccacagctgcccggcggctgctggaggccggggccaaccccaaccagcctgacagagctggccgcacccccctgcacgccgctgtggccgcagatgcccgggaggtgtgccagctgctgctgcggagccggcagacagctgtggatgccaggacagaagatggcaccacccccctgatgctggccgcccggctggccgtggaggacctggtggaggagctgattgctgcccaggctgatgtgggcgcccgggacaagtggggcaagacagccctgcactgggccgctgctgtgaacaatgcccgggccgcccggagcctgctgcaggccggggctgacaaggatgcccaggacaaccgggagcagacccccctcttcctggccgcccgggagggcgctgtggaggtggcccagctgctgctgggcctgggcgccgcccgggagctgcgggaccaggccggcctggccccagcagatgtggcccaccagaggaaccactgggacctgctgaccctgctggagggcgccggccccccagaggcccggcacaaggccaccccaggccgggaggccggccccttcccccgggccaggacagtgtctgtgtctgtgcccccccacggcggcggggccctgccccgctgcaggaccctgtctgctggagctggcccccggggcggcggggcctgcctgcaggcccggacctggagcgtggacctggccgcccggggcggcggggcctacagccactgccgcagcctgagcggcgtgggcgctgggggcggccccaccccccggggccgccgcttctctgctggcatgaggggcccccggcccaacccagccatcatgaggggccgctatggagtggccgccggccggggcggccgggtgtccacagatgactggccctgtgactgggtggccctgggcgcctgtggcagcgccagcaacatccccatccccccaccctgcctgacccccagccctgagcggggcagcccccagctggactgtggccccccagccctgcaggagatgcccatcaaccagggcggggagggcaagaagtag

SEQ ID NO: 162130 - DNA, 6018 bp, synthetic construct
  misc_feature 1..6018: note = Description of Artificial Sequence: Synthetic coding sequence
  source 1..6018: mol_type = other DNA
atgcagccccccagcctgctgctgctgctgctgctgctgctgctgctgctgctgtgtgtgtctgtggtgcggccccggggcctgctgtgtggcagcttccctgagccctgtgccaatggaggcacctgcctgagcctgagcctgggccagggcacctgccagtgtgcccctggcttcctgggggagacctgccagttcccagacccctgccagaatgcccagctgtgccagaatggaggcagctgccaggccctgctgcctgcccccctgggcctgcccagcagccccagccccctgacccccagcttcctgtgcacctgcctgcccggcttcaccggggagcgctgccaggcccagctggaggacccctgccccccatccttctgcagcaagaggggccgctgccacatccaggccagcggccggccccagtgcagctgcatgcctggctggacaggagagcagtgccagctgcgggacttctgcagcgccaacccctgtgtgaatggaggagtgtgcctggccacctacccccagatccagtgccactgccccccaggctttgagggccacgcctgtgaaagagatgtgaatgaatgcttccaggaccccggcccctgccccaagggcaccagctgccacaacaccctgggcagcttccagtgcctgtgccctgtgggccaggagggcccccgctgtgagctgcgggccggcccctgccccccccggggctgcagcaatggaggcacctgccagctgatgcctgagaaggacagcaccttccacctgtgcctgtgccccccaggcttcatcggccctgactgtgaggtgaacccagacaactgtgtgagccaccagtgccagaatggaggcacctgccaggacggcctggacacctacacctgcctgtgcccagagacctggacaggctgggactgcagtgaagatgtggatgaatgtgaggcccagggccccccccactgcagaaatggaggcacctgccagaacagcgctggcagcttccactgtgtgtgtgtgtctggctggggcggcaccagctgtgaggagaacctggatgactgcatcgccgccacctgtgcccctggcagcacctgcatcgacagagtgggcagcttcagctgcctgtgccccccaggccgcacaggcctgctgtgccacctggaggacatgtgcctgagccagccctgccacggagatgcccagtgcagcaccaaccccctgaccggcagcaccctgtgcctgtgccagcccggctacagcggccccacctgccaccaggacctggatgaatgtctgatggcccagcagggccccagcccctgtgagcacggcggcagctgcctgaacaccccaggcagcttcaactgcctgtgccccccaggctacacaggcagccgctgtgaggccgaccacaatgaatgtctgagccagccctgccaccctggcagcacctgcctggacctgctggccaccttccactgcctgtgccccccaggcctggagggccagctgtgtgaggtggagaccaatgaatgtgccagcgccccctgcctgaaccacgccgactgccacgacctgctgaatggcttccagtgcatctgcctgcccggcttcagcggcacccgctgtgaggaggacattgatgagtgccgcagcagcccctgtgccaacggcggccagtgccaggaccagcccggggccttccactgcaagtgcctgcccggctttgagggcccccgctgccagacagaggtggatgagtgcctgagtgacccctgccctgtgggcgccagctgcctggacctgcccggggccttcttctgcctgtgccccagcggcttcaccggccagctgtgtgaggtgcccctgtgtgcccccaacctgtgccagcccaagcagatctgcaaggaccagaaggacaaggccaactgcctgtgcccagatggcagccctggctgtgcccctcctgaggacaactgcacctgccaccacggccactgccagaggagcagctgtgtgtgtgatgtgggctggacaggcccagaatgtgaggccgagctgggcggctgcatcagcgccccctgtgcccacggcggcacctgctacccccagcccagcggctacaactgcacctgccccaccggctacacaggccccacctgcagcgaggagatgacagcctgccacagcggcccctgcctgaatggaggcagctgcaaccccagccctgggggctactactgcacctgcccccccagccacacaggcccccagtgccagaccagcacagactactgtgtgtctgccccctgcttcaacggcggcacctgtgtgaaccggcccggcaccttcagctgcctgtgtgccatgggcttccagggcccccgctgtgagggcaagctgcggcccagctgtgccgacagcccctgcaggaacagagccacctgccaggacagcccccagggcccccgctgcctgtgccccaccggctacacaggaggcagctgccagaccctgatggacctgtgtgcccagaagccctgccccaggaacagccactgcctgcagacaggccccagcttccactgcctgtgcctgcagggctggacaggccccctgtgcaacctgcccctgagcagctgccagaaggccgccctgagccagggcattgatgtgagcagcctgtgccacaatggaggcctgtgtgtggacagcggccccagctacttctgccactgccccccaggcttccagggcagcctgtgccaggaccacgtgaacccctgtgagagccggccctgccagaatggagccacctgcatggcccagcccagcggctacctgtgccagtgtgcccctggctatgatggccagaactgcagcaaggagctggatgcctgccagagccagccctgccacaaccacggcacctgcacccccaagccaggcggcttccactgtgcctgccccccaggctttgtgggcctgcgctgtgaaggagatgtggatgaatgtctggaccagccctgccaccccaccggcacagctgcctgccacagcctggccaatgccttctactgccagtgcctgcccggccacacaggccagtggtgtgaggtggagattgacccctgccacagccagccctgcttccatggaggcacctgtgaggccacagctggcagccccctgggcttcatctgccactgccccaagggctttgagggccccacctgcagccaccgggcccccagctgtggcttccaccactgccaccacggcggcctgtgcctgcccagccccaagccaggcttccccccaagatgtgcctgcctgagcggctacggcggccctgactgcctgaccccaccagcccccaagggctgcggcccccccagcccctgcctgtacaacggcagctgcagcgagaccaccggcctgggcggccctggcttccgctgcagctgcccccacagcagccctggcccccgctgccagaagccaggggccaagggctgtgagggccgctctggagatggagcctgtgatgctggctgcagcggccctgggggcaactgggatggaggagactgcagcctgggcgtgcctgacccctggaagggctgccccagccacagccgctgctggctgctcttcagagatggccagtgccacccccagtgtgacagtgaagaatgtctgtttgatggctatgactgtgagaccccaccagcctgcaccccagcctatgaccagtactgccacgaccacttccacaacggccactgtgagaagggctgcaacacagcagaatgtggctgggatggaggagactgcaggccagaagatggagaccctgagtggggccccagcctggccctgctggtggtgctgagccccccagccctggaccagcagctgtttgccctggcccgggtgctgagcctgaccctgcgggtgggcctgtgggtgaggaaggacagagatggccgggacatggtgtacccctacccaggggcccgggcagaggagaagctgggcggcacccgggaccccacctaccaggagagagctgccccccagacccagcccctgggcaaggagacagacagcctgtctgctggctttgtggtggtgatgggcgtggacctgagccgctgtggccctgaccacccagccagccgctgcccctgggaccccggcctgctgctgcgcttcctggccgccatggctgctgtgggcgccctggagcccctgctgcccggccccctgctggccgtgcacccccacgccggcacagcccccccagccaaccagctgccctggcctgtgctgtgcagccctgtggccggggtcatcctgctggccctgggcgccctgctggtgctgcagctgatcagaagaagaagaagagagcacggggccctgtggctgcccccaggcttcacccggcggcccaggacccagagcgccccccacagaagaagaccacccctgggggaggacagcatcggcctgaaggccctgaagcccaaggccgaggtggatgaagatggagtggtgatgtgcagcggccctgaggagggggaggaggtgggccaggccgaggagactggaccacccagcacctgccagctgtggagcctgagcggcggctgtggggccctgccccaggccgccatgctgaccccaccccaggagagcgagatggaggccccagacctggacacccggggcccagatggagtgacccccctgatgtctgctgtgtgctgcggggaggtgcagagcggcaccttccagggcgcctggctgggctgcccagagccctgggagcccctgctggatggaggagcctgcccccaggcccacacagtgggcactggagagacccccctgcacctggccgcccgcttcagccggcccacagctgcccggcggctgctggaggccggggccaaccccaaccagcctgaccgggccggccgcacccccctgcatgctgctgtggccgcagatgcccgggaggtgtgccagctgctgctgcggagccggcagacagctgtggatgccaggacagaagatggcaccacccccctgatgctggccgcccggctggccgtggaggacctggtggaggagctgattgctgcccaggctgatgtgggcgcccgggacaagtggggcaagacagccctgcactgggccgctgctgtgaacaatgcccgggccgcccggagcctgctgcaggccggggctgacaaggatgcccaggacaaccgggagcagacccccctcttcctggccgcccgggagggcgctgtggaggtggcccagctgctgctgggcctgggcgccgcccgggagctgcgggaccaggccggcctggccccagcagatgtggcccaccagaggaaccactgggacctgctgaccctgctggagggcgccggccccccagaggcccggcacaaggccaccccaggccgggaggccggccccttcccccgggccaggacagtgtctgtgtctgtgccccctcatggaggaggagccctgccccgctgcaggaccctgtctgctggggccggcccccggggcggcggggcctgcctgcaggcccggacctggagcgtggacctggccgcccggggcggcggggcctacagccactgccgcagcctgtctggagtgggcgccggcggcggccccaccccccggggccgccgcttctctgctggcatgaggggcccccggcccaacccagccatcatgaggggccgctatggagtggccgccggccggggcggccgggtgtccacagatgactggccctgtgactgggtggccctgggcgcctgtggcagcgccagcaacatccccatccccccaccctgcctgacccccagccctgagcggggcagcccccagctggactgtggccccccagccctgcaggagatgcccatcaaccagggcggggagggcaagaagtag

SEQ ID NO: 162131 - DNA, 6012 bp, synthetic construct
  misc_feature 1..6012: note = Description of Artificial Sequence: Synthetic coding sequence
  source 1..6012: mol_type = other DNA
atgcagccccccagcctgctgctgctgctgctgctgctgctgctgctgtgtgtgtctgtggtgcggccccggggcctgctgtgtggcagcttccctgagccctgtgccaatggaggcacctgcctgagcctgagcctgggccagggcacctgccagtgtgcccctggcttcctgggggagacctgccagttcccagacccctgccagaatgcccagctgtgccagaatggaggcagctgccaggccctgctgcctgcccccctgggcctgcccagcagccccagccccctgacccccagcttcctgtgcacctgcctgcccggcttcaccggggagcgctgccaggcccagctggaggacccctgccccccatccttctgcagcaagaggggccgctgccacatccaggccagcggccggccccagtgcagctgcatgcctggctggacaggagagcagtgccagctgcgggacttctgcagcgccaacccctgtgtgaatggaggagtgtgcctggccacctacccccagatccagtgccactgccccccaggctttgagggccacgcctgtgaaagagatgtgaatgaatgcttccaggaccccggcccctgccccaagggcaccagctgccacaacaccctgggcagcttccagtgcctgtgccctgtgggccaggagggcccccgctgtgagctgcgggccggcccctgccccccccggggctgcagcaatggaggcacctgccagctgatgcctgagaaggacagcaccttccacctgtgcctgtgccccccaggcttcatcggccctgactgtgaggtgaacccagacaactgtgtgagccaccagtgccagaatggaggcacctgccaggacggcctggacacctacacctgcctgtgcccagagacctggacaggctgggactgcagtgaagatgtggatgaatgtgagacccagggccccccccactgcagaaatggaggcacctgccagaacagcgctggcagcttccactgtgtgtgtgtgtctggctggggcggcaccagctgtgaggagaacctggatgactgcatcgccgccacctgtgcccctggcagcacctgcatcgacagagtgggcagcttcagctgcctgtgccccccaggccgcacaggcctgctgtgccacctggaggacatgtgcctgagccagccctgccacggagatgcccagtgcagcaccaaccccctgaccggcagcaccctgtgcctgtgccagcccggctacagcggccccacctgccaccaggacctggatgaatgtctgatggcccagcagggccccagcccctgtgagcacggcggcagctgcctgaacaccccaggcagcttcaactgcctgtgccccccaggctacacaggcagccgctgtgaggccgaccacaatgaatgtctgagccagccctgccaccctggcagcacctgcctggacctgctggccaccttccactgcctgtgccccccaggcctggagggccagctgtgtgaggtggagaccaatgaatgtgccagcgccccctgcctgaaccacgccgactgccacgacctgctgaatggcttccagtgcatctgcctgcccggcttcagcggcacccgctgtgaggaggacattgatgagtgccgcagcagcccctgtgccaacggcggccagtgccaggaccagcccggggccttccactgcaagtgcctgcccggctttgagggcccccgctgccagacagaggtggatgagtgcctgagtgacccctgccctgtgggcgccagctgcctggacctgcccggggccttcttctgcctgtgccccagcggcttcaccggccagctgtgtgaggtgcccctgtgtgcccccaacctgtgccagcccaagcagatctgcaaggaccagaaggacaaggccaactgcctgtgcccagatggcagccctggctgtgcccctcctgaggacaactgcacctgccaccacggccactgccagaggagcagctgtgtgtgtgatgtgggctggacaggcccagaatgtgaggccgagctgggcggctgcatcagcgccccctgtgcccacggcggcacctgctacccccagcccagcggctacaactgcacctgccccaccggctacacaggccccacctgcagcgaggagatgacagcctgccacagcggcccctgcctgaatggaggcagctgcaaccccagccctgggggctactactgcacctgcccccccagccacacaggcccccagtgccagaccagcacagactactgtgtgtctgccccctgcttcaacggcggcacctgtgtgaaccggcccggcaccttcagctgcctgtgtgccatgggcttccagggcccccgctgtgagggcaagctgcggcccagctgtgccgacagcccctgcaggaacagagccacctgccaggacagcccccagggcccccgctgcctgtgccccaccggctacacaggaggcagctgccagaccctgatggacctgtgtgcccagaagccctgccccaggaacagccactgcctgcagacaggccccagcttccactgcctgtgcctgcagggctggacaggccccctgtgcaacctgcccctgagcagctgccagaaggccgccctgagccagggcattgatgtgagcagcctgtgccacaatggaggcctgtgtgtggacagcggccccagctacttctgccactgccccccaggcttccagggcagcctgtgccaggaccacgtgaacccctgtgagagccggccctgccagaatggagccacctgcatggcccagcccagcggctacctgtgccagtgtgcccctggctatgatggccagaactgcagcaaggagctggatgcctgccagagccagccctgccacaaccacggcacctgcacccccaagccaggcggcttccactgtgcctgccccccaggctttgtgggcctgcgctgtgaaggagatgtggatgaatgtctggaccagccctgccaccccaccggcacagctgcctgccacagcctggccaatgccttctactgccagtgcctgcccggccacacaggccagtggtgtgaggtggagattgacccctgccacagccagccctgcttccatggaggcacctgtgaggccacagctggcagccccctgggcttcatctgccactgccccaagggctttgagggccccacctgcagccaccgggcccccagctgtggcttccaccactgccaccacggcggcctgtgcctgcccagccccaagccaggcttccccccaagatgtgcctgcctgagcggctacggcggccctgactgcctgaccccaccagcccccaagggctgcggcccccccagcccctgcctgtacaacggcagctgcagcgagaccaccggcctgggcggccctggcttccgctgcagctgcccccacagcagccctggcccccgctgccagaagccaggggccaagggctgtgagggccgctctggagatggagcctgtgatgctggctgcagcggccctgggggcaactgggatggaggagactgcagcctgggcgtgcctgacccctggaagggctgccccagccacagccgctgctggctgctcttcagagatggccagtgccacccccagtgtgacagtgaagaatgtctgtttgatggctatgactgtgagaccccaccagcctgcaccccagcctatgaccagtactgccacgaccacttccacaacggccactgtgagaagggctgcaacacagcagaatgtggctgggatggaggagactgcaggccagaagatggagaccctgagtggggccccagcctggccctgctggtggtgctgagccccccagccctggaccagcagctgtttgccctggcccgggtgctgagcctgaccctgcgggtgggcctgtgggtgaggaaggacagagatggccgggacatggtgtacccctacccaggggcccgggcagaggagaagctgggcggcacccgggaccccacctaccaggagagagctgccccccagacccagcccctgggcaaggagacagacagcctgtctgctggctttgtggtggtgatgggcgtggacctgagccgctgtggccctgaccacccagccagccgctgcccctgggaccccggcctgctgctgcgcttcctggccgccatggctgctgtgggcgccctggagcccctgctgcccggccccctgctggccgtgcacccccacgccggcacagcccccccagccaaccagctgccctggcctgtgctgtgcagccctgtggccggggtcatcctgctggccctgggcgccctgctggtgctgcagctgatcagaagaagaagaagagagcacggggccctgtggctgcccccaggcttcacccggcggcccaggacccagagcgccccccacagaagaagaccacccctgggggaggacagcatcggcctgaaggccctgaagcccaaggccgaggtggatgaagatggagtggtgatgtgcagcggccctgaggagggggaggaggtgggccaggccgaggagactggaccacccagcacctgccagctgtggagcctgagcggcggctgtggggccctgccccaggccgccatgctgaccccaccccaggagagcgagatggaggccccagacctggacacccggggcccagatggagtgacccccctgatgtctgctgtgtgctgcggggaggtgcagagcggcaccttccagggcgcctggctgggctgcccagagccctgggagcccctgctggatggaggagcctgcccccaggcccacacagtgggcactggagagacccccctgcacctggccgcccgcttcagccggcccacagctgcccggcggctgctggaggccggggccaaccccaaccagcctgaccgggccggccgcacccccctgcatgctgctgtggccgcagatgcccgggaggtgtgccagctgctgctgcggagccggcagacagctgtggatgccaggacagaagatggcaccacccccctgatgctggccgcccggctggccgtggaggacctggtggaggagctgattgctgcccaggctgatgtgggcgcccgggacaagtggggcaagacagccctgcactgggccgctgctgtgaacaatgcccgggccgcccggagcctgctgcaggccggggctgacaaggatgcccaggacaaccgggagcagacccccctcttcctggccgcccgggagggcgctgtggaggtggcccagctgctgctgggcctgggcgccgcccgggagctgcgggaccaggccggcctggccccagcagatgtggcccaccagaggaaccactgggacctgctgaccctgctggagggcgccggccccccagaggcccggcacaaggccaccccaggccgggaggccggccccttcccccgggccaggacagtgtctgtgtctgtgccccctcatggaggaggagccctgccccgctgcaggaccctgtctgctggggccggcccccggggcggcggggcctgcctgcaggcccggacctggagcgtggacctggccgcccggggcggcggggcctacagccactgccgcagcctgtctggagtgggcgccggcggcggccccaccccccggggccgccgcttctctgctggcatgaggggcccccggcccaacccagccatcatgaggggccgctatggagtggccgccggccggggcggccgggtgtccacagatgactggccctgtgactgggtggccctgggcgcctgtggcagcgccagcaacatccccatccccccaccctgcctgacccccagccctgagcggggcagcccccagctggactgtggccccccagccctgcaggagatgcccatcaaccagggcggggagggcaagaagtag

SEQ ID NO: 162132 - DNA, 561 bp, synthetic construct
  misc_feature 1..561: note = Description of Artificial Sequence: Synthetic coding sequence
  source 1..561: mol_type = other DNA
atgtctgctgtgtgctgcggggaggtgcagagcggcaccttccagggcgcctggctgggctgcccagagccctgggagcccctgctggatggaggagcctgcccccaggcccacacagtgggcaccggggagacccccctgcacctggccgcccgcttcagccggcccacagctgcccggcggctgctggaggccggggccaaccccaaccagcctgacagagctggccgcacccccctgcacgccgctgtggccgcagatgcccgggaggtgtgccagctgctgctgcggagccggcagacagctgtggatgccaggacagaagatggcaccacccccctgatgctggccgcccggctggccgtggaggacctggtggaggagctgattgctgcccaggctgatgtgggcgcccgggacaagtggggcgcagatgctgccatccctggaggagctggccgcagcggcggcagcagccctgccacagctggagctgggggcagccccagggctgctggccctggctgggccagcgctgggggccgccgcagccccacctag

SEQ ID NO: 162133 - DNA, 6009 bp, synthetic construct
  misc_feature 1..6009: note = Description of Artificial Sequence: Synthetic coding sequence
  source 1..6009: mol_type = other DNA
atgcagccccccagcctgctgctgctgctgctgctgctgctgctgtgtgtgtctgtggtgcggccccggggcctgctgtgtggcagcttccctgagccctgtgccaacggcggcacctgcctgagcctgagcctgggccagggcacctgccagtgtgcccctggcttcctgggggagacctgccagttcccagacccctgccagaatgcccagctgtgccagaatggaggcagctgccaggccctgctgcctgcccccctgggcctgcccagcagccccagccccctgacccccagcttcctgtgcacctgcctgcccggcttcaccggggagcgctgccaggcccagctggaggacccctgcccccccagcttctgcagcaagaggggccgctgccacatccaggccagcggccggccccagtgcagctgcatgcctggctggacaggagagcagtgccagctgcgggacttctgcagcgccaacccctgtgtgaatggaggagtgtgcctggccacctacccccagatccagtgccactgccccccaggctttgagggccacgcctgtgaaagagatgtgaatgaatgcttccaggaccccggcccctgccccaagggcaccagctgccacaacaccctgggcagcttccagtgcctgtgccctgtgggccaggagggcccccgctgtgagctgcgggccggcccctgccccccccggggctgcagcaatggaggcacctgccagctgatgcctgagaaggacagcaccttccacctgtgcctgtgccccccaggcttcatcggccctgactgtgaggtgaacccagacaactgtgtgagccaccagtgccagaatggaggcacctgccaggacggcctggacacctacacctgcctgtgcccagagacctggacaggctgggactgcagtgaagatgtggatgaatgtgagacccagggccccccccactgcagaaatggaggcacctgccagaacagcgctggcagcttccactgtgtgtgtgtgtctggctggggcggcaccagctgtgaggagaacctggatgactgcatcgccgccacctgtgcccctggcagcacctgcatcgacagagtgggcagcttcagctgcctgtgccccccaggccgcacaggcctgctgtgccacctggaggacatgtgcctgagccagccctgccacggagatgcccagtgcagcaccaaccccctgaccggcagcaccctgtgcctgtgccagcccggctacagcggccccacctgccaccaggacctggatgagtgcctgatggcccagcagggccccagcccctgtgaacatggaggcagctgcctgaacaccccaggcagcttcaactgcctgtgccccccaggctacacaggcagccgctgtgaggccgaccacaatgaatgtctgagccagccctgccaccctggcagcacctgcctggacctgctggccaccttccactgcctgtgccccccaggcctggagggccagctgtgtgaggtggagaccaatgaatgtgccagcgccccctgcctgaaccacgccgactgccacgacctgctgaatggcttccagtgcatctgcctgcccggcttcagcggcacccgctgtgaagaagatattgatgaatgtcgcagcagcccctgtgccaatggaggccagtgccaggaccagcccggggccttccactgcaagtgcctgcccggctttgagggcccccgctgccagacagaggtggatgaatgtctgagtgacccctgccctgtgggcgccagctgcctggacctgcccggggccttcttctgcctgtgccccagcggcttcaccggccagctgtgtgaggtgcccctgtgtgcccccaacctgtgccagcccaagcagatctgcaaggaccagaaggacaaggccaactgcctgtgcccagatggcagccctggctgtgcccccccagaggacaactgcacctgccaccacggccactgccagaggagcagctgtgtgtgtgatgtgggctggacaggcccagaatgtgaggccgagctgggcggctgcatcagcgccccctgtgcccatggaggcacctgctacccccagcccagcggctacaactgcacctgccccaccggctacacaggccccacctgcagcgaggagatgacagcctgccacagcggcccctgcctgaatggaggcagctgcaaccccagccctgggggctactactgcacctgcccccccagccacacaggcccccagtgccagaccagcacagactactgtgtgtctgccccctgcttcaatggaggcacctgtgtgaacagacctggcaccttcagctgcctgtgtgccatgggcttccagggcccccgctgtgagggcaagctgcggcccagctgtgccgacagcccctgcaggaacagagccacctgccaggacagcccccagggcccccgctgcctgtgccccaccggctacacaggaggcagctgccagaccctgatggacctgtgtgcccagaagccctgccccaggaacagccactgcctgcagacaggccccagcttccactgcctgtgcctgcagggctggacaggccccctgtgcaacctgcccctgagcagctgccagaaggccgccctgagccagggcattgatgtgagcagcctgtgccacaacggcggcctgtgtgtggacagcggccccagctacttctgccactgccccccaggcttccagggcagcctgtgccaggaccacgtgaacccctgtgagagccggccctgccagaatggagccacctgcatggcccagcccagcggctacctgtgccagtgtgcccctggctatgatggccagaactgcagcaaggagctggatgcctgccagagccagccctgccacaaccacggcacctgcacccccaagccaggcggcttccactgtgcctgccccccaggctttgtgggcctgcgctgtgaaggagatgtggatgagtgcctggaccagccctgccaccccactggaacagctgcctgccacagcctggccaatgccttctactgccagtgcctgcccggccacacaggccagtggtgtgaggtggagattgacccctgccacagccagccctgcttccacggcggcacctgtgaggccacagctggcagccccctgggcttcatctgccactgccccaagggctttgagggccccacctgcagccaccgggcccccagctgtggcttccaccactgccaccacggcggcctgtgcctgcccagccccaagccaggcttccccccaagatgtgcctgcctgagcggctatggaggccctgactgcctgaccccaccagcccccaagggctgcggcccccccagcccctgcctgtacaacggcagctgcagcgagaccaccggcctgggcggccctggcttccgctgcagctgcccccacagcagccctggcccccgctgccagaagccaggggccaagggctgtgagggccgctctggagatggagcctgtgatgctggctgcagcggccctgggggcaactgggatggaggagactgcagcctgggcgtgcctgacccctggaagggctgccccagccacagccgctgctggctgctcttcagagatggccagtgccacccccagtgtgacagcgaggagtgcctgtttgatggctatgactgtgagaccccaccagcctgcaccccagcctatgaccagtactgccacgaccacttccacaacggccactgtgagaagggctgcaacacagcagaatgtggctgggatggaggagactgcaggccagaagatggagaccctgagtggggccccagcctggccctgctggtggtgctgagccccccagccctggaccagcagctgtttgccctggcccgggtgctgagcctgaccctgcgggtgggcctgtgggtgaggaaggacagagatggccgggacatggtgtacccctacccaggggcccgggcagaggagaagctgggcggcacccgggaccccacctaccaggagcgggccgccccccagacccagcccctgggcaaggagacagacagcctgtctgctggctttgtggtggtgatgggcgtggacctgagccgctgtggccctgaccacccagccagccgctgcccctgggaccccggcctgctgctgcgcttcctggccgccatggctgctgtgggcgccctggagcccctgctgcccggccccctgctggccgtgcacccccatgctggaacagcccccccagccaaccagctgccctggcctgtgctgtgcagccctgtggccggggtcatcctgctggccctgggcgccctgctggtgctgcagctgatcagaagaagaagaagagaacatggagccctgtggctgcccccaggcttcacccggcggcccaggacccagagcgccccccacagaagaagaccacccctgggagaagattccatcggcctgaaggccctgaagcccaaggccgaggtggatgaagatggagtggtgatgtgcagcggccctgaggagggggaggaggtgggccaggccgaggagaccggcccccccagcacctgccagctgtggagcctgagcggcggctgtggggccctgccccaggccgccatgctgaccccaccccaggagagcgagatggaggccccagacctggacacccggggcccagatggagtgacccccctgatgtctgctgtgtgctgcggggaggtgcagagcggcaccttccagggcgcctggctgggctgcccagagccctgggagcccctgctggatggaggagcctgcccccaggcccacacagtgggcaccggggagacccccctgcacctggccgcccgcttcagccggcccacagctgcccggcggctgctggaggccggggccaaccccaaccagcctgacagagctggccgcacccccctgcacgccgctgtggccgcagatgcccgggaggtgtgccagctgctgctgcggagccggcagacagctgtggatgccaggacagaagatggcaccacccccctgatgctggccgcccggctggccgtggaggacctggtggaggagctgattgctgcccaggctgatgtgggcgcccgggacaagtggggcaagacagccctgcactgggccgctgctgtgaacaatgcccgggccgcccggagcctgctgcaggccggggctgacaaggatgcccaggacaaccgggagcagacccccctcttcctggccgcccgggagggcgctgtggaggtggcccagctgctgctgggcctgggcgccgcccgggagctgcgggaccaggccggcctggccccagcagatgtggcccaccagaggaaccactgggacctgctgaccctgctggagggcgccggccccccagaggcccggcacaaggccaccccaggccgggaggccggccccttcccccgggccaggacagtgtctgtgtctgtgcccccccacggcggcggggccctgccccgctgcaggaccctgtctgctggagctggcccccggggcggcggggcctgcctgcaggcccggacctggagcgtggacctggccgcccggggcggcggggcctacagccactgccgcagcctgagcggcgtgggcgctgggggcggccccaccccccggggccgccgcttctctgctggcatgaggggcccccggcccaacccagccatcatgaggggccgctatggagtggccgccggccggggcggccgggtgtccacagatgactggccctgtgactgggtggccctgggcgcctgtggcagcgccagcaacatccccatccccccaccctgcctgacccccagccctgagcggggcagcccccagctggactgtggccccccagccctgcaggagatgcccatcaaccagggcggggagggcaagaagtag

SEQ ID NO: 162134 - DNA, 6012 bp, synthetic construct; identical to SEQ ID NO: 162128
  misc_feature 1..6012: note = Description of Artificial Sequence: Synthetic coding sequence
  source 1..6012: mol_type = other DNA

SEQ ID NO: 162135 - DNA, 561 bp, synthetic construct; identical to SEQ ID NO: 162132
  misc_feature 1..561: note = Description of Artificial Sequence: Synthetic coding sequence
  source 1..561: mol_type = other DNA

SEQ ID NO: 162136 - DNA, 561 bp, synthetic construct; identical to SEQ ID NO: 162132
  misc_feature 1..561: note = Description of Artificial Sequence: Synthetic coding sequence
  source 1..561: mol_type = other DNA

SEQ ID NO: 162137 - DNA, 561 bp, synthetic construct; identical to SEQ ID NO: 162132
  misc_feature 1..561: note = Description of Artificial Sequence: Synthetic coding sequence
  source 1..561: mol_type = other DNA

SEQ ID NO: 162138 - DNA, 561 bp, synthetic construct; identical to SEQ ID NO: 162132
  misc_feature 1..561: note = Description of Artificial Sequence: Synthetic coding sequence
  source 1..561: mol_type = other DNA

SEQ ID NO: 162139 - DNA, 561 bp, synthetic construct; identical to SEQ ID NO: 162132
  misc_feature 1..561: note = Description of Artificial Sequence: Synthetic coding sequence
  source 1..561: mol_type = other DNA

SEQ ID NO: 162140 - DNA, 1491 bp, synthetic construct
  misc_feature 1..1491: note = Description of Artificial Sequence: Synthetic coding sequence
  source 1..1491: mol_type = other DNA
atgggccggggcgtgcgggtgctgctgctgctgagcctgctgcactgtgccggcggcagcgagggcaggaagacctggaggcggcggggccagcagcccccacctccacccaggacagaagctgccccagctgctggccagcctgtggagagcttccccctggacttcaccgctgtggagggcaacatggacagcttcatggcccaggtgaagagcctggcccagagcctgtacccctgcagcgcccagcagctgaatgaagacctgcggctgcacctgctgctgaacacctctgtgacctgcaatgatggcagccctgctggctactacctgaaggagagccggggcagccgccgctggctgctcttcctggagggcggctggtactgcttcaaccgggagaactgtgacagccgctatgacaccatgaggcggctgatgagcagccgggactggcccaggaccaggactggaacaggcatcctgagcagccagcctgaggagaacccctactggtggaatgccaacatggtgttcatcccctactgcagcagtgatgtgtggagcggggccagcagcaagtctgagaagaatgaatatgccttcatgggcgccctgatcatccaggaggtggtgcgggagctgctgggccggggcctgagcggggccaaggtgctgctgctggccggcagcagcgctgggggcaccggggtgctgctgaatgtggacagagtggccgagcagctggagaagctgggctacccagccatccaggtgcggggcctggccgacagcggctggttcctggacaacaagcagtaccgccacacagactgtgtggacaccatcacctgtgcccccacagaggccatccggcggggcatccgctactggaatggagtggtgcctgagcgctgccggcggcagttccaggagggggaggagtggaactgcttcttcggctacaaggtgtaccccaccctgcgctgccctgtgtttgtggtgcagtggctgtttgatgaggcccagctgactgtggacaacgtgcacctgaccggccagcctgtgcaggagggcctgcggctgtacatccagaacctgggccgggagctgcggcacaccctgaaggatgtgcctgccagctttgccccagcctgcctgagccatgagatcatcatccgcagccactggacagatgtgcaggtgaagggcaccagcctgccccgggccctgcactgctgggacaggagcctgcatgacagccacaaggccagcaagacccccctgaagggctgccctgtgcacctggtggacagctgcccctggccccactgcaaccccagctgccccaccgtgcgggaccagttcaccggccaggagatgaatgtggcccagttcctgatgcacatgggctttgacatgcagacagtggcccagccccagggcctggagcccagcgagctgctgggcatgctgagcaatggcagctag

SEQ ID NO: 162141 - DNA, 888 bp, synthetic construct
  misc_feature 1..888: note = Description of Artificial Sequence: Synthetic coding sequence
  source 1..888: mol_type = other DNA
atgggccggggcgtgcgggtgctgctgctgctgagcctgctgcactgtgccggcggcagcgagggcaggaagacctggaggcggcggggccagcagcccccacctccacccaggacagaagctgccccagctgctggccagcctgtggagagcttccccctggacttcaccgctgtggagggcaacatggacagcttcatggcccaggtgaagagcctggcccagagcctgtacccctgcagcgcccagcagctgaatgaagacctgcggctgcacctgctgctgaacacctctgtgacctgcaatgatggcagccctgctggctactacctgaaggagagccggggcagccgccgctggctgctcttcctggagggcggctggtactgcttcaaccgggagaactgtgacagccgctatgacaccatgaggcggctgatgagcagccgggactggcccaggaccaggactggaacaggcatcctgagcagccagcctgaggagaacccctactggtggaatgccaacatggtgttcatcccctactgcagcagtgatgtgtggagcggggccagcagcaagtctgagaagaatgaatatgccttcatgggcgccctgatcatccaggaggtggtgcgggagctgctgggccggggcctgagcggggccaaggtgctgctgctggccggcagcagcgctgggggcaccggggtgctgctgaatgtggacagagtggccgagcagctggagaagctgggctacccagccatccaggtgcggggcctggccgacagcggctggttcctggacaacaagcagtaccgccacacagactgtgtggacaccatcacctgtgcccccacagaggccatccggcggggcatctag

SEQ ID NO: 162142 - DNA, 4080 bp, synthetic construct
  misc_feature 1..4080: note = Description of Artificial Sequence: Synthetic coding sequence
  source 1..4080: mol_type = other DNA
atggccgaggccggcctgcggggctggctgctgtgggccctgctgctgcggctggcccagagcgagccctacaccaccatccaccagcccggctactgtgccttctatgatgaatgtgggaagaaccctgagctgagcggcagcctgatgaccctgagcaatgtgtcctgcctgagcaacaccccagccaggaagatcactggagaccacctgatcctgctgcagaagatctgcccccggctgtacacaggccccaacacccaggcctgctgcagcgccaagcagctggtgtccctggaggccagcctgagcatcaccaaggccctgctgacccgctgcccagcctgcagcgacaactttgtgaacctgcactgccacaacacctgcagccccaaccagagcctcttcatcaacgtgaccagggtggcccagctgggcgccggccagctgcctgctgtggtggcctatgaggccttctaccagcacagctttgctgagcagagctatgacagctgcagccgggtgcgggtgcctgctgctgccaccctggccgtgggcaccatgtgtggggtgtatggcagcgccctgtgcaatgcccagcgctggctgaacttccagggcgacacaggaaatggcctggcccccctggacatcaccttccacctgctggagcccggccaggccgtgggcagcggcatccagcccctgaatgaaggagtggcccgctgcaatgaaagccagggagatgatgtggccacctgcagctgccaggactgtgccgccagctgcccagccatcgcccggccccaggccctggacagcaccttctacctgggccagatgcctggcagcctggtgctgatcatcatcctgtgcagcgtgtttgctgtggtgaccatcctgctggtgggcttccgggtggccccagcccgggacaagagcaagatggtggaccccaagaagggcaccagcctgagtgacaagctgtccttcagcacccacaccctgctgggccagttcttccagggctggggcacctgggtggcctcctggcccctgaccatcctggtgctgagcgtcatccctgtggtggccctggccgccggcctggtgttcacagagctgaccacagatcctgtggagctgtggagcgcccccaacagccaggcccggtctgagaaggccttccatgaccagcacttcggccccttcttccgcaccaaccaggtgatcctgacagcccccaacagaagcagctaccgctatgacagcctgctgctgggccccaagaacttcagcggcatcctggacctggacctgctgctggagctgctggagctgcaggagcggctgcggcacctgcaggtgtggagccctgaggcccagaggaacatcagcctgcaggacatctgctacgcccccctgaacccagacaacaccagcctgtatgactgctgcatcaacagcctgctgcagtacttccagaacaacagaaccctgctgctgctgacagccaaccagaccctgatgggccagaccagccaggtggactggaaggaccacttcctgtactgtgccaatgcccccctgaccttcaaggatggaacagccctggccctgagctgcatggctgactatggagcccctgtgttccccttcctggccatcggcggctacaagggcaaggactacagcgaggccgaggccctgatcatgaccttcagcctgaacaactacccagctggggacccccggctggcccaggccaagctgtgggaggaggccttcctggaggagatgagggccttccagaggaggatggccggcatgttccaggtgaccttcatggccgagaggagcctggaggatgagatcaacagaaccacagctgaggacctgcccatctttgccaccagctacatcgtcatcttcctgtacatcagcctggccctgggcagctacagctcctggagccgggtgatggtggacagcaaggccaccctgggcctgggcggcgtggccgtggtgctgggcgctgtgatggccgccatgggcttcttctcctacctgggcatccgcagcagcctggtgatcctgcaggtggtgcccttcctggtgctgtctgtgggcgctgacaacatcttcatctttgtgctggagtaccagaggctgccccggcggcctggagagccccgggaggtgcacatcggccgggccctgggccgggtggcccccagcatgctgctgtgcagcctgtctgaggccatctgcttcttcctgggcgccctgacccccatgcctgctgtgaggacctttgccctgaccagcggcctggccgtcatcctggacttcctgctgcagatgtctgcctttgtggccctgctgagcctggacagcaagaggcaggaggccagccggctggatgtgtgctgctgcgtgaagccccaggagctgcccccacctggccagggcgagggcctgctgctgggcttcttccagaaggcctatgcccccttcctgctgcactggatcacccggggcgtggtgctgctgctcttcctggccctgtttggagtgtccctgtacagcatgtgccacatctctgtgggcctggaccaggagctggccctgcccaaggacagctacctgctggactacttcctgttcctgaaccgctactttgaggtgggcgcccctgtgtactttgtgaccaccctgggctacaacttcagcagcgaggccggcatgaatgccatctgcagcagcgctggctgcaacaacttctccttcacccagaagatccagtatgccacagagttccctgagcagagctacctggccatcccagccagctcctgggtggatgacttcatcgactggctgacccccagcagctgctgccgcctgtacatcagcggccccaacaaggacaagttctgccccagcacagtgaacagcctgaactgcctgaagaactgcatgagcatcaccatgggctctgtgcggcccagcgtggagcagttccacaagtacctgccctggttcctgaatgaccggcccaacatcaagtgccccaagggcggcctggccgcctacagcacctctgtgaacctgaccagtgatggccaggtgctggacacagtggccatcctgagcccccggctggagtacagcggcaccatcagcgcccactgcaacctgtacctgctggacagcaccagccgcttcatggcctaccacaagcccctgaagaacagccaggactacacagaggccctgcgggccgcccgggagctggccgccaacatcacagctgacctgaggaaggtgcctggaacagatcctgcctttgaggtgttcccctacaccatcaccaacgtgttctatgagcagtacctgaccatcctgcctgagggcctcttcatgctgagcctgtgcctggtgcccacctttgctgtgtcctgcctgctgctgggcctggacctgcggagcggcctgctgaacctgctgagcatcgtgatgatcctggtggacacagtgggcttcatggccctgtggggcatctcctacaatgctgtgtccctcatcaacctggtgtctgctgtgggcatgtctgtggagtttgtgagccacatcaccaggagctttgccatcagcaccaagcccacctggctggagcgggccaaggaggccaccatctccatgggcagcgctgtgtttgctggggtggccatgaccaacctgcccggcatcctggtgctgggcctggccaaggcccagctgatccagatcttcttcttccggctgaacctgctgatcaccctgctgggcctgctgcacggcctggtgttcctgcccgtcatcctgtcctatgtgggcccagatgtgaacccagccctggccctggagcagaagagagctgaggaggccgtggccgctgtgatggtggccagctgccccaaccaccccagccgggtgtccacagctgacaacatctacgtgaaccacagctttgagggcagcatcaagggagctggggccatcagcaacttcctgcccaacaacggccggcagttctag

SEQ ID NO: 162143 - DNA, 3999 bp, synthetic construct
  misc_feature 1..3999: note = Description of Artificial Sequence: Synthetic coding sequence
  source 1..3999: mol_type = other DNA
atggccgaggccggcctgcggggctggctgctgtgggccctgctgctgcggctggcccagagcgagccctacaccaccatccaccagcccggctactgtgccttctatgatgaatgtgggaagaaccctgagctgagcggcagcctgatgaccctgagcaatgtgtcctgcctgagcaacaccccagccaggaagatcactggagaccacctgatcctgctgcagaagatctgcccccggctgtacacaggccccaacacccaggcctgctgcagcgccaagcagctggtgtccctggaggccagcctgagcatcaccaaggccctgctgacccgctgcccagcctgcagcgacaactttgtgaacctgcactgccacaacacctgcagccccaaccagagcctcttcatcaacgtgaccagggtggcccagctgggcgccggccagctgcctgctgtggtggcctatgaggccttctaccagcacagctttgctgagcagagctatgacagctgcagccgggtgcgggtgcctgctgctgccaccctggccgtgggcaccatgtgtggggtgtatggcagcgccctgtgcaatgcccagcgctggctgaacttccagggcgacacaggaaatggcctggcccccctggacatcaccttccacctgctggagcccggccaggccgtgggcagcggcatccagcccctgaatgaaggagtggcccgctgcaatgaaagccagggagatgatgtggccacctgcagctgccaggactgtgccgccagctgcccagccatcgcccggccccaggccctggacagcaccttctacctgggccagatgcctggcagcctggtgctgatcatcatcctgtgcagcgtgtttgctgtggtgaccatcctgctggtgggcttccgggtggccccagcccgggacaagagcaagatggtggaccccaagaagggcaccagcctgagtgacaagctgtccttcagcacccacaccctgctgggccagttcttccagggctggggcacctgggtggcctcctggcccctgaccatcctggtgctgagcgtcatccctgtggtggccctggccgccggcctggtgttcacagagctgaccacagatcctgtggagctgtggagcgcccccaacagccaggcccggtctgagaaggccttccatgaccagcacttcggccccttcttccgcaccaaccaggtgatcctgacagcccccaacagaagcagctaccgctatgacagcctgctgctgggccccaagaacttcagcggcatcctggacctggacctgctgctggagctgctggagctgcaggagcggctgcggcacctgcaggtgtggagccctgaggcccagaggaacatcagcctgcaggacatctgctacgcccccctgaacccagacaacaccagcctgtatgactgctgcatcaacagcctgctgcagtacttccagaacaacagaaccctgctgctgctgacagccaaccagaccctgatgggccagaccagccaggtggactggaaggaccacttcctgtactgtgccaatgcccccctgaccttcaaggatggaacagccctggccctgagctgcatggctgactatggagcccctgtgttccccttcctggccatcggcggctacaagggcaaggactacagcgaggccgaggccctgatcatgaccttcagcctgaacaactacccagctggggacccccggctggcccaggccaagctgtgggaggaggccttcctggaggagatgagggccttccagaggaggatggccggcatgttccaggtgaccttcatggccgagaggagcctggaggatgagatcaacagaaccacagctgaggacctgcccatctttgccaccagctacatcgtcatcttcctgtacatcagcctggccctgggcagctacagctcctggagccgggtgatggtggacagcaaggccaccctgggcctgggcggcgtggccgtggtgctgggcgctgtgatggccgccatgggcttcttctcctacctgggcatccgcagcagcctggtgatcctgcaggtggtgcccttcctggtgctgtctgtgggcgctgacaacatcttcatctttgtgctggagtaccagaggctgccccggcggcctggagagccccgggaggtgcacatcggccgggccctgggccgggtggcccccagcatgctgctgtgcagcctgtctgaggccatctgcttcttcctgggcgccctgacccccatgcctgctgtgaggacctttgccctgaccagcggcctggccgtcatcctggacttcctgctgcagatgtctgcctttgtggccctgctgagcctggacagcaagaggcaggaggccagccggctggatgtgtgctgctgcgtgaagccccaggagctgcccccacctggccagggcgagggcctgctgctgggcttcttccagaaggcctatgcccccttcctgctgcactggatcacccggggcgtggtgctgctgctcttcctggccctgtttggagtgtccctgtacagcatgtgccacatctctgtgggcctggaccaggagctggccctgcccaaggacagctacctgctggactacttcctgttcctgaaccgctactttgaggtgggcgcccctgtgtactttgtgaccaccctgggctacaacttcagcagcgaggccggcatgaatgccatctgcagcagcgctggctgcaacaacttctccttcacccagaagatccagtatgccacagagttccctgagcagagctacctggccatcccagccagctcctgggtggatgacttcatcgactggctgacccccagcagctgctgccgcctgtacatcagcggccccaacaaggacaagttctgccccagcacagtgaacagcctgaactgcctgaagaactgcatgagcatcaccatgggctctgtgcggcccagcgtggagcagttccacaagtacctgccctggttcctgaatgaccggcccaacatcaagtgccccaagggcggcctggccgcctacagcacctctgtgaacctgaccagtgatggccaggtgctggccagccgcttcatggcctaccacaagcccctgaagaacagccaggactacacagaggccctgcgggccgcccgggagctggccgccaacatcacagctgacctgaggaaggtgcccggcacagatcctgcctttgaggtgttcccctacaccatcaccaacgtgttctatgagcagtacctgaccatcctgcctgagggcctcttcatgctgagcctgtgcctggtgcccacctttgctgtgtcctgcctgctgctgggcctggacctgcggagcggcctgctgaacctgctgagcatcgtgatgatcctggtggacacagtgggcttcatggccctgtggggcatctcctacaatgctgtgtccctcatcaacctggtgtctgctgtgggcatgtctgtggagtttgtgagccacatcaccaggagctttgccatcagcaccaagcccacctggctggagcgggccaaggaggccaccatctccatgggcagcgctgtgtttgctggggtggccatgaccaacctgcccggcatcctggtgctgggcctggccaaggcccagctgatccagatcttcttcttccggctgaacctgctgatcaccctgctgggcctgctgcacggcctggtgttcctgcctgtgatcctgtcctatgtgggcccagatgtgaacccagccctggccctggagcagaagagagctgaggaggccgtggccgctgtgatggtggccagctgccccaaccaccccagccgggtgtccacagctgacaacatctacgtgaaccacagctttgagggcagcatcaagggggccggggccatcagcaacttcctgcccaacaacggccggcagttctag

SEQ ID NO: 162144 - DNA, 3861 bp, synthetic construct
  misc_feature 1..3861: note = Description of Artificial Sequence: Synthetic coding sequence
  source 1..3861: mol_type = other DNA
atggccgaggccggcctgcggggctggctgctgtgggccctgctgctgcggctggcccagagcgagccctacaccaccatccaccagcccggctactgtgccttctatgatgaatgtgggaagaaccctgagctgagcggcagcctgatgaccctgagcaatgtgtcctgcctgagcaacaccccagccaggaagatcactggagaccacctgatcctgctgcagaagatctgcccccggctgtacacaggccccaacacccaggcctgctgcagcgccaagcagctggtgtccctggaggccagcctgagcatcaccaaggccctgctgacccgctgcccagcctgcagcgacaactttgtgaacctgcactgccacaacacctgcagccccaaccagagcctcttcatcaacgtgaccagggtggcccagctgggcgccggccagctgcctgctgtggtggcctatgaggccttctaccagcacagctttgctgagcagagctatgacagctgcagccgggtgcgggtgcctgctgctgccaccctggccgtgggcaccatgtgtggggtgtatggcagcgccctgtgcaatgcccagcgctggctgaacttccagggcgacacaggaaatggcctggcccccctggacatcaccttccacctgctggagcccggccaggccgtgggcagcggcatccagcccctgaatgaaggagtggcccgctgcaatgaaagccagggagatgatgtggccacctgcagctgccaggactgtgccgccagctgcccagccatcgcccggccccaggccctggacagcaccttctacctgggccagatgcctggcagcctggtgctgatcatcatcctgtgcagcgtgtttgctgtggtgaccatcctgctggtgggcttccgggtggccccagcccgggacaagagcaagatggtggaccccaagaagggcaccagcctgagtgacaagctgtccttcagcacccacaccctgctgggccagttcttccagggctggggcacctgggtggcctcctggcccctgaccatcctggtgctgagcgtcatccctgtggtggccctggccgccggcctggtgttcacagagctgaccacagatcctgtggagctgtggagcgcccccaacagccaggcccggtctgagaaggccttccatgaccagcacttcggccccttcttccgcaccaaccaggtgatcctgacagcccccaacagaagcagctaccgctatgacagcctgctgctgggccccaagaacttcagcggcatcctggacctggacctgctgctggagctgctggagctgcaggagcggctgcggcacctgcaggtgtggagccctgaggcccagaggaacatcagcctgcaggacatctgctacgcccccctgaacccagacaacaccagcctgtatgactgctgcatcaacagcctgctgcagtacttccagaacaacagaaccctgctgctgctgacagccaaccagaccctgatgggccagaccagccaggtggactggaaggaccacttcctgtactgtgccaatgcccccctgaccttcaaggatggaacagccctggccctgagctgcatggctgactatggagcccctgtgttccccttcctggccatcggcggctacaagggcaaggactacagcgaggccgaggccctgatcatgaccttcagcctgaacaactacccagctggggacccccggctggcccaggccaagctgtgggaggaggccttcctggaggagatgagggccttccagaggaggatggccggcatgttccaggtgaccttcatggccgagaggagcctggaggatgagatcaacagaaccacagctgaggacctgcccatctttgccaccagctacatcgtcatcttcctgtacatcagcctggccctgggcagctacagctcctggagccgggtgatggtggacagcaaggccaccctgggcctgggcggcgtggccgtggtgctgggcgctgtgatggccgccatgggcttcttctcctacctgggcatccgcagcagcctggtgatcctgcaggtggtgcccttcctggtgctgtctgtgggcgctgacaacatcttcatctttgtgctggagtaccagaggctgccccggcggcctggagagccccgggaggtgcacatcggccgggccctgggccgggtggcccccagcatgctgctgtgcagcctgtctgaggccatctgcttcttcctgggcgccctgacccccatgcctgctgtgaggacctttgccctgaccagcggcctggccgtcatcctggacttcctgctgcagatgtctgcctttgtggccctgctgagcctggacagcaagaggcaggaggccagccggctggatgtgtgctgctgcgtgaagccccaggagctgcccccacctggccagggcgagggcctgctgctgggcttcttccagaaggcctatgcccccttcctgctgcactggatcacccggggcgtggtggtgggcgcccctgtgtactttgtgaccaccctgggctacaacttcagcagcgaggccggcatgaatgccatctgcagcagcgctggctgcaacaacttctccttcacccagaagatccagtatgccacagagttccctgagcagagctacctggccatcccagccagctcctgggtggatgacttcatcgactggctgacccccagcagctgctgccgcctgtacatcagcggccccaacaaggacaagttctgccccagcacagtgaacagcctgaactgcctgaagaactgcatgagcatcaccatgggctctgtgcggcccagcgtggagcagttccacaagtacctgccctggttcctgaatgaccggcccaacatcaagtgccccaagggcggcctggccgcctacagcacctctgtgaacctgaccagtgatggccaggtgctggccagccgcttcatggcctaccacaagcccctgaagaacagccaggactacacagaggccctgcgggccgcccgggagctggccgccaacatcacagctgacctgaggaaggtgcccggcacagatcctgcctttgaggtgttcccctacaccatcaccaacgtgttctatgagcagtacctgaccatcctgcctgagggcctcttcatgctgagcctgtgcctggtgcccacctttgctgtgtcctgcctgctgctgggcctggacctgcggagcggcctgctgaacctgctgagcatcgtgatgatcctggtggacacagtgggcttcatggccctgtggggcatctcctacaatgctgtgtccctcatcaacctggtgtctgctgtgggcatgtctgtggagtttgtgagccacatcaccaggagctttgccatcagcaccaagcccacctggctggagcgggccaaggaggccaccatctccatgggcagcgctgtgtttgctggggtggccatgaccaacctgcccggcatcctggtgctgggcctggccaaggcccagctgatccagatcttcttcttccggctgaacctgctgatcaccctgctgggcctgctgcacggcctggtgttcctgcctgtgatcctgtcctatgtgggcccagatgtgaacccagccctggccctggagcagaagagagctgaggaggccgtggccgctgtgatggtggccagctgccccaaccaccccagccgggtgtccacagctgacaacatctacgtgaaccacagctttgagggcagcatcaagggggccggggccatcagcaacttcctgcccaacaacggccggcagttctag

SEQ ID NO: 162145 - DNA, 783 bp, synthetic construct
  misc_feature 1..783: note = Description of Artificial Sequence: Synthetic coding sequence
  source 1..783: mol_type = other DNA
atgccccagaatgagtacatcgagctgcacaggaagagatatggctaccgcctggactaccacgagaagaagaggaagaaggagagccgggaggcccacgagaggagcaagaaggccaagaagatgattggcctgaaggccaagctgtaccacaagcagagacatgctgagaagatccagatgaagaagaccatcaagatgcatgagaagaggaacaccaagcagaagaatgatgagaagaccccccagggcgctgtgcctgcctacctgctggaccgggagggccagagccgggccaaggtgctgagcaacatgatcaagcagaagaggaaggagaaggccggcaagtgggaggtgcccctgcccaaggtgcgggcccagggcgagacagaggtgctgaaggtgatcagaacaggcaagaggaagaagaaggcctggaagaggatggtgaccaaggtgtgctttgtgggagatggcttcaccaggaagccacccaagtatgagcgcttcatccggcccatgggcctgcgcttcaagaaggcccacgtgacccaccctgagctgaaggccaccttctgcctgcccatcctgggcgtgaagaagaaccccagcagccccctgtacaccaccctgggcgtcatcaccaagggcaccgtcatcgaggtgaatgtgtctgagctgggcctggtgacccagggcggcaaggtgatctggggcaagtatgcccaggtgaccaacaacccagaaaatgatggctgcatcaatgctgtgctgctggtgtag

SEQ ID NO: 162146 - DNA, 1509 bp, synthetic construct
  misc_feature 1..1509: note = Description of Artificial Sequence: Synthetic coding sequence
  source 1..1509: mol_type = other DNA
atgagctgccctgtgcctgcctgctgtgccctgctgctggtgctgggcctgtgccgggcccggcccagaaatgccctgctgctgctggctgatgatggcggctttgaaagtggggcctacaacaacagcgccatcgccaccccccacctggatgccctggcccggcgcagcctgctcttcagaaatgccttcacctctgtgagcagctgcagccccagccgggccagcctgctgaccggcctgccccagcaccagaatggcatgtatggcctgcaccaggatgtgcaccacttcaacagctttgacaaggtgcgcagcctgcccctgctgctgagccaggccggcgtgaggacaggcatcatcggcaagaagcacgtgggccctgagaccgtgtacccctttgattttgcctacacagaagaaaatggatctgtgctgcaggtgggcaggaacatcacccgcatcaagctgctggtgaggaagttcctgcagacccaggatgaccggcccttcttcctgtatgtggccttccatgacccccaccgctgtggccacagccagccccagtatggcaccttctgtgagaagtttggaaatggagagagcggcatgggccgcatcccagactggaccccccaggcctatgaccccctggatgtgctggtgccctactttgtgcccaacaccccagctgcccgggctgacctggccgcccagtacaccaccgtgggccgcatggaccagggcgtgggcctggtgctgcaggagctgagagatgctggggtgctgaatgacaccctggtgatcttcaccagtgacaatggcatccccttccccagcggccgcaccaacctgtactggccaggcacagctgagcccctgctggtgagcagccctgagcaccccaagcgctggggccaggtgtctgaggcctacgtgtccctgctggacctgacccccaccatcctggactggttcagcatcccctaccccagctatgccatcttcggcagcaagaccatccacctgaccggccgcagcctgctgcctgccctggaggccgagcccctgtgggccaccgtgtttggcagccagagccaccacgaggtgaccatgagctaccccatgaggtctgtgcagcaccgccacttccggctggtgcacaacctgaacttcaagatgcccttccccatcgaccaggacttctacgtgagccccaccttccaggacctgctgaacagaaccacagctggccagcccaccggctggtacaaggacctgcggcactactactaccgggcccgctgggagctgtatgacaggagccgggacccccatgagacccagaacctggccacagaccccaggtttgcccagctgctggagatgctgcgggaccagctggccaagtggcagtgggagacccatgacccctgggtgtgtgccccagatggagtgctggaggagaagctgagcccccagtgccagcccctgcacaatgagctgtag

SEQ ID NO: 162147 - DNA, 900 bp, synthetic construct
  misc_feature 1..900: note = Description of Artificial Sequence: Synthetic coding sequence
  source 1..900: mol_type = other DNA
atgggccgcatcccagactggaccccccaggcctatgaccccctggatgtgctggtgccctactttgtgcccaacaccccagctgcccgggctgacctggccgcccagtacaccaccgtgggccgcatggaccagggcgtgggcctggtgctgcaggagctgagagatgctggggtgctgaatgacaccctggtgatcttcaccagtgacaatggcatccccttccccagcggccgcaccaacctgtactggccaggcacagctgagcccctgctggtgagcagccctgagcaccccaagcgctggggccaggtgtctgaggcctacgtgtccctgctggacctgacccccaccatcctggactggttcagcatcccctaccccagctatgccatcttcggcagcaagaccatccacctgaccggccgcagcctgctgcctgccctggaggccgagcccctgtgggccaccgtgtttggcagccagagccaccacgaggtgaccatgagctaccccatgaggtctgtgcagcaccgccacttccggctggtgcacaacctgaacttcaagatgcccttccccatcgaccaggacttctacgtgagccccaccttccaggacctgctgaacagaaccacagctggccagcccaccggctggtacaaggacctgcggcactactactaccgggcccgctgggagctgtatgacaggagccgggacccccatgagacccagaacctggccacagaccccaggtttgcccagctgctggagatgctgcgggaccagctggccaagtggcagtgggagacccatgacccctgggtgtgtgccccagatggagtgctggaggagaagctgagcccccagtgccagcccctgcacaatgagctgtag

SEQ ID NO: 162148 - DNA, 618 bp, synthetic construct
  misc_feature 1..618: note = Description of Artificial Sequence: Synthetic coding sequence
  source 1..618: mol_type = other DNA
atgagctgccctgtgcctgcctgctgtgccctgctgctggtgctgggcctgtgccgggcccggcccagaaatgccctgctgctgctggccgaccgggccctgtctgtgagccacctgacccagaggatgacagaggccctgcgggtggcccggaccaccacagcccccagcccccccaggacctggaccccctggccagctgctgccagcagctttgccatgcccagccccaggtctgctgctgccctgcctgctgccccagccagcagcctggcctgccccagcatccgcatgggctgcaccggctgcaccaggacctgcaccaccagcacccccagcacccgctgtggggcctgccgctgctgcagcgccaagctggtgtgtgcccaggccagcagcggccgcagcacctggggccggcggccctgcacccggctgaccctgcggaccaggaggaggatggcccccagcagccgctggggcggcaccagcctggagctgagctgcagcagcggcaacagctgccgcctgaggatgacaggcctgagcagcagcaccagccccagcaccacccccaccctgtgggccctgcctgcccctgtgaggaacctgctgtag

SEQ ID NO: 162149 - DNA, 1191 bp, synthetic construct
  misc_feature 1..1191: note = Description of Artificial Sequence: Synthetic coding sequence
  source 1..1191: mol_type = other DNA
atggcctgtgccggcctgctgactgtgtgcctgctgcggcccccagccccccagccccagccccagacccccaggcacccccagctggccccagaccccggccctgctggccacaccctcttccaggatgtgttccggcgggctgacaagaatgatgatggcaagctgagctttgaggagttccagaactactttgctgatggagtgctgagcctgggggagctgcaggagctgttcagcggcattgatggccacctgacagacaacctggagacagagaagctgtgtgactacttcagcgagcacctgggcgtgtacagacctgtgctggccgccctggagagcctgaacagagctgtgctggccgccatggatgccaccaagctggagtatgagcgggccagcaaggtggaccagtttgtgacccgcttcctgctgcgggagaccgtgtcccagctgcaggccctgcagagcagcctggagggcgccagtgacaccctggaggcccaggcccacggctggaggagtgatgctgagagcgtggaggcccagagccggctgtgtggcagcagaagagctggaagaagagccctgcggtctgtgagccgcagcagcacctggagccctggcagcagtgacaccggccgcagcagcgaggccgagatgcagtggaggctgcaggtgaaccggctgcaggagctgattgaccagctggagtgcaaggtgcgggctgtgggccctggcccccacaagggcggccccagctggtacccacctgagcccggcccctgctggaggcctggcccccacagcgtgcccagccaggccccccggctggagcccctgcgggaggaggacctggccaagggccctgacctgcacatcctgatggcccagaggcaggtgcaggtggccgaggagggcctgcaggacttccaccgggccctgcgctgctacgtggacttcaccggggcccagagccactgcctgcacgtgtctgcccagaagatgctggatggagccagcttcaccctgtatgagttctggcaggatgaggcctcctggaggaggcaccagcagagccctggcagcaaggccttccagaggatcctgattgaccacctgcgggccccagacaccctgaccaccgtcttcttccctgcctcctggtggatcatgaacaacaactag

SEQ ID NO: 162150 - DNA, 1089 bp, synthetic construct
  misc_feature 1..1089: note = Description of Artificial Sequence: Synthetic coding sequence
  source 1..1089: mol_type = other DNA
atggcctgtgccggcctgctgactgtgtgcctgctgcggcccccagccccccagccccagccccagacccccaggcacccccagctggccccagaccccggccctgctggccacaccctcttccaggatgtgttccggcgggctgacaagaatgatgatggcaagctgagctttgaggagttccagaactactttgctgatggagtgctgagcctgggggagctgcaggagctgttcagcggcattgatggccacctgacagacaacctggagacagagaagctgtgtgactacttcagcgagcacctgggcgtgtacagacctgtgctggccgccctggagagcctgaacagagctgtgctggccgccatggatgccaccaagctggagtatgagcgggccagcaaggtggaccagtttgtgacccgcttcctgctgcgggagaccgtgtcccagctgcaggccctgcagagcagcctggagggcgccagtgacaccctggaggcccaggcccacggctggaggagtgatgctgagagcgtggaggcccagagccggctgtgtggcagcagaagagctggaagaagagccctgcggtctgtgagccgcagcagcacctggagccctggcagcagtgacaccggccgcagcagcgaggccgagatgcagtggaggctgcaggtgaaccggctgcaggagctgattgaccagctggagtgcaaggccccccggctggagcccctgcgggaggaggacctggccaagggccctgacctgcacatcctgatggcccagaggcaggtgcaggtggccgaggagggcctgcaggacttccaccgggccctgcgctgctacgtggacttcaccggggcccagagccactgcctgcacgtgtctgcccagaagatgctggatggagccagcttcaccctgtatgagttctggcaggatgaggcctcctggaggaggcaccagcagagccctggcagcaaggccttccagaggatcctgattgaccacctgcgggccccagacaccctgaccaccgtcttcttccctgcctcctggtggatcatgaacaacaactag

SEQ ID NO: 162151 - DNA, 870 bp, synthetic construct
  misc_feature 1..870: note = Description of Artificial Sequence: Synthetic coding sequence
  source 1..870: mol_type = other DNA
atggcctgtgccggcctgctgactgtgtgcctgctgcggcccccagccccccagccccagccccagacccccaggcacccccagctggccccagaccccggccctgctggccacaccctcttccaggatgtgttccggcgggctgacaagaatgatgatggcaagctgagctttgaggagttccagaactactttgctgatggagtgctgagcctgggggagctgcaggagctgttcagcggcattgatggccacctgacagacaacctggagacagagaagctgtgtgactacttcagcgagcacctgggcgtgtacagacctgtgctggccgccctggagagcctgaacagagctgtgctggccgccatggatgccaccaagctggagtatgagcgggccagcaaggtggaccagtttgtgacccgcttcctgctgcgggagaccgtgtcccagctgcaggccctgcagagcagcctggagggcgccagtgacaccctggaggcccaggcccacggctggaggagtgatgctgagagcgtggaggcccagagccggctgtgtggcagcagaagagctggaagaagagccctgcggtctgtgagccgcagcagcacctggagccctggcagcagtgacaccggccgcagcagcgaggccgagatgcagtggaggctgcaggtgaaccggctgcaggagctgattgaccagctggagtgcaagcacatcctgatggcccagaggcaggtgcaggtggccgaggagggcctgcaggacttccaccgggccctgcgctgctacgtggacttcaccggggcccagagccactgcctgcacgtgtctgcccagaagatgctggatggagcctag

SEQ ID NO: 162152 - DNA, 423 bp, synthetic construct
  misc_feature 1..423: note = Description of Artificial Sequence: Synthetic coding sequence
  source 1..423: mol_type = other DNA
atggcctctgtggacttcaagacctacgtggaccaggcctgcagagctgctgaggagtttgtgaatgtgtactacaccaccatggacaagagaagaaggctgctgagccggctgtacatgggcacagccaccctggtgtggaatggaaatgctgtgtctggccaggagagcctgtctgagttctttgagatgctgcccagcagcgagttccagatctctgtggtggactgccagcctgtgcatgatgaggccacccccagccagaccaccgtgctggtggtgatctgtggctctgtgaagtttgagggcaacaagcagagggacttcaaccagaacttcatcctgacagcccaggccagccccagcaacacagtgtggaagatcgccagtgactgcttccgcttccaggactgggccagctag

SEQ ID NO: 162153 - DNA, 984 bp, synthetic construct
  misc_feature 1..984: note = Description of Artificial Sequence: Synthetic coding sequence
  source 1..984: mol_type = other DNA
atggctgtgcctgccaagaagaggaagatgaacttcagcgagcgggaggtggagatcatcgtggaggagctggagctgaagaagcacctgctggtgaaccacttcaatgccggcgtgcccctggccgccaagtctgctgcctggcacggcatcctgcggcgggtgaatgctgtggccacctgccggcgggagctgcctgaggtgaagaagaagtggagcgacctgaagacagaggtgcggaggaaggtggcccaggtgcgggctgctgtggagggcggggaggcccctggccccacagaagaagatggagctgggggccctggcactggaggcggcagcggcggcggcggccctgctgtggcccctgtgctgctgacccccatgcagcagaggatctgcaacctgctgggggaggccaccatcatcagcctgcccagcaccacagagatccaccctgtggccctgggccccagcgccacagctgctgctgccaccgtgaccctgacccagatccccacagagaccacctaccacaccctggaggagggcgtggtggagtactgcacagctgaggcccccccacccctgcccccagagacccctgtggacatgatggcccagcacgccgacacctctgtgaagccccaggccctgaagagccgcatcgccctgaacagcgccaagctgatccaggagcagagggtgaccaacctgcacgtgaaggagatcgcccagcacctggagcagcagaatgacctgctgcagatgatccgccgcagccaggaggtgcaggcctgtgcccaggagcggcaggcccaggccatggagggcacccaggccgccctgtctgtgctgatccaggtgctgcggcccatgatcaaggacttccgccgctacctgcagagcaacacagccaacccagccccagccagtgaccccggccaggtggcccagaatggccagcctgacagcatcatccagtag

SEQ ID NO: 162154 - DNA, 1485 bp, synthetic construct
  misc_feature 1..1485: note = Description of Artificial Sequence: Synthetic coding sequence
  source 1..1485: mol_type = other DNA
atggaggtggtggaggccgccgccgcccagctggagaccctgaagttcaatggaacagactttggagtgggggagggccctgctgcccccagccctggcagcgcccctgtgcccggcacccagccccccctgcagagctttgagggcagcccagatgctggccagacagtggaggtgaagccagctggggagcagcccctgcagcctgtgctgaatgctgtggccgccggcaccccagccccccagccccagcccccagctgagagccctgcctgtggggactgtgtgaccagccctggagctgctgagcccgcccgggccccagacagcctggagaccagtgacagcgacagcgacagcgacagcgagacagacagcgacagcagcagcagcagcagcagcagcagcagcagcagcagcagcagcagcagcagctgcatcagcctgccccctgtgctgagtgatggagatgatgacctgcagatcgagaaggagaacaagaacttccccctgaagaccaaggatgagctgctgctgaatgagctgcccagcgtggaggagctgaccatcatcctgcctgaggacatcgagctgaagcccctgggcatggtgagcagcatcatcgagcagctggtgatcatcgagagcatgaccaacctgccccctgtgaatgaggagaccgtcatcttcaagagtgaccggcaggccgccggcaagatctttgagatcttcggccctgtggcccaccccttctacgtgctgcgcttcaacagcagtgaccacatcgagagcaagggcatcaagatcaaggagaccatgtactttgcccccagcatgaaggacttcacccagtacatcttcacagagaagctgaagcaggacaagggcagtgatgcctcctggaagaatgaccaggagcccccacctgaggccctggacttcagtgatgatgagaaggagaaggaggccaagcagaggaagaagagccagatccagggcaggaagaagctgaagtctgagttcaatgagcccggggaggacttcacagaggtgcaccagaactggaatgcccacagcagcgccagcgagcacgccaagggctacagaaaccgggagttcacccggggcttcagccgggcccgctaccccaggagctgccacggccggcccccaccccagcacttctacaacagcgagcacatggtgtcccaggagaccagcggcttccccagccagaggcagaacaaccccatcatgccccagtaccccttccccctgcctgtgtttgacatgcacaacttccccctgcggcccccacctcctcctcctcctcctcctgtgaacatgggctgggccacccccaacatggccgcccaccccctgctgaacctgccctacagcctgcccccacctcctcctcctccacccctgcccccaccacccagcagcggggacagcaacagccacttcggcccctactactag

SEQ ID NO: 162155 - DNA, 1170 bp, synthetic construct
  misc_feature 1..1170: note = Description of Artificial Sequence: Synthetic coding sequence
  source 1..1170: mol_type = other DNA
atggaggtggtggaggccgccgccgcccagctggagaccctgaagttcaatggaacagactttggagtgggggagggccctgctgcccccagccctggcagcgcccctgtgcccggcacccagccccccctgcagagctttgagggcagcccagatgctggccagacagtggaggtgaagccagctggggagcagcccctgcagcctgtgctgaatgctgtggccgccggcaccccagccccccagccccagcccccagctgagagccctgcctgtggggactgtgtgaccagccctggagctgctgagcccgcccgggccccagacagcctggagaccagtgacagcgacagcgacagcgacagcgagacagacagcgacagcagcagcagcagcagcagcagcagcagcagcagcagcagcagcagcagcagctgcatcagcctgccccctgtgctgagtgatggagatgatgacctgcagatcgagaaggagaacaagaacttccccctgaagaccaaggatgagctgctgctgaatgagctgcccagcgtggaggagctgaccatcatcctgcctgaggacatcgagctgaagcccctgggcatggtgagcagcatcatcgagcagctggtgatcatcgagagcatgaccaacctgccccctgtgaatgaggagaccgtcatcttcaagagtgaccggcaggccgccggcaagatctttgagatcttcggccctgtggcccaccccttctacgtgctgcgcttcaacagcagtgaccacatcgagagcaagggcatcaagatcaaggagaccatgtactttgcccccagcatgaaggacttcacccagtacatcttcacagagaagctgaagcaggacaagggcagtgatgcctcctggaagaatgaccaggagcccccacctgaggccctggacttcagtgatgatgagaaggagaaggaggccaagcagaggaagaagagccagatccagggcaggaagaagctgaagtctgagttcaatgagcccggcaccggcatcagccaccgctactgcggcctgggcagccggcccctgcagagcagcgagagccacaagctgtttggcttccagatgcacatcaaggtgaccttcacctgctacttcagcctgctgtccatgcagtag

SEQ ID NO: 162156 - DNA, 345 bp, synthetic construct
  misc_feature 1..345: note = Description of Artificial Sequence: Synthetic coding sequence
  source 1..345: mol_type = other DNA
ctggccagccggctgggccctgtgtccacagccaacatgagcaggcctgtgaggaacaggaaggtggtggactacagccagttccaggagagtgatgatgctgactttgaaagtgaagattctgaggacaaggatgtgaagaccaagaaggatgacagccacagcgcagaagattctgaagatgagaaggaggaccacaagaatgtgcggcagcagaggcaggccgccagcaaggccgccagcaagcagcgggagatgctgatggaggatgtgggcagcgaggaggagcaggaggaggaggatgaggcccccttccaggagaggaaggacagcttcagccagtag

SEQ ID NO: 162157 - DNA, 732 bp, synthetic construct
  misc_feature 1..732: note = Description of Artificial Sequence: Synthetic coding sequence
  source 1..732: mol_type = other DNA
atgagcaggcctgtgaggaacaggaaggtggtggactacagccagttccaggagagtgatgatgctgatgaggactatggccgggacagcggcccccccaccaagaagatccgcagcagcccccgggaggccaagaacaagagaagaagtggcaagaacagccaggaggacagtgaagattctgaggacaaggatgtgaagaccaagaaggatgacagccacagcgcagaagattctgaagatgagaaggaggaccacaagaatgtgcggcagcagaggcaggccgccagcaaggccgccagcaagcagcgggagatgctgatggaggatgtgggcagcgaggaggagcaggaggaggaggatgaggcccccttccaggagaaggacagcggcagtgatgaggacttcctgatggaggatgatgatgacagcgactatggcagcagcaagaagaagaacaagaagatggtgaagaagagcaagccagagaggaaggagaagaagatgcccaagccccggctgaaggccaccgtgacccccagccctgtgaagggcaagggcaaggtgggccggcccacagccagcaaggccagcaaggagaagacccccagccccaaggaggaggatgaggagcctgagagccccccagagaagaagaccagcaccagccccccacctgagaagtctggagatgagggctctgaagatgaggcccccagcggggaggactag

SEQ ID NO: 162158 - DNA, 1122 bp, synthetic construct
  misc_feature 1..1122: note = Description of Artificial Sequence: Synthetic coding sequence
  source 1..1122: mol_type = other DNA
atgagcccctgccccccccagcagagcaggaacagagtcatccagctgagcaccagcgagctgggggagatggagctgacctggcaggagatcatgagcatcacagagctgcagggcctgaatgcccccagcgagcccagctttgagccccaggccccagccccctacctgggccccccaccacccaccacctactgcccctgcagcatccacccagacagcggcttccccctgcccccaccaccctatgagctgcctgccagcaccagccacgtgcctgaccccccctacagctatggcaacatggccatccctgtgtccaagcccctgagcctgagcggcctgctgtctgagcccctgcaggaccccctggccctgctggacatcggcctgcctgctggcccccccaagccccaggaggaccctgagagtgacagcggcctgagcctgaactacagtgatgctgagagcctggagctggagggcacagaagctggaagaagaagaagtgaatatgtggagatgtaccctgtggagtacccctacagcctgatgcccaacagcctggcccacagcaactacaccctgcctgctgctgagacccccctggccctggagcccagcagcggccctgtgcgggccaagcccacagcccggggggaggccggcagcagagatgagcggcgggccctggccatgaagatccccttccccacagacaagatcgtgaacctgcctgtggatgacttcaatgagctgctggcccgctaccccctgacagagagccagctggccctggtgcgggacatcagaagaagaggcaagaacaaggtggccgcccagaactgcaggaagaggaagctggagaccatcgtgcagctggagcgggagctggagcggctgaccaatgaaagagagcggctgctgcgggcccggggggaggccgacaggaccctggaggtgatgaggcagcagctgacagagctgtacagagacatcttccagcacctgagagatgaaagtggcaacagctacagccctgaggagtatgccctgcagcaggccgcagatggcaccatcttcctggtgccccggggcaccaagatggaggccacagactag

SEQ ID NO: 162159 - DNA, 1122 bp, synthetic construct; identical to SEQ ID NO: 162158
  misc_feature 1..1122: note = Description of Artificial Sequence: Synthetic coding sequence
  source 1..1122: mol_type = other DNA

SEQ ID NO: 162160 - DNA, 1122 bp, synthetic construct; identical to SEQ ID NO: 162158
  misc_feature 1..1122: note = Description of Artificial Sequence: Synthetic coding sequence
  source 1..1122: mol_type = other DNA

SEQ ID NO: 162161 - DNA, 1122 bp, synthetic construct; identical to SEQ ID NO: 162158
  misc_feature 1..1122: note = Description of Artificial Sequence: Synthetic coding sequence
  source 1..1122: mol_type = other DNA

SEQ ID NO: 162162 - DNA, 1032 bp, synthetic construct
  misc_feature 1..1032: note = Description of Artificial Sequence: Synthetic coding sequence
  source 1..1032: mol_type = other DNA
atgagcccctgccccccccagcagagcaggaacagagtcatccagctgagcaccagcgagctgggggagatggagctgacctggcaggagatcatgagcatcacagagctgcagggcctgaatgcccccagcgagcccagctttgagccccaggccccagccccctacctgggccccccaccacccaccacctactgcccctgcagcatccacccagacagcggcttccccctgcccccaccaccctatgagctgcctgccagcaccagccacgtgcctgaccccccctacagctatggcaacatggccatccctgtgtccaagcccctgagcctgagcggcctgctgtctgagcccctgcaggaccccctggccctgctggacatcggcctgcctgctggcccccccaagccccaggaggaccctgagagtgacagcggcctgagcctgaactacagtgatgctgagagcctggagctggagggcacagaagctggaagaagaagaagtgaatatgtggagatgtaccctgtggagtacccctacagcctgatgcccaacagcctggcccacagcaactacaccctgcctgctgctgagacccccctggccctggagcccagcagcggccctgtgcgggccaagcccacagcccggggggaggccggcagcagagatgagcggcgggccctggccatgaagatccccttccccacagacaagatcgtgaacctgcctgtggatgacttcaatgagctgctggcccgctaccccctgacagagagccagctggccctggtgcgggacatcagaagaagaggcaagaacaaggtggccgcccagaactgcaggaagaggaagctggagaccatcgtgcagctggagcgggagctggagcggctgaccaatgaaagagagcggctgctgcgggcccggggggaggccgacaggaccctggaggtgatgaggcagcagctgacagagctgtacagagacatcttccagcacctgagagatgaaagtggcaactag

SEQ ID NO: 162163 - DNA, 2229 bp, synthetic construct
  misc_feature 1..2229: note = Description of Artificial Sequence: Synthetic coding sequence
  source 1..2229: mol_type = other DNA
atgctgagcctgaagaagtacctgacagagggcctgctgcagttcaccatcctgctgagcctcatcggcgtgcgggtggatgtggacacctacctgaccagccagctgccccccctgcgggagatcatcctgggccccagcagcgcctacacccagacccagttccacaacctgaggaacaccctggatggctacggcatccaccccaagagcattgacctggacaactacttcaccgcccggcggctgctgagccaggtgcgggccctggaccgcttccaggtgcccaccacagaggtgaatgcctggctggtgcaccgggaccctgagggctctgtgtctggcagccagcccaacagcggcctggccctggagagcagcagcggcctgcaggatgtgacaggccctgacaacggggtgcgggagagcgagacagagcagggctttggagaggacctggaggacctgggcgctgtggcccctcctgtgtctggggacctgaccaaggaggacatcgacctgattgacatcctgtggaggcaggacatcgacctgggcgccggccgggaggtgtttgactacagccaccggcagaaggagcaggatgtggagaaggagctgagagatggaggagagcaggacacctgggccggggagggcgctgaggccctggccaggaacctgctggtggatggagagaccggggagagcttccctgcccagtttcctgctgacatcagcagcatcacagaggccgtgcccagcgagagcgagcccccagccctgcagaacaacctgctgagccccctgctgaccggcacagagagcccctttgacctggagcagcagtggcaggacctgatgagcatcatggagatgcaggccatggaggtgaacaccagcgccagcgagatcctgtacagcgcccctcctggggaccccctgagcaccaactacagcctggcccccaacacccccatcaaccagaatgtgtccctgcaccaggccagcctgggcggctgcagccaggacttcctgctcttcagccctgaggtggagagcctgcctgtggccagcagcagcaccctgctgcccctggcccccagcaacagcaccagcctgaacagcaccttcggcagcaccaacctgaccggcctcttcttccccccccagctgaatggaacagccaatgacacagctggccctgagctgcctgaccccctgggcggcctgctggatgaggccatgctggatgagatcagcctgatggacctggccatcgaggagggcttcaaccctgtgcaggccagccagctggaggaggagtttgacagcgacagcggcctgagcctggacagcagccacagccccagcagcctgagcagcagcgagggcagcagcagcagcagcagcagcagcagcagcagcagcagcagcgccagcagcagcgccagcagcagcttcagcgaggagggcgctgtgggctacagcagtgacagcgagaccctggacctggaggaggccgagggcgctgtgggctaccagcctgagtacagcaagttctgcaggatgagctaccaggaccctgcccagctgagctgcctgccctacctggagcacgtgggccacaaccacacctacaacatggcccccagcgccctggacagcgctgacctgcccccaccttctgccctgaagaagggcagcaaggagaagcaggccgacttcctggacaagcagatgagcagagatgagcaccgggcccgggccatgaagatccccttcaccaatgacaagatcatcaacctgcctgtggaggagttcaatgagctgctgagcaagtaccagctgtctgaggcccagctgagcctcatccgggacatcagaagaagaggcaagaacaagatggccgcccagaactgcaggaagaggaagctggacaccatcctgaacctggagagagatgtggaggacctgcagagggacaaggcccggctgctgcgggagaaggtggagttcctgcggagcctgcggcagatgaagcagaaggtgcagagcctgtaccaggaggtgtttggccgcctgagagatgaaaatggccggccctacagccccagccagtatgccctgcagtatgctggagatggctctgtgctgctgatccccaggaccatggctgaccagcaggcccggcggcaggagaggaagcccaaggacaggaggaagtag

SEQ ID NO: 162164 - DNA, 2319 bp, synthetic construct
  misc_feature 1..2319: note = Description of Artificial Sequence: Synthetic coding sequence
  source 1..2319: mol_type = other DNA
atgctgagcctgaagaagtacctgacagagggcctgctgcagttcaccatcctgctgagcctcatcggcgtgcgggtggatgtggacacctacctgaccagccagctgccccccctgcgggagatcatcctgggccccagcagcgcctacacccagacccagttccacaacctgaggaacaccctggatggctacggcatccaccccaagagcattgacctggacaactacttcaccgcccggcggctgctgagccaggtgcgggccctggaccgcttccaggtgcccaccacagaggtgaatgcctggctggtgcaccgggaccctgagggctctgtgtctggcagccagcccaacagcggcctggccctggagagcagcagcggcctgcaggatgtgacaggccctgacaacggggtgcgggagagcgagacagagcagggctttggagaggacctggaggacctgggcgctgtggcccctcctgtgtctggggacctgaccaaggaggacatcgacctgattgacatcctgtggaggcaggacatcgacctgggcgccggccgggaggtgtttgactacagccaccggcagaaggagcaggatgtggagaaggagctgagagatggaggagagcaggacacctgggccggggagggcgctgaggccctggccaggaacctgctggtggatggagagaccggggagagcttccctgcccaggtgcccagcggggaggaccagacagccctgagcctggaggagtgcctgcggctgctggaggccacctgcccctttggagaaaatgctgagttccctgctgacatcagcagcatcacagaggccgtgcccagcgagagcgagcccccagccctgcagaacaacctgctgagccccctgctgaccggcacagagagcccctttgacctggagcagcagtggcaggacctgatgagcatcatggagatgcaggccatggaggtgaacaccagcgccagcgagatcctgtacagcgcccctcctggggaccccctgagcaccaactacagcctggcccccaacacccccatcaaccagaatgtgtccctgcaccaggccagcctgggcggctgcagccaggacttcctgctcttcagccctgaggtggagagcctgcctgtggccagcagcagcaccctgctgcccctggcccccagcaacagcaccagcctgaacagcaccttcggcagcaccaacctgaccggcctcttcttccccccccagctgaatggaacagccaatgacacagctggccctgagctgcctgaccccctgggcggcctgctggatgaggccatgctggatgagatcagcctgatggacctggccatcgaggagggcttcaaccctgtgcaggccagccagctggaggaggagtttgacagcgacagcggcctgagcctggacagcagccacagccccagcagcctgagcagcagcgagggcagcagcagcagcagcagcagcagcagcagcagcagcagcagcgccagcagcagcgccagcagcagcttcagcgaggagggcgctgtgggctacagcagtgacagcgagaccctggacctggaggaggccgagggcgctgtgggctaccagcctgagtacagcaagttctgcaggatgagctaccaggaccctgcccagctgagctgcctgccctacctggagcacgtgggccacaaccacacctacaacatggcccccagcgccctggacagcgctgacctgcccccaccttctgccctgaagaagggcagcaaggagaagcaggccgacttcctggacaagcagatgagcagagatgagcaccgggcccgggccatgaagatccccttcaccaatgacaagatcatcaacctgcctgtggaggagttcaatgagctgctgagcaagtaccagctgtctgaggcccagctgagcctcatccgggacatcagaagaagaggcaagaacaagatggccgcccagaactgcaggaagaggaagctggacaccatcctgaacctggagagagatgtggaggacctgcagagggacaaggcccggctgctgcgggagaaggtggagttcctgcggagcctgcggcagatgaagcagaaggtgcagagcctgtaccaggaggtgtttggccgcctgagagatgaaaatggccggccctacagccccagccagtatgccctgcagtatgctggagatggctctgtgctgctgatccccaggaccatggctgaccagcaggcccggcggcaggagaggaagcccaaggacaggaggaagtag

SEQ ID NO: 162165 - DNA, 2376 bp, synthetic construct
  misc_feature 1..2376: note = Description of Artificial Sequence: Synthetic coding sequence
  source 1..2376: mol_type = other DNA
tttgtgttctggaagatcctgaagaccaagaagcacaagcacagcggccccagcgccatgctgagcctgaagaagtacctgacagagggcctgctgcagttcaccatcctgctgagcctgattggagtgcgggtggatgtggacacctacctgaccagccagctgccccccctgcgggagatcatcctgggccccagcagcgcctacacccagacccagttccacaacctgaggaacaccctggatggctacggcatccaccccaagagcattgacctggacaactacttcaccgcccggcggctgctgagccaggtgcgggccctggaccgcttccaggtgcccaccacagaggtgaatgcctggctggtgcaccgggaccctgagggctctgtgtctggcagccagcccaacagcggcctggccctggagagcagcagcggcctgcaggatgtgactggaccagacaatggagtgcgggagagcgagacagagcagggctttggagaggacctggaggacctgggcgctgtggcccctcctgtgtctggggacctgaccaaggaggacatcgacctgattgacatcctgtggaggcaggacatcgacctgggcgccggccgggaggtgtttgactacagccaccggcagaaggagcaggatgtggagaaggagctgagagatggaggagagcaggacacctgggccggggagggcgctgaggccctggccaggaacctgctggtggatggagaaacaggagagagcttccctgcccaggtgcccagcggggaggaccagacagccctgagcctggaggagtgcctgcggctgctggaggccacctgcccctttggagaaaatgctgagttccctgctgacatcagcagcatcacagaagctgtgcccagcgagagcgagcccccagccctgcagaacaacctgctgagccccctgctgactggaacagagagcccctttgacctggagcagcagtggcaggacctgatgagcatcatggagatgcaggccatggaggtgaacaccagcgccagcgagatcctgtacagcgcccctcctggggaccccctgagcaccaactacagcctggcccccaacacccccatcaaccagaatgtgtccctgcaccaggccagcctgggcggctgcagccaggacttcctgctcttcagccctgaggtggagagcctgcctgtggccagcagcagcaccctgctgcccctggcccccagcaacagcaccagcctgaacagcaccttcggcagcaccaacctgaccggcctcttcttccccccccagctgaatggaacagccaatgacacagctggccctgagctgcctgaccccctgggcggcctgctggatgaggccatgctggatgagatcagcctgatggacctggccatcgaggagggcttcaaccctgtgcaggccagccagctggaggaggagtttgacagcgacagcggcctgagcctggacagcagccacagccccagcagcctgagcagcagcgagggcagcagcagcagcagcagcagcagcagcagcagcagcagcagcgccagcagcagcgccagcagcagcttcagcgaggagggcgctgtgggctacagcagtgacagcgagaccctggacctggaggaggccgagggcgctgtgggctaccagcctgagtacagcaagttctgcaggatgagctaccaggaccctgcccagctgagctgcctgccctacctggagcacgtgggccacaaccacacctacaacatggcccccagcgccctggacagcgctgacctgcccccacccagcgccctgaagaagggcagcaaggagaagcaggccgacttcctggacaagcagatgagcagagatgagcaccgggcccgggccatgaagatccccttcaccaatgacaagatcatcaacctgcctgtggaggagttcaatgagctgctgagcaagtaccagctgtctgaggcccagctgagcctcatccgggacatcagaagaagaggcaagaacaagatggccgcccagaactgcaggaagaggaagctggacaccatcctgaacctggagagagatgtggaggacctgcagagggacaaggcccggctgctgcgggagaaggtggagttcctgcggagcctgcggcagatgaagcagaaggtgcagagcctgtaccaggaggtgtttggccgcctgagagatgaaaatggccggccctacagccccagccagtatgccctgcagtatgctggagatggctctgtgctgctgatccccaggaccatggctgaccagcaggcccggcggcaggagaggaagcccaaggacaggaggaagtag

SEQ ID NO: 162166 - DNA, 1851 bp, synthetic construct
  misc_feature 1..1851: note = Description of Artificial Sequence: Synthetic coding sequence
  source 1..1851: mol_type = other DNA
atgacccggctggacaggagcagccacagcggcggcggccacgccaagggcagccggcccctgaacagcctgctggccggccaccgggtggcccagcctgccagcgcccctggcagccgggcctctgtgcaggacatcgacctgattgacatcctgtggaggcaggacatcgacctgggcgccggccgggaggtgtttgactacagccaccggcagaaggagcaggatgtggagaaggagctgagagatggaggagagcaggacacctgggccggggagggcgctgaggccctggccaggaacctgctggtggatggagagaccggggagagcttccctgcccagtttcctgctgacatcagcagcatcacagaggccgtgcccagcgagagcgagcccccagccctgcagaacaacctgctgagccccctgctgaccggcacagagagcccctttgacctggagcagcagtggcaggacctgatgagcatcatggagatgcaggccatggaggtgaacaccagcgccagcgagatcctgtacagcgcccctcctggggaccccctgagcaccaactacagcctggcccccaacacccccatcaaccagaatgtgtccctgcaccaggccagcctgggcggctgcagccaggacttcctgctcttcagccctgaggtggagagcctgcctgtggccagcagcagcaccctgctgcccctggcccccagcaacagcaccagcctgaacagcaccttcggcagcaccaacctgaccggcctcttcttccccccccagctgaatggaacagccaatgacacagctggccctgagctgcctgaccccctgggcggcctgctggatgaggccatgctggatgagatcagcctgatggacctggccatcgaggagggcttcaaccctgtgcaggccagccagctggaggaggagtttgacagcgacagcggcctgagcctggacagcagccacagccccagcagcctgagcagcagcgagggcagcagcagcagcagcagcagcagcagcagcagcagcagcagcgccagcagcagcgccagcagcagcttcagcgaggagggcgctgtgggctacagcagtgacagcgagaccctggacctggaggaggccgagggcgctgtgggctaccagcctgagtacagcaagttctgcaggatgagctaccaggaccctgcccagctgagctgcctgccctacctggagcacgtgggccacaaccacacctacaacatggcccccagcgccctggacagcgctgacctgcccccaccttctgccctgaagaagggcagcaaggagaagcaggccgacttcctggacaagcagatgagcagagatgagcaccgggcccgggccatgaagatccccttcaccaatgacaagatcatcaacctgcctgtggaggagttcaatgagctgctgagcaagtaccagctgtctgaggcccagctgagcctcatccgggacatcagaagaagaggcaagaacaagatggccgcccagaactgcaggaagaggaagctggacaccatcctgaacctggagagagatgtggaggacctgcagagggacaaggcccggctgctgcgggagaaggtggagttcctgcggagcctgcggcagatgaagcagaaggtgcagagcctgtaccaggaggtgtttggccgcctgagagatgaaaatggccggccctacagccccagccagtatgccctgcagtatgctggagatggctctgtgctgctgatccccaggaccatggctgaccagcaggcccggcggcaggagaggaagcccaaggacaggaggaagtag

SEQ ID NO: 162167 - DNA, 1818 bp, synthetic construct
  misc_feature 1..1818: note = Description of Artificial Sequence: Synthetic coding sequence
  source 1..1818: mol_type = other DNA
atgatggacctggagctgcccccacctggcctgcccagccagcaggacatggacctgattgacatcctgtggaggcaggacatcgacctgggcgtgtcccgggaggtgtttgacttcagccagaggaggaaggagtatgagctggagaagcagaagaagctggagaaggagcggcaggagcagctgcagaaggagcaggagaaggccttctttgcccagctgcagctggatgaggagaccggggagttcctgcccatccagcctgcccagcacatccagagcgagaccagcggcagcgccaactacagccaggtggcccacatccccaagagtgatgccctgtactttgatgactgcatgcagctgctggcccagaccttcccctttgtggatgacaatgaggtgtcctctgccaccttccagagcctggtgcctgacatccctggccacatcgagagccctgtgttcatcgccaccaaccaggcccagagccctgagacctctgtggcccaggtggcccctgtggacctggatggcatgcagcaggacatcgagcaggtgtgggaggagctgctgagcatccctgagctgcagtgcctgaacattgaaaatgacaagctggtggagaccaccatggtgcccagccctgaggccaagctgacagaggtggacaactaccacttctacagcagcatccccagcatggagaaggaggtgggcaactgcagcccccacttcctgaatgcctttgaagattccttcagcagcatcctgagcacagaggaccccaaccagctgactgtgaacagcctgaacagtgatgccaccgtgaacacagactttggagatgagttctacagcgccttcatcgccgagcccagcatcagcaacagcatgcccagccctgccaccctgagccacagcctgtctgagctgctgaatggccccattgatgtgtctgacctgagcctgtgcaaggccttcaaccagaaccaccctgagagcacagctgagttcaatgacagcgacagcggcatcagcctgaacaccagccccagcgtggccagccctgagcacagcgtggagagcagcagctatggagacaccctgctgggcctgagtgacagcgaggtggaggagctggacagcgcccctggctctgtgaagcagaatggccccaagacccctgtgcacagcagcggggacatggtgcagcccctgagccccagccagggccagagcacccacgtgcatgatgcccagtgtgagaacaccccagagaaggagctgcctgtgtccccaggccacaggaagacccccttcaccaaggacaagcacagcagccggctggaggcccacctgaccagagatgagctgcgggccaaggccctgcacatccccttccctgtggagaagatcatcaacctgcctgtggtggacttcaatgagatgatgagcaaggagcagttcaatgaggcccagctggccctgatccgggacatcagaagaagaggcaagaacaaggtggccgcccagaactgcaggaagaggaagctggagaacatcgtggagctggagcaggacctggaccacctgaaggatgagaaggagaagctgctgaaggagaagggagaaaatgacaagagcctgcacctgctgaagaagcagctgagcaccctgtacctggaggtgttctccatgctgagagatgaagatggcaagccctacagccccagcgagtacagcctgcagcagaccagagatggaaatgtgttcctggtgcccaagagcaagaagccagatgtgaagaagaactag

SEQ ID NO: 162168 - DNA, 1770 bp, synthetic construct
  misc_feature 1..1770: note = Description of Artificial Sequence: Synthetic coding sequence
  source 1..1770: mol_type = other DNA
atggacctgattgacatcctgtggaggcaggacatcgacctgggcgtgtcccgggaggtgtttgacttcagccagaggaggaaggagtatgagctggagaagcagaagaagctggagaaggagcggcaggagcagctgcagaaggagcaggagaaggccttctttgcccagctgcagctggatgaggagaccggggagttcctgcccatccagcctgcccagcacatccagagcgagaccagcggcagcgccaactacagccaggtggcccacatccccaagagtgatgccctgtactttgatgactgcatgcagctgctggcccagaccttcccctttgtggatgacaatgaggtgtcctctgccaccttccagagcctggtgcctgacatccctggccacatcgagagccctgtgttcatcgccaccaaccaggcccagagccctgagacctctgtggcccaggtggcccctgtggacctggatggcatgcagcaggacatcgagcaggtgtgggaggagctgctgagcatccctgagctgcagtgcctgaacattgaaaatgacaagctggtggagaccaccatggtgcccagccctgaggccaagctgacagaggtggacaactaccacttctacagcagcatccccagcatggagaaggaggtgggcaactgcagcccccacttcctgaatgcctttgaagattccttcagcagcatcctgagcacagaggaccccaaccagctgactgtgaacagcctgaacagtgatgccaccgtgaacacagactttggagatgagttctacagcgccttcatcgccgagcccagcatcagcaacagcatgcccagccctgccaccctgagccacagcctgtctgagctgctgaatggccccattgatgtgtctgacctgagcctgtgcaaggccttcaaccagaaccaccctgagagcacagctgagttcaatgacagcgacagcggcatcagcctgaacaccagccccagcgtggccagccctgagcacagcgtggagagcagcagctatggagacaccctgctgggcctgagtgacagcgaggtggaggagctggacagcgcccctggctctgtgaagcagaatggccccaagacccctgtgcacagcagcggggacatggtgcagcccctgagccccagccagggccagagcacccacgtgcatgatgcccagtgtgagaacaccccagagaaggagctgcctgtgtccccaggccacaggaagacccccttcaccaaggacaagcacagcagccggctggaggcccacctgaccagagatgagctgcgggccaaggccctgcacatccccttccctgtggagaagatcatcaacctgcctgtggtggacttcaatgagatgatgagcaaggagcagttcaatgaggcccagctggccctgatccgggacatcagaagaagaggcaagaacaaggtggccgcccagaactgcaggaagaggaagctggagaacatcgtggagctggagcaggacctggaccacctgaaggatgagaaggagaagctgctgaaggagaagggagaaaatgacaagagcctgcacctgctgaagaagcagctgagcaccctgtacctggaggtgttctccatgctgagagatgaagatggcaagccctacagccccagcgagtacagcctgcagcagaccagagatggaaatgtgttcctggtgcccaagagcaagaagccagatgtgaagaagaactag

SEQ ID NO: 162169 - DNA, 705 bp, synthetic construct
  misc_feature 1..705: note = Description of Artificial Sequence: Synthetic coding sequence
  source 1..705: mol_type = other DNA
atggacctgattgacatcctgtggaggcaggacatcgacctgggcgtgtcccgggaggtgtttgacttcagccagaggaggaaggagtatgagctggagaagcagaagaagctggagaaggagcggcaggagcagctgcagaaggagcaggagaaggccttctttgcccagctgcagctggatgaggagaccggggagttcctgcccatccagcctgcccagcacatccagagcgagaccagcggcagcgccaactacagccaggtggcccacatccccaagagtgatgccctgtactttgatgactgcatgcagctgctggcccagaccttcccctttgtggatgacaatgaggtgtcctctgccaccttccagagcctggtgcctgacatccctggccacatcgagagccctgtgttcatcgccaccaaccaggcccagagccctgagacctctgtggcccaggtggcccctgtggacctggatggcatgcagcaggacatcgagcaggtgtgggaggagctgctgagcatccctgagctgcagtgcctgaacattgaaaatgacaagctggtggagaccaccatggtgcccagccctgaggccaagctgacagaggtggacaactaccacttctacagcagcatccccagcatggagaaggaggtgggcaactgcagcccccacttcctgaatgccttctag

SEQ ID NO: 162170 - DNA, 843 bp, synthetic construct
  misc_feature 1..843: note = Description of Artificial Sequence: Synthetic coding sequence
  source 1..843: mol_type = other DNA
atggacctgattgacatcctgtggaggcaggacatcgacctgggcgtgtcccgggaggtgtttgacttcagccagaggaggaaggagtatgagctggagaagcagaagaagctggagaaggagcggcaggagcagctgcagaaggagcaggagaaggccttctttgcccagctgcagctggatgaggagaccggggagttcctgcccatccagcctgcccagcacatccagagcgagaccagcggcagcgccaactacagccaggtggcccacatccccaagagtgatgccctgtactttgatgactgcatgcagctgctggcccagaccttcccctttgtggatgacaatgaggtgtcctctgccaccttccagagcctggtgcctgacatccctggccacatcgagagccctgtgttcatcgccaccaaccaggcccagagccctgagacctctgtggcccaggtggcccctgtggacctggatggcatgcagcaggacatcgagcaggtgtgggaggagctgctgagcatccctgagctgcagtgcctgaacattgaaaatgacaagctggtggagaccaccatggtgcccagccctgaggccaagctgacagaggtggacaactaccacttctacagcagcatccccagcatggagaaggaggtgggcaactgcagcccccacttcctgaatgcctttgaagattccttcagcagcatcctgagcacagaggaccccaaccagctgactgtgaacagcctgaacagtgatgccaccgtgaacacagactttggagatgagttctacagcgccttcatcgccgagcccagcatctcctag

SEQ ID NO: 162171 - DNA, 1749 bp, synthetic construct
  misc_feature 1..1749: note = Description of Artificial Sequence: Synthetic coding sequence
  source 1..1749: mol_type = other DNA
atggacctgattgacatcctgtggaggcaggacatcgacctgggcgtgtcccgggaggtgtttgacttcagccagaggaggaaggagtatgagctggagaagcagaagaagctggagaaggagcggcaggagcagctgcagaaggagcaggagaaggccttctttgcccagctgcagctggatgaggagaccggggagttcctgcccatccagcctgcccagcacatccagagcgagaccagcggcagcgccaactacagccaggtggcccacatccccaagagtgatgccctgtactttgatgactgcatgcagctgctggcccagaccttcccctttgtggatgacaatgaaagcctggtgcctgacatccctggccacatcgagagccctgtgttcatcgccaccaaccaggcccagagccctgagacctctgtggcccaggtggcccctgtggacctggatggcatgcagcaggacatcgagcaggtgtgggaggagctgctgagcatccctgagctgcagtgcctgaacattgaaaatgacaagctggtggagaccaccatggtgcccagccctgaggccaagctgacagaggtggacaactaccacttctacagcagcatccccagcatggagaaggaggtgggcaactgcagcccccacttcctgaatgcctttgaggacagcttcagcagcatcctgagcacagaggaccccaaccagctgactgtgaacagcctgaacagtgatgccaccgtgaacacagactttggagatgagttctacagcgccttcatcgccgagcccagcatcagcaacagcatgcccagccctgccaccctgagccacagcctgtctgagctgctgaatggccccattgatgtgtctgacctgagcctgtgcaaggccttcaaccagaaccaccctgagagcacagctgagttcaatgacagcgacagcggcatcagcctgaacaccagccccagcgtggccagccctgagcacagcgtggagagcagcagctatggagacaccctgctgggcctgagtgacagcgaggtggaggagctggacagcgcccctggctctgtgaagcagaatggccccaagacccctgtgcacagcagcggggacatggtgcagcccctgagccccagccagggccagagcacccacgtgcatgatgcccagtgtgagaacaccccagagaaggagctgcctgtgtccccaggccacaggaagacccccttcaccaaggacaagcacagcagccggctggaggcccacctgaccagagatgagctgcgggccaaggccctgcacatccccttccctgtggagaagatcatcaacctgcctgtggtggacttcaatgagatgatgagcaaggagcagttcaatgaggcccagctggccctgatccgggacatcagaagaagaggcaagaacaaggtggccgcccagaactgcaggaagaggaagctggagaacatcgtggagctggagcaggacctggaccacctgaaggatgagaaggagaagctgctgaaggagaagggggagaatgacaagagcctgcacctgctgaagaagcagctgagcaccctgtacctggaggtgttctccatgctgagagatgaagatggcaagccctacagccccagcgagtacagcctgcagcagaccagagatggaaatgtgttcctggtgcccaagagcaagaagccagatgtgaagaagaactag

SEQ ID NO: 162172 - DNA, 2085 bp, synthetic construct
  misc_feature 1..2085: note = Description of Artificial Sequence: Synthetic coding sequence
  source 1..2085: mol_type = other DNA
atgaagcacctgaagcgctggtggagcgctgggggcggcctgctgcacctgaccctgctgctgagcctggccggcctgcgggtggacctggacctgtacctgctgctgcccccacccaccctgctgcaggatgagctgctcttcctgggcggccctgccagcagcgcctatgccctgagccccttcagcgccagcggcggctggggccgggccggccacctgcaccccaagggccgggagctggaccctgctgcccctcctgagggccagctgctgcgggaggtgcgggccctgggcgtgccctttgtgcccaggacctctgtggatgcctggctggtgcacagcgtggccgccggcagcgcagatgaggcccacggcctgctgggcgctgctgctgccagcagcactggaggagctggggcctctgtggatggcggcagccaggccgtgcagggcggcggcggggaccccagggctgcccggagcggccccctggatgctggggaggaggagaaggccccagctgagcccacagcccaggtgcctgatgctgggggctgtgcctctgaagaaaatggagtgctgcgggagaagcatgaagctgtggaccacagcagccagcacgaggagaatgaggagcgggtgtctgcccagaaggagaacagcctgcagcagaatgatgatgatgagaacaagattgctgagaagccagactgggaggccgagaagaccacagagagcagaaatgaaagacacctgaatggaacagacaccagcttcagcctggaggacctcttccagctgctgagcagccagcctgagaacagcctggagggcatcagcctgggggacatccccctgcccggcagcatcagtgatggcatgaacagcagcgcccactaccacgtgaacttcagccaggccatcagccaggatgtgaacctgcacgaggccatcctgctgtgccccaacaacaccttccggcgggaccccacagcccggaccagccagagccaggagcccttcctgcagctgaacagccacaccaccaaccctgagcagaccctgcccggcaccaacctgaccggcttcctgagccctgtggacaaccacatgaggaacctgaccagccaggacctgctgtatgacctggacatcaacatctttgatgagatcaacctgatgagcctggccacagaggacaactttgaccccattgatgtgtcccagctgtttgatgagccagacagcgacagcggcctgagcctggacagcagccacaacaacaccagcgtcatcaagagcaacagcagccacagcgtgtgtgatgaaggagccatcggctactgcacagaccacgagagcagcagccaccacgacctggagggcgctgtgggcggctactacccagagcccagcaagctgtgccacctggaccagagcgacagcgacttccacggggacctgaccttccagcacgtgttccacaaccacacctaccacctgcagcccacagcccctgagagcaccagcgagcccttcccctggccaggcaagagccagaagatccgcagccgctacctggaggacacagacaggaacctgagcagagatgagcagagggccaaggccctgcacatccccttctctgtggatgagatcgtgggcatgcctgtggacagcttcaacagcatgctgagccgctactacctgacagacctgcaggtgtccctcatccgggacatcagaagaagaggcaagaacaaggtggccgcccagaactgcaggaagaggaagctggacatcatcctgaacctggaggatgatgtgtgcaacctgcaggccaagaaggagaccctgaagcgggagcaggcccagtgcaacaaggccatcaacatcatgaagcagaagctgcatgacctgtaccatgacatcttcagccggctgagagatgaccagggccggcctgtgaaccccaaccactacgccctgcagtgcacccatgatggcagcatcctgattgtgcccaaggagctggtggccagcggccacaagaaggagacccagaagggcaagaggaagtag

SEQ ID NO: 162173 - DNA, 1200 bp, synthetic construct
  misc_feature 1..1200: note = Description of Artificial Sequence: Synthetic coding sequence
  source 1..1200: mol_type = other DNA
atgaacagcagcgcccactaccacgtgaacttcagccaggccatcagccaggatgtgaacctgcacgaggccatcctgctgtgccccaacaacaccttccggcgggaccccacagcccggaccagccagagccaggagcccttcctgcagctgaacagccacaccaccaaccctgagcagaccctgcccggcaccaacctgaccggcttcctgagccctgtggacaaccacatgaggaacctgaccagccaggacctgctgtatgacctggacatcaacatctttgatgagatcaacctgatgagcctggccacagaggacaactttgaccccattgatgtgtcccagctgtttgatgagccagacagcgacagcggcctgagcctggacagcagccacaacaacaccagcgtcatcaagagcaacagcagccacagcgtgtgtgatgaaggagccatcggctactgcacagaccacgagagcagcagccaccacgacctggagggcgctgtgggcggctactacccagagcccagcaagctgtgccacctggaccagagcgacagcgacttccacggggacctgaccttccagcacgtgttccacaaccacacctaccacctgcagcccacagcccctgagagcaccagcaacctcttccggcctgggaagagccagaagatccgcagccgctacctggaggacacagacaggaacctgagcagagatgagcagagggccaaggccctgcacatccccttctctgtggatgaaattgtgggcatgcctgtggacagcttcaacagcatgctgagccgctactacctgacagacctgcaggtgtccctcatccgggacatcagaagaagaggcaagaacaaggtggccgcccagaactgcaggaagaggaagctggacatcatcctgaacctggaggatgatgtgtgcaacctgcaggccaagaaggagaccctgaagcgggagcaggcccagtgcaacaaggccatcaacatcatgaagcagaagctgcatgacctgtaccatgacatcttcagccggctgagagatgaccagggccggcctgtgaaccccaaccactacgccctgcagtgcacccatgatggcagcatcctgattgtgcccaaggagctggtggccagcggccacaagaaggagacccagaagggcaagaggaagtag

SEQ ID NO: 162174 - DNA, 1143 bp, synthetic construct
  misc_feature 1..1143: note = Description of Artificial Sequence: Synthetic coding sequence
  source 1..1143: mol_type = other DNA
atgtacagccccctgtgcctgacccaggatgagttccaccccttcatcgaggccctgctgccccacgtgcgggcctttgcctacacctggttcaacctgcaggccaggaagaggaagtacttcaagaagcatgagaagaggatgagcaaggaggaggagagagctgtgaaggatgagctgctgtctgagaagccagaggtgaagcagaagtgggccagccggctgctggccaagctgaggaaggacatccggcctgagtacagagaagattttgtgctgactgtgacaggcaagaagccaccctgctgcgtgctgagcaacccagaccagaagggcaagatgagaagaattgactgcctgcggcaggccgacaaggtgtggaggctggacctggtgatggtgatcctcttcaagggcatccccctggagagcacagatggagagcggctggtgaagagcccccagtgcagcaaccctggcctgtgtgtgcagccccaccacatcggcgtgtctgtgaaggagctggacctgtacctggcctactttgtgcatgctgctggcatgcccagccccaccaccctgaagaagtctgagaagagcggcttcagcagccccagccccagccagaccagcagcctgggcacagccttcacccagcaccacaggcctgtgatcaccggcccccgggccagcccccacgccacccccagcaccctgcacttccccaccagccccatcatccagcagcccggcccctacttcagccacccagccatccgctaccacccccaggagaccctgaaggagtttgtgcagctggtgtgcccagatgctggccagcaggccggccaggtgggcttcctgaaccccaacggcagcagccagggcaaggtgcacaaccccttcctgcccacccccatgctgcccccacctcctcctccacccatggcccggcctgtgcccctgcctgtgcctgacaccaagccacccaccaccagcacagagggcggggccgccagccccaccagccccacctacagcacccccagcaccagccctgccaacagatttgtgtctgtgggcccccgggaccccagctttgtgaacatcccccagcagacccagagctggtacctgggctag

SEQ ID NO: 162175 - DNA, 1464 bp, synthetic construct
  misc_feature 1..1464: note = Description of Artificial Sequence: Synthetic coding sequence
  source 1..1464: mol_type = other DNA
atgtacagccccctgtgcctgacccaggatgagttccaccccttcatcgaggccctgctgccccacgtgcgggcctttgcctacacctggttcaacctgcaggccaggaagaggaagtacttcaagaagcatgagaagaggatgagcaaggaggaggagagagctgtgaaggatgagctgctgtctgagaagccagaggtgaagcagaagtgggccagccggctgctggccaagctgaggaaggacatccggcctgagtacagagaagattttgtgctgactgtgacaggcaagaagccaccctgctgcgtgctgagcaacccagaccagaagggcaagatgagaagaattgactgcctgcggcaggccgacaaggtgtggaggctggacctggtgatggtgatcctcttcaagggcatccccctggagagcacagatggagagcggctggtgaagagcccccagtgcagcaaccctggcctgtgtgtgcagccccaccacatcggcgtgtctgtgaaggagctggacctgtacctggcctactttgtgcatgctgctggccacctgggcttccaggacagctttgtgaccagcggggtcttctctgtgacagagctggtgcgggtgtcccagacccccatcgccgccggcaccggccccaacttcagcctgagtgacctggagagcagcagctactacagcatgagccctggggccatgagaagaagcctgcccagcaccagcagcaccagcagcaccaagaggctgaagtctgtggaggatgagatggacagccctggagaggagcccttctacacaggccagggccgcagccctggcagcggcagccagagcagcggctggcatgaggtggagcccggcatgcccagccccaccaccctgaagaagtctgagaagagcggcttcagcagccccagccccagccagaccagcagcctgggcacagccttcacccagcaccacaggcctgtgatcaccggcccccgggccagcccccacgccacccccagcaccctgcacttccccaccagccccatcatccagcagcccggcccctacttcagccacccagccatccgctaccacccccaggagaccctgaaggagtttgtgcagctggtgtgcccagatgctggccagcaggccggccaggtgggcttcctgaaccccaacggcagcagccagggcaaggtgcacaaccccttcctgcccacccccatgctgcccccacctcctcctccacccatggcccggcctgtgcccctgcctgtgcctgacaccaagccacccaccaccagcacagaaggaggagctgccagccccaccagccccacctacagcacccccagcaccagccctgccaacagatttgtgtctgtgggcccccgggaccccagctttgtgaacatcccccagcagacccagagctggtacctgggctag

SEQ ID NO: 162176 - DNA, 1401 bp, synthetic construct
  misc_feature 1..1401: note = Description of Artificial Sequence: Synthetic coding sequence
  source 1..1401: mol_type = other DNA
atgtacagccccctgtgcctgacccaggatgagttccaccccttcatcgaggccctgctgccccacgtgcgggcctttgcctacacctggttcaacctgcaggccaggaagaggaagtacttcaagaagcatgagaagaggatgagcaaggaggaggagagagctgtgaaggatgagctgctgtctgagaagccagaggtgaagcagaagtgggccagccggctgctggccaagctgaggaaggacatccggcctgagtacagagaagattttgtgctgactgtgacaggcaagaagccaccctgctgcgtgctgagcaacccagaccagaagggcaagatgagaagaattgactgcctgcggcaggccgacaaggtgtggaggctggacctggtgatggtgatcctcttcaagggcatccccctggagagcacagatggagagcggctggtgaagagcccccagtgcagcaaccctggcctgtgtgtgcagccccaccacatcggcgtgtctgtgaaggagctggacctgtacctggcctactttgtgcatgctgctgacagcagccagagcgagagccccagccagcccagtgatgctgacatcaaggaccagccagaaaatggccacctgggcttccaggacagctttgtgaccagcggggtcttctctgtgacagagctggtgcgggtgtcccagacccccatcgccgccggcaccggccccaacttcagcctgagtgacctggagagcagcagctactacagcatgagccctggggccatgagaagaagcctgcccagcaccagcagcaccagcagcaccaagaggctgaagtctgtggaggatgagatggacagccctggagaggagcccttctacacaggccagggccgcagccctggcagcggcagccagagcagcggctggcatgaggtggagcccgccagcccccacgccacccccagcaccctgcacttccccaccagccccatcatccagcagcccggcccctacttcagccacccagccatccgctaccacccccaggagaccctgaaggagtttgtgcagctggtgtgcccagatgctggccagcaggccggccaggtgggcttcctgaaccccaacggcagcagccagggcaaggtgcacaaccccttcctgcccacccccatgctgcccccacctcctcctccacccatggcccggcctgtgcccctgcctgtgcctgacaccaagccacccaccaccagcacagagggcggggccgccagccccaccagccccacctacagcacccccagcaccagccctgccaacagatttgtgtctgtgggcccccgggaccccagctttgtgaacatcccccagcagacccagagctggtacctgggctag

SEQ ID NO: 162177 - DNA, 1665 bp, synthetic construct
  misc_feature 1..1665: note = Description of Artificial Sequence: Synthetic coding sequence
  source 1..1665: mol_type = other DNA
atgcagatgtgcaggcctgccagcagctctgtgctgtatgtgcccacccgctggccaggcggctgtggggccacctggcagagctgccccagccccccacccaggaggacccgcatcccccagaggcctgctgtgatgtacagccccctgtgcctgacccaggatgagttccaccccttcatcgaggccctgctgccccacgtgcgggcctttgcctacacctggttcaacctgcaggccaggaagaggaagtacttcaagaagcatgagaagaggatgagcaaggaggaggagagagctgtgaaggatgagctgctgtctgagaagccagaggtgaagcagaagtgggccagccggctgctggccaagctgaggaaggacatccggcctgagtaccgggaggactttgtgctgactgtgacaggcaagaagccaccctgctgcgtgctgagcaacccagaccagaagggcaagatgagaagaattgactgcctgcggcaggccgacaaggtgtggaggctggacctggtgatggtgatcctcttcaagggcatccccctggagagcacagatggagagcggctggtgaagagcccccagtgcagcaaccctggcctgtgtgtgcagccccaccacatcggcgtgtctgtgaaggagctggacctgtacctggcctactttgtgcacgccgctgacagcagccagagcgagagccccagccagcccagtgatgctgacatcaaggaccagccagaaaatggccacctgggcttccaggacagctttgtgaccagcggggtcttctctgtgacagagctggtgcgggtgtcccagacccccatcgctgctggcaccggccccaacttcagcctgagtgacctggagagcagcagctactacagcatgagccctggggccatgaggaggagcctgcccagcaccagcagcaccagcagcaccaagaggctgaagtctgtggaggatgagatggacagccctggagaggagcccttctacacaggccagggccgcagccctggcagcggcagccagagcagcggctggcatgaggtggagcccggcatgcccagccccaccaccctgaagaagtctgagaagagcggcttcagcagccccagccccagccagaccagcagcctgggcacagccttcacccagcaccacaggcctgtgatcaccggcccccgggccagcccccacgccacccccagcaccctgcacttccccaccagccccatcatccagcagcccggcccctacttcagccacccagccatccgctaccacccccaggagaccctgaaggagtttgtgcagctggtgtgcccagatgctggccagcaggccggccaggtgggcttcctgaaccccaacggcagcagccagggcaaggtgcacaaccccttcctgcccacccccatgctgcccccacctcctcctccacccatggcccggcctgtgcccctgcctgtgcctgacaccaagccacccaccaccagcacagagggcggggccgccagccccaccagccccacctacagcacccccagcaccagccctgccaacagatttgtgtctgtgggcccccgggaccccagctttgtgaacatcccccagcagacccagagctggtacctgggctag

SEQ ID NO: 162178 - DNA, 1599 bp, synthetic construct
  misc_feature 1..1599: note = Description of Artificial Sequence: Synthetic coding sequence
  source 1..1599: mol_type = other DNA
atgaagctggccgacagcgtgatggccggcaaggccagtgatggcagcatcaagtggcagctgtgctatgacatcagcgcccggacctggtggatggatgagttccaccccttcatcgaggccctgctgccccacgtgcgggcctttgcctacacctggttcaacctgcaggccaggaagaggaagtacttcaagaagcatgagaagaggatgagcaaggaggaggagagagctgtgaaggatgagctgctgtctgagaagccagaggtgaagcagaagtgggccagccggctgctggccaagctgaggaaggacatccggcctgagtaccgggaggactttgtgctgactgtgacaggcaagaagccaccctgctgcgtgctgagcaacccagaccagaagggcaagatgagaagaattgactgcctgcggcaggccgacaaggtgtggaggctggacctggtgatggtgatcctcttcaagggcatccccctggagagcacagatggagagcggctggtgaagagcccccagtgcagcaaccctggcctgtgtgtgcagccccaccacatcggcgtgtctgtgaaggagctggacctgtacctggcctactttgtgcacgccgctgacagcagccagagcgagagccccagccagcccagtgatgctgacatcaaggaccagccagaaaatggccacctgggcttccaggacagctttgtgaccagcggggtcttctctgtgacagagctggtgcgggtgtcccagacccccatcgctgctggcaccggccccaacttcagcctgagtgacctggagagcagcagctactacagcatgagccctggggccatgaggaggagcctgcccagcaccagcagcaccagcagcaccaagaggctgaagtctgtggaggatgagatggacagccctggagaggagcccttctacacaggccagggccgcagccctggcagcggcagccagagcagcggctggcatgaggtggagcccggcatgcccagccccaccaccctgaagaagtctgagaagagcggcttcagcagccccagccccagccagaccagcagcctgggcacagccttcacccagcaccacaggcctgtgatcaccggcccccgggccagcccccacgccacccccagcaccctgcacttccccaccagccccatcatccagcagcccggcccctacttcagccacccagccatccgctaccacccccaggagaccctgaaggagtttgtgcagctggtgtgcccagatgctggccagcaggccggccaggtgggcttcctgaaccccaacggcagcagccagggcaaggtgcacaaccccttcctgcccacccccatgctgcccccacctcctcctccacccatggcccggcctgtgcccctgcctgtgcctgacaccaagccacccaccaccagcacagagggcggggccgccagccccaccagccccacctacagcacccccagcaccagccctgccaacagatttgtgtctgtgggcccccgggaccccagctttgtgaacatcccccagcagacccagagctggtacctgggctag

SEQ ID NO: 162179 - DNA, 1530 bp, synthetic construct
  misc_feature 1..1530: note = Description of Artificial Sequence: Synthetic coding sequence
  source 1..1530: mol_type = other DNA
atgtacagccccctgtgcctgacccaggatgagttccaccccttcatcgaggccctgctgccccacgtgcgggcctttgcctacacctggttcaacctgcaggccaggaagaggaagtacttcaagaagcatgagaagaggatgagcaaggaggaggagagagctgtgaaggatgagctgctgtctgagaagccagaggtgaagcagaagtgggccagccggctgctggccaagctgaggaaggacatccggcctgagtacagagaagattttgtgctgactgtgacaggcaagaagccaccctgctgcgtgctgagcaacccagaccagaagggcaagatgagaagaattgactgcctgcggcaggccgacaaggtgtggaggctggacctggtgatggtgatcctcttcaagggcatccccctggagagcacagatggagagcggctggtgaagagcccccagtgcagcaaccctggcctgtgtgtgcagccccaccacatcggcgtgtctgtgaaggagctggacctgtacctggcctactttgtgcatgctgctgacagcagccagagcgagagccccagccagcccagtgatgctgacatcaaggaccagccagaaaatggccacctgggcttccaggacagctttgtgaccagcggggtcttctctgtgacagagctggtgcgggtgtcccagacccccatcgccgccggcaccggccccaacttcagcctgagtgacctggagagcagcagctactacagcatgagccctggggccatgagaagaagcctgcccagcaccagcagcaccagcagcaccaagaggctgaagtctgtggaggatgagatggacagccctggagaggagcccttctacacaggccagggccgcagccctggcagcggcagccagagcagcggctggcatgaggtggagcccggcatgcccagccccaccaccctgaagaagtctgagaagagcggcttcagcagccccagccccagccagaccagcagcctgggcacagccttcacccagcaccacaggcctgtgatcaccggcccccgggccagcccccacgccacccccagcaccctgcacttccccaccagccccatcatccagcagcccggcccctacttcagccacccagccatccgctaccacccccaggagaccctgaaggagtttgtgcagctggtgtgcccagatgctggccagcaggccggccaggtgggcttcctgaaccccaacggcagcagccagggcaaggtgcacaaccccttcctgcccacccccatgctgcccccacctcctcctccacccatggcccggcctgtgcccctgcctgtgcctgacaccaagccacccaccaccagcacagaaggaggagctgccagccccaccagccccacctacagcacccccagcaccagccctgccaacagatttgtgtctgtgggcccccgggaccccagctttgtgaacatcccccagcagacccagagctggtacctgggctag

SEQ ID NO: 162180 - DNA, 1506 bp, synthetic construct
  misc_feature 1..1506: note = Description of Artificial Sequence: Synthetic coding sequence
  source 1..1506: mol_type = other DNA
atggatgagttccaccccttcatcgaggccctgctgccccacgtgcgggcctttgcctacacctggttcaacctgcaggccaggaagaggaagtacttcaagaagcatgagaagaggatgagcaaggaggaggagagagctgtgaaggatgagctgctgtctgagaagccagaggtgaagcagaagtgggccagccggctgctggccaagctgaggaaggacatccggcctgagtacagagaagattttgtgctgactgtgacaggcaagaagccaccctgctgcgtgctgagcaacccagaccagaagggcaagatgagaagaattgactgcctgcggcaggccgacaaggtgtggaggctggacctggtgatggtgatcctcttcaagggcatccccctggagagcacagatggagagcggctggtgaagagcccccagtgcagcaaccctggcctgtgtgtgcagccccaccacatcggcgtgtctgtgaaggagctggacctgtacctggcctactttgtgcatgctgctgacagcagccagagcgagagccccagccagcccagtgatgctgacatcaaggaccagccagaaaatggccacctgggcttccaggacagctttgtgaccagcggggtcttctctgtgacagagctggtgcgggtgtcccagacccccatcgccgccggcaccggccccaacttcagcctgagtgacctggagagcagcagctactacagcatgagccctggggccatgagaagaagcctgcccagcaccagcagcaccagcagcaccaagaggctgaagtctgtggaggatgagatggacagccctggagaggagcccttctacacaggccagggccgcagccctggcagcggcagccagagcagcggctggcatgaggtggagcccggcatgcccagccccaccaccctgaagaagtctgagaagagcggcttcagcagccccagccccagccagaccagcagcctgggcacagccttcacccagcaccacaggcctgtgatcaccggcccccgggccagcccccacgccacccccagcaccctgcacttccccaccagccccatcatccagcagcccggcccctacttcagccacccagccatccgctaccacccccaggagaccctgaaggagtttgtgcagctggtgtgcccagatgctggccagcaggccggccaggtgggcttcctgaaccccaacggcagcagccagggcaaggtgcacaaccccttcctgcccacccccatgctgcccccacctcctcctccacccatggcccggcctgtgcccctgcctgtgcctgacaccaagccacccaccaccagcacagaaggaggagctgccagccccaccagccccacctacagcacccccagcaccagccctgccaacagatttgtgtctgtgggcccccgggaccccagctttgtgaacatcccccagcagacccagagctggtacctgggctag

SEQ ID NO: 162181 - DNA, 1497 bp, synthetic construct
  misc_feature 1..1497: note = Description of Artificial Sequence: Synthetic coding sequence
  source 1..1497: mol_type = other DNA
atgtacagccccctgtgcctgacccaggatgagttccaccccttcatcgaggccctgctgccccacgtgcgggcctttgcctacacctggttcaacctgcaggccaggaagaggaagtacttcaagaagcatgagaagaggatgagcaaggaggaggagagagctgtgaaggatgagctgctgtctgagaagccagaggtgaagcagaagtgggccagccggctgctggccaagctgaggaaggacatccggcctgagtacagagaagattttgtgctgactgtgacaggcaagaagccaccctgctgcgtgctgagcaacccagaccagaagggcaagatgagaagaattgactgcctgcggcaggccgacaaggtgtggaggctggacctggtgatggtgatcctcttcaagggcatccccctggagagcacagatggagagcggctggtgaagagcccccagtgcagcaaccctggcctgtgtgtgcagccccaccacatcggcgtgtctgtgaaggagctggacctgtacctggcctactttgtgcatgctgctgacagcagccagagcgagagccccagccagcccagtgatgctgacatcaaggaccagccagaaaatggccacctgggcttccaggacagctttgtgaccagcggggtcttctctgtgacagagctggtgcgggtgtcccagacccccatcgccgccggcaccggccccaacttcagcctgagtgacctggagagcagcagctactacagcatgagccctggggccatgagaagaagcctgcccagcaccagcagcaccagcagcaccaagaggctgaagtctgtggaggatgagatggacagccctggagaggagcccttctacacaggccagggccgcagccctggcagcggcagccagagcagcggctggcatgaggtggagcccggcatgcccagccccaccaccctgaagaagtctgagaagagcggcttcagcagccccagccccagccagaccagcagcctgggcacagccttcacccagcaccacaggcctgtgatcaccggcccccgggccagcccccacgccacccccagcaccctgcacttccccaccagccccatcatccagcagcccggcccctacttcagccacccagccatccgctaccacccccaggagaccctgaaggagtttgtgcagctggtgtgcccagatgctggccagcaggccggccaggtgggcttcctgaaccccaacggcagcagccagggcaaggtgcacaaccccttcctgcccacccccatgctgcccccacctcctcctccacccatggcccggcctgtgcccctgcctgtgcctgacaccaagccacccaccaccagcacagaaggaggagctgccagccccaccagccccatcctggtgcccggcatcaaggtggccgccagccaccaccccccagaccggcccccagaccccttcagcaccctgtag

SEQ ID NO: 162182 - DNA, 603 bp, synthetic construct
  misc_feature 1..603: note = Description of Artificial Sequence: Synthetic coding sequence
  source 1..603: mol_type = other DNA
atgatgtacagccccatctgcctgacccaggatgagttccaccccttcatcgaggccctgctgccccacgtgcgggccatcgcctacacctggttcaacctgcaggccaggaagaggaagtacttcaagaagcatgagaagaggatgagcaaggatgaggagagagctgtgaaggatgagctgctgtctgagaagccagagatcaagcagaagtgggccagccggctgctggccaagctgaggaaggacatccggcaggagtaccgggaggactttgtgctgactgtgacaggcaagaagcacccctgctgcgtgctgagcaacccagaccagaagggcaagatcagaagaattgactgcctgcggcaggccgacaaggtgtggaggctggacctggtgatggtgatcctcttcaagggcatccccctggagagcacagatggagagcggctgatgaagagcccccactgcaccaacccagccctgtgtgtgcagccccaccacatcaccgtgtctgtgaaggagctggacctcttcctggcctactacgtgcaggagcagggcaagaacttcttcagcagcaacaagtgcatcaagatctag

SEQ ID NO: 162183 - DNA, 507 bp, synthetic construct
  misc_feature 1..507: note = Description of Artificial Sequence: Synthetic coding sequence
  source 1..507: mol_type = other DNA
atgaacagcggcgtgaacctgcagaggagcctgagcagcccccccagcagcaagaggcccaagaccatcagcattgatgagaacatggagcccagccccaccggggacttctaccccagccccagcagccctgctgctggcagcaggacctggcatgagcgggaccaggacatgagcagccccaccaccatgaagaagccagagaagcccctcttcagcagcgccagcccccaggacagcagcccccggctgagcaccttcccccagcaccaccaccctggcatccctggggtggcccacagcgtcatcagcaccaggaccccacctccacccagccccctgcccttccccacccaggccatcctgcccccagcccccagcagctacttcagccaccccaccatccgctacccaccccacctgaacccccaggacaccctgaagaactacgtgcccagctatgaccccagcagcccccagaccagccagagctggtacctgggctag

SEQ ID NO: 162184 - DNA, 1341 bp, synthetic construct
  misc_feature 1..1341: note = Description of Artificial Sequence: Synthetic coding sequence
  source 1..1341: mol_type = other DNA
atggagcgcatccctgtgtctgtggacttctgggtggtgtgctgtgctgtgctgaagtgcaaccctggcatccccaagaggatgagcaccctgtgcttcggcttcagtgatgagttccaccccttcatcgaggccctgctgccccacgtgcgggccatcgcctacacctggttcaacctgcaggccaggaagaggaagtacttcaagaagcatgagaagaggatgagcaaggatgaggagagagctgtgaaggatgagctgctgtctgagaagccagagatcaagcagaagtgggccagccggctgctggccaagctgaggaaggacatccggcaggagtaccgggaggactttgtgctgactgtgacaggcaagaagcacccctgctgcgtgctgagcaacccagaccagaagggcaagatcagaagaattgactgcctgcggcaggccgacaaggtgtggaggctggacctggtgatggtgatcctcttcaagggcatccccctggagagcacagatggagagcggctgatgaagagcccccactgcaccaacccagccctgtgtgtgcagccccaccacatcaccgtgtctgtgaaggagctggacctcttcctggcctactacgtgcaggagcaggacagcggccagagcggcagccccagccacaatgaccctgccaagaaccccccaggctacctggaggacagctttgtgaagtctggagtcttcaacgtgtctgagctggtgcgggtgtccaggacccccatcacccagggcactggagtgaacttccccatcggggagatccccagccagccctactaccatgacatgaacagcggcgtgaacctgcagaggagcctgagcagcccccccagcagcaagaggcccaagaccatcagcattgatgagaacatggagcccagccccaccggggacttctaccccagccccagcagccctgctgctggcagcaggacctggcatgagcgggaccaggacatgagcagccccaccaccatgaagaagccagagaagcccctcttcagcagcgccagcccccaggacagcagcccccggctgagcaccttcccccagcaccaccaccctggcatccctggggtggcccacagcgtcatcagcaccaggaccccacctccacccagccccctgcccttccccacccaggccatcctgcccccagcccccagcagctacttcagccaccccaccatccgctacccaccccacctgaacccccaggacaccctgaagaactacgtgcccagctatgaccccagcagcccccagaccagccagagctggtacctgggctag

SEQ ID NO: 162185 - DNA, 1485 bp, synthetic construct
  misc_feature 1..1485: note = Description of Artificial Sequence: Synthetic coding sequence
  source 1..1485: mol_type = other DNA
atgatgtacagccccatctgcctgacccaggatgagttccaccccttcatcgaggccctgctgccccacgtgcgggccatcgcctacacctggttcaacctgcaggccaggaagaggaagtacttcaagaagcatgagaagaggatgagcaaggatgaggagagagctgtgaaggatgagctgctgtctgagaagccagagatcaagcagaagtgggccagccggctgctggccaagctgaggaaggacatccggcaggagtaccgggaggactttgtgctgactgtgacaggcaagaagcacccctgctgcgtgctgagcaacccagaccagaagggcaagatcagaagaattgactgcctgcggcaggccgacaaggtgtggaggctggacctggtgatggtgatcctcttcaagggcatccccctggagagcacagatggagagcggctgatgaagagcccccactgcaccaacccagccctgtgtgtgcagccccaccacatcaccgtgtctgtgaaggagctggacctcttcctggcctactacgtgcaggagcaggacagcggccagagcggcagccccagccacaatgaccctgccaagaaccccccaggctacctggaggacagctttgtgaagtctggagtcttcaacgtgtctgagctggtgcgggtgtccaggacccccatcacccagggcactggagtgaacttccccatcggggagatccccagccagccctactaccatgacatgaacagcggcgtgaacctgcagaggagcctgagcagcccccccagcagcaagaggcccaagaccatcagcattgatgagaacatggagcccagccccaccggggacttctaccccagccccagcagccctgctgctggcagcaggacctggcatgagcgggaccaggacatgagcagccccaccaccatgaagaagccagagaagcccctcttcagcagcgccagcccccaggacagcagcccccggctgagcaccttcccccagcaccaccaccctggcatccctggggtggcccacagcgtcatcagcaccaggaccccacctccacccagccccctgcccttccccacccaggccatcctgcccccagcccccagcagctacttcagccaccccaccatccgctacccaccccacctgaacccccaggacaccctgaagaactacgtgcccagctatgaccccagcagcccccagaccagccagcccaatggaagtggccaggtggtgggcaaggtgcccggccacttcacccctgtgctggcccccagcccccaccccagcgctgtgcggcctgtgaccctgtccatgacagacaccaagcccatcaccaccagcacagaggcctacacagccagcggcaccagccaggccaaccgctacgtgggcctgagcccccgggaccccagcttcctgcaccagcagcagagctggtacctgggctag

SEQ ID NO: 162186 - DNA, 1263 bp, synthetic construct
  misc_feature 1..1263: note = Description of Artificial Sequence: Synthetic coding sequence
  source 1..1263: mol_type = other DNA
atgatgtacagccccatctgcctgacccaggatgagttccaccccttcatcgaggccctgctgccccacgtgcgggccatcgcctacacctggttcaacctgcaggccaggaagaggaagtacttcaagaagcatgagaagaggatgagcaaggatgaggagagagctgtgaaggatgagctgctgtctgagaagccagagatcaagcagaagtgggccagccggctgctggccaagctgaggaaggacatccggcaggagtaccgggaggactttgtgctgactgtgacaggcaagaagcacccctgctgcgtgctgagcaacccagaccagaagggcaagatcagaagaattgactgcctgcggcaggccgacaaggtgtggaggctggacctggtgatggtgatcctcttcaagggcatccccctggagagcacagatggagagcggctgatgaagagcccccactgcaccaacccagccctgtgtgtgcagccccaccacatcaccgtgtctgtgaaggagctggacctcttcctggcctactacgtgcaggagcaggacagcggccagagcggcagccccagccacaatgaccctgccaagaaccccccaggctacctggaggacagctttgtgaagtctggagtcttcaacgtgtctgagctggtgcgggtgtccaggacccccatcacccagggcactggagtgaacttccccatcggggagatccccagccagccctactaccatgacatgaacagcggcgtgaacctgcagaggagcctgagcagcccccccagcagcaagaggcccaagaccatcagcattgatgagaacatggagcccagccccaccggggacttctaccccagccccagcagccctgctgctggcagcaggacctggcatgagcgggaccaggacatgagcagccccaccaccatgaagaagccagagaagcccctcttcagcagcgccagcccccaggacagcagcccccggctgagcaccttcccccagcaccaccaccctggcatccctggggtggcccacagcgtcatcagcaccaggaccccacctccacccagccccctgcccttccccacccaggccatcctgcccccagcccccagcagctacttcagccaccccaccatccgctacccaccccacctgaacccccaggacaccctgaagaactacgtgcccagctatgaccccagcagcccccagaccagccagagctggtacctgggctag

SEQ ID NO: 162187 - DNA, 1686 bp, synthetic construct
  misc_feature 1..1686: note = Description of Artificial Sequence: Synthetic coding sequence
  source 1..1686: mol_type = other DNA
atgatgtacagccccatctgcctgacccaggatgagttccaccccttcatcgaggccctgctgccccacgtgcgggccatcgcctacacctggttcaacctgcaggccaggaagaggaagtacttcaagaagcatgagaagaggatgagcaaggatgaggagagagctgtgaaggatgagctgctgtctgagaagccagagatcaagcagaagtgggccagccggctgctggccaagctgaggaaggacatccggcaggagtaccgggaggactttgtgctgactgtgacaggcaagaagcacccctgctgcgtgctgagcaacccagaccagaagggcaagatcagaagaattgactgcctgcggcaggccgacaaggtgtggaggctggacctggtgatggtgatcctcttcaagggcatccccctggagagcacagatggagagcggctgatgaagagcccccactgcaccaacccagccctgtgtgtgcagccccaccacatcaccgtgtctgtgaaggagctggacctcttcctggcctactacgtgcaggagcaggacagcggccagagcggcagccccagccacaatgaccctgccaagaaccccccaggctacctggaggacagctttgtgaagtctggagtcttcaacgtgtctgagctggtgcgggtgtccaggacccccatcacccagggcactggagtgaacttccccatcggggagatccccagccagccctactaccatgacatgaacagcggcgtgaacctgcagaggagcctgagcagcccccccagcagcaagaggcccaagaccatcagcattgatgagaacatggagcccagccccaccggggacttctaccccagccccagcagccctgctgctggcagcaggacctggcatgagcgggaccaggacatgagcagccccaccaccatgaagaagccagagaagcccctcttcagcagcgccagcccccaggacagcagcccccggctgagcaccttcccccagcaccaccaccctggcatccctggggtggcccacagcgtcatcagcaccaggaccccacctccacccagccccctgcccttccccacccaggccatcctgcccccagcccccagcagctacttcagccaccccaccatccgctacccaccccacctgaacccccaggacaccctgaagaactacgtgcccagctatgaccccagcagcccccagaccagccagcccaatggaagtggccaggtggtgggcaaggtgcccggccacttcacccctgtgctggcccccagcccccaccccagcgctgtgcggcctgtgaccctgtccatgacagacaccaagcccatcaccaccagcacagaggcctacacagccagcggcaccagccaggccaaccgctacgtgggcctgagcccccgggaccccagcttcctgcaccagcagcagctgcgcatctgtgactggaccatgaaccagaatggccgccacctgtaccccagcaccagcgaggacaccctgggcatcacctggcagagccctggcacctgggccagcctggtgcccttccaggtgagcaacagaacacccatcctgcctgccaacgtgcagaactacggcctgaacatcatcggggagcccttcctgcaggccgagaccagcaactag

SEQ ID NO: 162188 - DNA, 1464 bp, synthetic construct
  misc_feature 1..1464: note = Description of Artificial Sequence: Synthetic coding sequence
  source 1..1464: mol_type = other DNA
atgatgtacagccccatctgcctgacccaggatgagttccaccccttcatcgaggccctgctgccccacgtgcgggccatcgcctacacctggttcaacctgcaggccaggaagaggaagtacttcaagaagcatgagaagaggatgagcaaggatgaggagagagctgtgaaggatgagctgctgtctgagaagccagagatcaagcagaagtgggccagccggctgctggccaagctgaggaaggacatccggcaggagtaccgggaggactttgtgctgactgtgacaggcaagaagcacccctgctgcgtgctgagcaacccagaccagaagggcaagatcagaagaattgactgcctgcggcaggccgacaaggtgtggaggctggacctggtgatggtgatcctcttcaagggcatccccctggagagcacagatggagagcggctgatgaagagcccccactgcaccaacccagccctgtgtgtgcagccccaccacatcaccgtgtctgtgaaggagctggacctcttcctggcctactacgtgcaggagcaggacagcggccagagcggcagccccagccacaatgaccctgccaagaaccccccaggctacctggaggacagctttgtgaagtctggagtcttcaacgtgtctgagctggtgcgggtgtccaggacccccatcacccagggcactggagtgaacttccccatcggggagatccccagccagccctactaccatgacatgaacagcggcgtgaacctgcagaggagcctgagcagcccccccagcagcaagaggcccaagaccatcagcattgatgagaacatggagcccagccccaccggggacttctaccccagccccagcagccctgctgctggcagcaggacctggcatgagcgggaccaggacatgagcagccccaccaccatgaagaagccagagaagcccctcttcagcagcgccagcccccaggacagcagcccccggctgagcaccttcccccagcaccaccaccctggcatccctggggtggcccacagcgtcatcagcaccaggaccccacctccacccagccccctgcccttccccacccaggccatcctgcccccagcccccagcagctacttcagccaccccaccatccgctacccaccccacctgaacccccaggacaccctgaagaactacgtgcccagctatgaccccagcagcccccagaccagccagctgcgcatctgtgactggaccatgaaccagaatggccgccacctgtaccccagcaccagcgaggacaccctgggcatcacctggcagagccctggcacctgggccagcctggtgcccttccaggtgagcaacagaacacccatcctgcctgccaacgtgcagaactacggcctgaacatcatcggggagcccttcctgcaggccgagaccagcaactag

SEQ ID NO: 162189 - DNA, 1713 bp, synthetic construct
  misc_feature 1..1713: note = Description of Artificial Sequence: Synthetic coding sequence
  source 1..1713: mol_type = other DNA
atgatgtacagccccatctgcctgacccaggatgagttccaccccttcatcgaggccctgctgccccacgtgcgggccatcgcctacacctggttcaacctgcaggccaggaagaggaagtacttcaagaagcatgagaagaggatgagcaaggatgaggagagagctgtgaaggatgagctgctgtctgagaagccagagatcaagcagaagtgggccagccggctgctggccaagctgaggaaggacatccggcaggagtaccgggaggactttgtgctgactgtgacaggcaagaagcacccctgctgcgtgctgagcaacccagaccagaagggcaagatcagaagaattgactgcctgcggcaggccgacaaggtgtggaggctggacctggtgatggtgatcctcttcaagggcatccccctggagagcacagatggagagcggctgatgaagagcccccactgcaccaacccagccctgtgtgtgcagccccaccacatcaccgtgtctgtgaaggagctggacctcttcctggcctactacgtgcaggagcaggacagcggccagagcggcagccccagccacaatgaccctgccaagaaccccccaggctacctggaggacagctttgtgaagtctggagtcttcaacgtgtctgagctggtgcgggtgtccaggacccccatcacccagggcactggagtgaacttccccatcggggagatccccagccagccctactaccatgacatgaacagcggcgtgaacctgcagaggagcctgagcagcccccccagcagcaagaggcccaagaccatcagcattgatgagaacatggagcccagccccaccggggacttctaccccagccccagcagccctgctgctggcagcaggacctggcatgagcgggaccaggacatgagcagccccaccaccatgaagaagccagagaagcccctcttcagcagcgccagcccccaggacagcagcccccggctgagcaccttcccccagcaccaccaccctggcatccctggggtggcccacagcgtcatcagcaccaggaccccacctccacccagccccctgcccttccccacccaggccatcctgcccccagcccccagcagctacttcagccaccccaccatccgctacccaccccacctgaacccccaggacaccctgaagaactacgtgcccagctatgaccccagcagcccccagaccagccagcccaatggaagtggccaggtggtgggcaaggtgcccggccacttcacccctgtgctggcccccagcccccaccccagcgctgtgcggcctgtgaccctgtccatgacagacaccaagcccatcaccaccagcacagaaggagaggccgccagccccacagccaccacctacacagccagcggcaccagccaggccaacagatatgtgggcctgagcccccgggaccccagcttcctgcaccagcagcagctgcgcatctgtgactggaccatgaaccagaatggccgccacctgtaccccagcaccagcgaggacaccctgggcatcacctggcagagccctggcacctgggccagcctggtgcccttccaggtgagcaacagaacacccatcctgcctgccaacgtgcagaactacggcctgaacatcattggagagcccttcctgcaggccgagaccagcaactag

SEQ ID NO: 162190 - DNA, 930 bp, synthetic construct
  misc_feature 1..930: note = Description of Artificial Sequence: Synthetic coding sequence
  source 1..930: mol_type = other DNA
atgaacagcggcgtgaacctgcagaggagcctgagcagcccccccagcagcaagaggcccaagaccatcagcattgatgagaacatggagcccagccccaccggggacttctaccccagccccagcagccctgctgctggcagcaggacctggcatgagcgggaccaggacatgagcagccccaccaccatgaagaagccagagaagcccctcttcagcagcgccagcccccaggacagcagcccccggctgagcaccttcccccagcaccaccaccctggcatccctggggtggcccacagcgtcatcagcaccaggaccccacctccacccagccccctgcccttccccacccaggccatcctgcccccagcccccagcagctacttcagccaccccaccatccgctacccaccccacctgaacccccaggacaccctgaagaactacgtgcccagctatgaccccagcagcccccagaccagccagcccaatggaagtggccaggtggtgggcaaggtgcccggccacttcacccctgtgctggcccccagcccccaccccagcgctgtgcggcctgtgaccctgtccatgacagacaccaagcccatcaccaccagcacagaggcctacacagccagcggcaccagccaggccaaccgctacgtgggcctgagcccccgggaccccagcttcctgcaccagcagcagctgcgcatctgtgactggaccatgaaccagaatggccgccacctgtaccccagcaccagcgaggacaccctgggcatcacctggcagagccctggcacctgggccagcctggtgcccttccaggtgagcaacagaacacccatcctgcctgccaacgtgcagaactacggcctgaacatcatcggggagcccttcctgcaggccgagaccagcaactag

SEQ ID NO: 162191 - DNA, 1272 bp, synthetic construct
  misc_feature 1..1272: note = Description of Artificial Sequence: Synthetic coding sequence
  source 1..1272: mol_type = other DNA
atgtacagcagccccctgtgcctgacccaggatgagttccaccccttcatcgaggccctgctgccccacgtgcgggcctttgcctacacctggttcaacctgcaggccaggaagaggaagtacttcaagaagcatgagaagaggatgagcaaggatgaggagagagctgtgaaggatgagctgctgggggagaagccagaggtgaagcagaagtgggccagccggctgctggccaagctgaggaaggacatccggccagaatgtcgggaggactttgtgctgagcatcaccgggaagaaggcccctggctgtgtgctgagcaacccagaccagaagggcaagatgagaagaattgactgcctgcggcaggccgacaaggtgtggaggctggacctggtgatggtgatcctcttcaagggcatccccctggagagcacagatggagagcggctggtgaaggccgcccagtgtggccaccctgtgctgtgtgtgcagccccaccacatcggcgtggccgtgaaggagctggacctgtacctggcctactttgtgcgggagagagatgctgagcagagcggcagccccaggacaggcatgggcagtgaccaggaggacagcaagcccatcaccctggacaccacagacttccaggagagctttgtgaccagcggggtcttctctgtgacagagctgatccaggtgtccaggacccctgtggtgactggaacaggccccaacttcagcctgggggagctgcagggccacctggcctatgacctgaacccagccagcacaggcctgcggaggaccctgcccagcaccagcagcagcggcagcaagaggcacaagagcggctccatggaggaggatgtggacaccagccctggaggagactactacaccagccccagcagccccaccagcagcagcaggaactggacagaggacatggagggcggcatcagcagccctgtgaagaagacagagatggacaagagccccttcaacagccccagcccccaggacagcccccggctgagcagcttcacccagcaccacaggcctgtgattgctgtgcacagcggcatcgcccggagcccccaccccagcagcgccctgcacttccccaccaccagcatcctgccccagacagccagcacctacttcccccacacagccatccgctacccaccccacctgaacccccaggaccccctgaaggacctggtgtccctggcctgtgaccctgccagccagcagcccggcccctag

SEQ ID NO: 162192 - DNA, 1287 bp, synthetic construct
  misc_feature 1..1287: note = Description of Artificial Sequence: Synthetic coding sequence
  source 1..1287: mol_type = other DNA
atgtacagcagccccctgtgcctgacccaggatgagttccaccccttcatcgaggccctgctgccccacgtgcgggcctttgcctacacctggttcaacctgcaggccaggaagaggaagtacttcaagaagcatgagaagaggatgagcaaggatgaggagagagctgtgaaggatgagctgctgggggagaagccagaggtgaagcagaagtgggccagccggctgctggccaagctgaggaaggacatccggccagaatgtcgggaggactttgtgctgagcatcaccgggaagaaggcccctggctgtgtgctgagcaacccagaccagaagggcaagatgagaagaattgactgcctgcggcaggccgacaaggtgtggaggctggacctggtgatggtgatcctcttcaagggcatccccctggagagcacagatggagagcggctggtgaaggccgcccagtgtggccaccctgtgctgtgtgtgcagccccaccacatcggcgtggccgtgaaggagctggacctgtacctggcctactttgtgcgggagagagatgctgagcagagcggcagccccaggacaggcatgggcagtgaccaggaggacagcaagcccatcaccctggacaccacagacttccaggagagctttgtgaccagcggggtcttctctgtgacagagctgatccaggtgtccaggacccctgtggtgactggaacaggccccaacttcagcctgggggagctgcagggccacctggcctatgacctgaacccagccagcacaggcctgcggaggaccctgcccagcaccagcagcagcggcagcaagaggcacaagagcggctccatggaggaggatgtggacaccagccctggaggagactactacaccagccccagcagccccaccagcagcagcaggaactggacagaggacatggagggcggcatcagcagccctgtgaagaagacagagatggacaagagccccttcaacagccccagcccccaggacagcccccggctgagcagcttcacccagcaccacaggcctgtgattgctgtgcacagcggcatcgcccggagcccccaccccagcagcgccctgcacttccccaccaccagcatcctgccccagacagccagcacctacttcccccacacagccatccgctacccaccccacctgaacccccaggaccccctgaaggacctggtgtccctggcctgtgaccctgccagccagcagcccggccccagctggtacctgggctag

SEQ ID NO: 162193 - DNA, 1527 bp, synthetic construct
  misc_feature 1..1527: note = Description of Artificial Sequence: Synthetic coding sequence
  source 1..1527: mol_type = other DNA
atgtacagcagccccctgtgcctgacccaggatgagttccaccccttcatcgaggccctgctgccccacgtgcgggcctttgcctacacctggttcaacctgcaggccaggaagaggaagtacttcaagaagcatgagaagaggatgagcaaggatgaggagagagctgtgaaggatgagctgctgggggagaagccagaggtgaagcagaagtgggccagccggctgctggccaagctgaggaaggacatccggccagaatgtcgggaggactttgtgctgagcatcaccgggaagaaggcccctggctgtgtgctgagcaacccagaccagaagggcaagatgagaagaattgactgcctgcggcaggccgacaaggtgtggaggctggacctggtgatggtgatcctcttcaagggcatccccctggagagcacagatggagagcggctggtgaaggccgcccagtgtggccaccctgtgctgtgtgtgcagccccaccacatcggcgtggccgtgaaggagctggacctgtacctggcctactttgtgcgggagagagatgctgagcagagcggcagccccaggacaggcatgggcagtgaccaggaggacagcaagcccatcaccctggacaccacagacttccaggagagctttgtgaccagcggggtcttctctgtgacagagctgatccaggtgtccaggacccctgtggtgactggaacaggccccaacttcagcctgggggagctgcagggccacctggcctatgacctgaacccagccagcacaggcctgcggaggaccctgcccagcaccagcagcagcggcagcaagaggcacaagagcggctccatggaggaggatgtggacaccagccctggaggagactactacaccagccccagcagccccaccagcagcagcaggaactggacagaggacatggagggcggcatcagcagccctgtgaagaagacagagatggacaagagccccttcaacagccccagcccccaggacagcccccggctgagcagcttcacccagcaccacaggcctgtgattgctgtgcacagcggcatcgcccggagcccccaccccagcagcgccctgcacttccccaccaccagcatcctgccccagacagccagcacctacttcccccacacagccatccgctacccaccccacctgaacccccaggaccccctgaaggacctggtgtccctggcctgtgaccctgccagccagcagcccggccccctgaatggaagtggccagctgaagatgcccagccactgcctgagcgcccagatgctggcccctcctcctcctggcctgccccggctggccctgcccccagccaccaagccagccaccaccagcgagggcggggccaccagccccaccagccccagctacagccccccagacaccagccctgccaacagaagctttgtgggcctgggcccccgggaccctgctggcatctaccaggcccagagctggggagatggatag

SEQ ID NO: 162194 - DNA, 1221 bp, synthetic construct
  misc_feature 1..1221: note = Description of Artificial Sequence: Synthetic coding sequence
  source 1..1221: mol_type = other DNA
atggatgagttccaccccttcatcgaggccctgctgccccacgtgcgggcctttgcctacacctggttcaacctgcaggccaggaagaggaagtacttcaagaagcatgagaagaggatgagcaaggatgaggagagagctgtgaaggatgagctgctgggggagaagccagaggtgaagcagaagtgggccagccggctgctggccaagctgaggaaggacatccggcctgagtgcagagaagattttgtgctgagcatcaccgggaagaaggcccctggctgtgtgctgagcaacccagaccagaagggcaagatgagaagaattgactgcctgcggcaggccgacaaggtgtggaggctggacctggtgatggtgatcctcttcaagggcatccccctggagagcacagatggagagcggctggtgaaggccgcccagtgtggccaccctgtgctgtgtgtgcagccccaccacatcggcgtggccgtgaaggagctggacctgtacctggcctactttgtgcgggagcgggacaccacagacttccaggagagctttgtgaccagcggggtcttctctgtgacagagctgatccaggtgtccaggacccctgtggtgacaggcaccggccccaacttcagcctgggggagctgcagggccacctggcctatgacctgaacccagccagcacaggcctgcggaggaccctgcccagcaccagcagcagcggcagcaagaggcacaagagcggctccatggaggaggatgtggacaccagccctggaggagactactacaccagccccagcagccccaccagcagcagcaggaactggacagaggacatggagggcggcatcagcagccctgtgaagaagacagagatggacaagagccccttcaacagccccagcccccaggacagcccccggctgagcagcttcacccagcaccacaggcctgtgattgctgtgcacagcggcatcgcccggagcccccaccccagcagcgccctgcacttccccaccaccagcatcctgccccagacagccagcacctacttcccccacacagccatccgctacccaccccacctgaacccccaggaccccctgaaggacctggtgtccctggcctgtgaccctgccagccagcagcccggcccccccaccctgcggcccacccggcccctgcagacagtgcccctgtgggactag

SEQ ID NO: 162195 - DNA, 1293 bp, synthetic construct
  misc_feature 1..1293: note = Description of Artificial Sequence: Synthetic coding sequence
  source 1..1293: mol_type = other DNA
atggatgagttccaccccttcatcgaggccctgctgccccacgtgcgggcctttgcctacacctggttcaacctgcaggccaggaagaggaagtacttcaagaagcatgagaagaggatgagcaaggatgaggagagagctgtgaaggatgagctgctgggggagaagccagaggtgaagcagaagtgggccagccggctgctggccaagctgaggaaggacatccggcctgagtgcagagaagattttgtgctgagcatcaccgggaagaaggcccctggctgtgtgctgagcaacccagaccagaagggcaagatgagaagaattgactgcctgcggcaggccgacaaggtgtggaggctggacctggtgatggtgatcctcttcaagggcatccccctggagagcacagatggagagcggctggtgaaggccgcccagtgtggccaccctgtgctgtgtgtgcagccccaccacatcggcgtggccgtgaaggagctggacctgtacctggcctactttgtgcgggagagagatgctgagcagagcggcagccccaggacaggcatgggcagtgaccaggaggacagcaagcccatcaccctggacaccacagacttccaggagagctttgtgaccagcggggtcttctctgtgacagagctgatccaggtgtccaggacccctgtggtgacaggcaccggccccaacttcagcctgggggagctgcagggccacctggcctatgacctgaacccagccagcacaggcctgcggaggaccctgcccagcaccagcagcagcggcagcaagaggcacaagagcggctccatggaggaggatgtggacaccagccctggaggagactactacaccagccccagcagccccaccagcagcagcaggaactggacagaggacatggagggcggcatcagcagccctgtgaagaagacagagatggacaagagccccttcaacagccccagcccccaggacagcccccggctgagcagcttcacccagcaccacaggcctgtgattgctgtgcacagcggcatcgcccggagcccccaccccagcagcgccctgcacttccccaccaccagcatcctgccccagacagccagcacctacttcccccacacagccatccgctacccaccccacctgaacccccaggaccccctgaaggacctggtgtccctggcctgtgaccctgccagccagcagcccggcccccccaccctgcggcccacccggcccctgcagacagtgcccctgtgggactag

SEQ ID NO: 162196 - DNA, 1500 bp, synthetic construct
  misc_feature 1..1500: note = Description of Artificial Sequence: Synthetic coding sequence
  source 1..1500: mol_type = other DNA
atggatgagttccaccccttcatcgaggccctgctgccccacgtgcgggcctttgcctacacctggttcaacctgcaggccaggaagaggaagtacttcaagaagcatgagaagaggatgagcaaggatgaggagagagctgtgaaggatgagctgctgggggagaagccagaggtgaagcagaagtgggccagccggctgctggccaagctgaggaaggacatccggcctgagtgcagagaagattttgtgctgagcatcaccgggaagaaggcccctggctgtgtgctgagcaacccagaccagaagggcaagatgagaagaattgactgcctgcggcaggccgacaaggtgtggaggctggacctggtgatggtgatcctcttcaagggcatccccctggagagcacagatggagagcggctggtgaaggccgcccagtgtggccaccctgtgctgtgtgtgcagccccaccacatcggcgtggccgtgaaggagctggacctgtacctggcctactttgtgcgggagagagatgctgagcagagcggcagccccaggacaggcatgggcagtgaccaggaggacagcaagcccatcaccctggacaccacagacttccaggagagctttgtgaccagcggggtcttctctgtgacagagctgatccaggtgtccaggacccctgtggtgacaggcaccggccccaacttcagcctgggggagctgcagggccacctggcctatgacctgaacccagccagcacaggcctgcggaggaccctgcccagcaccagcagcagcggcagcaagaggcacaagagcggctccatggaggaggatgtggacaccagccctggaggagactactacaccagccccagcagccccaccagcagcagcaggaactggacagaggacatggagggcggcatcagcagccctgtgaagaagacagagatggacaagagccccttcaacagccccagcccccaggacagcccccggctgagcagcttcacccagcaccacaggcctgtgattgctgtgcacagcggcatcgcccggagcccccaccccagcagcgccctgcacttccccaccaccagcatcctgccccagacagccagcacctacttcccccacacagccatccgctacccaccccacctgaacccccaggaccccctgaaggacctggtgtccctggcctgtgaccctgccagccagcagcccggccccctgaatggcagcggccagctgaagatgcccagccactgcctgagcgcccagatgctggcccctcctcctcctggcctgccccggctggccctgcccccagccaccaagccagccaccaccagcgagggcggggccaccagccccaccagccccagctacagccccccagacaccagccctgccaacagaagctttgtgggcctgggcccccgggaccctgctggcatctaccaggcccagagctggtacctgggctag

SEQ ID NO: 162197 - DNA, 1500 bp, synthetic construct; identical to SEQ ID NO: 162196
  misc_feature 1..1500: note = Description of Artificial Sequence: Synthetic coding sequence
  source 1..1500: mol_type = other DNA

SEQ ID NO: 162198 - DNA, 1212 bp, synthetic construct
  misc_feature 1..1212: note = Description of Artificial Sequence: Synthetic coding sequence
  source 1..1212: mol_type = other DNA
atgggcgccacagagcccggcggggacaccagcagtgatgagttccaccccttcatcgaggccctgctgccccacgtgcgggccttctcctacacctggttcaacctgcaggccaggaagaggaagtacttcaagaagcatgagaagaggatgagcaaggatgaggagagagctgtgaaggatgagctgctgggggagaagccagagatcaagcagaagtgggccagccggctgctggccaagctgaggaaggacatccggcctgagttccgggaggactttgtgctgaccatcaccgggaagaagccaccctgctgcgtgctgagcaacccagaccagaagggcaagatcagaagaattgactgcctgcggcaggccgacaaggtgtggaggctggacctggtgatggtgatcctcttcaagggcatccccctggagagcacagatggagagcggctgtacaagagcccccagtgcagcaaccctggcctgtgtgtgcagccccaccacatcggcgtgaccatcaaggagctggacctgtacctggcctactttgtgcacaccccagagagcggccagagcgacagcagcaaccagcagggagatgctgacatcaagcccctgcccaacggccacctgtccttccaggactgctttgtgaccagcggcgtgtggaatgtgacagagctggtgcgggtgtcccagacccctgtggccacagccagcggccccaacttcagcctggccgacctggagagccccagctactacaacatcaaccaggtgaccctgggccgccgcagcatcaccagcccccccagcaccagcaccaccaagaggcccaagagcattgatgattctgagatggagagccctgtggatgatgtgttctacccaggcaccggccgcagccctgctgctggcagcagccagagcagcggctggcccaatgatgtggatgctggcagcccccgggccacagccagcgccctgcacttccccagcaccagcatcatccagcagagcagcccctacttcacccaccccaccatccgctaccaccaccaccacggccaggacagcctgaaggagtttgtgcagtttgtgtgcagtgatggcagcggccaggccaccggccagcacagccagaggcaggccccacccctgcccaccggcctgagcgccagtgaccccggcacagccaccttctag

SEQ ID NO: 162199 - DNA, 1383 bp, synthetic construct
  misc_feature 1..1383: note = Description of Artificial Sequence: Synthetic coding sequence
  source 1..1383: mol_type = other DNA
atgctgcctgcctgccgcctgcaggatgagttccaccccttcatcgaggccctgctgccccacgtgcgggccttctcctacacctggttcaacctgcaggccaggaagaggaagtacttcaagaagcatgagaagaggatgagcaaggatgaggagagagctgtgaaggatgagctgctgggggagaagccagagatcaagcagaagtgggccagccggctgctggccaagctgaggaaggacatccggcctgagttccgggaggactttgtgctgaccatcaccgggaagaagccaccctgctgcgtgctgagcaacccagaccagaagggcaagatcagaagaattgactgcctgcggcaggccgacaaggtgtggaggctggacctggtgatggtgatcctcttcaagggcatccccctggagagcacagatggagagcggctgtacaagagcccccagtgcagcaaccctggcctgtgtgtgcagccccaccacatcggcgtgaccatcaaggagctggacctgtacctggcctactttgtgcacaccccagagagcggccagagcgacagcagcaaccagcagggagatgctgacatcaagcccctgcccaacggccacctgtccttccaggactgctttgtgaccagcggcgtgtggaatgtgacagagctggtgcgggtgtcccagacccctgtggccacagccagcggccccaacttcagcctggccgacctggagagccccagctactacaacatcaaccaggtgaccctgggccgccgcagcatcaccagcccccccagcaccagcaccaccaagaggcccaagagcattgatgattctgagatggagagccctgtggatgatgtgttctacccaggcaccggccgcagccctgctgctggcagcagccagagcagcggctggcccaatgatgtggatgctggcagcccccgggccacagccagcgccctgcacttccccagcaccagcatcatccagcagagcagcccctacttcacccaccccaccatccgctaccaccaccaccacggccaggacagcctgaaggagtttgtgcagtttgtgtgcagtgatggcagcggccaggccaccggccagcccaacggcagcggccagggcaaggtgcccggcagcttcctgctgcccccacctcctcctgtggcccggcctgtgcccctgcccatgccagacagcaagagcaccagcacagccccagatggagctgccctgaccccacccagccccagctttgccaccaccggggccagcagcgccaacagatttgtgtccatcggccccagagatggcaacttcctgaacatcccccagcagagccagagctggttcctgtag

SEQ ID NO: 162200 - DNA, 1326 bp, synthetic construct
  misc_feature 1..1326: note = Description of Artificial Sequence: Synthetic coding sequence
  source 1..1326: mol_type = other DNA
atgtacagcccctactgcctgacccaggatgagttccaccccttcatcgaggccctgctgccccacgtgcgggccttctcctacacctggttcaacctgcaggccaggaagaggaagtacttcaagaagcatgagaagaggatgagcaaggatgaggagagagctgtgaaggatgagctgctgggggagaagccagagatcaagcagaagtgggccagccggctgctggccaagctgaggaaggacatccggcctgagttcagagaagattttgtgctgaccatcaccgggaagaagccaccctgctgcgtgctgagcaacccagaccagaagggcaagatcagaagaattgactgcctgcggcaggccgacaaggtgtggaggctggacctggtgatggtgatcctcttcaagggcatccccctggagagcacagatggagagcggctgtacaagagcccccagtgcagcaaccctggcctgtgtgtgcagccccaccacatcggcgtgaccatcaaggagctggacctgtacctggcctactttgtgcacaccccagagagcggccagagcgacagcagcaaccagcagggagatgctgacatcaagcccctgcccaacggccacctgtccttccaggactgctttgtgaccagcggcgtgtggaatgtgacagagctggtgcgggtgtcccagacccctgtggccacagccagcggccccaacttcagcctggccgacctggagagccccagctactacaacatcaaccaggtgaccctgggcagaagaagcatcaccagcccccccagcaccagcaccaccaagaggcccaagagcattgatgacagcgagatggagagccctgtggatgatgtgttctacccaggcaccggccgcagccctgctgctggcagcagccagagcagcggctggcccaatgatgtggatgctggccctgccagcctgaagaagagcggcaagctggacttctgcagcgccctgagcagccagggcagcagccccaggatggccttcacccaccaccccctgcctgtgctggccggcgtgcggcccggcagcccccgggccacagccagcgccctgcacttccccagcaccagcatcatccagcagagcagcccctacttcacccaccccaccatccgctaccaccaccaccacggccaggacagcctgaaggagtttgtgcagtttgtgtgcagtgatggcagcggccaggccaccggccagcacagccagaggcaggccccacccctgcccaccggcctgagcgccagtgaccccggcacagccaccttctag

SEQ ID NO: 162201 - DNA, 1509 bp, synthetic construct
  misc_feature 1..1509: note = Description of Artificial Sequence: Synthetic coding sequence
  source 1..1509: mol_type = other DNA
atgtacagcccctactgcctgacccaggatgagttccaccccttcatcgaggccctgctgccccacgtgcgggccttctcctacacctggttcaacctgcaggccaggaagaggaagtacttcaagaagcatgagaagaggatgagcaaggatgaggagagagctgtgaaggatgagctgctgggggagaagccagagatcaagcagaagtgggccagccggctgctggccaagctgaggaaggacatccggcctgagttcagagaagattttgtgctgaccatcaccgggaagaagccaccctgctgcgtgctgagcaacccagaccagaagggcaagatcagaagaattgactgcctgcggcaggccgacaaggtgtggaggctggacctggtgatggtgatcctcttcaagggcatccccctggagagcacagatggagagcggctgtacaagagcccccagtgcagcaaccctggcctgtgtgtgcagccccaccacatcggcgtgaccatcaaggagctggacctgtacctggcctactttgtgcacaccccagagagcggccagagcgacagcagcaaccagcagggagatgctgacatcaagcccctgcccaacggccacctgtccttccaggactgctttgtgaccagcggcgtgtggaatgtgacagagctggtgcgggtgtcccagacccctgtggccacagccagcggccccaacttcagcctggccgacctggagagccccagctactacaacatcaaccaggtgaccctgggcagaagaagcatcaccagcccccccagcaccagcaccaccaagaggcccaagagcattgatgacagcgagatggagagccctgtggatgatgtgttctacccaggcaccggccgcagccctgctgctggcagcagccagagcagcggctggcccaatgatgtggatgctggccctgccagcctgaagaagagcggcaagctggacttctgcagcgccctgagcagccagggcagcagccccaggatggccttcacccaccaccccctgcctgtgctggccggcgtgcggcccggcagcccccgggccacagccagcgccctgcacttccccagcaccagcatcatccagcagagcagcccctacttcacccaccccaccatccgctaccaccaccaccacggccaggacagcctgaaggagtttgtgcagtttgtgtgcagtgatggcagcggccaggccaccggccagcccaacggcagcggccagggcaaggtgcccggcagcttcctgctgcccccacctcctcctgtggcccggcctgtgcccctgcccatgccagacagcaagagcaccagcacagccccagatggagctgccctgaccccacccagccccagctttgccaccaccggggccagcagcgccaacagatttgtgtccatcggccccagagatggcaacttcctgaacatcccccagcagagccagagctggttcctgtag

SEQ ID NO: 162202 - DNA, 633 bp, synthetic construct
  misc_feature 1..633: note = Description of Artificial Sequence: Synthetic coding sequence
  source 1..633: mol_type = other DNA
atgagcaaggatgaggagagagctgtgaaggatgagctgctgggggagaagccagagatcaagcagaagtgggccagccggctgctggccaagctgaggaaggacatccggcctgagttccgggaggactttgtgctgaccatcaccgggaagaagccaccctgctgcgtgctgagcaacccagaccagaagggcaagatcagaagaattgactgcctgcggcaggccgacaaggtgtggaggctggacctggtgatggtgatcctcttcaagggcatccccctggagagcacagatggagagcggctgtacaagagcccccagtgcagcaaccctggcctgtgtgtgcagccccaccacatcggcgtgaccatcaaggagctggacctgtacctggcctactttgtgcacaccccagagagcggccagagcgacagcagcaaccagcagggagatgctgacatcaagcccctgcccaacggccacctgtccttccaggactgctttgtgaccagcggcgtgtggaatgtgacagagctggtgtaccaccggctgctgctgcagcagcaccagggccccaccagcccctggaggacctggagggtgcctgccaccaccaccagcaccaggtag

SEQ ID NO: 162203 - DNA, 1071 bp, synthetic construct
  misc_feature 1..1071: note = Description of Artificial Sequence: Synthetic coding sequence
  source 1..1071: mol_type = other DNA
atggccggcgtggcctgcctgggcaaggctgctgatgctgatgagtggtgtgacagcggcctgggcagcctgggcccagatgctgctgcccctgggggccctggcctgggcgctgagctgggccctggcctgtcctgggcccccctggtgtttggctacgtgacagaagatggagacacagccctgcacctggccgtcatccaccagcacgagcccttcctggacttcctgctgggcttctctgctggaacagagtacatggacctgcagaatgacctgggccagacagccctgcacctggccgccatcctgggggagaccagcacagtggagaagctgtatgctgctggggccggcctgtgtgtggccgagcggcggggccacacagccctgcacctggcctgccgggtgggcgcccacgcctgtgcccgggccctgctgcagccccggccccggcggccccgggaggccccagacacctacctggcccagggccctgacaggaccccagacaccaaccacacccctgtggccctgtacccagacagcgacctggagaaggaggaggaggagagcgaggaggactggaagctgcagctggaggctgaaaattatgagggccacacccccctgcacgtggccgtcatccacaaggatgtggagatggtgcggctgctgagagatgctggagctgacctggacaagccagagcccacctgtggccgcagccccctgcacctggccgtggaggcccaggccgcagatgtgctggagctgctgctgcgggccggggccaacccagctgccaggatgtatggaggccgcacccccctgggcagcgccatgctgcggcccaaccccatcctggcccggctgctgcgggcccacggggcccctgagcctgagggggaggatgagaagagcggcccctgcagcagcagcagtgacagcgacagcggagatgaaggagatgaatatgatgacatcgtggtgcacagcagccgcagccagacccggctgccccccaccccagccagcaagcccctgcctgatgaccccaggcctgtgtag

SEQ ID NO: 162204 - DNA, 921 bp, synthetic construct
  misc_feature 1..921: note = Description of Artificial Sequence: Synthetic coding sequence
  source 1..921: mol_type = other DNA
atgaatggagccacagctgcctgggccccctgggtgaggacccagaggcccccagaggacctgggctgggcccgctcctgggcccggggctgccggggcctgcccagcagcagcgccaccagcctgaggatgggcacccgcttctctgctggaacagagtacatggacctgcagaatgacctgggccagacagccctgcacctggccgccatcctgggggagaccagcacagtggagaagctgtatgctgctggggccggcctgtgtgtggccgagcggcggggccacacagccctgcacctggcctgccgggtgggcgcccacgcctgtgcccgggccctgctgcagccccggccccggcggccccgggaggccccagacacctacctggcccagggccctgacaggaccccagacaccaaccacacccctgtggccctgtacccagacagcgacctggagaaggaggaggaggagagcgaggaggactggaagctgcagctggaggctgaaaattatgagggccacacccccctgcacgtggccgtcatccacaaggatgtggagatggtgcggctgctgagagatgctggagctgacctggacaagccagagcccacctgtggccgcagccccctgcacctggccgtggaggcccaggccgcagatgtgctggagctgctgctgcgggccggggccaacccagctgccaggatgtatggaggccgcacccccctgggcagcgccatgctgcggcccaaccccatcctggcccggctgctgcgggcccacggggcccctgagcctgagggggaggatgagaagagcggcccctgcagcagcagcagtgacagcgacagcggagatgaaggagtgtcccaggaggagcggcagggcagccctgctgggggcagcggctag

SEQ ID NO: 162205 - DNA, 1086 bp, synthetic construct
  misc_feature 1..1086: note = Description of Artificial Sequence: Synthetic coding sequence
  source 1..1086: mol_type = other DNA
ctgcagaacagccggcagagccctgccaccggcggccgcctgcggggggcccctgaggccgccggggccatggccggcgtggcctgcctgggcaaggccgcagatgctgatgagtggtgtgacagcggcctgggcagcctgggcccagatgctgctgcccctgggggccctggcctgggcgctgagctgggccctggcctgtcctgggcccccctggtgtttggctacgtgacagaagatggagacacagccctgcacctggccgtcatccaccagcacgagcccttcctggacttcctgctgggcttctctgctggaacagagtacatggacctgcagaatgacctgggccagacagccctgcacctggccgccatcctgggggagaccagcacagtggagaagctgtatgctgctggagctggcctgtgtgtggccgagcggcggggccacacagccctgcacctggcctgccgggtgggcgcccacgcctgtgcccgggccctgctgcagccccggccccggcggccccgggaggccccagacacctacctggcccagggccctgacaggaccccagacaccaaccacacccctgtggccctgtacccagacagcgacctggagaaggaggaggaggagagcgaggaggactggaagctgcagctggaggccgagaactatgagggccacacccccctgcacgtggccgtcatccacaaggatgtggagatggtgcggctgctgagagatgctggagctgacctggacaagccagagcccacctgtggccgcagccccctgcacctggccgtggaggcccaggccgcagatgtgctggagctgctgctgcgggccggggccaacccagctgccaggatgtatggaggccgcacccccctgggcagcgccatgctgcggcccaaccccatcctggcccggctgctgcgggcccatggagcccctgagccagaaggagaagatgagaagagcggcccctgcagcagcagcagtgacagcgacagcggagatgagggcgtgtcccaggaggagcggcagggcagccctgctgggggcagcggctag

SEQ ID NO: 162206 - DNA, 1791 bp, synthetic construct
  misc_feature 1..1791: note = Description of Artificial Sequence: Synthetic coding sequence
  source 1..1791: mol_type = other DNA
atgattgtggacaagctgctggatgacagccggggcggggagggcctgagagatgctgctgggggctgcggcctgatgaccagccccctgaacctgagctacttctacggggccagccccccagctgctgcccctggggcctgtgatgccagctgcagcgtgctgggccccagcgcccctggcagccctggcagtgacagcagtgacttcagcagcgccagctctgtgagcagctgtggggctgtggagagccgcagccggggcggggcccgggcagagcggcagcctgtggagccccacatgggcgtgggccggcagcagaggggccccttccagggcgtgcgggtgaagaacagcgtgaaggagctgctgctgcacatccgcagccacaagcagaaggccagcggccaggccgtggatgacttcaagacccagggcgtgaacatcgagcagttccgggagctgaagaacacagtgtcctacagcggcaagaggaagggccctgacagcctgagtgatggccctgcctgcaagaggcctgccctgctgcacagccagttcctgaccccaccccagacccccaccccaggagagagcatggaggatgtgcacctgaatgagcccaagcaggagagcagcgctgacctgctgcagaacatcatcaacatcaagaatgaatgttctcctgtgtccctgaacacagtgcagaccagcagctctgtgcagcagcagaatgatgcccacctgcacagcttctccatgatgcccagcagcgcctgtgaggccatggtgggccacgagatggccagtgacagcagcaacaccagcctgcccttcagcaacatgggcaaccccatgaacaccacccagctgggcaagagcctcttccagtggcaggtggagcaggaggagagcaagctggccaacatcagccaggaccagttcctgagcaaggatgctgatggagacaccttcctgcacatcgctgtggcccagggccggcgggccctgtcctatgtgctggccaggaagatgaatgccctgcacatgctggacatcaaggagcacaacggccagagcgccttccaggtggccgtggccgccaaccagcacctgattgtgcaggacctggtgaacatcggggcccaggtgaacaccacagactgctggggccgcacccccctgcacgtgtgtgccgagaagggccacagccaggtgctgcaggccatccagaagggagctgtgggcagcaaccagtttgtggacctggaggccaccaactatgatggcctgacccccctgcactgtgctgtgattgcccacaatgctgtggtgcatgagctgcagaggaaccagcagccccacagccctgaggtgcaggagctgctgctgaagaacaagagcctggtggacaccatcaagtgcctgatccagatgggcgctgctgtggaggccaaggacaggaagagcggccgcacagccctgcacctggccgctgaggaggccaacctggagctgatccgcctcttcctggagctgcccagctgcctgagctttgtgaatgccaaggcctacaacggcaacacagccctgcacgtggccgccagcctgcagtaccgcctgacccagctggatgctgtgcggctgctgatgaggaaaggagctgaccccagcaccaggaacctggagaatgagcagcctgtgcacctggtgcctgatggccctgtgggggagcagatccgccgcatcctgaagggcaagagcatccagcagagggccccaccctactag

SEQ ID NO: 162207 - DNA, 2157 bp, synthetic construct
  misc_feature 1..2157: note = Description of Artificial Sequence: Synthetic coding sequence
  source 1..2157: mol_type = other DNA
atgattgtggacaagctgctggatgacagccggggcggggagggcctgagagatgctgctgggggctgcggcctgatgaccagccccctgaacctgagctacttctacggggccagccccccagctgctgcccctggggcctgtgatgccagctgcagcgtgctgggccccagcgcccctggcagccctggcagtgacagcagtgacttcagcagcgccagctctgtgagcagctgtggggctgtggagagccgcagccggggcggggcccgggcagagcggcagcctgtggagccccacatgggcgtgggccggcagcagaggggccccttccagggcgtgcgggtgaagaacagcgtgaaggagctgctgctgcacatccgcagccacaagcagaaggccagcggccaggccgtggatgacttcaagacccagggcgtgaacatcgagcagttccgggagctgaagaacacagtgtcctacagcggcaagaggaagggccctgacagcctgagtgatggccctgcctgcaagaggcctgccctgctgcacagccagttcctgaccccaccccagacccccaccccaggagagagcatggaggatgtgcacctgaatgagcccaagcaggagagcagcgctgacctgctgcagaacatcatcaacatcaagaatgaatgttctcctgtgtccctgaacacagtgcaggtgtcctggctgaaccctgtggtggtgccccagagcagccctgctgagcagtgccaggacttccacggcggccaggtgttcagccccccccagaagtgccagcccttccaggtgcggggcagccagcagatgattgaccaggccagcctgtaccagtacagcccccagaaccagcacgtggagcagcagccccactacacccacaagcccaccctggagtacagccccttccccatccccccccagagccctgcctatgagcccaacctgtttgatggccctgagagccagttctgccccaaccagagcctggtgtccctgctgggggaccagcgggagagtgaaaatattgccaaccccatgcagaccagcagctctgtgcagcagcagaatgatgcccacctgcacagcttctccatgatgcccagcagcgcctgtgaggccatggtgggccacgagatggccagtgacagcagcaacaccagcctgcccttcagcaacatgggcaaccccatgaacaccacccagctgggcaagagcctcttccagtggcaggtggagcaggaggagagcaagctggccaacatcagccaggaccagttcctgagcaaggatgctgatggagacaccttcctgcacatcgctgtggcccagggccggcgggccctgtcctatgtgctggccaggaagatgaatgccctgcacatgctggacatcaaggagcacaacggccagagcgccttccaggtggccgtggccgccaaccagcacctgattgtgcaggacctggtgaacatcggggcccaggtgaacaccacagactgctggggccgcacccccctgcacgtgtgtgccgagaagggccacagccaggtgctgcaggccatccagaagggagctgtgggcagcaaccagtttgtggacctggaggccaccaactatgatggcctgacccccctgcactgtgctgtgattgcccacaatgctgtggtgcatgagctgcagaggaaccagcagccccacagccctgaggtgcaggagctgctgctgaagaacaagagcctggtggacaccatcaagtgcctgatccagatgggcgctgctgtggaggccaaggacaggaagagcggccgcacagccctgcacctggccgctgaggaggccaacctggagctgatccgcctcttcctggagctgcccagctgcctgagctttgtgaatgccaaggcctacaacggcaacacagccctgcacgtggccgccagcctgcagtaccgcctgacccagctggatgctgtgcggctgctgatgaggaaaggagctgaccccagcaccaggaacctggagaatgagcagcctgtgcacctggtgcctgatggccctgtgggggagcagatccgccgcatcctgaagggcaagagcatccagcagagggccccaccctactag

SEQ ID NO: 162208 - DNA, 1857 bp, synthetic construct
  misc_feature 1..1857: note = Description of Artificial Sequence: Synthetic coding sequence
  source 1..1857: mol_type = other DNA
atgggcgtgggccggcagcagaggggccccttccagggcgtgcgggtgaagaacagcgtgaaggagctgctgctgcacatccgcagccacaagcagaaggccagcggccaggccgtggatgacttcaagacccagggcgtgaacatcgagcagttccgggagctgaagaacacagtgtcctacagcggcaagaggaagggccctgacagcctgagtgatggccctgcctgcaagaggcctgccctgctgcacagccagttcctgaccccaccccagacccccaccccaggagagagcatggaggatgtgcacctgaatgagcccaagcaggagagcagcgctgacctgctgcagaacatcatcaacatcaagaatgaatgttctcctgtgtccctgaacacagtgcaggtgtcctggctgaaccctgtggtggtgccccagagcagccctgctgagcagtgccaggacttccacggcggccaggtgttcagccccccccagaagtgccagcccttccaggtgcggggcagccagcagatgattgaccaggccagcctgtaccagtacagcccccagaaccagcacgtggagcagcagccccactacacccacaagcccaccctggagtacagccccttccccatccccccccagagccctgcctatgagcccaacctgtttgatggccctgagagccagttctgccccaaccagagcctggtgtccctgctgggggaccagcgggagagtgaaaatattgccaaccccatgcagaccagcagctctgtgcagcagcagaatgatgcccacctgcacagcttctccatgatgcccagcagcgcctgtgaggccatggtgggccacgagatggccagtgacagcagcaacaccagcctgcccttcagcaacatgggcaaccccatgaacaccacccagctgggcaagagcctcttccagtggcaggtggagcaggaggagagcaagctggccaacatcagccaggaccagttcctgagcaaggatgctgatggagacaccttcctgcacatcgctgtggcccagggccggcgggccctgtcctatgtgctggccaggaagatgaatgccctgcacatgctggacatcaaggagcacaacggccagagcgccttccaggtggccgtggccgccaaccagcacctgattgtgcaggacctggtgaacatcggggcccaggtgaacaccacagactgctggggccgcacccccctgcacgtgtgtgccgagaagggccacagccaggtgctgcaggccatccagaagggagctgtgggcagcaaccagtttgtggacctggaggccaccaactatgatggcctgacccccctgcactgtgctgtgattgcccacaatgctgtggtgcatgagctgcagaggaaccagcagccccacagccctgaggtgcaggagctgctgctgaagaacaagagcctggtggacaccatcaagtgcctgatccagatgggcgctgctgtggaggccaaggacaggaagagcggccgcacagccctgcacctggccgctgaggaggccaacctggagctgatccgcctcttcctggagctgcccagctgcctgagctttgtgaatgccaaggcctacaacggcaacacagccctgcacgtggccgccagcctgcagtaccgcctgacccagctggatgctgtgcggctgctgatgaggaaaggagctgaccccagcaccaggaacctggagaatgagcagcctgtgcacctggtgcctgatggccctgtgggggagcagatccgccgcatcctgaagggcaagagcatccagcagagggccccaccctactag

SEQ ID NO: 162209 - DNA, 333 bp, synthetic construct
  misc_feature 1..333: note = Description of Artificial Sequence: Synthetic coding sequence
  source 1..333: mol_type = other DNA
atgattgtggacaagctgctggatgacagccggggcggggagggcctgagagatgctgctgggggctgcggcctgatgaccagccccctgaacctgagctacttctacggggccagccccccagctgctgcccctggggcctgtgatgccagctgcagcgtgctgggccccagcgcccctggcagccctggcagtgacagcagtgacttcagcagcgccagctctgtgagcagctgtggggctgtggagagccgcagccggggcggggcccgggcagagcggcagcctgtggagccccacatgggcgtgggccggcagcagaggggcccctag

SEQ ID NO: 162210 - DNA, 1806 bp, synthetic construct
  misc_feature 1..1806: note = Description of Artificial Sequence: Synthetic coding sequence
  source 1..1806: mol_type = other DNA
atgggcgtgggccggcagcagaggggccccttccagggcgtgcgggtgaagaacagcgtgaaggagctgctgctgcacatccgcagccacaagcagaaggccagcggccaggccgtggatgacttcaagacccagggcgtgaacatcgagcagttccgggagctgaagaacacagtgtcctacagcggcaagaggaagggccctgacagcctgagtgatggccctgcctgcaagaggcctgccctgctgcacagccagttcctgaccccaccccagacccccaccccaggagagagcatggaggatgtgcacctgaatgagcccaagcaggagagcagcgctgacctgctgcagaacatcatcaacatcaagaatgaatgttctcctgtgtccctgaacacagtgcaggtgtcctggctgaaccctgtggtggtgccccagagcagccctgctgagcagtgccaggacttccacggcggccaggtgttcagccccccccagaagtgccagcccttccaggtgcggggcagccagcagatgattgaccaggccagcctgtaccagtacagcccccagaaccagcacgtggagcagcagccccactacacccacaagcccaccctggagtacagccccttccccatccccccccagagccctgcctatgagcccaacctgtttgatggccctgagagccagttctgccccaaccagagcctggtgtccctgctgggggaccagcgggagagtgaaaatattgccaaccccatgcagaccagcagctctgtgcagcagcagaatgatgcccacctgcacagcttctccatgatgcccagcagcgcctgtgaggccatggtgggccacgagatggccagtgacagcagcaacaccagcctgcccttcagcaacatgggcaaccccatgaacaccacccagctgggcaagagcctcttccagtggcaggtggagcaggaggagagcaagctggccaacatcagccaggaccagttcctgagcaaggatgctgatggagacaccttcctgcacatcgctgtggcccagggccggcgggccctgtcctatgtgctggccaggaagatgaatgccctgcacatgctggacatcaaggagcacaacggccagagcgccttccaggtggccgtggccgccaaccagcacctgattgtgcaggacctggtgaacatcggggcccaggtgaacaccacagactgctggggccgcacccccctgcacgtgtgtgccgagaagggccacagccaggtgctgcaggccatccagaagggagctgtgggcagcaaccagtttgtggacctggaggccaccaactatgatggcctgacccccctgcactgtgctgtgattgcccacaatgctgtggtgcatgagctgcagaggaaccagcagccccacagccctgaggtgcaggagctgctgctgaagaacaagagcctggtggacaccatcaagtgcctgatccagatgggcgctgctgtggaggccaaggacaggaagagcggccgcacagccctgcacctggccgctgaggaggccaacctggagctgatccgcctcttcctggagctgcccagctgcctgagctttgtgaatgccaaggcctacaacggcaacacagccctgcacgtggccgccagcctgcagtaccgcctgacccagctggatgctgtgcggctgctgatgaggaaaggagctgaccccagcaccaggaacctggagaatgagcagcctgtgcacctggtgcctgatggccctgtgggggagcagtag

SEQ ID NO: 162211 - DNA, 393 bp, synthetic construct
  misc_feature 1..393: note = Description of Artificial Sequence: Synthetic coding sequence
  source 1..393: mol_type = other DNA
atgggcgtgggccggcagcagaggggccccttccagggcgtgcgggtgaagaacagcgtgaaggagctgctgctgcacatccgcagccacaagcagaaggccagcggccaggccgtggatgacttcaagacccagggcgtgaacatcgagcagttccgggagctgaagaacacagtgtcctacagcggcaagaggaagggccctgacagcctgagtgatggccctgcctgcaagaggcctgccctgctgcacagccagttcctgaccccaccccagacccccaccccaggagagagcatggaggatgtgcacctgaatgagcccaagcaggagagcagcgctgacctgctgcagaacatcatcaacatcaagaatgaatgttctcctgtgtag

SEQ ID NO: 162212 - DNA, 1101 bp, synthetic construct
  misc_feature 1..1101: note = Description of Artificial Sequence: Synthetic coding sequence
  source 1..1101: mol_type = other DNA
atgagcaaccccagcccccaggtgcctgaggaggaggccagcacctctgtgtgccggcccaagagctccatggccagcaccagccggcggcagaggcgggagcggcgcttccgccgctacctgtctgctggccgcctggtgcgggcccaggccctgctgcagaggcaccctggcctggatgtggatgctggccagcccccacccctgcaccgggcctgtgcccggcatgatgccccagccctgtgcctgctgctgcggctgggcgctgaccctgcccaccaggacagacatggagacacagccctgcacgccgccgcccggcagggcccagatgcctacacagacttcttcctgcccctgctgagccgctgccccagcgccatgggcatcaagaacaaggatggagagaccccaggccagatcctgggctggggccccccctgggacagcgctgaggaggaggaggaggatgatgccagcaaggagcgggagtggaggcagaagctgcagggagatgccagccatgagacccaggagcctgagagcttcagcgcctggagcgaccggctggcccgggagcacgcccagaagtgccagcagcagcagcgggaggccgagggcagcagaagaccacccagggctgagggcagcagccagagctggaggcagcaggaggaggagcagaggctcttccgggagcgggcccgggccaaggaggaggagctgcgggagagccgggcccggcgggcccaggaggccctgggggaccgggagcccaagcccacccgggccggcccccgggaggagcaccccaggggggccggccggggcagcctgtggaggtttggagatgtgccctggccctgccctgggggcggggaccctgaggccatggccgccgccctggtggcccggggcccccccctggaggagcagggcgccctgcggcgctacctgcgggtgcagcaggtgcgctggcacccagaccgcttcctgcagcgcttccgcagccagatcgagacctgggagctgggccgggtgatgggcgctgtgacagccctgagccaggccctgaacagacatgctgaggccctgaagtag

SEQ ID NO: 162213 - DNA, 1077 bp, synthetic construct
  misc_feature 1..1077: note = Description of Artificial Sequence: Synthetic coding sequence
  source 1..1077: mol_type = other DNA
atggccagcaccagccggcggcagaggcgggagcggcgcttccgccgctacctgtctgctggccgcctggtgcgggcccaggccctgctgcagaggcaccctggcctggatgtggatgctggccagcccccacccctgcaccgggcctgtgcccggcatgatgccccagccctgtgcctgctgctgcggctgggcgctgaccctgcccaccaggacagacatggagacacagccctgcatgctgctgcccggcagggcccagatgcctacacagacttcttcctgcccctgctgagccgctgccccagcgccatgggcatcaagaacaaggatggagagaccccaggccagatcctgggctggggccccccctgggacagcgctgaggaggaggaggaggatgatgccagcaaggagcgggagtggaggcagaagctgcagggcgagctggaggatgagtggcaggaggtgatgggccgctttgaaggagatgccagccatgagacccaggagcctgagagcttcagcgcctggagcgaccggctggcccgggagcacgcccagaagtgccagcagcagcagcgggaggccgagggcagcagaagaccacccagggctgagggcagcagccagagctggaggcagcaggaggaggagcagaggctcttccgggagcgggcccgggccaaggaggaggagctgcgggagagccgggcccggcgggcccaggaggccctgggggaccgggagcccaagcccacccgggccggcccccgggaggagcaccccaggggggccggccggggcagcctgtggaggtttggagatgtgccctggccctgccctgggggcggggaccctgaggccatggccgccgccctggtggcccggggcccccccctggaggagcagggcgccctgcggcgctacctgcgggtgcagcaggtgcgctggcacccagaccgcttcctgcagcgcttccgcagccagatcgagacctgggagctgggccgggtgatgggcgctgtgacagccctgagccaggccctgaacagacatgctgaggccctgaagtag

SEQ ID NO: 162214 - DNA, 1146 bp, synthetic construct
  misc_feature 1..1146: note = Description of Artificial Sequence: Synthetic coding sequence
  source 1..1146: mol_type = other DNA
atgagcaaccccagcccccaggtgcctgaggaggaggccagcacctctgtgtgccggcccaagagctccatggccagcaccagccggcggcagaggcgggagcggcgcttccgccgctacctgtctgctggccgcctggtgcgggcccaggccctgctgcagaggcaccctggcctggatgtggatgctggccagcccccacccctgcaccgggcctgtgcccggcatgatgccccagccctgtgcctgctgctgcggctgggcgctgaccctgcccaccaggacagacatggagacacagccctgcacgccgccgcccggcagggcccagatgcctacacagacttcttcctgcccctgctgagccgctgccccagcgccatgggcatcaagaacaaggatggagagaccccaggccagatcctgggctggggccccccctgggacagcgctgaggaggaggaggaggatgatgccagcaaggagcgggagtggaggcagaagctgcagggcgagctggaggatgagtggcaggaggtgatgggccgctttgaaggagatgccagccatgagacccaggagcctgagagcttcagcgcctggagcgaccggctggcccgggagcacgcccagaagtgccagcagcagcagcgggaggccgagggcagccggcggccccccagggctgagggcagcagccagagctggaggcagcaggaggaggagcagaggctcttccgggagcgggcccgggccaaggaggaggagctgcgggagagccgggcccggcgggcccaggaggccctgggggaccgggagcccaagcccaccagggctggcccccgggaggagcaccccagaggagctggccggggcagcctgtggaggtttggagatgtgccctggccctgccctgggggcggggaccctgaggccatggctgctgccctggtggcccggggcccccccctggaggagcagggcgccctgcggcgctacctgcgggtgcagcaggtgcgctggcacccagaccgcttcctgcagcgcttccgcagccagatcgagacctgggagctgggccgggtgatgggcgctgtgacagccctgagccaggccctgaacagacatgctgaggccctgaagtag

SEQ ID NO: 162215 - DNA, 1101 bp, synthetic construct
  misc_feature 1..1101: note = Description of Artificial Sequence: Synthetic coding sequence
  source 1..1101: mol_type = other DNA
atgagcaaccccagcccccaggtgcctgaggaggaggccagcacctctgtgtgccggcccaagagctccatggccagcaccagccggcggcagaggcgggagcggcgcttccgccgctacctgtctgctggccgcctggtgcgggcccaggccctgctgcagaggcaccctggcctggatgtggatgctggccagcccccacccctgcaccgggcctgtgcccggcatgatgccccagccctgtgcctgctgctgcggctgggcgctgaccctgcccaccaggacagacatggagacacagccctgcacgccgccgcccggcagggcccagatgcctacacagacttcttcctgcccctgctgagccgctgccccagcgccatgggcatcaagaacaaggatggagagaccccaggccagatcctgggctggggccccccctgggacagcgctgaggaggaggaggaggatgatgccagcaaggagcgggagtggaggcagaagctgcagggagatgccagccatgagacccaggagcctgagagcttcagcgcctggagcgaccggctggcccgggagcacgcccagaagtgccagcagcagcagcgggaggccgagggcagctgcaggcctcccagggctgagggcagcagccagagctggaggcagcaggaggaggagcagaggctcttccgggagcgggcccgggccaaggaggaggagctgcgggagagccgggcccggcgggcccaggaggccctgggggaccgggagcccaagcccacccgggccggcccccgggaggagcaccccaggggggccggccggggcagcctgtggaggtttggagatgtgccctggccctgccctgggggcggggaccctgaggccatggccgccgccctggtggcccggggcccccccctggaggagcagggcgccctgcggcgctacctgcgggtgcagcaggtgcgctggcacccagaccgcttcctgcagcgcttccgcagccagatcgagacctgggagctgggccgggtgatgggcgctgtgacagccctgagccaggccctgaacagacatgctgaggccctgaagtag

SEQ ID NO: 162216 - DNA, 1077 bp, synthetic construct
  misc_feature 1..1077: note = Description of Artificial Sequence: Synthetic coding sequence
  source 1..1077: mol_type = other DNA
atggccagcaccagccggcggcagaggcgggagcggcgcttccgccgctacctgtctgctggccgcctggtgcgggcccaggccctgctgcagaggcaccctggcctggatgtggatgctggccagcccccacccctgcaccgggcctgtgcccggcatgatgccccagccctgtgcctgctgctgcggctgggcgctgaccctgcccaccaggacagacatggagacacagccctgcatgctgctgcccggcagggcccagatgcctacacagacttcttcctgcccctgctgagccgctgccccagcgccatgggcatcaagaacaaggatggagagaccccaggccagatcctgggctggggccccccctgggacagcgctgaggaggaggaggaggatgatgccagcaaggagcgggagtggaggcagaagctgcagggcgagctggaggatgagtggcaggaggtgatgggccgctttgaaggagatgccagccatgagacccaggagcctgagagcttcagcgcctggagcgaccggctggcccgggagcacgcccagaagtgccagcagcagcagcgggaggccgagggcagctgcaggcctcccagggctgagggcagcagccagagctggaggcagcaggaggaggagcagaggctcttccgggagcgggcccgggccaaggaggaggagctgcgggagagccgggcccggcgggcccaggaggccctgggggaccgggagcccaagcccacccgggccggcccccgggaggagcaccccaggggggccggccggggcagcctgtggaggtttggagatgtgccctggccctgccctgggggcggggaccctgaggccatggccgccgccctggtggcccggggcccccccctggaggagcagggcgccctgcggcgctacctgcgggtgcagcaggtgcgctggcacccagaccgcttcctgcagcgcttccgcagccagatcgagacctgggagctgggccgggtgatgggcgctgtgacagccctgagccaggccctgaacagacatgctgaggccctgaagtag

SEQ ID NO: 162217 - DNA, 1146 bp, synthetic construct
  misc_feature 1..1146: note = Description of Artificial Sequence: Synthetic coding sequence
  source 1..1146: mol_type = other DNA
atgagcaaccccagcccccaggtgcctgaggaggaggccagcacctctgtgtgccggcccaagagctccatggccagcaccagccggcggcagaggcgggagcggcgcttccgccgctacctgtctgctggccgcctggtgcgggcccaggccctgctgcagaggcaccctggcctggatgtggatgctggccagcccccacccctgcaccgggcctgtgcccggcatgatgccccagccctgtgcctgctgctgcggctgggcgctgaccctgcccaccaggacagacatggagacacagccctgcacgccgccgcccggcagggcccagatgcctacacagacttcttcctgcccctgctgagccgctgccccagcgccatgggcatcaagaacaaggatggagagaccccaggccagatcctgggctggggccccccctgggacagcgctgaggaggaggaggaggatgatgccagcaaggagcgggagtggaggcagaagctgcagggcgagctggaggatgagtggcaggaggtgatgggccgctttgaaggagatgccagccatgagacccaggagcctgagagcttcagcgcctggagcgaccggctggcccgggagcacgcccagaagtgccagcagcagcagcgggaggccgagggcagctgccggccccccagggctgagggcagcagccagagctggaggcagcaggaggaggagcagaggctcttccgggagcgggcccgggccaaggaggaggagctgcgggagagccgggcccggcgggcccaggaggccctgggggaccgggagcccaagcccaccagggctggcccccgggaggagcaccccagaggagctggccggggcagcctgtggaggtttggagatgtgccctggccctgccctgggggcggggaccctgaggccatggctgctgccctggtggcccggggcccccccctggaggagcagggcgccctgcggcgctacctgcgggtgcagcaggtgcgctggcacccagaccgcttcctgcagcgcttccgcagccagatcgagacctgggagctgggccgggtgatgggcgctgtgacagccctgagccaggccctgaacagacatgctgaggccctgaagtag

SEQ ID NO: 162218 - DNA, 1101 bp, synthetic construct; identical to SEQ ID NO: 162215
  misc_feature 1..1101: note = Description of Artificial Sequence: Synthetic coding sequence
  source 1..1101: mol_type = other DNA

SEQ ID NO: 162219 - DNA, 1146 bp, synthetic construct; identical to SEQ ID NO: 162217
  misc_feature 1..1146: note = Description of Artificial Sequence: Synthetic coding sequence
  source 1..1146: mol_type = other DNA

SEQ ID NO: 162220 - DNA, 1101 bp, synthetic construct; identical to SEQ ID NO: 162215
  misc_feature 1..1101: note = Description of Artificial Sequence: Synthetic coding sequence
  source 1..1101: mol_type = other DNA

SEQ ID NO: 162221 - DNA, 1101 bp, synthetic construct; identical to SEQ ID NO: 162215
  misc_feature 1..1101: note = Description of Artificial Sequence: Synthetic coding sequence
  source 1..1101: mol_type = other DNA

SEQ ID NO: 162222 - DNA, 1146 bp, synthetic construct; identical to SEQ ID NO: 162217
  misc_feature 1..1146: note = Description of Artificial Sequence: Synthetic coding sequence
  source 1..1146: mol_type = other DNA

SEQ ID NO: 162223 - DNA, 1077 bp, synthetic construct; identical to SEQ ID NO: 162216
  misc_feature 1..1077: note = Description of Artificial Sequence: Synthetic coding sequence
  source 1..1077: mol_type = other DNA

SEQ ID NO: 162224 - DNA, 1101 bp, synthetic construct; identical to SEQ ID NO: 162215
  misc_feature 1..1101: note = Description of Artificial Sequence: Synthetic coding sequence
  source 1..1101: mol_type = other DNA

SEQ ID NO: 162225 - DNA, 1077 bp, synthetic construct; identical to SEQ ID NO: 162216
  misc_feature 1..1077: note = Description of Artificial Sequence: Synthetic coding sequence
  source 1..1077: mol_type = other DNA

SEQ ID NO: 162226 - DNA, 1146 bp, synthetic construct; identical to SEQ ID NO: 162217
  misc_feature 1..1146: note = Description of Artificial Sequence: Synthetic coding sequence
  source 1..1146: mol_type = other DNA

SEQ ID NO: 162227 - DNA, 1077 bp, synthetic construct; identical to SEQ ID NO: 162216
  misc_feature 1..1077: note = Description of Artificial Sequence: Synthetic coding sequence
  source 1..1077: mol_type = other DNA

SEQ ID NO: 162228 - DNA, 1146 bp, synthetic construct; identical to SEQ ID NO: 162217
  misc_feature 1..1146: note = Description of Artificial Sequence: Synthetic coding sequence
  source 1..1146: mol_type = other DNA

SEQ ID NO: 162229 - DNA, 1101 bp, synthetic construct; identical to SEQ ID NO: 162215
  misc_feature 1..1101: note = Description of Artificial Sequence: Synthetic coding sequence
  source 1..1101: mol_type = other DNA

SEQ ID NO: 162230 - DNA, 1077 bp, synthetic construct; identical to SEQ ID NO: 162216
  misc_feature 1..1077: note = Description of Artificial Sequence: Synthetic coding sequence
  source 1..1077: mol_type = other DNA

SEQ ID NO: 162231 - DNA, 1146 bp, synthetic construct; identical to SEQ ID NO: 162217
  misc_feature 1..1146: note = Description of Artificial Sequence: Synthetic coding sequence
  source 1..1146: mol_type = other DNA

SEQ ID NO: 162232 - DNA, 1077 bp, synthetic construct; identical to SEQ ID NO: 162216
  misc_feature 1..1077: note = Description of Artificial Sequence: Synthetic coding sequence
  source 1..1077: mol_type = other DNA

SEQ ID NO: 162233 - DNA, 699 bp, synthetic construct
  misc_feature 1..699: note = Description of Artificial Sequence: Synthetic coding sequence
  source 1..699: mol_type = other DNA
atggccagcaccagccggcggcagaggcgggagcggcgcttccgccgctacctgtctgctggccgcctggtgcgggcccaggccctgctgcagaggcaccctggcctggatgtggatgctggccagcccccacccctgcaccgggcctgtgcccggcatgatgccccagccctgtgcctgctgctgcggctgggcgctgaccctgcccaccaggacagacatggagacacagccctgcatgctgctgcccggcagggcccagatgcctacacagacttcttcctgcccctgctgagccgctgccccagcgccatgggcatcaagaacaaggatggagagaccccaggccagatcctgggctggggccccccctgggacagcgctgaggaggaggaggaggatgatgccagcaaggagcgggagtggaggcagaagctgcagggcgagctggaggatgagtggcaggaggtgatgggccgctttgaaggagatgccagccatgagacccaggagcctgagagcttcagcgcctggagcgaccggctggcccgggagcacgcccagaagtgccagcagcagcagcgggaggccgagggcagcagaagaccacccagggctgagggcagcagccagagctggaggcagcaggaggaggagcagaggctcttccgggagcgggcccgggccaaggaggagtag

SEQ ID NO: 162234 - DNA, 699 bp, synthetic construct
  misc_feature 1..699: note = Description of Artificial Sequence: Synthetic coding sequence
  source 1..699: mol_type = other DNA
atggccagcaccagccggcggcagaggcgggagcggcgcttccgccgctacctgtctgctggccgcctggtgcgggcccaggccctgctgcagaggcaccctggcctggatgtggatgctggccagcccccacccctgcaccgggcctgtgcccggcatgatgccccagccctgtgcctgctgctgcggctgggcgctgaccctgcccaccaggacagacatggagacacagccctgcatgctgctgcccggcagggcccagatgcctacacagacttcttcctgcccctgctgagccgctgccccagcgccatgggcatcaagaacaaggatggagagaccccaggccagatcctgggctggggccccccctgggacagcgctgaggaggaggaggaggatgatgccagcaaggagcgggagtggaggcagaagctgcagggcgagctggaggatgagtggcaggaggtgatgggccgctttgaaggagatgccagccatgagacccaggagcctgagagcttcagcgcctggagcgaccggctggcccgggagcacgcccagaagtgccagcagcagcagcgggaggccgagggcagctgcaggcctcccagggctgagggcagcagccagagctggaggcagcaggaggaggagcagaggctcttccgggagcgggcccgggccaaggaggagtag

SEQ ID NO: 162235 - DNA, 699 bp, synthetic construct; identical to SEQ ID NO: 162234
  misc_feature 1..699: note = Description of Artificial Sequence: Synthetic coding sequence
  source 1..699: mol_type = other DNA

SEQ ID NO: 162236 - DNA, 699 bp, synthetic construct; identical to SEQ ID NO: 162234
  misc_feature 1..699: note = Description of Artificial Sequence: Synthetic coding sequence
  source 1..699: mol_type = other DNA

SEQ ID NO: 162237 - DNA, 699 bp, synthetic construct; identical to SEQ ID NO: 162234
  misc_feature 1..699: note = Description of Artificial Sequence: Synthetic coding sequence
  source 1..699: mol_type = other DNA

SEQ ID NO: 162238 - DNA, 699 bp, synthetic construct; identical to SEQ ID NO: 162234
  misc_feature 1..699: note = Description of Artificial Sequence: Synthetic coding sequence
  source 1..699: mol_type = other DNA

SEQ ID NO: 162239 - DNA, 699 bp, synthetic construct; identical to SEQ ID NO: 162234
  misc_feature 1..699: note = Description of Artificial Sequence: Synthetic coding sequence
  source 1..699: mol_type = other DNA

SEQ ID NO: 162240 - DNA, 3900 bp, synthetic construct
  misc_feature 1..3900: note = Description of Artificial Sequence: Synthetic coding sequence
  source 1..3900: mol_type = other DNA
atggacagcctggaccacatgctgacagaccccctggagctgggcccctgtggagatggccacggcacccgcatcatggaggactgcctgctgggcggcaccagggtgtccctgcctgaggacctgctggaggaccctgagatcttctttgatgtggtgtccctgagcacctggcaggaggtgctgagtgacagccagcgggagcacctgcagcagttcctgccccagttcccagaagattctgctgagcagcagaatgagctgatcctggccctcttcagcggggagaacttccgcttcggcaaccccctgcacatcgcccagaagctgttcagagatggccacttcaaccctgaggtggtgaagtaccggcagctgtgcttcaagagccagtacaagcgctacctgaacagccagcagcagtacttccaccggctgctgaagcagatcctggccagcagaagtgacctgctggagatggcccggcgcagcggccctgccctgcccttccggcagaagaggcccagccccagcaggaccccagaggagcgggagtggaggacccagcagcgctacctgaaggtgctgcgggaggtgaaggaggagtgtggggacacagccctgagcagtgatgaggaggacctgagctcctggctgcccagcagccctgcccggagccccagccctgctgtgcccctgcgggtggtgcccaccctgagcaccacagacatgaagacagctgacaaggtggagctgggggacagcgacctgaagatcatgctgaagaagcaccacgagaagaggaagcaccagcctgaccacccagacctgctgactggagacctgaccctgaatgacatcatgaccagggtgaatgccggcaggaagggcagcctggccgccctgtatgacctggccgtgctgaagaagaaggtgaaggagaaggaggagaagaagaagaagaagatcaagaccatcaagtctgaggccgaggacctggccgagcccctgagcagcacagagggcgtggcccccctgagccaggcccccagccccctggccatcccagccatcaaggaggagcccctggaggacctgaagccctgcctgggcatcaatgagatcagcagcagcttcttcagcctgctgctggagatcctgctgctggagagccaggccagcctgcccatgctggaggagcgggtgctggactggcagagcagccctgccagcagcctgaacagctggttctctgctgcccccaactgggccgagctggtgctgcctgccctgcagtacctggccggggagagcagagctgtgcccagcagcttcagcccctttgtggagttcaaggagaagacccagcagtggaagctgctgggccagagccaggacaatgagaaggagctggccgccctcttccagctgtggctggagaccaaggaccaggccttctgcaagcaggagaatgaagacagcagtgatgccaccacccctgtgccccgggtgaggacagattatgtggtgcggcccagcactggagaggagaagagggtcttccaggagcaggagcgctaccgctacagccagccccacaaggccttcaccttcaggatgcacggctttgaatctgtggtgggccctgtgaagggcgtgtttgacaaggagaccagcctgaacaaggcccgggagcacagcctgctgcggagtgacaggcctgcctacgtgaccatcctgagcctggtgagagatgctgctgcccggctgcccaacggggagggcaccagggctgagatctgtgagctgctgaaggacagccagttcctggccccagatgtgaccagcacccaggtgaacacagtggtgtctggggccctggaccggctgcactatgagaaggacccctgtgtgaagtatgacatcggcaggaagctgtggatctacctgcaccgggacagaagtgaggaggagtttgagcgcatccaccaggcccaggccgctgctgccaaggccaggaaggccctgcagcagaagcccaagccacccagcaaggtgaagagcagcagcaaggagagcagcatcaaggtgctgagcagcggccccagcgagcagagccagatgagcctgagtgacagctccatgccacccacccctgtgacccctgtgacccccaccaccccagccctgcctgccatccccatcagccccccacctgtgtctgctgtgaacaagagcggccccagcacagtgtctgagcccgccaagagcagcagtggagtgctgctggtgagcagccccaccatgccccacctgggcaccatgctgagccctgccagcagccagacagcccccagcagccaggccgccgcccgggtggtgagccacagcggcagcgctggcctgagccaggtgcgggtggtggcccagcccagcctgcctgctgtgccccagcagagcggcggccctgcccagaccctgccccagatgcctgctggcccccagatccgggtgcctgccacagccacccagaccaaggtggtgccccagacagtgatggccaccgtgcctgtgaaggcccagaccacagctgccaccgtgcagaggcctggccctggccagacaggcctgactgtgaccagcctgcctgccacagccagccctgtgtccaagccagccaccagcagccctggcaccagcgcccccagcgccagcacagctgctgtgatccagaatgtgacaggccagaacatcatcaagcaggtggccatcaccggccagctgggcgtgaagccccagacaggcaacagcatccccctgacagccaccaacttccgcatccagggcaaggatgtgctgcggctgccccccagcagcatcaccacagatgccaagggccagacagtgctgcgcatcaccccagacatgatggccaccctggccaagagccaggtgaccaccgtgaagctgacccaggacctgtttggaactggaggcaacaccaccgggaagggcatcagcgccaccctgcacgtgaccagcaaccctgtgcatgctgctgacagccctgccaaggccagcagcgccagcgcccccagcagcacccccaccggcaccaccgtggtgaaggtgaccccagacctgaagcccacagaggccagcagcagcgccttccggctgatgcctgccctgggcgtgtctgtggccgaccagaagggcaagagcacagtggccagcagcgaggccaagccagctgccaccatccgcatcgtgcagggcctgggcgtgatgccacccaaggccggccagaccatcaccgtggccacccacgccaagcagggcgcctctgtggccagcggcagcggcaccgtgcacaccagcgctgtgtccctgcccagcatgaatgctgctgtgtccaagacagtggccgtggccagcggggccgccagcacccccatcagcatcagcactggagcccccaccgtgcggcaggtgcctgtgtccaccaccgtggtgtccaccagccaggccggcaagctgcccacccgcatcaccgtgcccctgagcgtcatcagccagcccatgaagggcaagtctgtggtgacagcccccatcatcaagggcaacctgggcgccaacctgagcggcctgggcaggaacatcatcctgaccaccatgcctgctggcaccaagctgattgctggcaacaagcctgtgtccttcctgacagcccagcagctgcagcagctgcagcagcagggccaggccacccaggtgcgcatccagacagtgcctgccagccacctgcagcagggcacagccagcggcagcagcaaggctgtgtccacagtggtggtgaccacagcccccagccccaagcaggcccctgagcagcagtag

SEQ ID NO: 162241 - DNA, 3900 bp, synthetic construct; identical to SEQ ID NO: 162240
  misc_feature 1..3900: note = Description of Artificial Sequence: Synthetic coding sequence
  source 1..3900: mol_type = other DNA

SEQ ID NO: 162242 - DNA, 3900 bp, synthetic construct; identical to SEQ ID NO: 162240
  misc_feature 1..3900: note = Description of Artificial Sequence: Synthetic coding sequence
  source 1..3900: mol_type = other DNA

SEQ ID NO: 162243 - DNA, 3975 bp, synthetic construct
  misc_feature 1..3975: note = Description of Artificial Sequence: Synthetic coding sequence
  source 1..3975: mol_type = other DNA
atgcacgtgtttgtgcagagcacctgtggggaggagaccatggacagcctggaccacatgctgacagaccccctggagctgggcccctgtggagatggccacggcacccgcatcatggaggactgcctgctgggcggcaccagggtgtccctgcctgaggacctgctggaggaccctgagatcttctttgatgtggtgtccctgagcacctggcaggaggtgctgagtgacagccagcgggagcacctgcagcagttcctgccccagtttcctgaggacagcgctgagcagcagaatgaactcatcctggccctcttctctggagagaacttccgctttggaaaccccctgcacatcgcccagaagctgttcagagatggccacttcaaccctgaggtggtgaagtaccggcagctgtgcttcaagagccagtacaagcgctacctgaacagccagcagcagtacttccaccggctgctgaagcagatcctggccagcagaagtgacctgctggagatggccaggagaagtggccctgccctgcccttccggcagaagaggcccagccccagcaggaccccagaggagcgggagtggaggacccagcagcgctacctgaaggtgctgcgggaggtgaaggaggagtgtggggacacagccctgagcagtgatgaggaggccaccctggacctgcaggagcagttctcctttgaggacctgagctcctggctgcccagcagccctgcccggagccccagccctgctgtgcccctgcgggtggtgcccaccctgagcaccacagacatgaagacagctgacaaggtggagctgggggacagcgacctgaagatcatgctgaagaagcaccacgagaagaggaagcaccagcctgaccacccagacctgctgaccggggacctgaccctgaatgacatcatgaccagggtgaatgccggcaggaagggcagcctggccgccctgtatgacctggccgtgctgaagaagaaggtgaaggagaaggaggagaagaagaagaagaagatcaagaccatcaagtctgaggccgaggacctggccgagcccctgagcagcacagaaggagtggcccccctgagccaggcccccagccccctggccatcccagccatcaaggaggagcccctggaggacctgaagccctgcctgggcatcaatgagatcagcagcagcttcttcagcctgctgctggagatcctgctgctggagagccaggccagcctgcccatgctggaggagcgggtgctggactggcagagcagccctgccagcagcctgaacagctggttctctgctgcccccaactgggccgagctggtgctgcctgccctgcagtacctggccggggagagcagagctgtgcccagcagcttcagcccctttgtggagttcaaggagaagacccagcagtggaagctgctgggccagagccaggacaatgagaaggagctggccgccctcttccagctgtggctggagaccaaggaccaggccttctgcaagcaggagaatgaagacagcagtgatgccaccacccctgtgccccgggtgaggacagattatgtggtgcggcccagcactggagaggagaagagggtcttccaggagcaggagcgctaccgctacagccagccccacaaggccttcaccttcaggatgcacggctttgagagcgtggtgggccctgtgaagggcgtgtttgacaaggagaccagcctgaacaaggcccgggagcacagcctgctgcggagtgacaggcctgcctacgtgaccatcctgagcctggtgagagatgctgctgcccggctgcccaatggagagggcaccagggctgagatctgtgagctgctgaaggacagccagttcctggccccagatgtgaccagcacccaggtgaacacagtggtgtctggggccctggaccggctgcactatgagaaggacccctgtgtgaagtatgacattggaaggaagctgtggatctacctgcaccgggacagaagtgaggaggagtttgagcgcatccaccaggcccaggccgccgccgccaaggccaggaaggccctgcagcagaagcccaagccacccagcaaggtgaagagcagcagcaaggagagcagcatcaaggtgctgagcagcggccccagcgagcagagccagatgagcctgagtgacagctccatgccacccacccctgtgacccctgtgacccccaccaccccagccctgcctgccatccccatcagccccccacctgtgtctgctgtgaacaagagcggccccagcacagtgtctgagcccgccaagagcagcagcggcgtgctgctggtgagcagccccaccatgccccacctgggcaccatgctgagccctgccagcagccagacagcccccagcagccaggccgccgcccgggtggtgagccacagcggcagcgctggcctgagccaggtgcgggtggtggcccagcccagcctgcctgctgtgccccagcagagcggcggccctgcccagaccctgccccagatgcctgctggcccccagatccgggtgcctgccacagccacccagaccaaggtggtgccccagacagtgatggccaccgtgcctgtgaaggcccagaccacagctgccaccgtgcagaggcctggccctggccagacaggcctgactgtgaccagcctgcctgccacagccagccctgtgtccaagccagccaccagcagccctggcaccagcgcccccagcgccagcacagctgctgtgatccagaatgtgacaggccagaacatcatcaagcaggtggccatcaccggccagctgggcgtgaagccccagacaggcaacagcatccccctgacagccaccaacttccgcatccagggcaaggatgtgctgcggctgccccccagcagcatcaccacagatgccaagggccagacagtgctgcgcatcaccccagacatgatggccaccctggccaagagccaggtgaccaccgtgaagctgacccaggacctgtttggcaccggcggcaacaccaccgggaagggcatcagcgccaccctgcacgtgaccagcaaccctgtgcacgccgctgacagccctgccaaggccagcagcgccagcgcccccagcagcacccccaccggcaccaccgtggtgaaggtgaccccagacctgaagcccacagaggccagcagcagcgccttccggctgatgcctgccctgggcgtgtctgtggccgaccagaagggcaagagcacagtggccagcagcgaggccaagccagctgccaccatcagaattgtgcagggcctgggcgtgatgccacccaaggccggccagaccatcaccgtggccacccacgccaagcagggcgcctctgtggccagcggcagcggcaccgtgcacaccagcgctgtgtccctgcccagcatgaatgctgctgtgtccaagacagtggccgtggccagcggggccgccagcacccccatcagcatcagcactggagcccccaccgtgcggcaggtgcctgtgtccaccaccgtggtgtccaccagccaggccggcaagctgcccacccgcatcaccgtgcccctgagcgtcatcagccagcccatgaagggcaagtctgtggtgacagcccccatcatcaagggcaacctgggcgccaacctgagcggcctgggcaggaacatcatcctgaccaccatgcctgctggcaccaagctgattgctggcaacaagcctgtgtccttcctgacagcccagcagctgcagcagctgcagcagcagggccaggccacccaggtgcgcatccagacagtgcctgccagccacctgcagcagggcacagccagcggcagcagcaaggctgtgtccacagtggtggtgaccacagcccccagccccaagcaggcccctgagcagcagtag

SEQ ID NO: 162244 - DNA, 1389 bp, synthetic construct
  misc_feature 1..1389: note = Description of Artificial Sequence: Synthetic coding sequence
  source 1..1389: mol_type = other DNA
atgcagctgaggaagatgcagacagtgaagaaggagcaggccagcctggatgccagcagcaatgtggacaagatgatggtgctgaacagcgccctgacagaggtgtctgaggacagcaccactggagaggagctgctgctgtctgagggctctgtgggcaagaacaagagcagcgcctgcaggaggaagcgggagttcatcccagatgagaagaaggatgccatgtactgggagaagaggaggaagaacaatgaggccgccaagaggagccgggagaagaggcggctgaatgacctggtgctggagaacaagctgattgccctgggggaggagaatgccaccctgaaggccgagctgctgagcctgaagctgaagtttggcctcatcagcagcacagcctatgcccaggagatccagaagctgagcaacagcacagctgtgtacttccaggactaccagaccagcaagagcaatgtgtcctcctttgtggatgagcacgagcccagcatggtgagcagcagctgcatcagcgtcatcaagcacagcccccagagcagcctgagtgatgtgtctgaggtgtcctctgtggagcacacccaggagagctctgtgcagggcagctgccgcagccctgagaacaagttccagatcatcaagcaggagcccatggagctggagagctacacccgggagcccagagatgaccggggcagctacacagccagcatctaccagaactacatgggcaacagcttcagcggctacagccacagcccccccctgctgcaggtgaacagaagcagcagcaacagccccaggaccagcgagacagatgatggagtggtgggcaagagcagtgatggagaagatgagcagcaggtgcccaagggccccatccacagccctgtggagctgaagcacgtgcacgccaccgtggtgaaggtgcctgaggtgaacagcagcgccctgccccacaagctgcgcatcaaggccaaggccatgcagatcaaggtggaggcctttgacaatgaatttgaggccacccagaagctgagcagccccatcgacatgaccagcaagaggcactttgagctggagaagcacagcgcccccagcatggtgcacagcagcctgacccccttctctgtgcaggtgaccaacatccaggactggagcctgaagtctgagcactggcaccagaaggagctgagcggcaagacccagaacagcttcaagacaggagtggtggagatgaaggacagcggctacaaggtgtctgaccctgaaaatctctacctgaagcagggcatcgccaacctgtctgctgaggtggtgtccctgaagaggctgattgccacccagcccatcagcgccagtgacagcggctag

SEQ ID NO: 162245 - DNA, 1389 bp, synthetic construct; identical to SEQ ID NO: 162244
  misc_feature 1..1389: note = Description of Artificial Sequence: Synthetic coding sequence
  source 1..1389: mol_type = other DNA

SEQ ID NO: 162246 - DNA, 1488 bp, synthetic construct
  misc_feature 1..1488: note = Description of Artificial Sequence: Synthetic coding sequence
  source 1..1488: mol_type = other DNA
atggccgagcccaccagtgactttgagacccccatcggctggcacgccagccctgagctgacccccaccctgggccccctgagtgacacagccccaccccgggacagctggatgttctgggccatgctgcccccacctcctccacccctgaccagcagcctgcctgctgctggcagcaagcccagcagcgagagccagccccccatggaggcccagagcctgcccggggcccctcctccatttgatgcccagatcctgcccggggcccagcccccatttgatgcccagagccccctggacagccagccccagcccagcggccagccctggaacttccacgccagcacctcctggtactggaggcagagcagtgaccgcttccccaggcaccagaagagcttcaacccagctgtgaagaacagctactaccccaggaaatatgatgccaagttcacagacttcagcctgccccccagcaggaagcagaagaagaagaagaggaaggagcccgtcttccacttcttctgtgacacctgtgaccggggcttcaagaaccaggagaagtatgacaagcacatgtctgagcacaccaagtgcccagagctggactgcagcttcaccgcccacgagaagatcgtgcagttccactggaggaacatgcacgcccctggcatgaagaagatcaagctggacaccccagaggagatcgcccgctggagggaggagaggaggaagaactaccccaccctggccaacattgaaaggaagaagaagctgaagctggagaaggagaagagaggagctgtgctgaccaccacccagtatggcaagatgaagggcatgagccgccacagccagatggccaagatccgcagccctgggaagaaccacaagtggaagaatgacaacagccggcagagagctgtgacaggcagcggcagccacctgtgtgacctgaagctggagggccccccagaggccaatgctgaccccctgggcgtgctgatcaacagcgacagcgagagtgacaaggaggagaagccccagcacagcgtcatccccaaggaggtgaccccagccctgtgcagcctgatgagcagctatggcagcctgagcggcagcgagagcgagcctgaggagacccccatcaagacagaagcagatgtgctggccgagaaccaggtgctggacagcagcgcccccaagagccccagccaggatgtgaaggccaccgtgaggaacttcagcgaggccaagtcagaaaataggaagaagagctttgagaagaccaaccccaagaggaagaaggactaccacaactaccagaccctgtttgagcccaggacccaccacccctacctgctggagatgctgctggccccagacatcagacatgaaagaaatgtcatcctgcagtgtgtgcgctacatcatcaagaaggacttcttcggcctggacaccaacagcgccaagagcaaggatgtgtag

SEQ ID NO: 162247 - DNA, 648 bp, synthetic construct
  misc_feature 1..648: note = Description of Artificial Sequence: Synthetic coding sequence
  source 1..648: mol_type = other DNA
atggagacccaggccgagcagcaggagctggagaccctgcccaccaccaagatggcccagaccaaccccaccccaggcagcctgggcccctggaagatcaccatctatgaccaggagaacttccagggcaagaggatggagttcaccagcagctgccccaacgtgtctgagaggagctttgacaacgtgcgcagcctgaaggtggagagcggggcctggattggctatgagcacaccagcttctgtggccagcagttcatcctggagcggggggagtacccccgctgggatgcctggagcggcagcaatgcctaccacatcgagcggctgatgtccttccggcccatctgcagcgccaaccacaaggagagcaagatgaccatctttgagaaggagaacttcatcggccggcagtgggagatcagtgatgactaccccagcctgcaggccatgggctggttcaacaatgaggtgggctccatgaagatccagagcggggcctgggtgtgctaccagtacccaggctaccggggctaccagtacatcctggagtgtgaccaccacggcggggactacaagcactggagggagtggggcagccacgcccagaccagccagatccagagcatccgccgcatccagcagtag

SEQ ID NO: 162248 - DNA, 2940 bp, synthetic construct
  misc_feature 1..2940: note = Description of Artificial Sequence: Synthetic coding sequence
  source 1..2940: mol_type = other DNA
atgaccctgcacgccaccagaggagctgccctgctgtcctgggtgaacagcctgcacgtggccgaccctgtggaggccgtgctgcagctgcaggactgcagcatcttcatcaagatcatcgaccgcatccacggcacagaggagggccagcagatcctgaagcagcctgtgtctgagcggctggactttgtgtgcagcttcctgcagaagaacaggaagcaccccagcagcccagaatgtctggtgtctgcccagaaggtgctggagggcagcgagctggagctggccaagatgaccatgctgctgctgtaccacagcaccatgagcagcaagagcccccgggactgggagcagtttgagtacaagatccaggccgagctggccgtcatcctgaagtttgtgctggaccatgaagatggcctgaacctgaatgaagacctggagaacttcctgcagaaggcccctgtgcccagcacctgcagcagcaccttccctgaggagctgagcccccccagccaccaggccaagcgggagatccgcttcctggagctgcagaaggtggccagcagcagcagcggcaacaacttcctgagcggcagccctgccagccccatgggagacatcctgcagaccccccagttccagatgaggcggctgaagaagcagctggctgatgagaggagcaacagagatgagctggagctggagctggctgaaaataggaagctgctgacagagaaggatgcccagatcgccatgatgcagcagagaattgaccggctggccctgctgaatgagaagcaggccgccagccccctggagcccaaggagctggaggagctgcgggacaagaatgaaagcctgaccatgaggctgcacgagaccctgaagcagtgccaggacctgaagacagagaagagccagatggacaggaagatcaaccagctgtctgaagaaaatggagacctgtccttcaagctgcgggagtttgccagccacctgcagcagctgcaggatgccctgaatgagctgacagaggagcacagcaaggccacccaggagtggctggagaagcaggcccagctggagaaggagctgtctgctgccctgcaggacaagaagtgcctggaggagaagaatgagatcctgcagggcaagctgagccagctggaggagcacctgagccagctgcaggacaaccccccccaggagaagggggaggtgctgggagatgtgctgcaggtggaggagctgagcaagaagctggccgacagcgaccaggccagcaaggtgcagcagcagaagctgaaggctgtgcaggcccagggcggggagagccagcaggaggcccagaggctgcaggcccagctgaatgagctgcaggcccagctgagccagaaggagcaggccgctgagcactacaagctgcagatggagaaggccaagacccactatgatgccaagaagcagcagaaccaggagctgcaggagcagctgcggagcctggagcagctgcagaaggagaacaaggagctgcgggcagaggccgagcggctgggccacgagctgcagcaggccggcctgaagaccaaggaggccgagcagacctgccgccacctgacagcccaggtgcgcagcctggaggcccaggtggcccacgccgaccagcagctgcgggacctgggcaagttccaggtggccacagatgccctgaagagccgggagccccaggccaagccccagctggacctgagcattgacagcctggacctgagctgtgaggagggcacccccctgagcatcaccagcaagctgcccaggacccagccagatggcacctctgtgcctggagagcccgccagccccatcagccagaggctgccccccaaggtggagagcctggagagcctgtacttcacccccatcccagcccggagccaggcccccctggagagcagcctggacagcctgggagatgtgttcctggacagcggcaggaagaccaggtctgcccggcggaggaccacccagatcatcaacatcaccatgaccaagaagctggatgtggaggagccagacagcgccaacagcagcttctacagcaccaggtctgccccagccagccaggccagcctgcgggccaccagcagcacccagagcctggcccggctgggcagcccagactatggcaacagcgccctgctgagcctgcccggctaccggcccaccaccaggagcagcgcccggcgcagccaggccggcgtgtcctctggggcccctcctggaagaaattccttctacatgggcacctgccaggatgagcctgagcagctggatgactggaacagaattgctgagctgcagcagaggaacagagtgtgccccccccacctgaagacctgctaccccctggagagccggcccagcctgagcctgggcaccatcacagatgaggagatgaagacaggagacccccaggagaccctgcggcgggcctccatgcagcccatccagattgctgagggcaccggcatcaccacccggcagcagaggaagagggtgtccctggagccccaccagggccctggcaccccagagagcaagaaggccaccagctgcttcccccggcccatgaccccccgggacagacatgagggcaggaagcagagcaccacagaggcccagaagaaggccgccccagccagcaccaagcaggccgaccggcggcagagcatggccttcagcatcctgaacacccccaagaagctgggcaacagcctgctgcggcggggggccagcaagaaggccctgagcaaggccagccccaacaccaggagcggcaccaggaggagcccccgcatcgccaccaccacagccagcgctgccacagctgctgccatcggggccaccccccgggccaagggcaaggccaagcactag

SEQ ID NO: 162249 - DNA, 6306 bp, synthetic construct
  misc_feature 1..6306: note = Description of Artificial Sequence: Synthetic coding sequence
  source 1..6306: mol_type = other DNA
atgaccctgcacgccaccagaggagctgccctgctgtcctgggtgaacagcctgcacgtggccgaccctgtggaggccgtgctgcagctgcaggactgcagcatcttcatcaagatcatcgaccgcatccacggcacagaggagggccagcagatcctgaagcagcctgtgtctgagcggctggactttgtgtgcagcttcctgcagaagaacaggaagcaccccagcagcccagaatgtctggtgtctgcccagaaggtgctggagggcagcgagctggagctggccaagatgaccatgctgctgctgtaccacagcaccatgagcagcaagagcccccgggactgggagcagtttgagtacaagatccaggccgagctggccgtcatcctgaagtttgtgctggaccatgaagatggcctgaacctgaatgaagacctggagaacttcctgcagaaggcccctgtgcccagcacctgcagcagcaccttccctgaggagctgagcccccccagccaccaggccaagcgggagatccgcttcctggagctgcagaaggtggccagcagcagcagcggcaacaacttcctgagcggcagccctgccagccccatgggagacatcctgcagaccccccagttccagatgaggcggctgaagaagcagctggctgatgagaggagcaacagagatgagctggagctggagctggctgaaaataggaagctgctgacagagaaggatgcccagatcgccatgatgcagcagagaattgaccggctggccctgctgaatgagaagcaggccgccagccccctggagcccaaggagctggaggagctgcgggacaagaatgaaagcctgaccatgaggctgcacgagaccctgaagcagtgccaggacctgaagacagagaagagccagatggacaggaagatcaaccagctgtctgaagaaaatggagacctgtccttcaagctgcgggagtttgccagccacctgcagcagctgcaggatgccctgaatgagctgacagaggagcacagcaaggccacccaggagtggctggagaagcaggcccagctggagaaggagctgtctgctgccctgcaggacaagaagtgcctggaggagaagaatgagatcctgcagggcaagctgagccagctggaggagcacctgagccagctgcaggacaaccccccccaggagaagggggaggtgctgggagatgtgctgcagctggagaccctgaagcaggaggccgccaccctggccgccaacaacacccagctgcaggcccgggtggagatgctggagacagagcggggccagcaggaggccaagctgctggccgagcggggccactttgaggaggagaagcagcagctgagcagcctcatcacagacctgcagagcagcatcagcaacctgagccaggccaaggaggagctggagcaggccagccaggcccacggggcccggctgacagcccaggtggccagcctgaccagcgagctgaccaccctgaatgccaccatccagcagcaggaccaggagctggccggcctgaagcagcaggccaaggagaagcaggcccagctggcccagaccctgcagcagcaggagcaggccagccagggcctgcggcaccaggtggagcagctgagcagcagcctgaagcagaaggagcagcagctgaaggaggtggccgagaagcaggaggccacccggcaggaccacgcccagcagctggccacagctgctgaggagcgggaggccagcctgcgggagagagatgctgccctgaagcagctggaggccctggagaaggagaaggccgccaagctggagatcctgcagcagcagctgcaggtggccaatgaggcccgggacagcgcccagacctctgtgacccaggcccagcgggagaaggccgagctgagcaggaaggtggaggagctgcaggcctgtgtggagacagcccggcaggagcagcacgaggcccaggcccaggtggccgagctggagctgcagctgcggtctgagcagcagaaggccacagagaaggagcgggtggcccaggagaaggaccagctgcaggagcagctgcaggccctgaaggagagcctgaaggtgaccaagggcagcctggaggaggagaagagaagagctgctgatgccctggaggagcagcagcgctgcatcagcgagctgaaggccgagaccaggagcctggtggagcagcacaagcgggagaggaaggagctggaggaggagcgggccggcaggaagggcctggaggcccggctgcagcagctgggggaggcccaccaggccgagacagaggtgctgcggcgggagctggccgaggccatggccgcccagcacacagctgagagtgaatgtgagcagctggtgaaggaggtggccgcctggagggagagatatgaggacagccagcaggaggaggcccagtatggagccatgttccaggagcagctgatgaccctgaaggaggagtgtgagaaggcccggcaggagctgcaggaggccaaggagaaggtggccggcatcgagagccacagcgagctgcagatcagccggcagcagaatgagctggccgagctgcacgccaacctggcccgggccctgcagcaggtgcaggagaaggaggtgcgggcccagaagctggctgatgacctgagcaccctgcaggagaagatggccgccaccagcaaggaggtggcccggctggagaccctggtgaggaaggccggggagcagcaggagacagccagccgggagctggtgaaggagcccgcccgggccggggaccggcagcctgagtggctggaggagcagcagggccggcagttctgcagcacccaggccgccctgcaggccatggagcgggaggccgagcagatgggaaatgagctggagcggctgcgggccgccctgatggagagccagggccagcagcaggaggagcggggccagcaggagcgggaggtggcccggctgacccaggagcggggccgggcccaggccgacctggccctggagaaggccgcccgggcagagctggagatgaggctgcagaatgccctgaatgagcagagggtggagtttgccaccctgcaggaggccctggcccacgccctgacagagaaggagggcaaggaccaggagctggccaagctgcggggcctggaggccgcccagatcaaggagctggaggagctgcggcagacagtgaagcagctgaaggagcagctggccaagaaggagaaggagcacgccagcggcagcggggcccagagcgaggccgccggccgcacagagcccaccggccccaagctggaggccctgcgggcagaggtgtccaagctggagcagcagtgccagaagcagcaggagcaggccgacagcctggagaggagcctggaggccgagcgggccagcagagctgagcgggacagcgccctggagaccctgcagggccagctggaggagaaggcccaggagctgggccacagccagagcgccctggccagcgcccagcgggagctggccgccttccgcaccaaggtgcaggaccacagcaaggccgaggatgagtggaaggcccaggtggcccggggccggcaggaggccgagaggaagaacagcctcatcagcagcctggaggaggaggtgtccatcctgaaccggcaggtgctggagaaggagggggagagcaaggagctgaagaggctggtgatggccgagagcgagaagagccagaagctggaggagcggctgcggctgctgcaggccgagacagccagcaacagcgcccgggctgctgagaggagcagcgccctgcgggaggaggtgcagagcctgcgggaggaggccgagaagcagagggtggccagcgagaacctgcggcaggagctgaccagccaggccgagcgggcagaggagctgggccaggagctgaaggcctggcaggagaagttcttccagaaggagcaggccctgagcaccctgcagctggagcacaccagcacccaggccctggtgtctgagctgctgcctgccaagcacctgtgccagcagctgcaggccgagcaggccgctgctgagaagaggcaccgggaggagctggagcagagcaagcaggccgccggcggcctgcgggcagagctgctgcgggcccagcgggagctgggggagctgatccccctgcggcagaaggtggccgagcaggagaggacagcccagcagctgcgggcagagaaggccagctatgcagagcagctgtccatgctgaagaaggcccacggcctgctggccgaggagaacagaggcctgggggagcgggccaacctgggccggcagttcctggaggtggagctggaccaggcccgggagaagtatgtgcaggagctggccgctgtgcgggcagatgctgagacccggctggccgaggtgcagcgggaggcccagagcacagcccgggagctggaggtgatgacagccaagtatgagggcgccaaggtgaaggtgctggaggagcggcagcgcttccaggaggagcggcagaagctgacagcccaggtggaggagctgagcaagaagctggccgacagcgaccaggccagcaaggtgcagcagcagaagctgaaggctgtgcaggcccagggcggggagagccagcaggaggcccagaggctgcaggcccagctgaatgagctgcaggcccagctgagccagaaggagcaggccgctgagcactacaagctgcagatggagaaggccaagacccactatgatgccaagaagcagcagaaccaggagctgcaggagcagctgcggagcctggagcagctgcagaaggagaacaaggagctgcgggcagaggccgagcggctgggccacgagctgcagcaggccggcctgaagaccaaggaggccgagcagacctgccgccacctgacagcccaggtgcgcagcctggaggcccaggtggcccacgccgaccagcagctgcgggacctgggcaagttccaggtggccacagatgccctgaagagccgggagccccaggccaagccccagctggacctgagcattgacagcctggacctgagctgtgaggagggcacccccctgagcatcaccagcaagctgcccaggacccagccagatggcacctctgtgcctggagagcccgccagccccatcagccagaggctgccccccaaggtggagagcctggagagcctgtacttcacccccatcccagcccggagccaggcccccctggagagcagcctggacagcctgggagatgtgttcctggacagcggcaggaagaccaggtctgcccggcggaggaccacccagatcatcaacatcaccatgaccaagaagctggatgtggaggagccagacagcgccaacagcagcttctacagcaccaggtctgccccagccagccaggccagcctgcgggccaccagcagcacccagagcctggcccggctgggcagcccagactatggcaacagcgccctgctgagcctgcccggctaccggcccaccaccaggagcagcgcccggcgcagccaggccggcgtgtcctctggggcccctcctggaagaaattccttctacatgggcacctgccaggatgagcctgagcagctggatgactggaacagaattgctgagctgcagcagaggaacagagtgtgccccccccacctgaagacctgctaccccctggagagccggcccagcctgagcctgggcaccatcacagatgaggagatgaagacaggagacccccaggagaccctgcggcgggcctccatgcagcccatccagattgctgagggcaccggcatcaccacccggcagcagaggaagagggtgtccctggagccccaccagggccctggcaccccagagagcaagaaggccaccagctgcttcccccggcccatgaccccccgggacagacatgagggcaggaagcagagcaccacagaggcccagaagaaggccgccccagccagcaccaagcaggccgaccggcggcagagcatggccttcagcatcctgaacacccccaagaagctgggcaacagcctgctgcggcggggggccagcaagaaggccctgagcaaggccagccccaacaccaggagcggcaccaggaggagcccccgcatcgccaccaccacagccagcgctgccacagctgctgccatcggggccaccccccgggccaagggcaaggccaagcactag

SEQ ID NO: 162250 - DNA, 4995 bp, synthetic construct
  misc_feature 1..4995: note = Description of Artificial Sequence: Synthetic coding sequence
  source 1..4995: mol_type = other DNA
atgctggagacagagcggggccagcaggaggccaagctgctggccgagcggggccactttgaggaggagaagcagcagctgagcagcctcatcacagacctgcagagcagcatcagcaacctgagccaggccaaggaggagctggagcaggccagccaggcccatggagcccggctgacagcccaggtggccagcctgaccagcgagctgaccaccctgaatgccaccatccagcagcaggaccaggagctggccggcctgaagcagcaggccaaggagaagcaggcccagctggcccagaccctgcagcagcaggagcaggccagccagggcctgcggcaccaggtggagcagctgagcagcagcctgaagcagaaggagcagcagctgaaggaggtggccgagaagcaggaggccacccggcaggaccacgcccagcagctggccacagctgctgaggagcgggaggccagcctgcgggagagagatgctgccctgaagcagctggaggccctggagaaggagaaggccgccaagctggagatcctgcagcagcagctgcaggtggccaatgaggcccgggacagcgcccagacctctgtgacccaggcccagcgggagaaggccgagctgagcaggaaggtggaggagctgcaggcctgtgtggagacagcccggcaggagcagcacgaggcccaggcccaggtggccgagctggagctgcagctgcggtctgagcagcagaaggccacagagaaggagcgggtggcccaggagaaggaccagctgcaggagcagctgcaggccctgaaggagagcctgaaggtgaccaagggcagcctggaggaggagaagagaagagctgctgatgccctggaggagcagcagcgctgcatcagcgagctgaaggccgagaccaggagcctggtggagcagcacaagcgggagaggaaggagctggaggaggagagagctggcaggaagggcctggaggcccggctgcagcagctgggggaggcccaccaggccgagacagaggtgctgcggcgggagctggccgaggccatggccgcccagcacacagctgagagtgaatgtgagcagctggtgaaggaggtggccgcctggagggagagatatgaggacagccagcaggaggaggcccagtacggggccatgttccaggagcagctgatgaccctgaaggaggagtgtgagaaggcccggcaggagctgcaggaggccaaggagaaggtggccggcatcgagagccacagcgagctgcagatcagccggcagcagaatgagctggccgagctgcacgccaacctggcccgggccctgcagcaggtgcaggagaaggaggtgcgggcccagaagctggctgatgacctgagcaccctgcaggagaagatggccgccaccagcaaggaggtggcccggctggagaccctggtgaggaaggccggggagcagcaggagacagccagccgggagctggtgaaggagcccgcccgggccggggaccggcagcctgagtggctggaggagcagcagggccggcagttctgcagcacccaggccgccctgcaggccatggagcgggaggccgagcagatgggaaatgagctggagcggctgcgggccgccctgatggagagccagggccagcagcaggaggagcggggccagcaggagcgggaggtggcccggctgacccaggagcggggccgggcccaggccgacctggccctggagaaggccgcccgggcagagctggagatgaggctgcagaatgccctgaatgagcagagggtggagtttgccaccctgcaggaggccctggcccacgccctgacagagaaggagggcaaggaccaggagctggccaagctgcggggcctggaggccgcccagatcaaggagctggaggagctgcggcagacagtgaagcagctgaaggagcagctggccaagaaggagaaggagcacgccagcggcagcggggcccagagcgaggccgccggccgcacagagcccaccggccccaagctggaggccctgcgggcagaggtgtccaagctggagcagcagtgccagaagcagcaggagcaggccgacagcctggagaggagcctggaggccgagcgggccagcagagctgagcgggacagcgccctggagaccctgcagggccagctggaggagaaggcccaggagctgggccacagccagagcgccctggccagcgcccagcgggagctggccgccttccgcaccaaggtgcaggaccacagcaaggcagaagatgagtggaaggcccaggtggcccggggccggcaggaggccgagaggaagaacagcctcatcagcagcctggaggaggaggtgtccatcctgaaccggcaggtgctggagaaggagggggagagcaaggagctgaagaggctggtgatggccgagagcgagaagagccagaagctggaggagcggctgcggctgctgcaggccgagacagccagcaacagcgcccgggctgctgagaggagcagcgccctgcgggaggaggtgcagagcctgcgggaggaggccgagaagcagagggtggccagcgagaacctgcggcaggagctgaccagccaggccgagagagctgaggagctgggccaggagctgaaggcctggcaggagaagttcttccagaaggagcaggccctgagcaccctgcagctggagcacaccagcacccaggccctggtgtctgagctgctgcctgccaagcacctgtgccagcagctgcaggccgagcaggccgctgctgagaagaggcaccgggaggagctggagcagagcaagcaggccgccggcggcctgcgggcagagctgctgcgggcccagcgggagctgggggagctgatccccctgcggcagaaggtggccgagcaggagaggacagcccagcagctgcgggcagagaaggccagctatgcagagcagctgtccatgctgaagaaggcccacggcctgctggccgaggagaacagaggcctgggggagcgggccaacctgggccggcagttcctggaggtggagctggaccaggcccgggagaagtatgtgcaggagctggccgctgtgcgggcagatgctgagacccggctggccgaggtgcagcgggaggcccagagcacagcccgggagctggaggtgatgacagccaagtatgaaggagccaaggtgaaggtgctggaggagcggcagcgcttccaggaggagcggcagaagctgacagcccaggtggaggagctgagcaagaagctggccgacagcgaccaggccagcaaggtgcagcagcagaagctgaaggctgtgcaggcccagggcggggagagccagcaggaggcccagaggctgcaggcccagctgaatgagctgcaggcccagctgagccagaaggagcaggccgctgagcactacaagctgcagatggagaaggccaagacccactatgatgccaagaagcagcagaaccaggagctgcaggagcagctgcggagcctggagcagctgcagaaggagaacaaggagctgcgggcagaggccgagcggctgggccacgagctgcagcaggccggcctgaagaccaaggaggccgagcagacctgccgccacctgacagcccaggtgcgcagcctggaggcccaggtggcccatgctgaccagcagctgcgggacctgggcaagttccaggtggccacagatgccctgaagagccgggagccccaggccaagccccagctggacctgagcattgacagcctggacctgagctgtgaggagggcacccccctgagcatcaccagcaagctgcccaggacccagccagatggcacctctgtgcctggagagcccgccagccccatcagccagaggctgccccccaaggtggagagcctggagagcctgtacttcacccccatcccagcccggagccaggcccccctggagagcagcctggacagcctgggagatgtgttcctggacagcggcaggaagaccaggtctgcccggcggaggaccacccagatcatcaacatcaccatgaccaagaagctggatgtggaggagccagattctgccaacagcagcttctacagcaccaggtctgccccagccagccaggccagcctgcgggccaccagcagcacccagagcctggcccggctgggcagcccagactatggcaacagcgccctgctgagcctgcccggctaccggcccaccaccaggagcagcgcccggcgcagccaggccggcgtgagcagcggggcccctcctggcaggaacagcttctacatgggcacctgccaggatgagcctgagcagctggatgactggaacagaattgctgagctgcagcagaggaacagagtgtgccccccccacctgaagacctgctaccccctggagagccggcccagcctgagcctgggcaccatcacagatgaggagatgaagacaggagacccccaggagaccctgcggcgggcctccatgcagcccatccagattgctgagggcaccggcatcaccacccggcagcagaggaagagggtgtccctggagccccaccagggccctggcaccccagagagcaagaaggccaccagctgcttcccccggcccatgaccccccgggacagacatgagggcaggaagcagagcaccacagaggcccagaagaaggccgccccagccagcaccaagcaggccgaccggcggcagagcatggccttcagcatcctgaacacccccaagaagctgggcaacagcctgctgcggcggggggccagcaagaaggccctgagcaaggccagccccaacaccaggagcggcacccggcgcagccccagaattgccaccaccacagccagcgctgccacagctgctgccatcggggccaccccccgggccaagggcaaggccaagcactag

SEQ ID NO: 162251 - DNA, 228 bp, synthetic construct
  misc_feature 1..228: note = Description of Artificial Sequence: Synthetic coding sequence
  source 1..228: mol_type = other DNA
atgaccctgcacgccaccagaggagctgccctgctgtcctgggtgaacagcctgcacgtggccgaccctgtggaggccgtgctgcagctgcaggactgcagcatcttcatcaagatcatcgaccgcatccacggcacagaggagggccagcagatcctgaagcagcctgtgtctgagcggctggactttgtgtgcagcttcctgcagaagaacaggaagcacccctag

SEQ ID NO: 162252 - DNA, 276 bp, synthetic construct
  misc_feature 1..276: note = Description of Artificial Sequence: Synthetic coding sequence
  source 1..276: mol_type = other DNA
atgaccctgcacgccaccagaggagctgccctgctgtcctgggtgaacagcctgcacgtggccgaccctgtggaggccgtgctgcagctgcaggactgcagcatcttcatcaagatcatcgaccgcatccacggcacagaggagggccagcagatcctgaagcagcctgtgtctgagcggctggactttgtgtgcagcttcctgcagaagaacaggaagcaccccagcagcccagaatgtctggtgtctgcccagaaggtgctggagggcagctag

SEQ ID NO: 162253 - DNA, 6348 bp, synthetic construct
  misc_feature 1..6348: note = Description of Artificial Sequence: Synthetic coding sequence
  source 1..6348: mol_type = other DNA
atgaccctgcacgccaccagaggagctgccctgctgtcctgggtgaacagcctgcacgtggccgaccctgtggaggccgtgctgcagctgcaggactgcagcatcttcatcaagatcatcgaccgcatccacggcacagaggagggccagcagatcctgaagcagcctgtgtctgagcggctggactttgtgtgcagcttcctgcagaagaacaggaagcaccccagcagcccagaatgtctggtgtctgcccagaaggtgctggagggcagcgagctggagctggccaagatgaccatgctgctgctgtaccacagcaccatgagcagcaagagcccccgggactgggagcagtttgagtacaagatccaggccgagctggccgtcatcctgaagtttgtgctggaccatgaagatggcctgaacctgaatgaagacctggagaacttcctgcagaaggcccctgtgcccagcacctgcagcagcaccttccctgaggagctgagcccccccagccaccaggccaagcgggagatccgcttcctggagctgcagaaggtggccagcagcagcagcggcaacaacttcctgagcggcagccctgccagccccatgggagacatcctgcagaccccccagttccagatgaggcggctgaagaagcagctggctgatgagaggagcaacagagatgagctggagctggagctggctgaaaataggaagctgctgacagagaaggatgcccagatcgccatgatgcagcagagaattgaccggctggccctgctgaatgagaagcaggccgccagccccctggagcccaaggagctggaggagctgcgggacaagaatgaaagcctgaccatgaggctgcacgagaccctgaagcagtgccaggacctgaagacagagaagagccagatggacaggaagatcaaccagctgtctgaagaaaatggagacctgtccttcaagctgcgggagtttgccagccacctgcagcagctgcaggatgccctgaatgagctgacagaggagcacagcaaggccacccaggagtggctggagaagcaggcccagctggagaaggagctgtctgctgccctgcaggacaagaagtgcctggaggagaagaatgagatcctgcagggcaagctgagccagctggaggagcacctgagccagctgcaggacaaccccccccaggagaagggggaggtgctgggagatgtgctgcagctggagaccctgaagcaggaggccgccaccctggccgccaacaacacccagctgcaggcccgggtggagatgctggagacagagcggggccagcaggaggccaagctgctggccgagcggggccactttgaggaggagaagcagcagctgagcagcctcatcacagacctgcagagcagcatcagcaacctgagccaggccaaggaggagctggagcaggccagccaggcccacggggcccggctgacagcccaggtggccagcctgaccagcgagctgaccaccctgaatgccaccatccagcagcaggaccaggagctggccggcctgaagcagcaggccaaggagaagcaggcccagctggcccagaccctgcagcagcaggagcaggccagccagggcctgcggcaccaggtggagcagctgagcagcagcctgaagcagaaggagcagcagctgaaggaggtggccgagaagcaggaggccacccggcaggaccacgcccagcagctggccacagctgctgaggagcgggaggccagcctgcgggagagagatgctgccctgaagcagctggaggccctggagaaggagaaggccgccaagctggagatcctgcagcagcagctgcaggtggccaatgaggcccgggacagcgcccagacctctgtgacccaggcccagcgggagaaggccgagctgagcaggaaggtggaggagctgcaggcctgtgtggagacagcccggcaggagcagcacgaggcccaggcccaggtggccgagctggagctgcagctgcggtctgagcagcagaaggccacagagaaggagcgggtggcccaggagaaggaccagctgcaggagcagctgcaggccctgaaggagagcctgaaggtgaccaagggcagcctggaggaggagaagagaagagctgctgatgccctggaggagcagcagcgctgcatcagcgagctgaaggccgagaccaggagcctggtggagcagcacaagcgggagaggaaggagctggaggaggagcgggccggcaggaagggcctggaggcccggctgcagcagctgggggaggcccaccaggccgagacagaggtgctgcggcgggagctggccgaggccatggccgcccagcacacagctgagagtgaatgtgagcagctggtgaaggaggtggccgcctggagggagagatatgaggacagccagcaggaggaggcccagtatggagccatgttccaggagcagctgatgaccctgaaggaggagtgtgagaaggcccggcaggagctgcaggaggccaaggagaaggtggccggcatcgagagccacagcgagctgcagatcagccggcagcagaatgagctggccgagctgcacgccaacctggcccgggccctgcagcaggtgcaggagaaggaggtgcgggcccagaagctggctgatgacctgagcaccctgcaggagaagatggccgccaccagcaaggaggtggcccggctggagaccctggtgaggaaggccggggagcagcaggagacagccagccgggagctggtgaaggagcccgcccgggccggggaccggcagcctgagtggctggaggagcagcagggccggcagttctgcagcacccaggccgccctgcaggccatggagcgggaggccgagcagatgggaaatgagctggagcggctgcgggccgccctgatggagagccagggccagcagcaggaggagcggggccagcaggagcgggaggtggcccggctgacccaggagcggggccgggcccaggccgacctggccctggagaaggccgcccgggcagagctggagatgaggctgcagaatgccctgaatgagcagagggtggagtttgccaccctgcaggaggccctggcccacgccctgacagagaaggagggcaaggaccaggagctggccaagctgcggggcctggaggccgcccagatcaaggagctggaggagctgcggcagacagtgaagcagctgaaggagcagctggccaagaaggagaaggagcacgccagcggcagcggggcccagagcgaggccgccggccgcacagagcccaccggccccaagctggaggccctgcgggcagaggtgtccaagctggagcagcagtgccagaagcagcaggagcaggccgacagcctggagaggagcctggaggccgagcgggccagcagagctgagcgggacagcgccctggagaccctgcagggccagctggaggagaaggcccaggagctgggccacagccagagcgccctggccagcgcccagcgggagctggccgccttccgcaccaaggtgcaggaccacagcaaggccgaggatgagtggaaggcccaggtggcccggggccggcaggaggccgagaggaagaacagcctcatcagcagcctggaggaggaggtgtccatcctgaaccggcaggtgctggagaaggagggggagagcaaggagctgaagaggctggtgatggccgagagcgagaagagccagaagctggaggagcggctgcggctgctgcaggccgagacagccagcaacagcgcccgggctgctgagaggagcagcgccctgcgggaggaggtgcagagcctgcgggaggaggccgagaagcagagggtggccagcgagaacctgcggcaggagctgaccagccaggccgagcgggcagaggagctgggccaggagctgaaggcctggcaggagaagttcttccagaaggagcaggccctgagcaccctgcagctggagcacaccagcacccaggccctggtgtctgagctgctgcctgccaagcacctgtgccagcagctgcaggccgagcaggccgctgctgagaagaggcaccgggaggagctggagcagagcaagcaggccgccggcggcctgcgggcagagctgctgcgggcccagcgggagctgggggagctgatccccctgcggcagaaggtggccgagcaggagaggacagcccagcagctgcgggcagagaaggccagctatgcagagcagctgtccatgctgaagaaggcccacggcctgctggccgaggagaacagaggcctgggggagcgggccaacctgggccggcagttcctggaggtggagctggaccaggcccgggagaagtatgtgcaggagctggccgctgtgcgggcagatgctgagacccggctggccgaggtgcagcgggaggcccagagcacagcccgggagctggaggtgatgacagccaagtatgagggcgccaaggtgaaggtgctggaggagcggcagcgcttccaggaggagcggcagaagctgacagcccaggtggagcagctggaggtgttccagcgggagcagaccaagcaggtggaggagctgagcaagaagctggccgacagcgaccaggccagcaaggtgcagcagcagaagctgaaggctgtgcaggcccagggcggggagagccagcaggaggcccagaggctgcaggcccagctgaatgagctgcaggcccagctgagccagaaggagcaggccgctgagcactacaagctgcagatggagaaggccaagacccactatgatgccaagaagcagcagaaccaggagctgcaggagcagctgcggagcctggagcagctgcagaaggagaacaaggagctgcgggcagaggccgagcggctgggccacgagctgcagcaggccggcctgaagaccaaggaggccgagcagacctgccgccacctgacagcccaggtgcgcagcctggaggcccaggtggcccacgccgaccagcagctgcgggacctgggcaagttccaggtggccacagatgccctgaagagccgggagccccaggccaagccccagctggacctgagcattgacagcctggacctgagctgtgaggagggcacccccctgagcatcaccagcaagctgcccaggacccagccagatggcacctctgtgcctggagagcccgccagccccatcagccagaggctgccccccaaggtggagagcctggagagcctgtacttcacccccatcccagcccggagccaggcccccctggagagcagcctggacagcctgggagatgtgttcctggacagcggcaggaagaccaggtctgcccggcggaggaccacccagatcatcaacatcaccatgaccaagaagctggatgtggaggagccagacagcgccaacagcagcttctacagcaccaggtctgccccagccagccaggccagcctgcgggccaccagcagcacccagagcctggcccggctgggcagcccagactatggcaacagcgccctgctgagcctgcccggctaccggcccaccaccaggagcagcgcccggcgcagccaggccggcgtgtcctctggggcccctcctggaagaaattccttctacatgggcacctgccaggatgagcctgagcagctggatgactggaacagaattgctgagctgcagcagaggaacagagtgtgccccccccacctgaagacctgctaccccctggagagccggcccagcctgagcctgggcaccatcacagatgaggagatgaagacaggagacccccaggagaccctgcggcgggcctccatgcagcccatccagattgctgagggcaccggcatcaccacccggcagcagaggaagagggtgtccctggagccccaccagggccctggcaccccagagagcaagaaggccaccagctgcttcccccggcccatgaccccccgggacagacatgagggcaggaagcagagcaccacagaggcccagaagaaggccgccccagccagcaccaagcaggccgaccggcggcagagcatggccttcagcatcctgaacacccccaagaagctgggcaacagcctgctgcggcggggggccagcaagaaggccctgagcaaggccagccccaacaccaggagcggcaccaggaggagcccccgcatcgccaccaccacagccagcgctgccacagctgctgccatcggggccaccccccgggccaagggcaaggccaagcactag

SEQ ID NO: 162254 - DNA, 330 bp, synthetic construct
  misc_feature 1..330: note = Description of Artificial Sequence: Synthetic coding sequence
  source 1..330: mol_type = other DNA
atgaccctgcacgccaccagaggagctgccctgctgtcctgggtgaacagcctgcacgtggccgaccctgtggaggccgtgctgcagctgcaggactgcagcatcttcatcaagatcatcgaccgcatccacggcacagaggagggccagcagatcctgaagcagcctgtgtctgagcggctggactttgtgtgcagcttcctgcagaagaacaggaagcaccccagcagcccagaatgtctggtgtctgcccagaaggtgctggagggcagcgagctggagctggccaagatgaccatgctgctgctgtaccacagcaccatgtcctag

SEQ ID NO: 162255 - DNA, 186 bp, synthetic construct
  misc_feature 1..186: note = Description of Artificial Sequence: Synthetic coding sequence
  source 1..186: mol_type = other DNA
atgaccctgcacgccaccagaggagctgccctgctgtcctgggtgaacagcctgcacgtggccgaccctgtggaggccgtgctgcagctgcaggactgcagcatcttcatcaagatcatcgaccgcatccacggcacagaggagggccagcagatcctgaagcagcctgtgtctgagcggctgtag

SEQ ID NO: 162256 - DNA, 180 bp, synthetic construct
  misc_feature 1..180: note = Description of Artificial Sequence: Synthetic coding sequence
  source 1..180: mol_type = other DNA
atgaccctgcacgccaccagaggagctgccctgctgtcctgggtgaacagcctgcacgtggccgaccctgtggaggccgtgctgcagctgcaggactgcagcatcttcatcaagatcatcgaccgcatccacggcacagaggagggccagcagatcctgaagcagcctgtgtctgagtag

SEQ ID NO: 162257 - DNA, 441 bp, synthetic construct
  misc_feature 1..441: note = Description of Artificial Sequence: Synthetic coding sequence
  source 1..441: mol_type = other DNA
atgaccctgcacgccaccagaggagctgccctgctgtcctgggtgaacagcctgcacgtggccgaccctgtggaggccgtgctgcagctgcaggactgcagcatcttcatcaagatcatcgaccgcatccacggcacagaggagggccagcagatcctgaagcagcctgtgtctgagcggctggactttgtgtgcagcttcctgcagaagaacaggaagcaccccagcagcccagaatgtctggtgtctgcccagaaggtgctggagggcagcgagctggagctggccaagatgaccatgctgctgctgtaccacagcaccatgagcagcaagagcccccgggactgggagcagtttgagtacaagatccaggccgagctggccgtcatcctgaagtttgtgctggaccatgaagatggcctgaacctgaatgaagattag

SEQ ID NO: 162258 - DNA, 3267 bp, synthetic construct
  misc_feature 1..3267: note = Description of Artificial Sequence: Synthetic coding sequence
  source 1..3267: mol_type = other DNA
atgaggctgcagaatgccctgaatgagcagagggtggagtttgccaccctgcaggaggccctggcccacgccctgacagagaaggagggcaaggaccaggagctggccaagctgcggggcctggaggccgcccagatcaaggagctggaggagctgcggcagacagtgaagcagctgaaggagcagctggccaagaaggagaaggagcacgccagcggcagcggggcccagagcgaggccgccggccgcacagagcccaccggccccaagctggaggccctgcgggcagaggtgtccaagctggagcagcagtgccagaagcagcaggagcaggccgacagcctggagaggagcctggaggccgagcgggccagcagagctgagcgggacagcgccctggagaccctgcagggccagctggaggagaaggcccaggagctgggccacagccagagcgccctggccagcgcccagcgggagctggccgccttccgcaccaaggtgcaggaccacagcaaggcagaagatgagtggaaggcccaggtggcccggggccggcaggaggccgagaggaagaacagcctcatcagcagcctggaggaggaggtgtccatcctgaaccggcaggtgctggagaaggagggggagagcaaggagctgaagaggctggtgatggccgagagcgagaagagccagaagctggaggagcggctgcggctgctgcaggccgagacagccagcaacagcgcccgggctgctgagaggagcagcgccctgcgggaggaggtgcagagcctgcgggaggaggccgagaagcagagggtggccagcgagaacctgcggcaggagctgaccagccaggccgagagagctgaggagctgggccaggagctgaaggcctggcaggagaagttcttccagaaggagcaggccctgagcaccctgcagctggagcacaccagcacccaggccctggtgtctgagctgctgcctgccaagcacctgtgccagcagctgcaggccgagcaggccgctgctgagaagaggcaccgggaggagctggagcagagcaagcaggccgccggcggcctgcgggcagagctgctgcgggcccagcgggagctgggggagctgatccccctgcggcagaaggtggccgagcaggagaggacagcccagcagctgcgggcagagaaggccagctatgcagagcagctgtccatgctgaagaaggcccacggcctgctggccgaggagaacagaggcctgggggagcgggccaacctgggccggcagttcctggaggtggagctggaccaggcccgggagaagtatgtgcaggagctggccgctgtgcgggcagatgctgagacccggctggccgaggtgcagcgggaggcccagagcacagcccgggagctggaggtgatgacagccaagtatgaaggagccaaggtgaaggtgctggaggagcggcagcgcttccaggaggagcggcagaagctgacagcccaggtggaggagctgagcaagaagctggccgacagcgaccaggccagcaaggtgcagcagcagaagctgaaggctgtgcaggcccagggcggggagagccagcaggaggcccagaggctgcaggcccagctgaatgagctgcaggcccagctgagccagaaggagcaggccgctgagcactacaagctgcagatggagaaggccaagacccactatgatgccaagaagcagcagaaccaggagctgcaggagcagctgcggagcctggagcagctgcagaaggagaacaaggagctgcgggcagaggccgagcggctgggccacgagctgcagcaggccggcctgaagaccaaggaggccgagcagacctgccgccacctgacagcccaggtgcgcagcctggaggcccaggtggcccatgctgaccagcagctgcgggacctgggcaagttccaggtggccacagatgccctgaagagccgggagccccaggccaagccccagctggacctgagcattgacagcctggacctgagctgtgaggagggcacccccctgagcatcaccaggcacaaggccctgatgaccatcatcccagacctgagccccaacaaccccctgagcaagctgcccaggacccagccagatggcacctctgtgcctggagagcccgccagccccatcagccagaggctgccccccaaggtggagagcctggagagcctgtacttcacccccatcccagcccggagccaggcccccctggagagcagcctggacagcctgggagatgtgttcctggacagcggcaggaagaccaggtctgcccggcggaggaccacccagatcatcaacatcaccatgaccaagaagctggatgtggaggagccagattctgccaacagcagcttctacagcaccaggtctgccccagccagccaggccagcctgcgggccaccagcagcacccagagcctggcccggctgggcagcccagactatggcaacagcgccctgctgagcctgcccggctaccggcccaccaccaggagcagcgcccggcgcagccaggccggcgtgagcagcggggcccctcctggcaggaacagcttctacatgggcacctgccaggatgagcctgagcagctggatgactggaacagaattgctgagctgcagcagaggaacagagtgtgccccccccacctgaagacctgctaccccctggagagccggcccagcctgagcctgggcaccatcacagatgaggagatgaagacaggagacccccaggagaccctgcggcgggcctccatgcagcccatccagattgctgagggcaccggcatcaccacccggcagcagaggaagagggtgtccctggagccccaccagggccctggcaccccagagagcaagaaggccaccagctgcttcccccggcccatgaccccccgggacagacatgagggcaggaagcagagcaccacagaggcccagaagaaggccgccccagccagcaccaagcaggccgaccggcggcagagcatggccttcagcatcctgaacacccccaagaagctgggcaacagcctgctgcggcggggggccagcaagaaggccctgagcaaggccagccccaacaccaggagcggcacccggcgcagccccagaattgccaccaccacagccagcgctgccacagctgctgccatcggggccaccccccgggccaagggcaaggccaagcactag

SEQ ID NO: 162259 - DNA, 2076 bp, synthetic construct
  misc_feature 1..2076: note = Description of Artificial Sequence: Synthetic coding sequence
  source 1..2076: mol_type = other DNA
atgaccctgcacgccaccagaggagctgccctgctgtcctgggtgaacagcctgcacgtggccgaccctgtggaggccgtgctgcagctgcaggactgcagcatcttcatcaagatcatcgaccgcatccacggcacagaggagggccagcagatcctgaagcagcctgtgtctgagcggctggactttgtgtgcagcttcctgcagaagaacaggaagcaccccagcagcccagaatgtctggtgtctgcccagaaggtgctggagggcagcgagctggagctggccaagatgaccatgctgctgctgtaccacagcaccatgagcagcaagagcccccgggactgggagcagtttgagtacaagatccaggccgagctggccgtcatcctgaagtttgtgctggaccatgaagatggcctgaacctgaatgaagacctggagaacttcctgcagaaggcccctgtgcccagcacctgcagcagcaccttccctgaggagctgagcccccccagccaccaggccaagcgggagatccgcttcctggagctgcagaaggtggccagcagcagcagcggcaacaacttcctgagcggcagccctgccagccccatgggagacatcctgcagaccccccagttccagatgaggcggctgaagaagcagctggctgatgagaggagcaacagagatgagctggagctggagctggctgaaaataggaagctgctgacagagaaggatgcccagatcgccatgatgcagcagagaattgaccggctggccctgctgaatgagaagcaggccgccagccccctggagcccaaggagctggaggagctgcgggacaagaatgaaagcctgaccatgaggctgcacgagaccctgaagcagtgccaggacctgaagacagagaagagccagatggacaggaagatcaaccagctgtctgaagaaaatggagacctgtccttcaagctgcgggagtttgccagccacctgcagcagctgcaggatgccctgaatgagctgacagaggagcacagcaaggccacccaggagtggctggagaagcaggcccagctggagaaggagctgtctgctgccctgcaggacaagaagtgcctggaggagaagaatgagatcctgcagggcaagctgagccagctggaggagcacctgagccagctgcaggacaaccccccccaggagaagggggaggtgctgggagatgtgctgcagctggagaccctgaagcaggaggccgccaccctggccgccaacaacacccagctgcaggcccgggtggagatgctggagacagagcggggccagcaggaggccaagctgctggccgagcggggccactttgaggaggagaagcagcagctgagcagcctcatcacagacctgcagagcagcatcagcaacctgagccaggccaaggaggagctggagcaggccagccaggcccacggggcccggctgacagcccaggtggccagcctgaccagcgagctgaccaccctgaatgccaccatccagcagcaggaccaggagctggccggcctgaagcagcaggccaaggagaagcaggcccagctggcccagaccctgcagcagcaggagcaggccagccagggcctgcggcaccaggtggagcagctgagcagcagcctgaagcagaaggagcagcagctgaaggaggtggccgagaagcaggaggccacccggcaggaccacgcccagcagctggccacagctgctgaggagcgggaggccagcctgcgggagagagatgctgccctgaagcagctggaggccctggagaaggagaaggccgccaagctggagatcctgcagcagcagctgcaggtggccaatgaggcccgggacagcgcccagacctctgtgacccaggcccagcgggagaaggccgagctgagcaggaaggtggaggagctgcaggcctgtgtggagacagcccggcaggagcagcacgaggcccaggcccaggtggccgagctggagctgcagctgcggtctgagcagcagaaggccacagagaaggagtag

SEQ ID NO: 162260 - DNA, 480 bp, synthetic construct
  misc_feature 1..480: note = Description of Artificial Sequence: Synthetic coding sequence
  source 1..480: mol_type = other DNA
atgaccctgcacgccaccagaggagctgccctgctgtcctgggtgaacagcctgcacgtggccgaccctgtggaggccgtgctgcagctgcaggactgcagcatcttcatcaagatcatcgaccgcatccacggcacagaggagggccagcagatcctgaagcagcctgtgtctgagcggctggactttgtgtgcagcttcctgcagaagaacaggaagcaccccagcagcccagaatgtctggtgtctgcccagaaggtgctggagggcagcgagctggagctggccaagatgaccatgctgctgctgtaccacagcaccatgagcagcaagagcccccgggactgggagcagtttgagtacaagatccaggccgagctggccgtcatcctgaagtttgtgctggaccatgaagatggcctgaacctgaatgaagacctggagaacttcctgcagaaggcccctgtgcccagcacctag

SEQ ID NO: 162261 - DNA, 219 bp, synthetic construct
  misc_feature 1..219: note = Description of Artificial Sequence: Synthetic coding sequence
  source 1..219: mol_type = other DNA
atgaccctgcacgccaccagaggagctgccctgctgtcctgggtgaacagcctgcacgtggccgaccctgtggaggccgtgctgcagctgcaggactgcagcatcttcatcaagatcatcgaccgcatccacggcacagaggagggccagcagatcctgaagcagcctgtgtctgagcggctggactttgtgtgcagcttcctgcagaagaacagatag

SEQ ID NO: 162262 - DNA, 252 bp, synthetic construct
  misc_feature 1..252: note = Description of Artificial Sequence: Synthetic coding sequence
  source 1..252: mol_type = other DNA
atgaccctgcacgccaccagaggagctgccctgctgtcctgggtgaacagcctgcacgtggccgaccctgtggaggccgtgctgcagctgcaggactgcagcatcttcatcaagatcatcgaccgcatccacggcacagaggagggccagcagatcctgaagcagcctgtgtctgagcggctggactttgtgtgcagcttcctgcagaagaacaggaagcaccccagcagcccagaatgtctggtgtcctag

SEQ ID NO: 162263 - DNA, 2559 bp, synthetic construct
  misc_feature 1..2559: note = Description of Artificial Sequence: Synthetic coding sequence
  source 1..2559: mol_type = other DNA
atgaccctgcacgccaccagaggagctgccctgctgtcctgggtgaacagcctgcacgtggccgaccctgtggaggccgtgctgcagctgcaggactgcagcatcttcatcaagatcatcgaccgcatccacggcacagaggagggccagcagatcctgaagcagcctgtgtctgagcggctggactttgtgtgcagcttcctgcagaagaacaggaagcaccccagcagcccagaatgtctggtgtctgcccagaaggtgctggagggcagcgagctggagctggccaagatgaccatgctgctgctgtaccacagcaccatgagcagcaagagcccccgggactgggagcagtttgagtacaagatccaggccgagctggccgtcatcctgaagtttgtgctggaccatgaagatggcctgaacctgaatgaagacctggagaacttcctgcagaaggcccctgtgcccagcacctgcagcagcaccttccctgaggagctgagcccccccagccaccaggccaagcgggagatccgcttcctggagctgcagaaggtggccagcagcagcagcggcaacaacttcctgagcggcagccctgccagccccatgggagacatcctgcagaccccccagttccagatgaggcggctgaagaagcagctggctgatgagaggagcaacagagatgagctggagctggagctggctgaaaataggaagctgctgacagagaaggatgcccagatcgccatgatgcagcagagaattgaccggctggccctgctgaatgagaagcaggccgccagccccctggagcccaaggagctggaggagctgcgggacaagaatgaaagcctgaccatgaggctgcacgagaccctgaagcagtgccaggacctgaagacagagaagagccagatggacaggaagatcaaccagctgtctgaagaaaatggagacctgtccttcaagctgcgggagtttgccagccacctgcagcagctgcaggatgccctgaatgagctgacagaggagcacagcaaggccacccaggagtggctggagaagcaggcccagctggagaaggagctgtctgctgccctgcaggacaagaagtgcctggaggagaagaatgagatcctgcagggcaagctgagccagctggaggagcacctgagccagctgcaggacaaccccccccaggagaagggggaggtgctgggagatgtgctgcagctggagaccctgaagcaggaggccgccaccctggccgccaacaacacccagctgcaggcccgggtggagatgctggagacagagcggggccagcaggaggccaagctgctggccgagcggggccactttgaggaggagaagcagcagctgagcagcctcatcacagacctgcagagcagcatcagcaacctgagccaggccaaggaggagctggagcaggccagccaggcccacggggcccggctgacagcccaggtggccagcctgaccagcgagctgaccaccctgaatgccaccatccagcagcaggaccaggagctggccggcctgaagcagcaggccaaggagaagcaggcccagctggcccagaccctgcagcagcaggagcaggccagccagggcctgcggcaccaggtggagcagctgagcagcagcctgaagcagaaggagcagcagctgaaggaggtggccgagaagcaggaggccacccggcaggaccacgcccagcagctggccacagctgctgaggagcgggaggccagcctgcgggagagagatgctgccctgaagcagctggaggccctggagaaggagaaggccgccaagctggagatcctgcagcagcagctgcaggtggccaatgaggcccgggacagcgcccagacctctgtgacccaggcccagcgggagaaggccgagctgagcaggaaggtggaggagctgcaggcctgtgtggagacagcccggcaggagcagcacgaggcccaggcccaggtggccgagctggagctgcagctgcggtctgagcagcagaaggccacagagaaggagcgggtggcccaggagaaggaccagctgcaggagcagctgcaggccctgaaggagagcctgaaggtgaccaagggcagcctggaggaggagaagagaagagctgctgatgccctggaggagcagcagcgctgcatcagcgagctgaaggccgagaccaggagcctggtggagcagcacaagcgggagaggaaggagctggaggaggagcgggccggcaggaagggcctggaggcccggctgcagcagctgggggaggcccaccaggccgagacagaggtgctgcggcgggagctggccgaggccatggccgcccagcacacagctgagagtgaatgtgagcagctggtgaaggaggtggccgcctggagggagagatatgaggacagccagcaggaggaggcccagtatggagccatgttccaggagcagctgatgaccctgaaggaggagtgtgagaaggcccggcaggagctgcaggaggcctag

SEQ ID NO: 162264 - DNA, 525 bp, synthetic construct
  misc_feature 1..525: note = Description of Artificial Sequence: Synthetic coding sequence
  source 1..525: mol_type = other DNA
atgaccctgcacgccaccagaggagctgccctgctgtcctgggtgaacagcctgcacgtggccgaccctgtggaggccgtgctgcagctgcaggactgcagcatcttcatcaagatcatcgaccgcatccacggcacagaggagggccagcagatcctgaagcagcctgtgtctgagcggctggactttgtgtgcagcttcctgcagaagaacaggaagcaccccagcagcccagaatgtctggtgtctgcccagaaggtgctggagggcagcgagctggagctggccaagatgaccatgctgctgctgtaccacagcaccatgagcagcaagagcccccgggactgggagcagtttgagtacaagatccaggccgagctggccgtcatcctgaagtttgtgctggaccatgaagatggcctgaacctgaatgaagacctggagaacttcctgcagaaggcccctgtgcccagcacctgcagcagcaccttccctgaggagctgagcccccccagccaccagtag

SEQ ID NO: 162265 - DNA, 606 bp, synthetic construct
  misc_feature 1..606: note = Description of Artificial Sequence: Synthetic coding sequence
  source 1..606: mol_type = other DNA
atgaccctgcacgccaccagaggagctgccctgctgtcctgggtgaacagcctgcacgtggccgaccctgtggaggccgtgctgcagctgcaggactgcagcatcttcatcaagatcatcgaccgcatccacggcacagaggagggccagcagatcctgaagcagcctgtgtctgagcggctggactttgtgtgcagcttcctgcagaagaacaggaagcaccccagcagcccagaatgtctggtgtctgcccagaaggtgctggagggcagcgagctggagctggccaagatgaccatgctgctgctgtaccacagcaccatgagcagcaagagcccccgggactgggagcagtttgagtacaagatccaggccgagctggccgtcatcctgaagtttgtgctggaccatgaagatggcctgaacctgaatgaagacctggagaacttcctgcagaaggcccctgtgcccagcacctgcagcagcaccttccctgaggagctgagcccccccagccaccaggccaagcgggagatccgcttcctggagctgcagaaggtggccagcagcagcagcggcaacaacttcctgagcggcagcccctag

SEQ ID NO: 162266 - DNA, 480 bp, synthetic construct; identical to SEQ ID NO: 162260
  misc_feature 1..480: note = Description of Artificial Sequence: Synthetic coding sequence
  source 1..480: mol_type = other DNA

SEQ ID NO: 162267 - DNA, 663 bp, synthetic construct
  misc_feature 1..663: note = Description of Artificial Sequence: Synthetic coding sequence
  source 1..663: mol_type = other DNA
atgaccctgcacgccaccagaggagctgccctgctgtcctgggtgaacagcctgcacgtggccgaccctgtggaggccgtgctgcagctgcaggactgcagcatcttcatcaagatcatcgaccgcatccacggcacagaggagggccagcagatcctgaagcagcctgtgtctgagcggctggactttgtgtgcagcttcctgcagaagaacaggaagcaccccagcagcccagaatgtctggtgtctgcccagaaggtgctggagggcagcgagctggagctggccaagatgaccatgctgctgctgtaccacagcaccatgagcagcaagagcccccgggactgggagcagtttgagtacaagatccaggccgagctggccgtcatcctgaagtttgtgctggaccatgaagatggcctgaacctgaatgaagacctggagaacttcctgcagaaggcccctgtgcccagcacctgcagcagcaccttccctgaggagctgagcccccccagccaccaggccaagcgggagatccgcttcctggagctgcagaaggtggccagcagcagcagcggcaacaacttcctgagcggcagccctgccagccccatgggagacatcctgcagaccccccagttccagatgaggcggctgaagtag

SEQ ID NO: 162268 - DNA, 171 bp, synthetic construct
  misc_feature 1..171: note = Description of Artificial Sequence: Synthetic coding sequence
  source 1..171: mol_type = other DNA
atgaccctgcacgccaccagaggagctgccctgctgtcctgggtgaacagcctgcacgtggccgaccctgtggaggccgtgctgcagctgcaggactgcagcatcttcatcaagatcatcgaccgcatccacggcacagaggagggccagcagatcctgaagcagccctag

SEQ ID NO: 162269 - DNA, 1053 bp, synthetic construct
  misc_feature 1..1053: note = Description of Artificial Sequence: Synthetic coding sequence
  source 1..1053: mol_type = other DNA
atgttctgctgcctgggctatgagtggctgagcggcggctgcaagacctggcacagcgcctgggtgatcaacaccctggccgaccaccgccaccggggcacagactttggaggcagcccctggctgctgatcatcaccgtcttcctgcggagctacaagtttgccatcagcctgtgcaccagctacctgtgtgtgtccttcctgaagaccatcttccccagccagaatggacatgatggcagcacagatgtgcagcagagggcccggcgcagcaacagaagacggcaggagggcatcaagatcgtgctggaggacatcttcaccctgtggaggcaggtggagaccaaggtgcgggccaagatcaggaagatgaaggtgaccaccaaggtgaacagacatgacaagatcaatggcaagaggaagacagccaaggagcacctgaggaagctgtccatgaaggagcgggagcacggggagaaggagcggcaggtgtctgaggccgaggagaatggcaagctggacatgaaggagatccacacctacatggagatgttccagagggcccaggccctgcggaggagagctgaggactactaccgctgcaagatcacccccagcgccaggaagcccctgtgcaacagagtgaggatggctgctgtggagcaccgccacagcagcggcctgccctactggccctacctgacagctgagaccctgaagaacaggatgggccaccagcccccaccacccacccagcagcacagcatcatcgacaacagcctgagcctgaagaccccatctgagtgcctgctgacccccctgcccccatctgccctgcccagcgcagatgacaacctgaagaccccagcagaatgtctgctgtaccccctgccccccagcgcagatgacaacctgaagaccccacctgagtgcctgctgacccccctgcccccatctgcccctccttctgtggatgacaacctgaagaccccaccagaatgtgtgtgcagcctgcccttccacccccagaggatgatcatcagcagaaattag

SEQ ID NO: 162270 - DNA, 1053 bp, synthetic construct; identical to SEQ ID NO: 162269
  misc_feature 1..1053: note = Description of Artificial Sequence: Synthetic coding sequence
  source 1..1053: mol_type = other DNA

SEQ ID NO: 162271 - DNA, 1431 bp, synthetic construct
  misc_feature 1..1431: note = Description of Artificial Sequence: Synthetic coding sequence
  source 1..1431: mol_type = other DNA
atggccagccccttcagcggggccctgcagctgacagacctggatgacttcatcggccccagccaggagtgcatcaagcctgtgaaggtggagaagagagctggcagcggcgtggccaagatcagaattgaagatgatggcagctacttccagatcaaccaggacggcggcacccggcggctggagaaggccaaggtgtccctgaatgactgcctggcctgcagcggctgcatcaccagcgctgagaccgtgctgatcacccagcagagccatgaggagctgaagaaggtgctggatgccaacaagatggccgcccccagccagcagaggctggtggtggtgtctgtgagcccccagagccgggccagcctggccgcccgcttccagctgaaccccacagacacagccaggaagctgaccagcttcttcaagaagattggagtgcactttgtgtttgacacagccttcagccgccacttcagcctgctggagagccagcgggagtttgtgcggcgcttccggggccaggccgactgccggcaggccctgcccctgctggccagcgcctgccccggctggatctgctacgccgagaagacccacggcagcttcatcctgccccacatcagcacagcccggagcccccagcaggtgatgggcagcctggtgaaggacttctttgcccagcagcagcacctgaccccagacaagatctaccacgtgacagtgatgccctgctatgacaagaagctggaggccagcaggccagacttcttcaaccaggagcaccagaccagagatgtggactgtgtgctgaccaccggggaggtgttccggctgctggaggaggagggcgtgtccctgcctgacctggagcccgcccccctggacagcctgtgcagcggggccagcgctgaggagcccaccagccacagaggaggcggcagcggcggctacctggagcacgtgttcagacatgctgcccgggagctgtttggcatccacgtggccgaggtgacctacaagcccctgaggaacaaggacttccaggaggtgaccctggagaaggagggccaggtgctgctgcactttgccatggcctacggcttcaggaacatccagaacctggtgcagaggctgaagaggggccgctgcccctaccactacgtggaggtgatggcctgccccagcggctgcctgaatggaggcggccagctgcaggccccagaccggcccagccgggagctgctgcagcacgtggagcggctgtatggcatggtgcgggcagaggccccagaagatgcccctggggtgcaggagctgtacacccactggctgcagggcacagattctgaatgtgccggccgcctgctgcacacccagtaccacgctgtggagaaggccagcacaggcctgggcatccgctggtag

SEQ ID NO: 162272 - DNA, 567 bp, synthetic construct
  misc_feature 1..567: note = Description of Artificial Sequence: Synthetic coding sequence
  source 1..567: mol_type = other DNA
atggccagccccttcagcggggccctgcagctgacagacctggatgacttcatcggccccagccaggagtgcatcaagcctgtgaaggtggagaagagagctggcagcggcgtggccaagatcagaattgaagatgatggcagctacttccagatcaaccaggacggcggcacccggcggctggagaaggccaaggtgtccctgaatgactgcctggcctgcagcggctgcatcaccagcgctgagaccgtgctgatcacccagcagagccatgaggagctgaagaaggtgctggatgccaacaagggctgcaccagcagcagcaccccacccagccagggcaccagcgcctcctggagggccagcgagagcctgtgtggggacagcgaggaccggcccacagctgaccggcgctgcccctgctggcccctgcctgcccaggccggcagcgccatgccccggcggctgacagctgccagcagcagccccaccagcgcccctcctggccccaggagccgctcctgggccccctggagcaggaccagcagccccagcagcagcacctag

SEQ ID NO: 162273 - DNA, 1125 bp, synthetic construct
  misc_feature 1..1125: note = Description of Artificial Sequence: Synthetic coding sequence
  source 1..1125: mol_type = other DNA
atggccgcccccagccagcagaggctggtggtggtgtctgtgagcccccagagccgggccagcctggccgcccgcttccagctgaaccccacagacacagccaggaagctgaccagcttcttcaagaagattggagtgcactttgtgtttgacacagccttcagccgccacttcagcctgctggagagccagcgggagtttgtgcggcgcttccggggccaggccgactgccggcaggccctgcccctgctggccagcgcctgccccggctggatctgctacgccgagaagacccacggcagcttcatcctgccccacatcagcacagcccggagcccccagcaggtgatgggcagcctggtgaaggacttctttgcccagcagcagcacctgaccccagacaagatctaccacgtgacagtgatgccctgctatgacaagaagctggaggccagcaggccagacttcttcaaccaggagcaccagaccagagatgtggactgtgtgctgaccaccggggaggtgttccggctgctggaggaggagggcgtgtccctgcctgacctggagcccgcccccctggacagcctgtgcagcggggccagcgctgaggagcccaccagccacagaggaggcggcagcggcggctacctggagcacgtgttcagacatgctgcccgggagctgtttggcatccacgtggccgaggtgacctacaagcccctgaggaacaaggacttccaggaggtgaccctggagaaggagggccaggtgctgctgcactttgccatggcctacggcttcaggaacatccagaacctggtgcagaggctgaagaggggccgctgcccctaccactacgtggaggtgatggcctgccccagcggctgcctgaatggaggcggccagctgcaggccccagaccggcccagccgggagctgctgcagcacgtggagcggctgtatggcatggtgcgggcagaggccccagaagatgcccctggggtgcaggagctgtacacccactggctgcagggcacagattctgaatgtgccggccgcctgctgcacacccagtaccacgctgtggagaaggccagcacaggcctgggcatccgctggtag

SEQ ID NO: 162274 - DNA, 4284 bp, synthetic construct
  misc_feature 1..4284: note = Description of Artificial Sequence: Synthetic coding sequence
  source 1..4284: mol_type = other DNA
atgctgctgcccagtgatgtggcccggctggtgctgggctacctgcagcaggagaacctgatcagcacctgccagaccttcatcctggagagcagtgacctgaaggagtatgcagagcactgcacagatgagggcttcatcccagcctgcctgctgagcctgtttgggaagaacctgaccaccatcctgaatgaatatgtggccatgaagaccaaggagaccagcaacaacgtgcctgccatcatgagcagcctgtggaagaagctggaccacaccctgagccagatccgctccatgcagagcagccccaggtttgctggcagccagagggcccggaccaggactggaattgctgagatcaagaggcagaggaagctggccagccagacagccccagccagcgctgagctgctgaccctgccctacctgagcggccagttcaccaccccacccagcacaggcacccaggtgacccggcccagcggccagatcagtgaccccagccgcagctactttgtggtggtgaaccacagccagagccaggacacagtgaccaccggggaggccctgaatgtcatccctggggcccaggagaagaaggcccacgccagcctgatgagccctggccgcaggaagtctgagagccagaggaagagcaccaccctgagcggcccccacagcaccatccggaacttccaggaccccaatgcctttgctgtggagaagcagatggtgattgaaaatgcccgggagaagatcctgagcaacaagagcctgcaggagaagctggccgagaacatcaacaagttcctgaccagtgacaacaacatcgcccaggtgcccaagcagacagacaacaaccccacagagcctgagaccagcattgatgagttcctgggcctgcccagcgagatccacatgtctgaggaggccatccaggacatcctggagcagacagaaagtgaccctgccttccaggccctgtttgacctgtttgattatggcaagaccaagaacaacaagaacatcagccagagcatcagcagccagcccatggagagcaaccccagcatcgtgctggctgatgagaccaacctggccgtgaagggcagctttgaaacagaggagagtgatggccagagcggccagcctgccttctgcaccagctaccagaatgatgaccccctgaatgccctgaagaacagcaacaaccatgatgtgctgcggcaggaggaccaggagaacttcagccagatcagcaccagcatccagaagaaggccttcaagacagctgtgcccacagagcagaagtgtgacatcgacatcacctttgagagcgtgcccaacctgaatgacttcaaccagaggggcaacagcaatgctgagtgcaacccccactgtgccgagctgtacaccaaccagatgagcacagaaacagagatggccatcggcatcgagaagaacagcctgagcagcaatgtgcccagcgagagccagctgcagcctgaccagcctgacatccccatcaccagctttgtgtccctgggctgtgaggccaacaatgaaaacctgatcctgagcggcaagagcagccagctgctgagccaggacaccagcctgaccgggaagcccagcaagaagagccagttctgtgagaacagcaatgacacagtgaagctgaagatcaacttccacggcagcaagagcagtgacagcagcgaggtgcacaagagcaagattgagatcaacgtgctggagcctgtgatgagccagctgagcaactgccaggacaacagctgcctgcagagcgagatcctgcctgtgtctgtggagagcagccacctgaatgtgtctggccaggtggagatccacctgggggacagcctgagcagcaccaagcagcccagcaatgattctgcctctgtggagctgaaccacacagaaaatgaggcccaggccagcaagtctgagaacagccaggagcccagcagctctgtgaaggaggagaacaccatcttcctgagcctgggcggcaatgccaactgtgagaaggtggccctgaccccacctgagggcacccctgtggagaacagccacagcctgcccccagagagcgtgtgcagctctgtgggggacagccaccctgagagccagaacacagatgacaagcccagcagcaacaacagcgctgagattgatgccagcaacatcgtgtccctgaaggtgatcatcagtgatgacccctttgtgtccagtgacacagagctgaccagcgctgtgagcagcatcaacggggagaacctgcccaccatcatcctgagcagccccaccaagagccccaccaagaatgctgagctggtgaagtgcctgagcagcgaggagaccgtgggcgctgtggtgtatgcagaggtgggggacagcgcctccatggagcagagcctgctgaccttcaagtctgaggacagcgctgtgaacaacacccagaatgaagatggcatcgccttcagcgccaacgtgaccccctgtgtgtccaaggatggcggctacatccagctgatgcctgccaccagcacagccttcggcaacagcaacaacatcctgattgccacctgtgtgacagaccccacagccctgggcacctctgtgtcccagagcaatgtggtggtgctgcccggcaacagcgcccccatgacagcccagcccctgcccccccagctgcagaccccacccaggagcaacagcgtgtttgctgtgaaccaggccgtgagccccaacttcagccagggcagcgccatcatcatcgccagccctgtgcagcctgtgctgcagggcatggtgggcatgatccctgtgtctgtggtgggccagaatggaaacaacttcagcaccccaccccggcaggtgctgcacatgcccctgacagcccctgtgtgcaacagaagcatcccccagtttcctgtgccccccaagagccagaaggcccagggcctgaggaacaagccctgcatcggcaagcaggtgaacaacctggtggacagcagcggccacagcgtgggctgccacgcccagaagacagaggtgtctgacaagagcatcgccacagacctgggcaagaagtctgaggagaccaccgtgcccttccctgaggagagcatcgtgcctgctgccaagccctgccacagaagagtgctgtgctttgacagcaccacagcccctgtggccaacacccagggccccaaccacaagatggtgtcccagaacaaggagagaaatgctgtgtccttccccaacctggacagccccaacgtgagcagcaccctgaagccacccagcaacaatgccatcaagcgggagaaggagaagccacccctgcccaagatcctgagcaagtctgagagcgccatcagccgccacaccaccatccgggagacccagagcgagaagaaggtgagccccacagaaattgtgctggagagcttccacaaggccacagccaacaaggaaaatgagctgtgcagtgatgtggagcggcagaagaaccctgagaacagcaagctgagcatcggccagcagaatggaggcctgcggtctgagaagagcatcgccagcctgcaggagatgaccaagaagcagggcaccagcagcaacaacaagaatgtgctgtctgtgggcacagctgtgaaggacctgaagcaggagcagaccaagagcgccagcagcctcatcaccacagagatgctgcaggacatccagaggcacagctctgtgtcccggctggccgacagcagtgacctgcctgtgcccaggaccccaggcagcggggccggggagaagcacaaggaggagcccatcgacatcatcaaggcccccagcagccgccgcttcagcgaggacagcagcaccagcaaggtgatggtgccccctgtgaccccagacctgcctgcctgcagccctgccagcgagaccggctctgaaaattctgtgaacatggccgcccacaccctgatgatcctgagcagagctgccatcagcaggaccaccagcgccacccccctgaaggacaacacccagcagttccgggccagcagccgcagcaccaccaagaagaggaagattgaggagctggatgagcgggagaggaacagccggcccagcagcaagaacctgaccaacagcagcatccccatgaagaagaagaagatcaagaagaagaagctgcccagcagcttccctgctggcatggatgtggacaagttcctgctgagcctgcactatgatgaatag

SEQ ID NO: 162275 - DNA, 7284 bp, synthetic construct
  misc_feature 1..7284: note = Description of Artificial Sequence: Synthetic coding sequence
  source 1..7284: mol_type = other DNA
atgcccctgaagaccaggacagccctgagtgatgatcctgacagcagcaccagcaccctgggcaacatgctggagctgcccggcaccagcagcagcagcaccagccaggagctgcccttctgccagcccaagaagaagagcacccccctgaagtatgaggtgggggacctgatctgggccaagttcaagaggcggccctggtggccctgccgcatctgcagcgaccccctcatcaacacccacagcaagatgaaggtgagcaacagaagaccctaccggcagtactacgtggaggccttcggggaccccagcgagcgggcctgggtggccggcaaggccatcgtgatgtttgagggccgccaccagtttgaggagctgcctgtgctgcggcggcggggcaagcagaaggagaagggctaccgccacaaggtgccccagaagatcctgagcaagtgggaggcctctgtgggcctggccgagcagtatgatgtgcccaagggcagcaagaacaggaagtgcatccctggcagcatcaagctggacagcgaggaggacatgccctttgaggactgcaccaatgaccctgagagcgagcatgacctgctgctgaatggctgcctgaagagcctggcctttgacagcgagcacagcgcagatgagaaggagaagccctgtgccaagagccgggccaggaagagcagtgacaaccccaagaggacctctgtgaagaagggccacatccagtttgaggcccacaaggatgagcggcggggcaagatccctgagaacctgggcctgaacttcatcagcggggacatcagtgacacccaggccagcaatgagctgagcagaattgccaacagcctgaccggcagcaacacagcccctggcagcttcctgttcagcagctgtgggaagaacacagccaagaaggagtttgagaccagcaatggagacagcctgctgggcctgcctgagggcgccctgatcagcaagtgcagccgggagaagaacaagccccagaggagcctggtgtgtggcagcaaggtgaagctgtgctacatcggggctggagatgaggagaagagaagtgacagcatcagcatctgcaccaccagtgatgatggcagcagtgacctggaccccatcgagcacagcagcgagagtgacaacagcgtgctggagatcccagatgcctttgacagaacagagaacatgctgtccatgcagaagaatgagaagatcaagtacagcagatttgctgccaccaacaccagggtgaaggccaagcagaagcccctcatcagcaacagccacacagaccacctgatgggctgcaccaagtctgctgagcccggcacagagaccagccaggtgaacctgagtgacctgaaggccagcaccctggtgcacaagccccagagcgacttcaccaatgatgccctgagccccaagttcaacctgagcagcagcatcagcagcgagaacagcctcatcaagggcggggccgccaaccaggccctgctgcacagcaagagcaagcagcccaagttccgcagcatcaagtgcaagcacaaggaaaatcctgtgatggccgagccccctgtgatcaatgaggagtgcagcctgaagtgctgcagcagtgacaccaagggcagccccctggccagcatcagcaagagcggcaaggtggatggcctgaagctgctgaacaacatgcatgagaagacccgggacagcagtgacattgaaacagctgtggtgaagcacgtgctgtctgagctgaaggagctgagctaccgcagcctgggagaagatgtgtctgacagcggcaccagcaagcccagcaagcccctgctcttcagcagcgccagcagccagaaccacatccccatcgagccagactacaagttcagcaccctgctgatgatgctgaaggacatgcatgacagcaagaccaaggagcagaggctgatgacagcccagaacctggtgtcctaccgcagccctggccgcggggactgcagcaccaacagccctgtgggcgtgtccaaggtgctggtgtctgggggcagcacccacaacagcgagaagaagggagatggcacccagaacagcgccaaccccagccccagcggcggggacagcgccctgtctggagagctgagcgccagcctgcccggcctgctgagtgacaagagggacctgcctgccagcggcaagagcagaagtgactgtgtgaccaggaggaactgtggccgcagcaagcccagcagcaagctgagagatgccttcagcgcccagatggtgaagaacacagtgaacaggaaggccctgaagacagagaggaagaggaagctgaaccagctgcccagcgtgaccctggatgctgtgctgcagggcgaccgggagcggggcggcagcctgcggggcggcgctgaggaccccagcaaagaagaccccctgcagatcatgggccacctgaccagtgaagatggagaccacttcagtgatgtgcactttgacagcaaggtgaagcagagcgaccccgggaagatcagcgagaagggcctgagctttgaaaatggcaagggccctgagctggacagcgtgatgaacagtgaaaatgatgagctgaatggagtgaaccaggtggtgcccaagaagcgctggcagaggctgaaccagaggaggaccaagcccaggaagaggatgaaccgcttcaaggagaaggagaacagtgaatgtgccttccgggtgctgctgcccagcgaccctgtgcaggagggcagagatgagttccctgagcacaggaccccatctgccagcatcctggaggagcccctgacagagcagaaccacgccgactgcctggacagcgctggcccccggctgaatgtgtgtgacaagagcagcgccagcattggagacatggagaaggagcccggcatccccagcctgaccccccaggccgagctgcctgagcctgctgtgcgctctgagaagaagaggctgaggaagcccagcaagtggctgctggagtacacagaggagtatgaccagatctttgcccccaagaagaagcagaagaaggtgcaggagcaggtgcacaaggtgagcagccgctgtgaggaggagagcctgctggcccggggccgcagcagcgcccagaacaagcaggtggatgagaacagcctcatcagcaccaaggaggagccccctgtgctggagcgggaggcccccttcctggagggccccctggcccagagcgagctgggcggcggccatgctgagctgccccagctgaccctgtctgtgcctgtggcccctgaggtgagccccaggcctgccctggagagcgaggagctgctggtgaagaccccaggcaactatgagagcaagaggcagaggaagcccaccaagaagctgctggagagcaatgacctggaccccggcttcatgcccaagaagggggacctgggcctgagcaagaagtgctatgaagctggccacctggagaatggcatcacagagagctgtgccaccagctacagcaaggactttggaggcggcaccaccaagatctttgacaagcccaggaagaggaagaggcagagacatgctgctgccaagatgcagtgcaagaaggtgaagaatgatgacagcagcaaggagatccctggcagcgagggggagctgatgccccacaggacagccaccagccccaaggagaccgtggaggagggcgtggagcatgaccccggcatgcctgccagcaagaagatgcagggcgagcggggcggcggggccgccctgaaggaaaatgtgtgccagaactgtgagaagctgggggagctgctgctgtgtgaggcccagtgctgcggggccttccacctggagtgcctgggcctgacagagatgccccggggcaagttcatctgcaatgaatgtagaacaggcatccacacctgctttgtgtgcaagcagagcggggaggatgtgaagcgctgcctgctgcccctgtgtgggaagttctaccatgaagaatgtgtgcagaagtacccacccaccgtgatgcagaacaagggcttccgctgcagcctgcacatctgcatcacctgccacgccgccaacccagccaacgtgtctgccagcaagggccgcctgatgagatgtgtgcgctgccctgtggcctaccacgccaatgacttctgcctggccgccggcagcaagatcctggccagcaacagcatcatctgccccaaccacttcaccccaagaagaggctgcagaaatcatgaacatgtgaatgtgtcctggtgctttgtgtgcagcgagggcggcagcctgctgtgctgtgacagctgcccagctgccttccacagagaatgtctgaacatcgacatccctgagggcaactggtactgcaatgactgcaaggccggcaagaagccccactaccgggagatcgtgtgggtgaaggtgggccgctaccgctggtggccagctgagatctgccaccccagggctgtgcccagcaacatcgacaagatgagacatgatgtgggggagttccctgtgctcttcttcggcagcaatgactacctgtggacccaccaggcccgggtcttcccctacatggagggagatgtgagcagcaaggacaagatgggcaaaggagtggatggcacctacaagaaggccctgcaggaggccgccgccaggtttgaggagctgaaggcccagaaggagctgcggcagctgcaggaggacaggaagaatgacaagaagcccccaccctacaagcacatcaaggtgaaccggcccatcggccgggtgcagatcttcaccgctgacctgtctgagatcccccgctgcaactgcaaggccacagatgagaacccctgtggcatcgacagcgagtgcatcaacaggatgctgctgtatgagtgccaccccaccgtgtgcccagctgggggccgctgccagaaccagtgcttcagcaagaggcagtacccagaggtggagatcttccgcaccctgcagaggggctggggcctgcggaccaagacagacatcaagaagggggagtttgtgaatgaatatgtgggggagctgattgatgaggaggagtgccgggcccgcatccgctatgcccaggagcatgacatcaccaacttctacatgctgaccctggacaaggaccgcatcattgatgctggccccaagggcaactatgcccgcttcatgaaccactgctgccagcccaactgtgagacccagaagtggagcgtgaatggagacaccagggtgggcctgtttgccctgagtgacatcaaggccggcacagagctgaccttcaactacaacctggagtgcctgggcaatggcaagacagtgtgcaagtgtggggcccccaactgcagcggcttcctgggcgtgcggcccaagaaccagcccatcgccacagaggagaagagcaagaagttcaagaagaagcagcagggcaagaggaggacccagggcgagatcaccaaggagagagaagatgagtgcttcagctgtggagatgctggccagctggtgtcctgcaagaagccaggctgccccaaggtgtaccacgccgactgcctgaacctgaccaagaggcctgctgggaagtgggagtgcccctggcaccagtgtgacatctgtgggaaggaggccgccagcttctgtgagatgtgccccagcagcttctgcaagcagcaccgggagggcatgctgttcatcagcaagctggatggccgcctgagctgcacagaacatgacccctgtggccccaaccccctggagcccggggagatccgggagtatgtgcccccacctgtgcccctgcccccaggccccagcacccacctggccgagcagagcacaggcatggccgcccaggcccccaagatgtctgacaagcccccagctgacaccaaccagatgctgagcctgagcaagaaggccctggccggcacctgccagaggcccctgctgcctgagcggcccctggagaggacagacagccggccccagcccctggacaaggtgcgggacctggccggcagcggcaccaagagccagagcctggtgagcagccagaggcccctggaccggcccccagctgtggccggcccccggccccagctgagtgacaagcccagccctgtgaccagccccagcagcagccccagcgtgcgcagccagcccctggagcggcccctgggcacagctgacccccggctggacaagagcatcggggccgccagcccccggccccagagcctggagaagacctctgtgcccaccggcctgcggctgcccccaccagaccggctgctgatcaccagcagccccaagccccagaccagtgaccggcccacagacaagccccacgccagcctgagccagaggctgcccccacctgagaaggtgctgtctgctgtggtgcagaccctggtggccaaggagaaggccctgcggcctgtggaccagaacacccagagcaagaacagagctgccctggtgatggacctgattgacctgaccccccggcagaaggagcgggccgccagcccccaccaggtgaccccccaggctgatgagaagatgcctgtgctggagagcagctcctggccagccagcaagggcctgggccacatgcccagggctgtggagaagggctgtgtgtctgaccccctgcagaccagcggcaaggctgctgcccccagcgaggacccctggcaggccgtgaagagcctgacccaggcccggctgctgagccagcccccagccaaggccttcctgtatgagcccaccacccaggccagcggccgggccagcgctggagctgagcagaccccaggccccctgagccagagccctggcctggtgaagcaggccaagcagatggtgggcggccagcagctgcctgccctggccgccaagagcggccagagcttccgcagcctgggcaaggccccagccagcctgcccacagaggagaagaagctggtgaccacagagcagagcccctgggccctgggcaaggccagcagcagagctggcctgtggcccatcgtggccggccagaccctggcccagagctgctggagcgctggcagcacccagaccctggcccagacctgctggagcctgggccggggccaggaccccaagccagagcagaacaccctgcctgccctgaaccaggcccccagcagccacaagtgtgccgagagcgagcagaagtag

SEQ ID NO: 162276 - DNA, 7284 bp, synthetic construct; identical to SEQ ID NO: 162275
  misc_feature 1..7284: note = Description of Artificial Sequence: Synthetic coding sequence
  source 1..7284: mol_type = other DNA

SEQ ID NO: 162277 - DNA, 1692 bp, synthetic construct
  misc_feature 1..1692: note = Description of Artificial Sequence: Synthetic coding sequence
  source 1..1692: mol_type = other DNA
atgcccctgaagaccaggacagccctgagtgatgatcctgacagcagcaccagcaccctgggcaacatgctggagctgcccggcaccagcagcagcagcaccagccaggagctgcccttctgccagcccaagaagaagagcacccccctgaagtatgaggtgggggacctgatctgggccaagttcaagaggcggccctggtggccctgccgcatctgcagcgaccccctcatcaacacccacagcaagatgaaggtgagcaacagaagaccctaccggcagtactacgtggaggccttcggggaccccagcgagcgggcctgggtggccggcaaggccatcgtgatgtttgagggccgccaccagtttgaggagctgcctgtgctgcggcggcggggcaagcagaaggagaagggctaccgccacaaggtgccccagaagatcctgagcaagtgggaggcctctgtgggcctggccgagcagtatgatgtgcccaagggcagcaagaacaggaagtgcatccctggcagcatcaagctggacagcgaggaggacatgccctttgaggactgcaccaatgaccctgagagcgagcatgacctgctgctgaatggctgcctgaagagcctggcctttgacagcgagcacagcgcagatgagaaggagaagccctgtgccaagagccgggccaggaagagcagtgacaaccccaagaggacctctgtgaagaagggccacatccagtttgaggcccacaaggatgagcggcggggcaagatccctgagaacctgggcctgaacttcatcagcggggacatcagtgacacccaggccagcaatgagctgagcagaattgccaacagcctgaccggcagcaacacagcccctggcagcttcctgttcagcagctgtgggaagaacacagccaagaaggagtttgagaccagcaatggagacagcctgctgggcctgcctgagggcgccctgatcagcaagtgcagccgggagaagaacaagccccagaggagcctggtgtgtggcagcaaggtgaagctgtgctacatcggggctggagatgaggagaagagaagtgacagcatcagcatctgcaccaccagtgatgatggcagcagtgacctggaccccatcgagcacagcagcgagagtgacaacagcgtgctggagatcccagatgcctttgacagaacagagaacatgctgtccatgcagaagaatgagaagatcaagtacagcagatttgctgccaccaacaccagggtgaaggccaagcagaagcccctcatcagcaacagccacacagaccacctgatgggctgcaccaagtctgctgagcccggcacagagaccagccaggtgaacctgagtgacctgaaggccagcaccctggtgcacaagccccagagcgacttcaccaatgatgccctgagccccaagttcaacctgagcagcagcatcagcagcgagaacagcctcatcaagggcggggccgccaaccaggccctgctgcacagcaagagcaagcagcccaagttccgcagcatcaagtgcaagcacaaggaaaatcctgtgatggccgagccccctgtgatcaatgaggagtgcagcctgaagtgctgcagcagtgacaccaagggcagccccctggccagcatcagcaagaccccaccctag

SEQ ID NO: 162278 - DNA, 7782 bp, synthetic construct
  misc_feature 1..7782: note = Description of Artificial Sequence: Synthetic coding sequence
  source 1..7782: mol_type = other DNA
atggaccagacctgtgagctgcccaggaggaactgcctgctgcccttcagcaaccctgtgaacctggatgcccctgaggacaaggacagcccctttggaaatggccagagcaacttcagcgagcccctgaatggctgcaccatgcagctgagcacagtgtctggcaccagccagaatgcctacggccaggacagccccagctgctacatccccctgcggcggctgcaggacctggcctccatgatcaacgtggagtacctgaatggcagcgcagatggcagcgagagcttccaggaccctgagaagagtgacagccgggcccagacccccatcgtgtgcaccagcctgagccctgggggccccacagccctggccatgaagcaggagcccagctgcaacaacagccctgagctgcaggtgaaggtgaccaagaccatcaagaatggcttcctgcactttgagaacttcacctgtgtggatgatgctgatgtggacagcgagatggaccctgagcagcctgtgacagaagatgagagcattgaggagatctttgaggagacccagaccaatgccacctgcaactatgagaccaagtcagaaaatggagtgaaggtggccatgggcagcgagcaggacagcaccccagagagcagacatggagctgtgaagagccccttcctgcccctggccccccagacagagacccagaagaacaagcagagaaatgaggtggatggcagcaatgagaaggccgccctgctgcctgcccccttcagcctgggggacaccaacatcaccatcgaggagcagctgaacagcatcaacctgtccttccaggatgatcctgacagcagcaccagcaccctgggcaacatgctggagctgcccggcaccagcagcagcagcaccagccaggagctgccctttgtgccccagaagatcctgagcaagtgggaggcctctgtgggcctggccgagcagtatgatgtgcccaagggcagcaagaacaggaagtgcatccctggcagcatcaagctggacagcgaggaggacatgccctttgaggactgcaccaatgaccctgagagcgagcatgacctgctgctgaatggctgcctgaagagcctggcctttgacagcgagcacagcgcagatgagaaggagaagccctgtgccaagagccgggccaggaagagcagtgacaaccccaagaggacctctgtgaagaagggccacatccagtttgaggcccacaaggatgagcggcggggcaagatccctgagaacctgggcctgaacttcatcagcggggacatcagtgacacccaggccagcaatgagctgagcagaattgccaacagcctgaccggcagcaacacagcccctggcagcttcctgttcagcagctgtgggaagaacacagccaagaaggagtttgagaccagcaatggagacagcctgctgggcctgcctgagggcgccctgatcagcaagtgcagccgggagaagaacaagccccagaggagcctggtgtgtggcagcaaggtgaagctgtgctacatcggggctggagatgaggagaagagaagtgacagcatcagcatctgcaccaccagtgatgatggcagcagtgacctggaccccatcgagcacagcagcgagagtgacaacagcgtgctggagatcccagatgcctttgacagaacagagaacatgctgtccatgcagaagaatgagaagatcaagtacagcagatttgctgccaccaacaccagggtgaaggccaagcagaagcccctcatcagcaacagccacacagaccacctgatgggctgcaccaagtctgctgagcccggcacagagaccagccaggtgaacctgagtgacctgaaggccagcaccctggtgcacaagccccagagcgacttcaccaatgatgccctgagccccaagttcaacctgagcagcagcatcagcagcgagaacagcctcatcaagggcggggccgccaaccaggccctgctgcacagcaagagcaagcagcccaagttccgcagcatcaagtgcaagcacaaggaaaatcctgtgatggccgagccccctgtgatcaatgaggagtgcagcctgaagtgctgcagcagtgacaccaagggcagccccctggccagcatcagcaagagcggcaaggtggatggcctgaagctgctgaacaacatgcatgagaagacccgggacagcagtgacattgaaacagctgtggtgaagcacgtgctgtctgagctgaaggagctgagctaccgcagcctgggagaagatgtgtctgacagcggcaccagcaagcccagcaagcccctgctcttcagcagcgccagcagccagaaccacatccccatcgagccagactacaagttcagcaccctgctgatgatgctgaaggacatgcatgacagcaagaccaaggagcagaggctgatgacagcccagaacctggtgtcctaccgcagccctggccgcggggactgcagcaccaacagccctgtgggcgtgtccaaggtgctggtgtctgggggcagcacccacaacagcgagaagaagggagatggcacccagaacagcgccaaccccagccccagcggcggggacagcgccctgtctggagagctgagcgccagcctgcccggcctgctgagtgacaagagggacctgcctgccagcggcaagagcagaagtgactgtgtgaccaggaggaactgtggccgcagcaagcccagcagcaagctgagagatgccttcagcgcccagatggtgaagaacacagtgaacaggaaggccctgaagacagagaggaagaggaagctgaaccagctgcccagcgtgaccctggatgctgtgctgcagggcgaccgggagcggggcggcagcctgcggggcggcgctgaggaccccagcaaagaagaccccctgcagatcatgggccacctgaccagtgaagatggagaccacttcagtgatgtgcactttgacagcaaggtgaagcagagcgaccccgggaagatcagcgagaagggcctgagctttgaaaatggcaagggccctgagctggacagcgtgatgaacagtgaaaatgatgagctgaatggagtgaaccaggtggtgcccaagaagcgctggcagaggctgaaccagaggaggaccaagcccaggaagaggatgaaccgcttcaaggagaaggagaacagtgaatgtgccttccgggtgctgctgcccagcgaccctgtgcaggagggcagagatgagttccctgagcacaggaccccatctgccagcatcctggaggagcccctgacagagcagaaccacgccgactgcctggacagcgctggcccccggctgaatgtgtgtgacaagagcagcgccagcattggagacatggagaaggagcccggcatccccagcctgaccccccaggccgagctgcctgagcctgctgtgcgctctgagaagaagaggctgaggaagcccagcaagtggctgctggagtacacagaggagtatgaccagatctttgcccccaagaagaagcagaagaaggtgcaggagcaggtgcacaaggtgagcagccgctgtgaggaggagagcctgctggcccggggccgcagcagcgcccagaacaagcaggtggatgagaacagcctcatcagcaccaaggaggagccccctgtgctggagcgggaggcccccttcctggagggccccctggcccagagcgagctgggcggcggccatgctgagctgccccagctgaccctgtctgtgcctgtggcccctgaggtgagccccaggcctgccctggagagcgaggagctgctggtgaagaccccaggcaactatgagagcaagaggcagaggaagcccaccaagaagctgctggagagcaatgacctggaccccggcttcatgcccaagaagggggacctgggcctgagcaagaagtgctatgaagctggccacctggagaatggcatcacagagagctgtgccaccagctacagcaaggactttggaggcggcaccaccaagatctttgacaagcccaggaagaggaagaggcagagacatgctgctgccaagatgcagtgcaagaaggtgaagaatgatgacagcagcaaggagatccctggcagcgagggggagctgatgccccacaggacagccaccagccccaaggagaccgtggaggagggcgtggagcatgaccccggcatgcctgccagcaagaagatgcagggcgagcggggcggcggggccgccctgaaggaaaatgtgtgccagaactgtgagaagctgggggagctgctgctgtgtgaggcccagtgctgcggggccttccacctggagtgcctgggcctgacagagatgccccggggcaagttcatctgcaatgaatgtagaacaggcatccacacctgctttgtgtgcaagcagagcggggaggatgtgaagcgctgcctgctgcccctgtgtgggaagttctaccatgaagaatgtgtgcagaagtacccacccaccgtgatgcagaacaagggcttccgctgcagcctgcacatctgcatcacctgccacgccgccaacccagccaacgtgtctgccagcaagggccgcctgatgagatgtgtgcgctgccctgtggcctaccacgccaatgacttctgcctggccgccggcagcaagatcctggccagcaacagcatcatctgccccaaccacttcaccccaagaagaggctgcagaaatcatgaacatgtgaatgtgtcctggtgctttgtgtgcagcgagggcggcagcctgctgtgctgtgacagctgcccagctgccttccacagagaatgtctgaacatcgacatccctgagggcaactggtactgcaatgactgcaaggccggcaagaagccccactaccgggagatcgtgtgggtgaaggtgggccgctaccgctggtggccagctgagatctgccaccccagggctgtgcccagcaacatcgacaagatgagacatgatgtgggggagttccctgtgctcttcttcggcagcaatgactacctgtggacccaccaggcccgggtcttcccctacatggagggagatgtgagcagcaaggacaagatgggcaaaggagtggatggcacctacaagaaggccctgcaggaggccgccgccaggtttgaggagctgaaggcccagaaggagctgcggcagctgcaggaggacaggaagaatgacaagaagcccccaccctacaagcacatcaaggtgaaccggcccatcggccgggtgcagatcttcaccgctgacctgtctgagatcccccgctgcaactgcaaggccacagatgagaacccctgtggcatcgacagcgagtgcatcaacaggatgctgctgtatgagtgccaccccaccgtgtgcccagctgggggccgctgccagaaccagtgcttcagcaagaggcagtacccagaggtggagatcttccgcaccctgcagaggggctggggcctgcggaccaagacagacatcaagaagggggagtttgtgaatgaatatgtgggggagctgattgatgaggaggagtgccgggcccgcatccgctatgcccaggagcatgacatcaccaacttctacatgctgaccctggacaaggaccgcatcattgatgctggccccaagggcaactatgcccgcttcatgaaccactgctgccagcccaactgtgagacccagaagtggagcgtgaatggagacaccagggtgggcctgtttgccctgagtgacatcaaggccggcacagagctgaccttcaactacaacctggagtgcctgggcaatggcaagacagtgtgcaagtgtggggcccccaactgcagcggcttcctgggcgtgcggcccaagaaccagcccatcgccacagaggagaagagcaagaagttcaagaagaagcagcagggcaagaggaggacccagggcgagatcaccaaggagagagaagatgagtgcttcagctgtggagatgctggccagctggtgtcctgcaagaagccaggctgccccaaggtgtaccacgccgactgcctgaacctgaccaagaggcctgctgggaagtgggagtgcccctggcaccagtgtgacatctgtgggaaggaggccgccagcttctgtgagatgtgccccagcagcttctgcaagcagcaccgggagggcatgctgttcatcagcaagctggatggccgcctgagctgcacagaacatgacccctgtggccccaaccccctggagcccggggagatccgggagtatgtgcccccacctgtgcccctgcccccaggccccagcacccacctggccgagcagagcacaggcatggccgcccaggcccccaagatgtctgacaagcccccagctgacaccaaccagatgctgagcctgagcaagaaggccctggccggcacctgccagaggcccctgctgcctgagcggcccctggagaggacagacagccggccccagcccctggacaaggtgcgggacctggccggcagcggcaccaagagccagagcctggtgagcagccagaggcccctggaccggcccccagctgtggccggcccccggccccagctgagtgacaagcccagccctgtgaccagccccagcagcagccccagcgtgcgcagccagcccctggagcggcccctgggcacagctgacccccggctggacaagagcatcggggccgccagcccccggccccagagcctggagaagacctctgtgcccaccggcctgcggctgcccccaccagaccggctgctgatcaccagcagccccaagccccagaccagtgaccggcccacagacaagccccacgccagcctgagccagaggctgcccccacctgagaaggtgctgtctgctgtggtgcagaccctggtggccaaggagaaggccctgcggcctgtggaccagaacacccagagcaagaacagagctgccctggtgatggacctgattgacctgaccccccggcagaaggagcgggccgccagcccccaccaggtgaccccccaggctgatgagaagatgcctgtgctggagagcagctcctggccagccagcaagggcctgggccacatgcccagggctgtggagaagggctgtgtgtctgaccccctgcagaccagcggcaaggctgctgcccccagcgaggacccctggcaggccgtgaagagcctgacccaggcccggctgctgagccagcccccagccaaggccttcctgtatgagcccaccacccaggccagcggccgggccagcgctggagctgagcagaccccaggccccctgagccagagccctggcctggtgaagcaggccaagcagatggtgggcggccagcagctgcctgccctggccgccaagagcggccagagcttccgcagcctgggcaaggccccagccagcctgcccacagaggagaagaagctggtgaccacagagcagagcccctgggccctgggcaaggccagcagcagagctggcctgtggcccatcgtggccggccagaccctggcccagagctgctggagcgctggcagcacccagaccctggcccagacctgctggagcctgggccggggccaggaccccaagccagagcagaacaccctgcctgccctgaaccaggcccccagcagccacaagtgtgccgagagcgagcagaagtag

SEQ ID NO: 162279 - DNA, 8091 bp, synthetic construct
  misc_feature 1..8091: note = Description of Artificial Sequence: Synthetic coding sequence
  source 1..8091: mol_type = other DNA
atggaccagacctgtgagctgcccaggaggaactgcctgctgcccttcagcaaccctgtgaacctggatgcccctgaggacaaggacagcccctttggaaatggccagagcaacttcagcgagcccctgaatggctgcaccatgcagctgagcacagtgtctggcaccagccagaatgcctacggccaggacagccccagctgctacatccccctgcggcggctgcaggacctggcctccatgatcaacgtggagtacctgaatggcagcgcagatggcagcgagagcttccaggaccctgagaagagtgacagccgggcccagacccccatcgtgtgcaccagcctgagccctgggggccccacagccctggccatgaagcaggagcccagctgcaacaacagccctgagctgcaggtgaaggtgaccaagaccatcaagaatggcttcctgcactttgagaacttcacctgtgtggatgatgctgatgtggacagcgagatggaccctgagcagcctgtgacagaagatgagagcattgaggagatctttgaggagacccagaccaatgccacctgcaactatgagaccaagtcagaaaatggagtgaaggtggccatgggcagcgagcaggacagcaccccagagagcagacatggagctgtgaagagccccttcctgcccctggccccccagacagagacccagaagaacaagcagagaaatgaggtggatggcagcaatgagaaggccgccctgctgcctgcccccttcagcctgggggacaccaacatcaccatcgaggagcagctgaacagcatcaacctgtccttccaggatgatcctgacagcagcaccagcaccctgggcaacatgctggagctgcccggcaccagcagcagcagcaccagccaggagctgcccttctgccagcccaagaagaagagcacccccctgaagtatgaggtgggggacctgatctgggccaagttcaagagaagaccctggtggccctgccgcatctgcagcgaccccctcatcaacacccacagcaagatgaaggtgagcaacagaagaccctaccggcagtactacgtggaggcctttggagaccccagcgagcgggcctgggtggccggcaaggccatcgtgatgtttgagggccgccaccagtttgaggagctgcctgtgctgcggcggcggggcaagcagaaggagaagggctaccgccacaaggtgccccagaagatcctgagcaagtgggaggcctctgtgggcctggccgagcagtatgatgtgcccaagggcagcaagaacaggaagtgcatccctggcagcatcaagctggacagcgaggaggacatgccctttgaggactgcaccaatgaccctgagagcgagcatgacctgctgctgaatggctgcctgaagagcctggcctttgattctgagcacagcgcagatgagaaggagaagccctgtgccaagagccgggccaggaagagcagtgacaaccccaagaggacctctgtgaagaagggccacatccagtttgaggcccacaaggatgaaagaagaggcaagatccctgagaacctgggcctgaacttcatcagcggggacatcagtgacacccaggccagcaatgagctgagccgcatcgccaacagcctgaccggcagcaacacagcccctggcagcttcctgttcagcagctgtgggaagaacacagccaagaaggagtttgagaccagcaatggagacagcctgctgggcctgcctgagggcgccctgatcagcaagtgcagccgggagaagaacaagccccagaggagcctggtgtgtggcagcaaggtgaagctgtgctacatcggggctggagatgaggagaagagaagtgacagcatcagcatctgcaccaccagtgatgatggcagcagtgacctggaccccatcgagcacagcagcgagagtgacaacagcgtgctggagatcccagatgcctttgacagaacagagaacatgctgtccatgcagaagaatgagaagatcaagtacagcagatttgctgccaccaacaccagggtgaaggccaagcagaagcccctcatcagcaacagccacacagaccacctgatgggctgcaccaagtctgctgagcctggaacagagaccagccaggtgaacctgagtgacctgaaggccagcaccctggtgcacaagccccagagcgacttcaccaatgatgccctgagccccaagttcaacctgagcagcagcatcagcagcgagaacagcctcatcaagggcggggccgccaaccaggccctgctgcacagcaagagcaagcagcccaagttccgcagcatcaagtgcaagcacaaggagaaccctgtgatggccgagccccctgtgatcaatgaagaatgttccctgaagtgctgcagcagtgacaccaagggcagccccctggccagcatcagcaagagcggcaaggtggatggcctgaagctgctgaacaacatgcatgagaagacccgggacagcagtgacatcgagacagctgtggtgaagcacgtgctgtctgagctgaaggagctgagctaccgcagcctgggggaggatgtgtctgattctggcaccagcaagcccagcaagcccctgctcttcagcagcgccagcagccagaaccacatccccattgaaccagactacaagttcagcaccctgctgatgatgctgaaggacatgcatgacagcaagaccaaggagcagaggctgatgacagcccagaacctggtgtcctaccgcagccctggccgcggggactgcagcaccaacagccctgtgggcgtgtccaaggtgctggtgtctgggggcagcacccacaacagcgagaagaagggagatggcacccagaacagcgccaaccccagccccagcggcggggacagcgccctgagcggggagctgagcgccagcctgcccggcctgctgagtgacaagagggacctgcctgccagcggcaagagcagaagtgactgtgtgaccaggaggaactgtggccgcagcaagcccagcagcaagctgagagatgccttcagcgcccagatggtgaagaacacagtgaacaggaaggccctgaagacagagaggaagaggaagctgaaccagctgcccagcgtgaccctggatgctgtgctgcagggcgaccgggagcggggcggcagcctgcggggcggcgctgaggaccccagcaaggaggaccccctgcagatcatgggccacctgaccagtgaagatggagaccacttcagtgatgtgcactttgacagcaaggtgaagcagagcgaccccgggaagatcagcgagaagggcctgagctttgaaaatggaaaaggacctgagctggacagcgtgatgaacagtgaaaatgatgagctgaatggagtgaaccaggtggtgcccaagaagcgctggcagaggctgaaccagaggaggaccaagcccaggaagaggatgaaccgcttcaaggagaaggaaaattctgaatgtgccttccgggtgctgctgcccagcgaccctgtgcaggagggcagagatgagttccctgagcacaggacccccagcgccagcatcctggaggagcccctgacagagcagaaccacgccgactgcctggacagcgctggcccccggctgaatgtgtgtgacaagagcagcgccagcatcggggacatggagaaggagcccggcatccccagcctgaccccccaggccgagctgcctgagcctgctgtgcgctctgagaagaagaggctgaggaagcccagcaagtggctgctggagtacacagaggagtatgaccagatctttgcccccaagaagaagcagaagaaggtgcaggagcaggtgcacaaggtgagcagccgctgtgaggaggagagcctgctggcccggggccgcagcagcgcccagaacaagcaggtggatgagaacagcctcatcagcaccaaggaggagccccctgtgctggagcgggaggcccccttcctggagggccccctggcccagagcgagctgggcggcggccacgccgagctgccccagctgaccctgtctgtgcctgtggcccctgaggtgagccccaggcctgccctggagagcgaggagctgctggtgaagaccccaggcaactatgagagcaagaggcagaggaagcccaccaagaagctgctggagagcaatgacctggaccccggcttcatgcccaagaagggggacctgggcctgagcaagaagtgctatgaggccggccacctggagaatggcatcacagagagctgtgccaccagctacagcaaggactttggaggcggcaccaccaagatctttgacaagcccaggaagaggaagaggcagagacatgctgctgccaagatgcagtgcaagaaggtgaagaatgatgacagcagcaaggagatccctggcagcgagggggagctgatgccccacaggacagccaccagccccaaggagaccgtggaggagggcgtggagcatgaccccggcatgcctgccagcaagaagatgcagggcgagcggggcggcggggccgccctgaaggaaaatgtgtgccagaactgtgagaagctgggggagctgctgctgtgtgaggcccagtgctgcggggccttccacctggagtgcctgggcctgacagagatgccccggggcaagttcatctgcaatgaatgtagaacaggcatccacacctgctttgtgtgcaagcagagcggagaagatgtgaagcgctgcctgctgcccctgtgtgggaagttctaccacgaggagtgtgtgcagaagtacccacccaccgtgatgcagaacaagggcttccgctgcagcctgcacatctgcatcacctgccacgccgccaacccagccaacgtgtctgccagcaagggccgcctgatgagatgtgtgcgctgccctgtggcctaccacgccaatgacttctgcctggccgccggcagcaagatcctggccagcaacagcatcatctgccccaaccacttcaccccccggcggggctgcaggaaccacgagcacgtgaatgtgtcctggtgctttgtgtgcagcgagggcggcagcctgctgtgctgtgacagctgcccagctgccttccaccgggagtgcctgaacatcgacatccctgagggcaactggtactgcaatgactgcaaggccggcaagaagccccactaccgggagatcgtgtgggtgaaggtgggccgctaccgctggtggccagctgagatctgccaccccagggctgtgcccagcaacatcgacaagatgagacatgatgtgggggagttccctgtgctcttcttcggcagcaatgactacctgtggacccaccaggcccgggtcttcccctacatggagggagatgtgagcagcaaggacaagatgggcaagggcgtggatggcacctacaagaaggccctgcaggaggccgccgccaggtttgaggagctgaaggcccagaaggagctgcggcagctgcaggaggacaggaagaatgacaagaagcccccaccctacaagcacatcaaggtgaaccggcccatcggccgggtgcagatcttcaccgctgacctgtctgagatcccccgctgcaactgcaaggccacagatgagaacccctgtggcattgattctgagtgcatcaacaggatgctgctgtatgagtgccaccccaccgtgtgcccagctgggggccgctgccagaaccagtgcttcagcaagaggcagtacccagaggtggagatcttccgcaccctgcagaggggctggggcctgcggaccaagacagacatcaagaagggggagtttgtgaatgaatatgtgggggagctgattgatgaggaggagtgccgggcccgcatccgctatgcccaggagcatgacatcaccaacttctacatgctgaccctggacaaggaccgcatcattgatgctggccccaagggcaactatgcccgcttcatgaaccactgctgccagcccaactgtgagacccagaagtggagcgtgaatggagacaccagggtgggcctgtttgccctgagtgacatcaaggccggcacagagctgaccttcaactacaacctggagtgcctgggcaatggcaagacagtgtgcaagtgtggggcccccaactgcagcggcttcctgggcgtgcggcccaagaaccagcccatcgccacagaggagaagagcaagaagttcaagaagaagcagcagggcaagaggaggacccagggcgagatcaccaaggagcgggaggatgagtgcttcagctgtggagatgctggccagctggtgtcctgcaagaagccaggctgccccaaggtgtaccacgccgactgcctgaacctgaccaagaggcctgctgggaagtgggagtgcccctggcaccagtgtgacatctgtgggaaggaggccgccagcttctgtgagatgtgccccagcagcttctgcaagcagcaccgggagggcatgctgttcatcagcaagctggatggccgcctgagctgcacagaacatgacccctgtggccccaaccccctggagcctggagagatccgggagtatgtgcccccacctgtgcccctgcccccaggccccagcacccacctggccgagcagagcacaggcatggccgcccaggcccccaagatgtctgacaagcccccagctgacaccaaccagatgctgagcctgagcaagaaggccctggccggcacctgccagaggcccctgctgcctgagcggcccctggagaggacagacagccggccccagcccctggacaaggtgcgggacctggccggcagcggcaccaagagccagagcctggtgagcagccagaggcccctggacaggcctcctgctgtggccggcccccggccccagctgagtgacaagcccagccctgtgaccagccccagcagcagccccagcgtgcgcagccagcccctggagcggcccctgggcacagctgacccccggctggacaagagcattggagctgccagcccccggccccagagcctggagaagacctctgtgcccaccggcctgcggctgcccccaccagaccggctgctgatcaccagcagccccaagccccagaccagtgaccggcccacagacaagccccacgccagcctgagccagaggctgcccccacctgagaaggtgctgtctgctgtggtgcagaccctggtggccaaggagaaggccctgcggcctgtggaccagaacacccagagcaagaacagagctgccctggtgatggacctgattgacctgaccccccggcagaaggagagagctgccagcccccaccaggtgaccccccaggctgatgagaagatgcctgtgctggagagcagctcctggccagccagcaagggcctgggccacatgcccagggctgtggagaagggctgtgtgtctgaccccctgcagaccagcggcaaggccgccgcccccagcgaggacccctggcaggccgtgaagagcctgacccaggcccggctgctgagccagcccccagccaaggccttcctgtatgagcccaccacccaggccagcggccgggccagcgctggagctgagcagaccccaggccccctgagccagagccctggcctggtgaagcaggccaagcagatggtgggcggccagcagctgcctgccctggccgccaagagcggccagagcttccgcagcctgggcaaggccccagccagcctgcccacagaggagaagaagctggtgaccacagagcagagcccctgggccctgggcaaggccagcagccgggccggcctgtggcccatcgtggccggccagaccctggcccagagctgctggagcgctggcagcacccagaccctggcccagacctgctggagcctgggccggggccaggaccccaagccagagcagaacaccctgcctgccctgaaccaggcccccagcagccacaagtgtgccgagagcgagcagaagtag

SEQ ID NO: 162280 - DNA, 468 bp, synthetic construct
  misc_feature 1..468: note = Description of Artificial Sequence: Synthetic coding sequence
  source 1..468: mol_type = other DNA
atgcccctgaagaccaggacagccctgagtgatgatcctgacagcagcaccagcaccctgggcaacatgctggagctgcccggcaccagcagcagcagcaccagccaggagctgcccttctgccagcccaagaagaagagcacccccctgaagtatgaggtgggggacctgatctgggccaagttcaagaggcggccctggtggccctgccgcatctgcagcgaccccctcatcaacacccacagcaagatgaaggtgagcaacagaagaccctaccggcagtactacgtggaggccttcggggaccccagcgagcgggcctgggtggccggcaaggccatcgtgatgtttgagggccgccaccagtttgaggagctgcctgtgctgcggcggcggggcaagcagaaggagaagggctaccgccacaaggtgccccagaagatcctgagcaagtgggaggccagctag

SEQ ID NO: 162281 - DNA, 375 bp, synthetic construct
  misc_feature 1..375: note = Description of Artificial Sequence: Synthetic coding sequence
  source 1..375: mol_type = other DNA
atgcccctgaagaccaggacagccctgagtgatgatcctgacagcagcaccagcaccctgggcaacatgctggagctgcccggcaccagcagcagcagcaccagccaggagctgcccttctgccagcccaagaagaagagcacccccctgaagtatgaggtgggggacctgatctgggccaagttcaagaggcggccctggtggccctgccgcatctgcagcgaccccctcatcaacacccacagcaagatgaaggtgagcaacagaagaccctaccggcagtactacgtggaggccttcggggaccccagcgagcgggcctgggtggccggcaaggccatcgtgatgtttgagggccgccaccagtttgaatag

SEQ ID NO: 162282 - DNA, 4200 bp, synthetic construct
  misc_feature 1..4200: note = Description of Artificial Sequence: Synthetic coding sequence
  source 1..4200: mol_type = other DNA
atgagcggcctgggggacagcagcagtgaccctgccaacccagacagccacaagaggaagggcagcccctgtgacaccctggccagcagcacagagaagagaagaagagagcaggagaacaagtacctggaggagctggccgagctgctgagcgccaacatcagtgacatcgacagcctgtctgtgaagccagacaagtgcaagatcctgaagaagacagtggaccagatccagctgatgaagaggatggagcaggagaagagcaccacagatgatgatgtgcagaagagtgacatcagcagcagcagccagggcgtgattgagaaggagagcctgggccccctgctgctggaggccctggatggcttcttctttgtggtgaactgtgagggcagaattgtgtttgtgtctgaaaatgtgaccagctacctgggctacaaccaggaggagctgatgaacacctctgtgtacagcatcctgcacgtgggggaccacgccgagtttgtgaagaacctgctgcccaagagcctggtgaatggagtgccctggccccaggaggccaccaggaggaacagccacaccttcaactgcaggatgctgatccaccccccagatgagcctggaacagagaaccaggaggcctgccagagatatgaggtgatgcagtgcttcaccgtgtcccagcccaagagcatccaggaggatggagaggacttccagagctgcctgatctgcatcgcccggcggctgccccggcccccagccatcactggagtggagagcttcatgaccaagcaggacaccaccgggaagatcatcagcattgacaccagcagcctgcgggctgctggccgcacaggctgggaggacctggtgaggaagtgcatctatgccttcttccagccccagggccgggagcccagctatgcccggcagctgttccaggaggtgatgacccggggcacagccagcagccccagctaccgcttcatcctgaatgatggcaccatgctgagcgcccacaccaagtgcaagctgtgctacccccagagcccagacatgcagcccttcatcatgggcatccacatcatcgaccgggagcacagcggcctgagcccccaggatgacaccaacagcggcatgagcatcccccgggtgaaccccagcgtgaaccccagcatcagccctgcccacggcgtggcccggagcagcaccctgccccccagcaacagcaacatggtgtccacccgcatcaaccggcagcagagcagtgacctgcacagcagcagccacagcaacagcagcaacagccagggcagctttggctgcagccctggcagccagatcgtggccaacgtggccctgaaccagggccaggccagcagccagagcagcaaccccagcctgaacctgaacaacagccccatggagggcaccggcatcagcctggcccagttcatgagcccccggcggcaggtgaccagcggcctggccacccggcccaggatgcccaacaacagcttcccccccaacatcagcaccctgagcagccctgtgggcatgaccagcagcgcctgcaacaacaacaacagaagctacagcaacatccctgtgaccagcctgcagggcatgaatgaaggccccaacaacagcgtgggcttcagcgccagcagccctgtgctgcggcagatgagcagccagaacagccccagccggctgaacatccagcctgccaaggccgagagcaaggacaacaaggagatcgccagcatcctgaatgagatgatccagagcgacaacagcagcagtgatggcaagcccctggacagcggcctgctgcacaacaatgaccggctgagtgatggagacagcaagtacagccagaccagccacaagctggtgcagctgctgaccaccacagctgagcagcagctgcggcatgctgacatcgacaccagctgcaaggatgtgctgagctgcaccggcaccagcaacagcgccagcgccaacagcagcggcggcagctgccccagcagccacagcagcctgacagagcggcacaagatcctgcaccggctgctgcaggagggcagccccagcgacatcaccaccctgtctgtggagccagacaagaaggacagcgccagcacctctgtgtctgtgacaggccaggtgcagggcaacagcagcatcaagctggagctggatgccagcaagaagaaggagagcaaggaccaccagctgctgcgctacctgctggacaaggatgagaaggacctgcggagcacccccaacctgagcctggatgatgtgaaggtgaaggtggagaagaaggagcagatggacccctgcaacaccaaccccacccccatgaccaagcccaccccagaggagatcaagctggaggcccagagccagttcaccgctgacctggaccagtttgaccagctgctgcccaccctggagaaggccgcccagctgcccggcctgtgtgaaacagacaggatggatggagctgtgacctctgtgaccatcaagtctgagatcctgcctgccagcctgcagagcgccacagcccggcccaccagccggctgaaccggctgcctgagctggagctggaggccatcgacaaccagtttggccagcccggcactggagaccagatcccctggaccaacaacacagtgacagccatcaaccagagcaagtctgaggaccagtgcatcagcagccagctggatgagctgctgtgcccccccaccaccgtggagggcagaaatgatgagaaggccctgctggagcagctggtgtccttcctgagcggcaaggatgaaacagagctggccgagctggaccgggccctgggcatcgacaagctggtgcagggcggcggcctggatgtgctgtctgagcgcttccccccccagcaggccaccccacccctcatcatggaggagcggcccaacctgtacagccagccctacagcagccccagccccacagccaacctgcccagccccttccagggcatggtgcggcagaagcccagcctgggcaccatgcctgtgcaggtgaccccacccaggggggccttcagccctggcatgggcatgcagccccggcagaccctgaacagacctcctgctgcccccaaccagctgcggctgcagctgcagcagaggctgcagggccagcagcagctgatccaccagaaccggcaggccatcctgaaccagtttgctgccacagcccctgtgggcatcaacatgaggagcggcatgcagcagcagatcaccccccagccccccctgaatgcccagatgctggcccagaggcagcgggagctgtacagccagcagcaccggcagaggcagctgatccagcagcagagggccatgctgatgaggcagcagagctttggaaacaacctgccccccagcagcggcctgcctgtgcagatgggcaacccccggctgccccagggcgccccccagcagttcccctacccacccaactacggcaccaaccctggcaccccaccagccagcaccagccccttcagccagctggccgccaaccctgaggccagcctggccaacagaaattccatggtgtcccggggcatgacaggcaacattggaggccagtttggaacaggcatcaacccccagatgcagcagaatgtgttccagtacccaggagctggcatggtgccccagggcgaggccaactttgcccccagcctgagccctggcagctccatggtgcccatgcccatccccccaccccagagcagcctgctgcagcagaccccaccagccagcggctaccagagcccagacatgaaggcctggcagcagggcgccatcggcaacaacaacgtgttcagccaggccgtgcagaaccagcccaccccagcccagcccggggtgtacaacaacatgagcatcaccgtgtccatggccggcggcaacaccaacgtgcagaacatgaaccccatgatggcccagatgcagatgagcagcctgcagatgcctggcatgaacacagtgtgcccagagcagatcaatgaccctgccctgcggcacacaggcctgtactgcaaccagctgagcagcacagacctgctgaagacagaagcagatggcacccaggacaagaagacagaggagttcttctctgtggtgaccacagactag

SEQ ID NO: 162283 - DNA, 4326 bp, synthetic construct
  misc_feature 1..4326: note = Description of Artificial Sequence: Synthetic coding sequence
  source 1..4326: mol_type = other DNA
atgagcggcctgggggacagcagcagtgaccctgccaacccagacagccacaagaggaagggcagcccctgtgacaccctggccagcagcacagagaagagaagaagagagcaggagaacaagtacctggaggagctggccgagctgctgagcgccaacatcagtgacatcgacagcctgtctgtgaagccagacaagtgcaagatcctgaagaagacagtggaccagatccagctgatgaagaggatggagcaggagaagagcaccacagatgatgatgtgcagaagagtgacatcagcagcagcagccagggcgtgattgagaaggagagcctgggccccctgctgctggaggccctggatggcttcttctttgtggtgaactgtgagggcagaattgtgtttgtgtctgaaaatgtgaccagctacctgggctacaaccaggaggagctgatgaacacctctgtgtacagcatcctgcacgtgggggaccacgccgagtttgtgaagaacctgctgcccaagagcctggtgaatggagtgccctggccccaggaggccaccaggaggaacagccacaccttcaactgcaggatgctgatccaccccccagatgagcctggaacagagaaccaggaggcctgccagagatatgaggtgatgcagtgcttcaccgtgtcccagcccaagagcatccaggaggatggagaggacttccagagctgcctgatctgcatcgcccggcggctgccccggcccccagccatcactggagtggagagcttcatgaccaagcaggacaccaccgggaagatcatcagcattgacaccagcagcctgcgggctgctggccgcacaggctgggaggacctggtgaggaagtgcatctatgccttcttccagccccagggccgggagcccagctatgcccggcagctgttccaggaggtgatgacccggggcacagccagcagccccagctaccgcttcatcctgaatgatggcaccatgctgagcgcccacaccaagtgcaagctgtgctacccccagagcccagacatgcagcccttcatcatgggcatccacatcatcgaccgggagcacagcggcctgagcccccaggatgacaccaacagcggcatgagcatcccccgggtgaaccccagcgtgaaccccagcatcagccctgcccacggcgtggcccggagcagcaccctgccccccagcaacagcaacatggtgtccacccgcatcaaccggcagcagagcagtgacctgcacagcagcagccacagcaacagcagcaacagccagggcagctttggctgcagccctggcagccagatcgtggccaacgtggccctgaaccagggccaggccagcagccagagcagcaaccccagcctgaacctgaacaacagccccatggagggcaccggcatcagcctggcccagttcatgagcccccggcggcaggtgaccagcggcctggccacccggcccaggatgcccaacaacagcttcccccccaacatcagcaccctgagcagccctgtgggcatgaccagcagcgcctgcaacaacaacaacagaagctacagcaacatccctgtgaccagcctgcagggcatgaatgaaggccccaacaacagcgtgggcttcagcgccagcagccctgtgctgcggcagatgagcagccagaacagccccagccggctgaacatccagcctgccaaggccgagagcaaggacaacaaggagatcgccagcatcctgaatgagatgatccagagcgacaacagcagcagtgatggcaagcccctggacagcggcctgctgcacaacaatgaccggctgagtgatggagacagcaagtacagccagaccagccacaagctggtgcagctgctgaccaccacagctgagcagcagctgcggcatgctgacatcgacaccagctgcaaggatgtgctgagctgcaccggcaccagcaacagcgccagcgccaacagcagcggcggcagctgccccagcagccacagcagcctgacagagcggcacaagatcctgcaccggctgctgcaggagggcagccccagcgacatcaccaccctgtctgtggagccagacaagaaggacagcgccagcacctctgtgtctgtgacaggccaggtgcagggcaacagcagcatcaagctggagctggatgccagcaagaagaaggagagcaaggaccaccagctgctgcgctacctgctggacaaggatgagaaggacctgcggagcacccccaacctgagcctggatgatgtgaaggtgaaggtggagaagaaggagcagatggacccctgcaacaccaaccccacccccatgaccaagcccaccccagaggagatcaagctggaggcccagagccagttcaccgctgacctggaccagtttgaccagctgctgcccaccctggagaaggccgcccagctgcccggcctgtgtgaaacagacaggatggatggagctgtgacctctgtgaccatcaagtctgagatcctgcctgccagcctgcagagcgccacagcccggcccaccagccggctgaaccggctgcctgagctggagctggaggccatcgacaaccagtttggccagcccggcactggagaccagatcccctggaccaacaacacagtgacagccatcaaccagagcaagtctgaggaccagtgcatcagcagccagctggatgagctgctgtgcccccccaccaccgtggagggcagaaatgatgagaaggccctgctggagcagctggtgtccttcctgagcggcaaggatgaaacagagctggccgagctggaccgggccctgggcatcgacaagctggtgcagggcggcggcctggatgtgctgtctgagcgcttccccccccagcaggccaccccacccctcatcatggaggagcggcccaacctgtacagccagccctacagcagccccagccccacagccaacctgcccagccccttccagggcatggtgcggcagaagcccagcctgggcaccatgcctgtgcaggtgaccccacccaggggggccttcagccctggcatgggcatgcagccccggcagaccctgaacagacctcctgctgcccccaaccagctgcggctgcagctgcagcagaggctgcagggccagcagcagctgatccaccagaaccggcaggccatcctgaaccagtttgctgccacagcccctgtgggcatcaacatgaggagcggcatgcagcagcagatcaccccccagccccccctgaatgcccagatgctggcccagaggcagcgggagctgtacagccagcagcaccggcagaggcagctgatccagcagcagagggccatgctgatgaggcagcagagctttggaaacaacctgccccccagcagcggcctgcctgtgcagatgggcaacccccggctgccccagggcgccccccagcagttcccctacccacccaactacggcaccaaccctggcaccccaccagccagcaccagccccttcagccagctggccgccaaccctgaggccagcctggccaacagaaattccatggtgtcccggggcatgacaggcaacattggaggccagtttggaacaggcatcaacccccagatgcagcagaatgtgttccagtacccaggagctggcatggtgccccagggcgaggccaactttgcccccagcctgagccctggcagctccatggtgcccatgcccatccccccaccccagagcagcctgctgcagcagaccccaccagccagcggctaccagagcccagacatgaaggcctggcagcagggcgccatcggcaacaacaacgtgttcagccaggccgtgcagaaccagcccaccccagcccagcccggggtgtacaacaacatgagcatcaccgtgtccatggccggcggcaacaccaacgtgcagaacatgaaccccatgatggcccagatgcagatgagcagcctgcagatgcctggcatgaacacagtgtgcccagagcagatcaatgaccctgccctgcggcacacaggcctgtactgcaaccagctgagcagcacagacctgctgaagacagaagcagatggcacccagcaggtgcagcaggtgcaggtgtttgctgatgtgcagtgcaccgtgaacctggtgggcggggacccctacctgaaccagcccggccccctgggcacccagaagcccaccagcggcccccagaccccccaggcccagcagaagagcctgctgcagcagctgctgacagaatag

SEQ ID NO: 162284 - DNA, 4323 bp, synthetic construct
  misc_feature 1..4323: note = Description of Artificial Sequence: Synthetic coding sequence
  source 1..4323: mol_type = other DNA
atgagcggcctgggggacagcagcagtgaccctgccaacccagacagccacaagaggaagggcagcccctgtgacaccctggccagcagcacagagaagagaagaagagagcaggagaacaagtacctggaggagctggccgagctgctgagcgccaacatcagtgacatcgacagcctgtctgtgaagccagacaagtgcaagatcctgaagaagacagtggaccagatccagctgatgaagaggatggagcaggagaagagcaccacagatgatgatgtgcagaagagtgacatcagcagcagcagccagggcgtgattgagaaggagagcctgggccccctgctgctggaggccctggatggcttcttctttgtggtgaactgtgagggcagaattgtgtttgtgtctgaaaatgtgaccagctacctgggctacaaccaggaggagctgatgaacacctctgtgtacagcatcctgcacgtgggggaccacgccgagtttgtgaagaacctgctgcccaagagcctggtgaatggagtgccctggccccaggaggccaccaggaggaacagccacaccttcaactgcaggatgctgatccaccccccagatgagcctggaacagagaaccaggaggcctgccagagatatgaggtgatgcagtgcttcaccgtgtcccagcccaagagcatccaggaggatggagaggacttccagagctgcctgatctgcatcgcccggcggctgccccggcccccagccatcactggagtggagagcttcatgaccaagcaggacaccaccgggaagatcatcagcattgacaccagcagcctgcgggctgctggccgcacaggctgggaggacctggtgaggaagtgcatctatgccttcttccagccccagggccgggagcccagctatgcccggcagctgttccaggaggtgatgacccggggcacagccagcagccccagctaccgcttcatcctgaatgatggcaccatgctgagcgcccacaccaagtgcaagctgtgctacccccagagcccagacatgcagcccttcatcatgggcatccacatcatcgaccgggagcacagcggcctgagcccccaggatgacaccaacagcggcatgagcatcccccgggtgaaccccagcgtgaaccccagcatcagccctgcccacggcgtggcccggagcagcaccctgccccccagcaacagcaacatggtgtccacccgcatcaaccggcagcagagcagtgacctgcacagcagcagccacagcaacagcagcaacagccagggcagctttggctgcagccctggcagccagatcgtggccaacgtggccctgaaccagggccaggccagcagccagagcagcaaccccagcctgaacctgaacaacagccccatggagggcaccggcatcagcctggcccagttcatgagcccccggcggcaggtgaccagcggcctggccacccggcccaggatgcccaacaacagcttcccccccaacatcagcaccctgagcagccctgtgggcatgaccagcagcgcctgcaacaacaacaacagaagctacagcaacatccctgtgaccagcctgcagggcatgaatgaaggccccaacaacagcgtgggcttcagcgccagcagccctgtgctgcggcagatgagcagccagaacagccccagccggctgaacatccagcctgccaaggccgagagcaaggacaacaaggagatcgccagcatcctgaatgagatgatccagagcgacaacagcagcagtgatggcaagcccctggacagcggcctgctgcacaacaatgaccggctgagtgatggagacagcaagtacagccagaccagccacaagctggtgcagctgctgaccaccacagctgagcagcagctgcggcatgctgacatcgacaccagctgcaaggatgtgctgagctgcaccggcaccagcaacagcgccagcgccaacagcagcggcggcagctgccccagcagccacagcagcctgacagagcggcacaagatcctgcaccggctgctgcaggagggcagccccagcgacatcaccaccctgtctgtggagccagacaagaaggacagcgccagcacctctgtgtctgtgacaggccaggtgcagggcaacagcagcatcaagctggagctggatgccagcaagaagaaggagagcaaggaccaccagctgctgcgctacctgctggacaaggatgagaaggacctgcggagcacccccaacctgagcctggatgatgtgaaggtgaaggtggagaagaaggagcagatggacccctgcaacaccaaccccacccccatgaccaagcccaccccagaggagatcaagctggaggcccagagccagttcaccgctgacctggaccagtttgaccagctgctgcccaccctggagaaggccgcccagctgcccggcctgtgtgaaacagacaggatggatggagctgtgacctctgtgaccatcaagtctgagatcctgcctgccagcctgcagagcgccacagcccggcccaccagccggctgaaccggctgcctgagctggagctggaggccatcgacaaccagtttggccagcccggcactggagaccagatcccctggaccaacaacacagtgacagccatcaaccagagcaagtctgaggaccagtgcatcagcagccagctggatgagctgctgtgcccccccaccaccgtggagggcagaaatgatgagaaggccctgctggagcagctggtgtccttcctgagcggcaaggatgaaacagagctggccgagctggaccgggccctgggcatcgacaagctggtgcagggcggcggcctggatgtgctgtctgagcgcttccccccccagcaggccaccccacccctcatcatggaggagcggcccaacctgtacagccagccctacagcagccccagccccacagccaacctgcccagccccttccagggcatggtgcggcagaagcccagcctgggcaccatgcctgtgcaggtgaccccacccaggggggccttcagccctggcatgggcatgcagccccggcagaccctgaacagacctcctgctgcccccaaccagctgcggctgcagctgcagcagaggctgcagggccagcagcagctgatccaccagaaccggcaggccatcctgaaccagtttgctgccacagcccctgtgggcatcaacatgaggagcggcatgcagcagcagatcaccccccagccccccctgaatgcccagatgctggcccagaggcagcgggagctgtacagccagcagcaccggcagaggcagctgatccagcagcagagggccatgctgatgaggcagcagagctttggaaacaacctgccccccagcagcggcctgcctgtgcagatgggcaacccccggctgccccagggcgccccccagcagttcccctacccacccaactacggcaccaaccctggcaccccaccagccagcaccagccccttcagccagctggccgccaaccctgaggccagcctggccaacagaaattccatggtgtcccggggcatgacaggcaacattggaggccagtttggaacaggcatcaacccccagatgcagcagaatgtgttccagtacccaggagctggcatggtgccccagggcgaggccaactttgcccccagcctgagccctggcagctccatggtgcccatgcccatccccccaccccagagcagcctgctgcagcagaccccaccagccagcggctaccagagcccagacatgaaggcctggcagcagggcgccatcggcaacaacaacgtgttcagccaggccgtgcagaaccagcccaccccagcccagcccggggtgtacaacaacatgagcatcaccgtgtccatggccggcggcaacaccaacgtgcagaacatgaaccccatgatggcccagatgcagatgagcagcctgcagatgcctggcatgaacacagtgtgcccagagcagatcaatgaccctgccctgcggcacacaggcctgtactgcaaccagctgagcagcacagacctgctgaagacagaagcagatggcacccaggtgcagcaggtgcaggtgtttgctgatgtgcagtgcaccgtgaacctggtgggcggggacccctacctgaaccagcccggccccctgggcacccagaagcccaccagcggcccccagaccccccaggcccagcagaagagcctgctgcagcagctgctgacagaatag

SEQ ID NO: 162285 - DNA, 4200 bp, synthetic construct; identical to SEQ ID NO: 162282
  misc_feature 1..4200: note = Description of Artificial Sequence: Synthetic coding sequence
  source 1..4200: mol_type = other DNA

SEQ ID NO: 162286 - DNA, 4326 bp, synthetic construct; identical to SEQ ID NO: 162283
  misc_feature 1..4326: note = Description of Artificial Sequence: Synthetic coding sequence
  source 1..4326: mol_type = other DNA

SEQ ID NO: 162287 - DNA, 4200 bp, synthetic construct; identical to SEQ ID NO: 162282
  misc_feature 1..4200: note = Description of Artificial Sequence: Synthetic coding sequence
  source 1..4200: mol_type = other DNA

SEQ ID NO: 162288 - DNA, 1659 bp, synthetic construct
  misc_feature 1..1659: note = Description of Artificial Sequence: Synthetic coding sequence
  source 1..1659: mol_type = other DNA
atgcagctgacagctgagaacagccctgtgacccctgtgggcgcccagaagacagccctgcgcatcagccagagcaggatgattggcaacagcgccagccggcccaccatgcccagcggggagtgggccccccagagcagcgctgtgcgggtgacctgtgccgccaccaccagcgccatgaacagacctgtgcagggcggcatgatccggaacccagctgccagcatccccatgaggcccagcagccagcccggccagaggcagaccctgcagagccaggtgatgaacatcggccccagcgagctggagatgaacatgggcggcccccagtacagccagcagcaggccccacccaaccagacagccccctggccagagagcatcctgcccatcgaccaggccagctttgccagccagaaccggcagcccttcggcagcagcccagatgacctgctgtgcccccaccctgctgctgagagccccagtgatgaaggagccctgctggaccagctgtacctggccctgaggaactttgatggcctggaggagattgaccgggccctgggcatccctgagctggtgtcccagagccaggccgtggaccctgagcagttcagcagccaggacagcaacatcatgctggagcagaaggcccctgtgttcccccagcagtatgccagccaggcccagatggcccagggcagctacagccccatgcaggaccccaacttccacaccatgggccagaggcccagctatgccaccctgaggatgcagccccggcccggcctgcggcccaccggcctggtgcagaaccagcccaaccagctgcggctgcagctgcagcaccggctgcaggcccagcagaaccggcagcccctgatgaaccagatcagcaatgtgtccaatgtgaacctgaccctgcggcctggggtgcccacccaggcccccatcaatgcccagatgctggcccagaggcagcgggagatcctgaaccagcacctgcggcagaggcagatgcaccagcagcagcaggtgcagcagaggaccctgatgatgaggggccagggcctgaacatgacccccagcatggtggcccccagcggcatgcctgccaccatgagcaacccccgcatcccccaggccaatgcccagcagttccccttcccccccaactacggcatcagccagcagcctgaccccggcttcaccggggccaccaccccccagagccccctgatgagccccaggatggcccacacccagagccccatgatgcagcagagccaggccaacccagcctaccaggcccccagcgacatcaatggctgggcccagggcaacatgggcggcaacagcatgttcagccagcagagccccccccacttcggccagcaggccaacacctccatgtacagcaacaacatgaacatcaacgtgtccatggccaccaacacaggaggcatgagctccatgaaccagatgacaggccagatctccatgacctctgtgacctctgtgcccaccagcggcctgagctccatgggccctgagcaggtgaatgaccctgccctgcggggcggcaacctcttccccaaccagctgcccggcatggacatgatcaagcaggagggggacaccaccaggaagtactgctag

SEQ ID NO: 162289 - DNA, 4395 bp, synthetic construct
  misc_feature 1..4395: note = Description of Artificial Sequence: Synthetic coding sequence
  source 1..4395: mol_type = other DNA
atgagcggcatgggagagaacaccagtgaccccagcagagctgagaccaggaagaggaaagaatgtcctgaccagctgggccccagccccaagaggaacacagagaagaggaaccgggagcaggagaacaagtacatcgaggagctggccgagctgatctttgccaacttcaatgacatcgacaacttcaacttcaagccagacaagtgtgccatcctgaaggagaccgtgaagcagatccggcagatcaaggagcaggagaaggctgctgctgccaacattgatgaggtgcagaagagtgatgtgagcagcacaggccagggcgtcatcgacaaggatgccctgggccccatgatgctggaggccctggatggcttcttctttgtggtgaacctggagggcaatgtggtgtttgtgtctgaaaatgtgacccagtacctgcgctacaaccaggaggagctgatgaacaagtctgtgtacagcatcctgcacgtgggggaccacacagaatttgtgaagaacctgctgcccaagagcatcgtgaatggaggctcctggagcggggagccccccaggaggaacagccacaccttcaactgcaggatgctggtgaagcccctgcctgacagcgaggaggagggccatgacaaccaggaggcccaccagaagtatgagaccatgcagtgctttgctgtgtcccagcccaagagcatcaaggaggagggggaggacctgcagagctgcctgatctgtgtggcccggcgggtgcccatgaaggagaggcctgtgctgcccagcagcgagagcttcaccacccggcaggacctgcagggcaagatcaccagcctggacaccagcaccatgagagctgccatgaagccaggctgggaggacctggtgcggcgctgcatccagaagttccacgcccagcatgaaggagagagcgtgtcctatgccaagaggcaccaccacgaggtgctgcggcagggcctggccttcagccagatctaccgcttcagcctgagtgatggcaccctggtggccgcccagaccaagagcaagctgatccgcagccagaccaccaatgagccccagctggtgatcagcctgcacatgctgcaccgggagcagaatgtgtgtgtgatgaacccagacctgaccggccagaccatgggcaagcccctgaaccccatcagcagcaacagccctgcccaccaggccctgtgcagcggcaaccctggccaggacatgaccctgagcagcaacatcaacttccccatcaatggccccaaggagcagatgggcatgcccatgggccgctttggaggcagcggcggcatgaaccacgtgtctggcatgcaggccaccaccccccagggcagcaactatgccctgaagatgaacagccccagccagagcagccctggcatgaaccctggccagcccacctccatgctgagccccaggcacaggatgagccctggggtggccggcagcccccgcatcccccccagccagttctccccagctggcagcctgcacagccctgtgggcgtgtgcagcagcactggaaacagccacagctacaccaacagcagcctgaatgccctgcaggccctgtctgagggccacggcgtgtccctgggcagcagcctggccagcccagacctgaagatgggcaacctgcagaacagccctgtgaacatgaaccccccacccctgagcaagatgggcagcctggacagcaaggactgcttcggcctgtatggagagcccagcgagggcaccaccggccaggccgagagcagctgccaccctggagagcagaaggagaccaatgaccccaacctgcccccagctgtgtcctctgagcgggcagatggccagagccggctgcatgacagcaagggccagaccaagctgctgcagctgctgaccaccaagagtgaccagatggagcccagccccctggccagcagcctgagtgacaccaacaaggacagcacaggcagcctgcccggcagcggcagcacccacggcaccagcctgaaggagaagcacaagatcctgcaccggctgctgcaggacagcagcagccctgtggacctggccaagctgacagctgaggccaccgggaaggacctgagccaggagagcagcagcacagcccctggcagcgaggtgaccatcaagcaggagcctgtgagccccaagaagaaggaaaatgccctgctgcgctacctgctggacaaggatgacaccaaggacatcggcctgcctgagatcacccccaagctggagcggctggacagcaagacagatcctgccagcaacaccaagctgattgccatgaagacagagaaggaggagatgagctttgagcccggggaccagcccggcagcgagctggacaacctggaggagatcctggatgacctgcagaacagccagctgccccagctgttcccagacaccaggcctggggccccagctggctctgtggacaagcaggccatcatcaatgacctgatgcagctgacagctgagaacagccctgtgacccctgtgggcgcccagaagacagccctgcgcatcagccagagcaccttcaacaaccccaggcctggccagctgggccgcctgctgcccaaccagaacctgcccctggacatcaccctgcagagccccactggagctggccccttcccccccatccggaacagcagcccctacagcgtcatcccccagcccggcatgatgggcaaccagggcatgattggcaaccagggcaacctgggcaacagcagcacaggcatgattggcaacagcgccagccggcccaccatgcccagcggggagtgggccccccagagcagcgctgtgcgggtgacctgtgccgccaccaccagcgccatgaacagacctgtgcagggcggcatgatccggaacccagctgccagcatccccatgaggcccagcagccagcccggccagaggcagaccctgcagagccaggtgatgaacatcggccccagcgagctggagatgaacatgggcggcccccagtacagccagcagcaggccccacccaaccagacagccccctggccagagagcatcctgcccatcgaccaggccagctttgccagccagaaccggcagcccttcggcagcagcccagatgacctgctgtgcccccaccctgctgctgagagccccagtgatgaaggagccctgctggaccagctgtacctggccctgaggaactttgatggcctggaggagattgaccgggccctgggcatccctgagctggtgtcccagagccaggccgtggaccctgagcagttcagcagccaggacagcaacatcatgctggagcagaaggcccctgtgttcccccagcagtatgccagccaggcccagatggcccagggcagctacagccccatgcaggaccccaacttccacaccatgggccagaggcccagctatgccaccctgaggatgcagccccggcccggcctgcggcccaccggcctggtgcagaaccagcccaaccagctgcggctgcagctgcagcaccggctgcaggcccagcagaaccggcagcccctgatgaaccagatcagcaatgtgtccaatgtgaacctgaccctgcggcctggggtgcccacccaggcccccatcaatgcccagatgctggcccagaggcagcgggagatcctgaaccagcacctgcggcagaggcagatgcaccagcagcagcaggtgcagcagaggaccctgatgatgaggggccagggcctgaacatgacccccagcatggtggcccccagcggcatgcctgccaccatgagcaacccccgcatcccccaggccaatgcccagcagttccccttcccccccaactacggcatcagccagcagcctgaccccggcttcaccggggccaccaccccccagagccccctgatgagccccaggatggcccacacccagagccccatgatgcagcagagccaggccaacccagcctaccaggcccccagcgacatcaatggctgggcccagggcaacatgggcggcaacagcatgttcagccagcagagccccccccacttcggccagcaggccaacacctccatgtacagcaacaacatgaacatcaacgtgtccatggccaccaacacaggaggcatgagctccatgaaccagatgacaggccagatctccatgacctctgtgacctctgtgcccaccagcggcctgagctccatgggccctgagcaggtgaatgaccctgccctgcggggcggcaacctcttccccaaccagctgcccggcatggacatgatcaagcaggagggggacaccaccaggaagtactgctag

SEQ ID NO: 162290 - DNA, 51 bp, synthetic construct
  misc_feature 1..51: note = Description of Artificial Sequence: Synthetic coding sequence
  source 1..51: mol_type = other DNA
atgagcggcatgggagagaacaccagtgaccccagcagagctgagacctag

SEQ ID NO: 162291 - DNA, 27 bp, synthetic construct
  misc_feature 1..27: note = Description of Artificial Sequence: Synthetic coding sequence
  source 1..27: mol_type = other DNA
atgagcggcatgggagagaacacctag

SEQ ID NO: 162292 - DNA, 4263 bp, synthetic construct
  misc_feature 1..4263: note = Description of Artificial Sequence: Synthetic coding sequence
  source 1..4263: mol_type = other DNA
atgagcggcctgggggagaacctggaccccctggccagtgacagcaggaagaggaagctgccctgtgacaccccaggccagggcctgacctgcagcggggagaagagaagaagagagcaggagagcaagtacatcgaggagctggccgagctgatcagcgccaacctgagtgacatcgacaacttcaacgtgaagccagacaagtgtgccatcctgaaggagaccgtgcggcagatccggcagatcaaggagcagggcaagaccatcagcaatgatgatgatgtgcagaaggcagatgtgagcagcacaggccagggcgtcatcgacaaggacagcctgggccccctgctgctgcaggccctggatggcttcctgtttgtggtgaacagagatggcaacatcgtgtttgtgtctgaaaatgtgacccagtacctgcagtacaagcaggaggacctggtgaacacctctgtgtacaacatcctgcacgaggaggacaggaaggacttcctgaagaacctgcccaagagcacagtgaatggagtgtcctggaccaatgagacccagaggcagaagagccacaccttcaactgcaggatgctgatgaagacccctcatgacatcctggaggacatcaatgccagccctgagatgaggcagagatatgagaccatgcagtgctttgccctgagccagccccgggccatgatggaggagggggaggacctgcagagctgcatgatctgtgtggcccggcgcatcaccactggagagaggaccttccccagcaaccctgagagcttcatcaccaggcatgacctgagcggcaaggtggtgaacatcgacaccaacagcctgcggagctccatgaggcctggctttgaggacatcatccgccgctgcatccagcgcttcttcagcctgaatgatggccagagctggagccagaagaggcactaccaggaggcctacctgaatggacatgctgagacccctgtgtaccgcttcagcctggctgatggcaccatcgtgacagcccagaccaagagcaagctgttcagaaatcctgtgaccaatgacagacatggctttgtgtccacccacttcctgcagcgggagcagaatggctaccggcccaaccccaaccctgtgggccagggcatccggccccccatggccggctgcaacagctctgtgggcggcatgtccatgagccccaaccagggcctgcagatgcccagcagccgggcctacggcctggccgaccccagcaccaccggccagatgtctggggcccgctatggaggcagcagcaacatcgccagcctgaccccaggccctggcatgcagagccccagcagctaccagaacaacaactacggcctgaacatgagcagccccccccacggcagccctggcctggcccccaaccagcagaacatcatgatcagccccaggaacagaggcagccccaagatcgccagccaccagttcagccctgtggccggcgtgcacagccccatggccagcagcggcaacacaggcaaccacagcttcagcagcagcagcctgagcgccctgcaggccatcagcgagggcgtgggcaccagcctgctgagcaccctgagcagccctggccccaagctggacaacagccccaacatgaacatcacccagcccagcaaggtgagcaaccaggacagcaagagccccctgggcttctactgtgaccagaaccctgtggagagctccatgtgccagagcaacagccgggaccacctgagtgacaaggagagcaaggagagctctgtggagggcgctgagaaccagaggggccccctggagagcaagggccacaagaagctgctgcagctgctgacctgcagcagtgatgaccggggccacagcagcctgaccaacagccccctggacagcagctgcaaggagagctctgtgtctgtgaccagccccagcggcgtgagcagcagcaccagcggcggcgtgagcagcaccagcaacatgcacggcagcctgctgcaggagaagcaccgcatcctgcacaagctgctgcagaatggaaacagccctgctgaggtggccaagatcacagctgaggccaccgggaaggacaccagcagcatcaccagctgtggagatggaaatgtggtgaagcaggagcagctgagccccaagaagaaggaaaataatgccctgctgcgctacctgctggacagagatgaccccagtgatgccctgagcaaggagctgcagccccaggtggagggcgtggacaacaagatgagccagtgcaccagcagcaccatccccagcagcagccaggagaaggaccccaagatcaagacagagaccagcgaggagggcagcggggacctggacaacctggatgccatcctgggggacctgaccagcagtgacttctacaacaacagcatcagcagcaatggcagccacctgggcaccaagcagcaggtgttccagggcaccaacagcctgggcctgaagagcagccagagcgtgcagagcatccggcccccctacaacagagctgtgtccctggacagccctgtgtctgtgggcagcagcccccctgtgaagaacatcagcgccttccccatgctgcccaagcagcccatgctgggcggcaaccccaggatgatggacagccaggagaactacggcagctccatgggcggccccaacagaaatgtgacagtgacccagacccccagcagcggggactggggcctgcccaacagcaaggccggccgcatggagcccatgaacagcaacagcatgggccggcctggaggagactacaacaccagcctgcccaggcctgccctgggcggcagcatccccaccctgcccctgcggagcaacagcatccctggggcccggcctgtgctgcagcagcagcagcagatgctgcagatgaggcctggagagatccccatgggcatgggcgccaacccctacggccaggccgccgccagcaaccagctgggctcctggccagatggcatgctgtccatggagcaggtgagccacggcacccagaaccggcccctgctgaggaacagcctggatgacctggtgggcccccccagcaacctggagggccagagtgatgagcgggccctgctggaccagctgcacaccctgctgagcaacacagatgccaccggcctggaggagattgaccgggccctgggcatccctgagctggtgaaccagggccaggccctggagcccaagcaggatgccttccagggccaggaggccgctgtgatgatggaccagaaggccggcctgtatggccagacctacccagcccagggcccccccatgcagggcggcttccacctgcagggccagagccccagcttcaacagcatgatgaaccagatgaaccagcagggcaacttccccctgcagggcatgcacccccgggccaacatcatgaggcccaggaccaacacccccaagcagctgaggatgcagctgcagcagaggctgcagggccagcagttcctgaaccagagccggcaggccctggagctgaagatggagaaccccacagctgggggcgctgctgtgatgaggcccatgatgcagccccagcagggcttcctgaatgcccagatggtggcccagaggagccgggagctgctgagccaccacttccggcagcagagggtggccatgatgatgcagcagcagcagcagcagcagcagcagcagcagcagcagcagcagcagcagcagcagcagcagcagcagcagcagcagcagcagcagacccaggccttcagccccccaccaaatgtgacagccagccccagcatggatggcctgctggccggccccaccatgccccaggccccaccccagcagttcccctaccagcccaactacggcatgggccagcagcctgaccctgccttcggccgggtgagcagccccccaaatgccatgatgagcagcaggatgggccccagccagaaccccatgatgcagcacccccaggccgccagcatctaccagagcagcgagatgaagggctggcccagcggcaacctggccaggaacagcagcttcagccagcagcagtttgcccaccagggcaacccagctgtgtacagcatggtgcacatgaatggcagcagcggccacatgggccagatgaacatgaaccccatgcccatgagcggcatgcccatgggccctgaccagaagtactgctag

SEQ ID NO: 162293 - DNA, 4053 bp, synthetic construct
  misc_feature 1..4053: note = Description of Artificial Sequence: Synthetic coding sequence
  source 1..4053: mol_type = other DNA
atgagcggcctgggggagaacctggaccccctggccagtgacagcaggaagaggaagctgccctgtgacaccccaggccagggcctgacctgcagcggggagaagagaagaagagagcaggagagcaagtacatcgaggagctggccgagctgatcagcgccaacctgagtgacatcgacaacttcaacgtgaagccagacaagtgtgccatcctgaaggagaccgtgcggcagatccggcagatcaaggagcagggcaagaccatcagcaatgatgatgatgtgcagaaggcagatgtgagcagcacaggccagggcgtcatcgacaaggacagcctgggccccctgctgctgcaggccctggatggcttcctgtttgtggtgaacagagatggcaacatcgtgtttgtgtctgaaaatgtgacccagtacctgcagtacaagcaggaggacctggtgaacacctctgtgtacaacatcctgcacgaggaggacaggaaggacttcctgaagaacctgcccaagagcacagtgaatggagtgtcctggaccaatgagacccagaggcagaagagccacaccttcaactgcaggatgctgatgaagacccctcatgacatcctggaggacatcaatgccagccctgagatgaggcagagatatgagaccatgcagtgctttgccctgagccagccccgggccatgatggaggagggggaggacctgcagagctgcatgatctgtgtggcccggcgcatcaccactggagagaggaccttccccagcaaccctgagagcttcatcaccaggcatgacctgagcggcaaggtggtgaacatcgacaccaacagcctgcggagctccatgaggcctggctttgaggacatcatccgccgctgcatccagcgcttcttcagcctgaatgatggccagagctggagccagaagaggcactaccaggaggtgaccagtgatggcatcttcagccccacagcctacctgaatggacatgctgagacccctgtgtaccgcttcagcctggctgatggcaccatcgtgacagcccagaccaagagcaagctgttcagaaatcctgtgaccaatgacagacatggctttgtgtccacccacttcctgcagcgggagcagaatggctaccggcccaaccccaaccctgtgggccagggcatccggccccccatggccggctgcaacagctctgtgggcggcatgtccatgagccccaaccagggcctgcagatgcccagcagccgggcctacggcctggccgaccccagcaccaccggccagatgtctggggcccgctatggaggcagcagcaacatcgccagcctgaccccaggccctggcatgcagagccccagcagctaccagaacaacaactacggcctgaacatgagcagccccccccacggcagccctggcctggcccccaaccagcagaacatcatgatcagccccaggaacagaggcagccccaagatcgccagccaccagttcagccctgtggccggcgtgcacagccccatggccagcagcggcaacacaggcaaccacagcttcagcagcagcagcctgagcgccctgcaggccatcagcgagggcgtgggcaccagcctgctgagcaccctgagcagccctggccccaagctggacaacagccccaacatgaacatcacccagcccagcaaggtgagcaaccaggacagcaagagccccctgggcttctactgtgaccagaaccctgtggagagctccatgtgccagagcaacagccgggaccacctgagtgacaaggagagcaaggagagctctgtggagggcgctgagaaccagaggggccccctggagagcaagggccacaagaagctgctgcagctgctgacctgcagcagtgatgaccggggccacagcagcctgaccaacagccccctggacagcagctgcaaggagagctctgtgtctgtgaccagccccagcggcgtgagcagcagcaccagcggcggcgtgagcagcaccagcaacatgcacggcagcctgctgcaggagaagcaccgcatcctgcacaagctgctgcagaatggaaacagccctgctgaggtggccaagatcacagctgaggccaccgggaaggacaccagcagcatcaccagctgtggagatggaaatgtggtgaagcaggagcagctgagccccaagaagaaggaaaataatgccctgctgcgctacctgctggacagagatgaccccagtgatgccctgagcaaggagctgcagccccaggtggagggcgtggacaacaagatgagccagtgcaccagcagcaccatccccagcagcagccaggagaaggaccccaagatcaagacagagaccagcgaggagggcagcggggacctggacaacctggatgccatcctgggggacctgaccagcagtgacttctacaacaacagcatcagcagcaatggcagccacctgggcaccaagcagcaggtgttccagggcaccaacagcctgggggactggggcctgcccaacagcaaggccggccgcatggagcccatgaacagcaacagcatgggccggcctggaggagactacaacaccagcctgcccaggcctgccctgggcggcagcatccccaccctgcccctgcggagcaacagcatccctggggcccggcctgtgctgcagcagcagcagcagatgctgcagatgaggcctggagagatccccatgggcatgggcgccaacccctacggccaggccgccgccagcaaccagctgggctcctggccagatggcatgctgtccatggagcaggtgagccacggcacccagaaccggcccctgctgaggaacagcctggatgacctggtgggcccccccagcaacctggagggccagagtgatgagcgggccctgctggaccagctgcacaccctgctgagcaacacagatgccaccggcctggaggagattgaccgggccctgggcatccctgagctggtgaaccagggccaggccctggagcccaagcaggatgccttccagggccaggaggccgctgtgatgatggaccagaaggccggcctgtatggccagacctacccagcccagggcccccccatgcagggcggcttccacctgcagggccagagccccagcttcaacagcatgatgaaccagatgaaccagcagggcaacttccccctgcagggcatgcacccccgggccaacatcatgaggcccaggaccaacacccccaagcagctgaggatgcagctgcagcagaggctgcagggccagcagttcctgaaccagagccggcaggccctggagctgaagatggagaaccccacagctgggggcgctgctgtgatgaggcccatgatgcagccccagcagggcttcctgaatgcccagatggtggcccagaggagccgggagctgctgagccaccacttccggcagcagagggtggccatgatgatgcagcagcagcagcagcagcagcagcagcagcagcagcagcagcagcagcagcagcagcagcagcagcagcagcagcagcagcagcagacccaggccttcagccccccaccaaatgtgacagccagccccagcatggatggcctgctggccggccccaccatgccccaggccccaccccagcagttcccctaccagcccaactacggcatgggccagcagcctgaccctgccttcggccgggtgagcagccccccaaatgccatgatgagcagcaggatgggccccagccagaaccccatgatgcagcacccccaggccgccagcatctaccagagcagcgagatgaagggctggcccagcggcaacctggccaggaacagcagcttcagccagcagcagtttgcccaccagggcaacccagctgtgtacagcatggtgcacatgaatggcagcagcggccacatgggccagatgaacatgaaccccatgcccatgagcggcatgcccatgggccctgaccagaagtactgctag

SEQ ID NO: 162294 - DNA, 4248 bp, synthetic construct
  misc_feature 1..4248: note = Description of Artificial Sequence: Synthetic coding sequence
  source 1..4248: mol_type = other DNA
atgagcggcctgggggagaacctggaccccctggccagtgacagcaggaagaggaagctgccctgtgacaccccaggccagggcctgacctgcagcggggagaagagaagaagagagcaggagagcaagtacatcgaggagctggccgagctgatcagcgccaacctgagtgacatcgacaacttcaacgtgaagccagacaagtgtgccatcctgaaggagaccgtgcggcagatccggcagatcaaggagcagggcaagaccatcagcaatgatgatgatgtgcagaaggcagatgtgagcagcacaggccagggcgtcatcgacaaggacagcctgggccccctgctgctgcaggccctggatggcttcctgtttgtggtgaacagagatggcaacatcgtgtttgtgtctgaaaatgtgacccagtacctgcagtacaagcaggaggacctggtgaacacctctgtgtacaacatcctgcacgaggaggacaggaaggacttcctgaagaacctgcccaagagcacagtgaatggagtgtcctggaccaatgagacccagaggcagaagagccacaccttcaactgcaggatgctgatgaagacccctcatgacatcctggaggacatcaatgccagccctgagatgaggcagagatatgagaccatgcagtgctttgccctgagccagccccgggccatgatggaggagggggaggacctgcagagctgcatgatctgtgtggcccggcgcatcaccactggagagaggaccttccccagcaaccctgagagcttcatcaccaggcatgacctgagcggcaaggtggtgaacatcgacaccaacagcctgcggagctccatgaggcctggctttgaggacatcatccgccgctgcatccagcgcttcttcagcctgaatgatggccagagctggagccagaagaggcactaccaggaggtgaccagtgatggcatcttcagccccacagcctacctgaatggacatgctgagacccctgtgtaccgcttcagcctggctgatggcaccatcgtgacagcccagaccaagagcaagctgttcagaaatcctgtgaccaatgacagacatggctttgtgtccacccacttcctgcagcgggagcagaatggctaccggcccaaccccaaccctgtgggccagggcatccggccccccatggccggctgcaacagctctgtgggcggcatgtccatgagccccaaccagggcctgcagatgcccagcagccgggcctacggcctggccgaccccagcaccaccggccagatgtctggggcccgctatggaggcagcagcaacatcgccagcctgaccccaggccctggcatgcagagccccagcagctaccagaacaacaactacggcctgaacatgagcagccccccccacggcagccctggcctggcccccaaccagcagaacatcatgatcagccccaggaacagaggcagccccaagatcgccagccaccagttcagccctgtggccggcgtgcacagccccatggccagcagcggcaacacaggcaaccacagcttcagcagcagcagcctgagcgccctgcaggccatcagcgagggcgtgggcaccagcctgctgagcaccctgagcagccctggccccaagctggacaacagccccaacatgaacatcacccagcccagcaaggtgagcaaccaggacagcaagagccccctgggcttctactgtgaccagaaccctgtggagagctccatgtgccagagcaacagccgggaccacctgagtgacaaggagagcaaggagagctctgtggagggcgctgagaaccagaggggccccctggagagcaagggccacaagaagctgctgcagctgctgacctgcagcagtgatgaccggggccacagcagcctgaccaacagccccctggacagcagctgcaaggagagctctgtgtctgtgaccagccccagcggcgtgagcagcagcaccagcggcggcgtgagcagcaccagcaacatgcacggcagcctgctgcaggagaagcaccgcatcctgcacaagctgctgcagaatggaaacagccctgctgaggtggccaagatcacagctgaggccaccgggaaggacaccagcagcatcaccagctgtggagatggaaatgtggtgaagcaggagcagctgagccccaagaagaaggaaaataatgccctgctgcgctacctgctggacagagatgaccccagtgatgccctgagcaaggagctgcagccccaggtggagggcgtggacaacaagatgagccagtgcaccagcagcaccatccccagcagcagccaggagaaggaccccaagatcaagacagagaccagcgaggagggcagcggggacctggacaacctggatgccatcctgggggacctgaccagcagtgacttctacaacaacagcatcagcagcaatggcagccacctgggcaccaagcagcaggtgttccagggcaccaacagcctgggcctgaagagcagccagagcgtgcagagcatccggcccccctacaacagagctgtgtccctggacagccctgtgtctgtgggcagcagcccccctgtgaagaacatcagcgccttccccatgctgcccaagcagcccatgctgggcggcaaccccaggatgatggacagccaggagaactacggcagctccatgggagactggggcctgcccaacagcaaggccggccgcatggagcccatgaacagcaacagcatgggccggcctggaggagactacaacaccagcctgcccaggcctgccctgggcggcagcatccccaccctgcccctgcggagcaacagcatccctggggcccggcctgtgctgcagcagcagcagcagatgctgcagatgaggcctggagagatccccatgggcatgggcgccaacccctacggccaggccgccgccagcaaccagctgggctcctggccagatggcatgctgtccatggagcaggtgagccacggcacccagaaccggcccctgctgaggaacagcctggatgacctggtgggcccccccagcaacctggagggccagagtgatgagcgggccctgctggaccagctgcacaccctgctgagcaacacagatgccaccggcctggaggagattgaccgggccctgggcatccctgagctggtgaaccagggccaggccctggagcccaagcaggatgccttccagggccaggaggccgctgtgatgatggaccagaaggccggcctgtatggccagacctacccagcccagggcccccccatgcagggcggcttccacctgcagggccagagccccagcttcaacagcatgatgaaccagatgaaccagcagggcaacttccccctgcagggcatgcacccccgggccaacatcatgaggcccaggaccaacacccccaagcagctgaggatgcagctgcagcagaggctgcagggccagcagttcctgaaccagagccggcaggccctggagctgaagatggagaaccccacagctggaggagctgctgtgatgaggcccatgatgcagccccagcagggcttcctgaatgcccagatggtggcccagaggagccgggagctgctgagccaccacttccggcagcagagggtggccatgatgatgcagcagcagcagcagcagcagcagcagcagcagcagcagcagcagcagcagcagcagcagcagcagcagcagcagcagcagcagcagacccaggccttcagccccccacccaacgtgacagccagccccagcatggatggcctgctggccggccccaccatgccccaggccccaccccagcagttcccctaccagcccaactacggcatgggccagcagcctgaccctgccttcggccgggtgagcagccccccaaatgccatgatgagcagcaggatgggccccagccagaaccccatgatgcagcacccccaggccgccagcatctaccagagcagcgagatgaagggctggcccagcggcaacctggccaggaacagcagcttcagccagcagcagtttgcccaccagggcaacccagctgtgtacagcatggtgcacatgaatggcagcagcggccacatgggccagatgaacatgaaccccatgcccatgagcggcatgcccatgggccctgaccagaagtactgctag

SEQ ID NO: 162295 - DNA, 4275 bp, synthetic construct
  misc_feature 1..4275: note = Description of Artificial Sequence: Synthetic coding sequence
  source 1..4275: mol_type = other DNA
atgagcggcctgggggagaacctggaccccctggccagtgacagcaggaagaggaagctgccctgtgacaccccaggccagggcctgacctgcagcggggagaagagaagaagagagcaggagagcaagtacatcgaggagctggccgagctgatcagcgccaacctgagtgacatcgacaacttcaacgtgaagccagacaagtgtgccatcctgaaggagaccgtgcggcagatccggcagatcaaggagcagggcaagaccatcagcaatgatgatgatgtgcagaaggcagatgtgagcagcacaggccagggcgtcatcgacaaggacagcctgggccccctgctgctgcaggccctggatggcttcctgtttgtggtgaacagagatggcaacatcgtgtttgtgtctgaaaatgtgacccagtacctgcagtacaagcaggaggacctggtgaacacctctgtgtacaacatcctgcacgaggaggacaggaaggacttcctgaagaacctgcccaagagcacagtgaatggagtgtcctggaccaatgagacccagaggcagaagagccacaccttcaactgcaggatgctgatgaagacccctcatgacatcctggaggacatcaatgccagccctgagatgaggcagagatatgagaccatgcagtgctttgccctgagccagccccgggccatgatggaggagggggaggacctgcagagctgcatgatctgtgtggcccggcgcatcaccactggagagaggaccttccccagcaaccctgagagcttcatcaccaggcatgacctgagcggcaaggtggtgaacatcgacaccaacagcctgcggagctccatgaggcctggctttgaggacatcatccgccgctgcatccagcgcttcttcagcctgaatgatggccagagctggagccagaagaggcactaccaggaggcctacctgaatggacatgctgagacccctgtgtaccgcttcagcctggctgatggcaccatcgtgacagcccagaccaagagcaagctgttcagaaatcctgtgaccaatgacagacatggctttgtgtccacccacttcctgcagcgggagcagaatggctaccggcccaaccccaaccctgtgggccagggcatccggccccccatggccggctgcaacagctctgtgggcggcatgtccatgagccccaaccagggcctgcagatgcccagcagccgggcctacggcctggccgaccccagcaccaccggccagatgtctggggcccgctatggaggcagcagcaacatcgccagcctgaccccaggccctggcatgcagagccccagcagctaccagaacaacaactacggcctgaacatgagcagccccccccacggcagccctggcctggcccccaaccagcagaacatcatgatcagccccaggaacagaggcagccccaagatcgccagccaccagttcagccctgtggccggcgtgcacagccccatggccagcagcggcaacacaggcaaccacagcttcagcagcagcagcctgagcgccctgcaggccatcagcgagggcgtgggcaccagcctgctgagcaccctgagcagccctggccccaagctggacaacagccccaacatgaacatcacccagcccagcaaggtgagcaaccaggacagcaagagccccctgggcttctactgtgaccagaaccctgtggagagctccatgtgccagagcaacagccgggaccacctgagtgacaaggagagcaaggagagctctgtggagggcgctgagaaccagaggggccccctggagagcaagggccacaagaagctgctgcagctgctgacctgcagcagtgatgaccggggccacagcagcctgaccaacagccccctggacagcagctgcaaggagagctctgtgtctgtgaccagccccagcggcgtgagcagcagcaccagcggcggcgtgagcagcaccagcaacatgcacggcagcctgctgcaggagaagcaccgcatcctgcacaagctgctgcagaatggaaacagccctgctgaggtggccaagatcacagctgaggccaccgggaaggacaccagcagcatcaccagctgtggagatggaaatgtggtgaagcaggagcagctgagccccaagaagaaggaaaataatgccctgctgcgctacctgctggacagagatgaccccagtgatgccctgagcaaggagctgcagccccaggtggagggcgtggacaacaagatgagccagtgcaccagcagcaccatccccagcagcagccaggagaaggaccccaagatcaagacagagaccagcgaggagggcagcggggacctggacaacctggatgccatcctgggggacctgaccagcagtgacttctacaacaacagcatcagcagcaatggcagccacctgggcaccaagcagcaggtgttccagggcaccaacagcctgggcctgaagagcagccagagcgtgcagagcatccggcccccctacaacagagctgtgtccctggacagccctgtgtctgtgggcagcagcccccctgtgaagaacatcagcgccttccccatgctgcccaagcagcccatgctgggcggcaaccccaggatgatggacagccaggagaactacggcagctccatgggcggccccaacagaaatgtgacagtgacccagacccccagcagcggggactggggcctgcccaacagcaaggccggccgcatggagcccatgaacagcaacagcatgggccggcctggaggagactacaacaccagcctgcccaggcctgccctgggcggcagcatccccaccctgcccctgcggagcaacagcatccctggggcccggcctgtgctgcagcagcagcagcagatgctgcagatgaggcctggagagatccccatgggcatgggcgccaacccctacggccaggccgccgccagcaaccagctgggctcctggccagatggcatgctgtccatggagcaggtgagccacggcacccagaaccggcccctgctgaggaacagcctggatgacctggtgggcccccccagcaacctggagggccagagtgatgagcgggccctgctggaccagctgcacaccctgctgagcaacacagatgccaccggcctggaggagattgaccgggccctgggcatccctgagctggtgaaccagggccaggccctggagcccaagcaggatgccttccagggccaggaggccgctgtgatgatggaccagaaggccggcctgtatggccagacctacccagcccagggcccccccatgcagggcggcttccacctgcagggccagagccccagcttcaacagcatgatgaaccagatgaaccagcagggcaacttccccctgcagggcatgcacccccgggccaacatcatgaggcccaggaccaacacccccaagcagctgaggatgcagctgcagcagaggctgcagggccagcagttcctgaaccagagccggcaggccctggagctgaagatggagaaccccacagctgggggcgctgctgtgatgaggcccatgatgcagccccaggtgagcagccagcagggcttcctgaatgcccagatggtggcccagaggagccgggagctgctgagccaccacttccggcagcagagggtggccatgatgatgcagcagcagcagcagcagcagcagcagcagcagcagcagcagcagcagcagcagcagcagcagcagcagcagcagcagcagcagcagacccaggccttcagccccccaccaaatgtgacagccagccccagcatggatggcctgctggccggccccaccatgccccaggccccaccccagcagttcccctaccagcccaactacggcatgggccagcagcctgaccctgccttcggccgggtgagcagccccccaaatgccatgatgagcagcaggatgggccccagccagaaccccatgatgcagcacccccaggccgccagcatctaccagagcagcgagatgaagggctggcccagcggcaacctggccaggaacagcagcttcagccagcagcagtttgcccaccagggcaacccagctgtgtacagcatggtgcacatgaatggcagcagcggccacatgggccagatgaacatgaaccccatgcccatgagcggcatgcccatgggccctgaccagaagtactgctag

SEQ ID NO: 162296 - DNA, 4263 bp, synthetic construct; identical to SEQ ID NO: 162292
  misc_feature 1..4263: note = Description of Artificial Sequence: Synthetic coding sequence
  source 1..4263: mol_type = other DNA

SEQ ID NO: 162297 - DNA, 774 bp, synthetic construct
  misc_feature 1..774: note = Description of Artificial Sequence: Synthetic coding sequence
  source 1..774: mol_type = other DNA
atgatggaggagggggaggacctgcagagctgcatgatctgtgtggcccggcgcatcaccactggagagaggaccttccccagcaaccctgagagcttcatcaccaggcatgacctgagcggcaaggtggtgaacatcgacaccaacagcctgcggagctccatgaggcctggctttgaggacatcatccgccgctgcatccagcgcttcttcagcctgaatgatggccagagctggagccagaagaggcactaccaggaggcctacctgaatggacatgctgagacccctgtgtaccgcttcagcctggctgatggcaccatcgtgacagcccagaccaagagcaagctgttcagaaatcctgtgaccaatgacagacatggctttgtgtccacccacttcctgcagcgggagcagaatggctaccggcccaaccccaaccctgtgggccagggcatccggccccccatggccggctgcaacagctctgtgggcggcatgtccatgagccccaaccagggcctgcagatgcccagcagccgggcctacggcctggccgaccccagcaccaccggccagatgtctggggcccgctatggaggcagcagcaacatcgccagcctgaccccaggccctggcatgcagagccccagcagctaccagaacaacaactacggcctgaacatgagcagccccccccacggcagccctggcctggcccccaaccagcagaacatcatgatcctgctggtgattgtgggcgtgcagaggtag

SEQ ID NO: 162298 - DNA, 864 bp, synthetic construct
  misc_feature 1..864: note = Description of Artificial Sequence: Synthetic coding sequence
  source 1..864: mol_type = other DNA
atgaacaccttccaggaccagagcggcagcagcagcaaccgggagcccctgctgcgctgcagtgatgcccggcgggacctggagctggccatcggcggcgtgctgcgggcagagcagcagatcaaggacaacctgcgggaggtgaaggcccagatccacagctgcatcagccgccacctggagtgcctgcggagccgggaggtgtggctgtatgagcaggtggacctgatctaccagctgaaggaggagaccctgcagcagcaggcccagcagctgtacagcctgctgggccagttcaactgcctgacccaccagctggagtgcacccagaacaaggacctggccaaccaggtgtctgtgtgcctggagcggctgggcagcctgaccctgaagccagaggacagcacagtgctgctgtttgaggccgacaccatcaccctgcggcagaccatcaccaccttcggcagcctgaagaccatccagatccctgagcacctgatggcccacgccagcagcgccaacatcggccccttcctggagaagaggggctgcatctccatgcctgagcagaagagcgccagcggcatcgtggccgtgcccttcagcgagtggctgctgggcagcaagccagccagcggctaccaggccccctacatccccagcacagacccccaggactggctgacccagaagcagaccctggagaacagccagcaggaggtgctgctgaacagccccctgcaggaggagcacaacttccccccagaccactacggcctgcctgctgtgtgtgacctgtttgcctgcatgcagctgaaggtggacaaggagaagtggctgtaccgcacccccctgcaggtgtag

SEQ ID NO: 162299 - DNA, 1845 bp, synthetic construct
  misc_feature 1..1845: note = Description of Artificial Sequence: Synthetic coding sequence
  source 1..1845: mol_type = other DNA
atgaacaccttccaggaccagagcggcagcagcagcaaccgggagcccctgctgcgctgcagtgatgcccggcgggacctggagctggccatcggcggcgtgctgcgggcagagcagcagatcaaggacaacctgcgggaggtgaaggcccagatccacagctgcatcagccgccacctggagtgcctgcggagccgggaggtgtggctgtatgagcaggtggacctgatctaccagctgaaggaggagaccctgcagcagcaggcccagcagctgtacagcctgctgggccagttcaactgcctgacccaccagctggagtgcacccagaacaaggacctggccaaccaggtgtctgtgtgcctggagcggctgggcagcctgaccctgaagccagaggacagcacagtgctgctgtttgaggccgacaccatcaccctgcggcagaccatcaccaccttcggcagcctgaagaccatccagatccctgagcacctgatggcccacgccagcagcgccaacatcggccccttcctggagaagaggggctgcatctccatgcctgagcagaagagcgccagcggcatcgtggccgtgcccttcagcgagtggctgctgggcagcaagccagccagcggctaccaggccccctacatccccagcacagacccccaggactggctgacccagaagcagaccctggagaacagccagaccagcagccgggcctgcaacttcttcaacaacgtgggcggcaacctgaagggcctggagaactggctgctgaagtctgagaagagcagctaccagaagtgcaacagccacagcaccaccagcagcttcagcattgagatggagaaggtgggggaccaggagctgcctgaccaggatgagatggacctgagtgactggctggtgaccccccaggagagccacaagctgaggaagccagaaaatggcagccgggagaccagcgagaagttcaagctgctcttccagagctacaacgtgaatgactggctggtgaagacagacagctgcaccaactgccagggcaaccagcccaagggcgtggagattgagaacctgggcaacctgaagtgcctgaatgaccacctggaggccaagaagcccctgagcacccccagcatggtgacagaggactggctggtgcagaaccaccaggacccctgcaaggtggaggaggtgtgccgggccaatgagccctgcaccagctttgctgaatgtgtgtgtgatgagaactgtgagaaggaggccctgtacaagtggctgctgaagaaggagggcaaggacaagaatggcatgcctgtggagcccaagccagagcctgagaagcacaaggacagcctgaacatgtggctgtgccccaggaaggaggtgattgagcagaccaaggcccccaaggccatgacccccagcagaattgctgacagcttccaggtgatcaagaacagccccctgtctgagtggctgatccggcccccctacaaggagggcagccccaaggaggtgcccggcacagaagatcgggccggcaagcagaagttcaagagccccatgaacacctcctggtgcagcttcaacacagctgactgggtgctgcccgggaagaagatgggcaacctgagccagctgagcagcggggaggacaagtggctgctgaggaagaaggcccaggaggtgctgctgaacagccccctgcaggaggagcacaacttccccccagaccactacggcctgcctgctgtgtgtgacctgtttgcctgcatgcagctgaaggtggacaaggagaagtggctgtaccgcacccccctgcagatgtag

SEQ ID NO: 162300 - DNA, 1728 bp, synthetic construct
  misc_feature 1..1728: note = Description of Artificial Sequence: Synthetic coding sequence
  source 1..1728: mol_type = other DNA
atgaacaccttccaggaccagagcggcagcagcagcaaccgggagcccctgctgcgctgcagtgatgcccggcgggacctggagctggccatcggcggcgtgctgcgggcagagcagcagatcaaggacaacctgcgggaggtgaaggcccagatccacagctgcatcagccgccacctggagtgcctgcggagccgggaggtgtggctgtatgagcaggtggacctgatctaccagctgaaggaggagaccctgcagcagcaggcccagcagctgtacagcctgctgggccagttcaactgcctgacccaccagctggagtgcacccagaacaaggacctggccaaccaggtgtctgtgtgcctggagcggctgggcagcctgaccctgaagccagaggacagcacagtgctgctgtttgaggccgacaccatcaccctgcggcagaccatcaccaccttcggcagcctgaagaccatccagatccctgagcacctgatggcccacgccagcagcgccaacatcggccccttcctggagaagaggggctgcatctccatgcctgagcagaagagcgccagcggcatcgtggccgtgcccttcagcgagtggctgctgggcagcaagccagccagcggctaccaggccccctacatccccagcacagacccccaggactggctgacccagaagcagaccctggagaacagccagaccagcagccgggcctgcaacttcttcaacaacgtgggcggcaacctgaagggcctggagaactggctgctgaagtctgagaagagcagctaccagaagtgcaacagccacagcaccaccagcagcttcagcattgagatggagaaggtgggggaccaggagctgcctgaccaggatgagatggacctgagtgactggctggtgaccccccaggagagccacaagctgaggaagccagaaaatggcagccgggagaccagcgagaagttcaagctgctcttccagagctacaacgtgaatgactggctggtgaagacagacagctgcaccaactgccagggcaaccagcccaagggcgtggagattgagaacctgggcaacctgaagtgcctgaatgaccacctggaggccaagaagcccctgagcacccccagcatggtgacagaggactggctggtgcagaaccaccaggacccctgcaaggtggaggaggtgtgccgggccaatgagccctgcaccagctttgctgaatgtgtgtgtgatgagaactgtgagaaggaggccctgtacaagtggctgctgaagaaggagggcaaggacaagaatggcatgcctgtggagcccaagccagagcctgagaagcacaaggacagcctgaacatgtggctgtgccccaggaaggaggtgattgagcagaccaaggcccccaaggccatgacccccagcagaattgctgacagcttccaggtgatcaagaacagccccctgtctgagtggctgatccggcccccctacaaggagggcagccccaaggaggtgcccggcacagaagatcgggccggcaagcagaagtactacctgatccacctgtacagaagaaacatcaccagcccccagaccatcatggccagcctgcagtttgtgatcagcctgcctgtgtgcagcctgaagctgatcaagaggagcggctacatcgagctgctgtaccgctgtgagggcatggacaagagctag

SEQ ID NO: 162301 - DNA, 1845 bp, synthetic construct; identical to SEQ ID NO: 162299
  misc_feature 1..1845: note = Description of Artificial Sequence: Synthetic coding sequence
  source 1..1845: mol_type = other DNA

SEQ ID NO: 162302 - DNA, 1347 bp, synthetic construct
  misc_feature 1..1347: note = Description of Artificial Sequence: Synthetic coding sequence
  source 1..1347: mol_type = other DNA
atggcccacgccagcagcgccaacatcggccccttcctggagaagaggggctgcatctccatgcctgagcagaagagcgccagcggcatcgtggccgtgcccttcagcgagtggctgctgggcagcaagccagccagcggctaccaggccccctacatccccagcacagacccccaggactggctgacccagaagcagaccctggagaacagccagaccagcagccgggcctgcaacttcttcaacaacgtgggcggcaacctgaagggcctggagaactggctgctgaagtctgagaagagcagctaccagaagtgcaacagccacagcaccaccagcagcttcagcattgagatggagaaggtgggggaccaggagctgcctgaccaggatgagatggacctgagtgactggctggtgaccccccaggagagccacaagctgaggaagccagaaaatggcagccgggagaccagcgagaagttcaagctgctcttccagagctacaacgtgaatgactggctggtgaagacagacagctgcaccaactgccagggcaaccagcccaagggcgtggagattgagaacctgggcaacctgaagtgcctgaatgaccacctggaggccaagaagcccctgagcacccccagcatggtgacagaggactggctggtgcagaaccaccaggacccctgcaaggtggaggaggtgtgccgggccaatgagccctgcaccagctttgctgaatgtgtgtgtgatgagaactgtgagaaggaggccctgtacaagtggctgctgaagaaggagggcaaggacaagaatggcatgcctgtggagcccaagccagagcctgagaagcacaaggacagcctgaacatgtggctgtgccccaggaaggaggtgattgagcagaccaaggcccccaaggccatgacccccagcagaattgctgacagcttccaggtgatcaagaacagccccctgtctgagtggctgatccggcccccctacaaggagggcagccccaaggaggtgcccggcacagaagatcgggccggcaagcagaagttcaagagccccatgaacacctcctggtgcagcttcaacacagctgactgggtgctgcccgggaagaagatgggcaacctgagccagctgagcagcggggaggacaagtggctgctgaggaagaaggcccaggaggtgctgctgaacagccccctgcaggaggagcacaacttccccccagaccactacggcctgcctgctgtgtgtgacctgtttgcctgcatgcagctgaaggtggacaaggagaagtggctgtaccgcacccccctgcagatgtag

SEQ ID NO: 162303 - DNA, 1545 bp, synthetic construct
  misc_feature 1..1545: note = Description of Artificial Sequence: Synthetic coding sequence
  source 1..1545: mol_type = other DNA
atgaaccgctggaccctcttcatcagcctgaagaggaggcacttcaacagccggctgagcagcagcacccggctgggcagcctgaccctgaagccagaggacagcacagtgctgctgtttgaggccgacaccatcaccctgcggcagaccatcaccaccttcggcagcctgaagaccatccagatccctgagcacctgatggcccacgccagcagcgccaacatcggccccttcctggagaagaggggctgcatctccatgcctgagcagaagagcgccagcggcatcgtggccgtgcccttcagcgagtggctgctgggcagcaagccagccagcggctaccaggccccctacatccccagcacagacccccaggactggctgacccagaagcagaccctggagaacagccagaccagcagccgggcctgcaacttcttcaacaacgtgggcggcaacctgaagggcctggagaactggctgctgaagtctgagaagagcagctaccagaagtgcaacagccacagcaccaccagcagcttcagcattgagatggagaaggtgggggaccaggagctgcctgaccaggatgagatggacctgagtgactggctggtgaccccccaggagagccacaagctgaggaagccagaaaatggcagccgggagaccagcgagaagttcaagctgctcttccagagctacaacgtgaatgactggctggtgaagacagacagctgcaccaactgccagggcaaccagcccaagggcgtggagattgagaacctgggcaacctgaagtgcctgaatgaccacctggaggccaagaagcccctgagcacccccagcatggtgacagaggactggctggtgcagaaccaccaggacccctgcaaggtggaggaggtgtgccgggccaatgagccctgcaccagctttgctgaatgtgtgtgtgatgagaactgtgagaaggaggccctgtacaagtggctgctgaagaaggagggcaaggacaagaatggcatgcctgtggagcccaagccagagcctgagaagcacaaggacagcctgaacatgtggctgtgccccaggaaggaggtgattgagcagaccaaggcccccaaggccatgacccccagcagaattgctgacagcttccaggtgatcaagaacagccccctgtctgagtggctgatccggcccccctacaaggagggcagccccaaggaggtgcccggcacagaagatcgggccggcaagcagaagttcaagagccccatgaacacctcctggtgcagcttcaacacagctgactgggtgctgcccgggaagaagatgggcaacctgagccagctgagcagcggggaggacaagtggctgctgaggaagaaggcccaggaggtgctgctgaacagccccctgcaggaggagcacaacttccccccagaccactacggcctgcctgctgtgtgtgacctgtttgcctgcatgcagctgaaggtggacaaggagaagtggctgtaccgcacccccctgcagatgtag

SEQ ID NO: 162304 - DNA, 795 bp, synthetic construct
  misc_feature 1..795: note = Description of Artificial Sequence: Synthetic coding sequence
  source 1..795: mol_type = other DNA
tgatgcaccccagcctgggccgctgagctggacagcgtgtccaagcagaagaagaaccccaagcccaccttcaagaagaagacagaggagaggacctgtgaggtgaagaaggtgtcccggctgggcagcctgaccctgaagccagaggacagcacagtgctgctgtttgaggccgacaccatcaccctgcggcagaccatcaccaccttcggcagcctgaagaccatccagatccctgagcacctgatggcccacgccagcagcgccaacatcggccccttcctggagaagaggggctgcatctccatgcctgagcagaagagcgccagcggcatcgtggccgtgcccttcagcgagtggctgctgggcagcaagccagccagcggctaccaggccccctacatccccagcacagacccccaggactggctgacccagaagcagaccctggagaacagccagaccagcagccgggcctgcaacttcttcaacaacgtgggcggcaacctgaagggcctggagaactggctgctgaagtctgagaagagcagctaccagaagtgcaacagccacagcaccaccagcagcttcagcattgagatggagaaggtgggggaccaggagctgcctgaccaggatgagatggacctgagtgactggctggtgaccccccaggagagccacaagctgaggaagccagaaaatggcagccgggagaccagcgagaagttcaagctgctcttccagagctacaacgtgaatgactggctggtgaagacagacagctgcacctag

SEQ ID NO: 162305 - DNA, 1893 bp, synthetic construct
  misc_feature 1..1893: note = Description of Artificial Sequence: Synthetic coding sequence
  source 1..1893: mol_type = other DNA
atgggcgcccagctgaccacctttgccctggccggggctgtgcggaggatgaacaccttccaggaccagagcggcagcagcagcaaccgggagcccctgctgcgctgcagtgatgcccggcgggacctggagctggccatcggcggcgtgctgcgggcagagcagcagatcaaggacaacctgcgggaggtgaaggcccagatccacagctgcatcagccgccacctggagtgcctgcggagccgggaggtgtggctgtatgagcaggtggacctgatctaccagctgaaggaggagaccctgcagcagcaggcccagcagctgtacagcctgctgggccagttcaactgcctgacccaccagctggagtgcacccagaacaaggacctggccaaccaggtgtctgtgtgcctggagcggctgggcagcctgaccctgaagccagaggacagcacagtgctgctgtttgaggccgacaccatcaccctgcggcagaccatcaccaccttcggcagcctgaagaccatccagatccctgagcacctgatggcccacgccagcagcgccaacatcggccccttcctggagaagaggggctgcatctccatgcctgagcagaagagcgccagcggcatcgtggccgtgcccttcagcgagtggctgctgggcagcaagccagccagcggctaccaggccccctacatccccagcacagacccccaggactggctgacccagaagcagaccctggagaacagccagaccagcagccgggcctgcaacttcttcaacaacgtgggcggcaacctgaagggcctggagaactggctgctgaagtctgagaagagcagctaccagaagtgcaacagccacagcaccaccagcagcttcagcattgagatggagaaggtgggggaccaggagctgcctgaccaggatgagatggacctgagtgactggctggtgaccccccaggagagccacaagctgaggaagccagaaaatggcagccgggagaccagcgagaagttcaagctgctcttccagagctacaacgtgaatgactggctggtgaagacagacagctgcaccaactgccagggcaaccagcccaagggcgtggagattgagaacctgggcaacctgaagtgcctgaatgaccacctggaggccaagaagcccctgagcacccccagcatggtgacagaggactggctggtgcagaaccaccaggacccctgcaaggtggaggaggtgtgccgggccaatgagccctgcaccagctttgctgaatgtgtgtgtgatgagaactgtgagaaggaggccctgtacaagtggctgctgaagaaggagggcaaggacaagaatggcatgcctgtggagcccaagccagagcctgagaagcacaaggacagcctgaacatgtggctgtgccccaggaaggaggtgattgagcagaccaaggcccccaaggccatgacccccagcagaattgctgacagcttccaggtgatcaagaacagccccctgtctgagtggctgatccggcccccctacaaggagggcagccccaaggaggtgcccggcacagaagatcgggccggcaagcagaagttcaagagccccatgaacacctcctggtgcagcttcaacacagctgactgggtgctgcccgggaagaagatgggcaacctgagccagctgagcagcggggaggacaagtggctgctgaggaagaaggcccaggaggtgctgctgaacagccccctgcaggaggagcacaacttccccccagaccactacggcctgcctgctgtgtgtgacctgtttgcctgcatgcagctgaaggtggacaaggagaagtggctgtaccgcacccccctgcagatgtag

SEQ ID NO: 162306 - DNA, 1845 bp, synthetic construct; identical to SEQ ID NO: 162299
  misc_feature 1..1845: note = Description of Artificial Sequence: Synthetic coding sequence
  source 1..1845: mol_type = other DNA

SEQ ID NO: 162307 - DNA, 1953 bp, synthetic construct
  misc_feature 1..1953: note = Description of Artificial Sequence: Synthetic coding sequence
  source 1..1953: mol_type = other DNA
atgggcgcccagctgaccacctttgccctggccggggctgtgcggaggatgaacaccttccaggaccagagcggcagcagcagcaaccgggagcccctgctgcgctgcagtgatgcccggcgggacctggagctggccatcggcggcgtgctgcgggcagagcagcagatcaaggacaacctgcgggaggtgaaggcccagatccacagctgcatcagccgccacctggagtgcctgcggagccgggaggtgtggctgtatgagcaggtggacctgatctaccagctgaaggaggagaccctgcagcagcaggcccagcagctgtacagcctgctgggccagttcaactgcctgacccaccagctggagtgcacccagaacaaggacctggccaaccaggtgtctgtgtgcctggagcggctgggcagcctgaccctgaagccagaggacagcacagtgctgctgtttgaggccgacaccatcaccctgcggcagaccatcaccaccttcggcagcctgaagaccatccagatccctgagcacctgatggcccacgccagcagcgccaacatcggccccttcctggagaagaggggctgcatctccatgcctgagcagaagagcgccagcggcatcgtggccgtgcccttcagcgagtggctgctgggcagcaagccagccagcggctaccaggccccctacatccccagcacagacccccaggactggctgacccagaagcagaccctggagaacagccagaccagcagccgggcctgcaacttcttcaacaacgtgggcggcaacctgaagggcctggagaactggctgctgaagtctgagaagagcagctaccagaagtgcaacagccacagcaccaccagcagcttcagcattgagatggagaaggtgggggaccaggagctgcctgaccaggatgagatggacctgagtgactggctggtgaccccccaggagagccacaagctgaggaagccagaaaatggcagccgggagaccagcgagaagttcaagctgctcttccagagctacaacgtgaatgactggctggtgaagacagacagctgcaccaactgccagggcaaccagcccaagggcgtggagattgagaacctgggcaacctgaagtgcctgaatgaccacctggaggccaagaagcccctgagcacccccagcatggtgacagaggactggctggtgcagaaccaccaggacccctgcaaggtggaggaggtgtgccgggccaatgagccctgcaccagctttgctgaatgtgtgtgtgatgagaactgtgagaaggaggccctgtacaagtggctgctgaagaaggagggcaaggacaagaatggcatgcctgtggagcccaagccagagcctgagaagcacaaggacagcctgaacatgtggctgtgccccaggaaggaggtgattgagcagaccaaggcccccaaggccatgacccccagcagaattgctgacagcttccaggtgatcaagaacagccccctgtctgagtggctgatccggcccccctacaaggagggcagccccaaggaggtgcccggcacagaagatcgggccggcaagcagaagttcaagagccccatgaacacctcctggtgcagcttcaacacagctgactgggtgctgcccgggaagaagatgggcaacctgagccagctgagcagcggggaggacaagtggctgctgaggaagaaggcccaggaggtgctgctgaacagccccctgcaggaggagcacaacttccccccagaccactacggcctgcctgctgtgtgtgacctgtttgcctgcatgcagctgaaggtggacaaggagaagtggctgtaccgcacccccctgcaggcctacttcaagatgaacttccaggatgtgacagtgggcaacttccagatcccctgtggcttctag

SEQ ID NO: 162308 - DNA, 6192 bp, synthetic construct
  misc_feature 1..6192: note = Description of Artificial Sequence: Synthetic coding sequence
  source 1..6192: mol_type = other DNA
atggtgctggatgacctgcccaacctggaggacatctacaccagcctgtgcagcagcaccatggaggacagcgagatggactttgacagcggcctggaggatgatgacaccaagagtgacagcatcctggaggacagcaccatctttgtggccttcaagggcaacattgatgacaaggacttcaagtggaagctggatgccatcctgaagaatgtgcccaacctgctgcacatggagagcagcaagctgaaggtgcagaaggtggagccctggaacagcgtgcgggtgaccttcaacatcccccgggaggccgctgagcggctgcgcatcctggcccagagcaacaaccagcagctgcgggacctgggcatcctgtctgtgcagattgaaggagagggcgccatcaacctggccctggcccagaacagaagccaggatgtgaggatgaatggccccatgggcgccggcaacagcgtgaggatggaggccggcttccccatggccagcggccctggcatcatccgcatgaacaacccagccaccgtgatgatccccccaggcggcaatgtgagcagctccatgatggcccctggccccaaccctgagctgcagcccaggacccccaggcctgccagccagagtgatgccatggaccccctgctgagcggcctgcacatccagcagcagagccaccccagcggcagcctggccccaccccaccaccccatgcagcctgtgtctgtgaaccggcagatgaacccagccaacttcccccagctgcagcagcagcagcagcagcagcagcagcagcagcagcagcagcagcagcagcagcagcagcagcagcagcagcagctgcaggcccggcccccccagcagcaccagcagcagcagccccagggcatccggccccagttcaccgcccccacccaggtgcctgtgcccccaggctggaaccagctgcccagcggggccctgcagcccccaccagcccagggcagcctgggcaccatgacagccaaccagggctggaagaaggcccccctgcccggccccatgcagcagcagctgcaggcccggcccagcctggccaccgtgcagacccccagccaccccccaccaccctaccccttcggcagccagcaggccagccaggcccacaccaacttcccccagatgagcaaccctggccagttcaccgccccccagatgaagagcctgcagggcggccccagccgggtgcccacccccctgcagcagccccacctgaccaacaagagccctgccagcagccccagcagcttccagcagggcagccctgccagcagccccaccgtgaaccagacccagcagcagatgggccccaggcctccccagaacaaccccctgccccagggcttccagcagcctgtgagcagccctggcaggaaccccatggtgcagcagggcaatgtgccccccaacttcatggtgatgcagcagcagccccccaaccagggcccccagagcctgcaccctggcctgggcggcatgcccaagaggctgcccccaggcttctctgctggccaggccaaccccaacttcatgcagggccaggtgcccagcaccacagccaccaccccaggcaacagcggggccccccagctgcaggccaaccagaatgtgcagcacgccggcggccagggcgccggccccccccagaaccagatgcaggtgagccacggcccccccaacatgatgcagcccagcctgatgggcatccacggcaacatgaacaaccagcaggccggcaccagcggcgtgccccaggtgaacctgagcaacatgcagggccagccccagcagggcccccccagccagctgatgggcatgcaccagcagatcgtgcccagccagggccagatggtgcagcagcagggcaccctgaacccccagaaccccatgatcctgagccgggcccagctgatgccccagggccagatgatggtgaacccccccagccagaacctgggccccagcccccagaggatgaccccacccaagcagatgctgagccagcagggcccccagatgatggccccccacaaccagatgatgggcccccagggccaggtgctgctgcagcagaaccccatgattgagcagatcatgaccaaccagatgcagggcaacaagcagcagttcaacacccagaaccagagcaatgtgatgcctggccctgcccagatcatgaggggccccacccccaacatgcagggcaacatggtgcagttcaccggccagatgagcggccagatgctgccccagcagggccctgtgaacaacagccccagccaggtgatgggcatccagggccaggtgctgcggcccccaggccccagcccccacatggcccagcagcacggggaccctgccaccacagccaacaatgatgtgtccctgagccagatgatgccagatgtgtccatccagcagaccaacatggtgcccccccacgtgcaggccatgcagggcaacagcgccagcggcaaccacttcagcggccacggcatgtccttcaatgcccccttcagcggggcccccaacggcaaccagatgagctgtggccagaaccctggcttccctgtgaacaaggatgtgaccctgaccagccccctgctggtgaacctgctgcagagcgacatctctgctggccactttggagtgaacaacaagcagaacaacaccaatgccaacaagcccaagaagaagaagccacccaggaagaagaagaacagccagcaggacctgaacaccccagacaccaggcctgctggcctggaggaggccgaccagccccccctgcctggagagcagggcatcaacctggacaacagcggccccaagctgcctgagttcagcaaccggcccccaggctaccccagccagcctgtggagcagaggcccctgcagcagatgccaccccagctgatgcagcacgtggcccccccaccccagcccccccagcagcagccccagccccagctgccccagcagcagcagcccccaccacccagccagccccagagccagcagcagcagcagcagcagcagcagatgatgatgatgctgatgatgcagcaggaccccaagtctgtgcggctgcctgtgtcccagaatgtgcaccccccccggggccccctgaacccagacagccagaggatgcccatgcagcagagcggctctgtgcctgtgatggtgtccctgcagggccctgcctctgtgccccccagcccagacaagcagaggatgcccatgcctgtgaacacccccctgggcagcaacagcaggaagatggtgtaccaggagagcccccagaaccccagcagcagccccctggccgagatggccagcctgcctgaggccagcggcagcgaggcccccagcgtgcctgggggccccaacaacatgcccagccacgtggtgctgccccagaaccagctgatgatgacaggccccaagccaggccccagccccctgagcgccacccagggcgccaccccccagcagccccctgtgaacagcctgcccagcagccacggccaccacttccccaacgtggccgcccccacccagaccagccggcccaagacccccaacagagccagcccccggccctactacccccagacccccaacaacagaccacccagcacagagcccagcgagatcagcctgagccctgagcggctgaatgccagcattgctggcctcttccccccccagatcaacatccccctgcccccccggcccaacctgaacagaggatttgaccagcagggcctgaaccccaccaccctgaaggccatcggccaggcccccagcaacctgaccatgaaccccagcaactttgccaccccccagacccacaagctggacagcgtggtggtgaacagcggcaagcagagcaacagcggggccaccaagagggccagccccagcaacagccgccgcagcagccctggcagcagcaggaagaccacccccagccctggccggcagaacagcaaggcccccaagctgaccctggccagccagaccaatgctgccctgctgcagaatgtggagctgcccagaaatgtgctggtgagccccacccccctggccaacccccctgtgcccggcagcttccccaacaacagcggcctgaacccccagaacagcacagtgtctgtggccgctgtgggcggcgtggtggaggacaacaaggagagcctgaatgtgccccaggacagcgactgccagaacagccagagcaggaaggagcaggtgaacatcgagctgaaggctgtgcctgcccaggaggtgaagatggtggtgcctgaggaccagagcaagaaggatggccagcccagcgaccccaacaagctgcccagcgtggaggagaacaagaacctggtgtccccagccatgagggaggcccccaccagcctgagccagctgctggacaacagcggggcccccaacgtgaccatcaagcccccaggcctgacagacctggaggtgaccccacctgtggtgtctggagaggacctgaagaaggccagcgtcatccccaccctgcaggacctgagcagcagcaaggagcccagcaacagcctgaacctgccccacagcaatgagctgtgcagcagcctggtgcaccctgagctgtctgaggtgagcagcaatgtggcccccagcatcccccctgtgatgagcaggcctgtgagcagcagcagcatcagcacccccctgccccccaaccagatcaccgtgtttgtgaccagcaaccccatcaccaccagcgccaacaccagcgctgccctgcccacccacctgcagagcgccctgatgagcacagtggtgaccatgcccaatgccggcagcaaggtgatggtgtctgagggccagagcgctgcccagagcaatgcccggccccagttcatcacccctgtgttcatcaacagcagcagcatcatccaggtgatgaagggcagccagcccagcaccatcccagctgcccccctgaccaccaacagcggcctgatgcctccttctgtggccgtggtgggccccctgcacatcccccagaacatcaagttcagcagcgcccctgtgcccccaaatgccctgagcagcagccctgcccccaacatccagacaggccggcccctggtgctgagcagccgggccacccctgtgcagctgcccagccccccctgcaccagcagccctgtggtgcccagccacccccctgtgcagcaggtgaaggagctgaacccagatgaggccagcccccaggtgaacaccagcgctgaccagaacaccctgcccagcagccagagcaccaccatggtgagccccctgctgaccaacagccctggcagcagcggcaacagaagaagccctgtgagcagcagcaagggcaagggcaaggtggacaagattggccagatcctgctgaccaaggcctgcaagaaggtgacaggcagcctggagaagggggaggagcagtacggggctgatggagaaacagagggccagggcctggacaccacagcccctggcctgatgggcacagagcagctgagcacagagctggacagcaagacccccaccccaccagcccccaccctgctgaagatgaccagcagccctgtgggccctggaacagccagcgctggccccagcctgcccggcggggccctgcccacctctgtgcgcagcatcgtgaccaccctggtgcccagcgagctgatctctgctgtgcccaccaccaagagcaaccacggcggcatcgccagcgagagcctggccggcggcctggtggaggagaaggtgggcagccaccctgagctgctgcccagcatcgcccccagccagaacctggtgtccaaggagaccagcaccacagccctgcaggcctctgtggcccggcctgagctggaggtgaatgctgccatcgtgtctggccagagcagcgagcccaaggagatcgtggagaagagcaagatccctggaagaagaaacagcaggacagaggagcccaccgtggccagcgagagcgtggagaatggccacaggaagaggagcagcaggcctgccagcgccagcagcagcaccaaggacatcaccagcgctgtgcagagcaagaggaggaagagcaagtag

SEQ ID NO: 162309 - DNA, 6192 bp, synthetic construct; identical to SEQ ID NO: 162308
  misc_feature 1..6192: note = Description of Artificial Sequence: Synthetic coding sequence
  source 1..6192: mol_type = other DNA

SEQ ID NO: 162310 - DNA, 1086 bp, synthetic construct
  misc_feature 1..1086: note = Description of Artificial Sequence: Synthetic coding sequence
  source 1..1086: mol_type = other DNA
atggtgctggatgacctgcccaacctggaggacatctacaccagcctgtgcagcagcaccatggaggacagcgagatggactttgacagcggcctggaggatgatgacaccaagagtgacagcatcctggaggacagcaccatctttgtggccttcaagggcaacattgatgacaaggacttcaagtggaagctggatgccatcctgaagaatgtgcccaacctgctgcacatggagagcagcaagctgaaggtgcagaaggtggagccctggaacagcgtgcgggtgaccttcaacatcccccgggaggccgctgagcggctgcgcatcctggcccagagcaacaaccagcagctgcgggacctgggcatcctgtctgtgcagattgaaggagagggcgccatcaacctggccctggcccagaacagaagccaggatgtgaggatgaatggccccatgggcgccggcaacagcgtgaggatggaggccggcttccccatggccagcggcccagatgccatggaccccctgctgagcggcctgcacatccagcagcagagccaccccagcggcagcctggccccaccccaccaccccatgcagcctgtgtctgtgaaccggcagatgaacccagccaacttcccccagctgcagcagcagcagcagcagcagcagcagcagcagcagcagcagcagcagcagcagcagcagcagcagcagcagcagctgcaggcccggcccccccagcagcaccagcagcagcagccccagggcatccggccccagttcaccgcccccacccaggtgcctgtgcccccaggctggaaccagctgcccagcggggccctgcagcccccaccagcccagggcagcctgggcaccatgacagccaaccagggctggaagaaggcccccctgcccggccccatgcagcagcagctgcaggcccggcccagcctggccaccgtgcagacccccagccaccccccaccaccctaccccttcggcagccagcaggccagccaggcccacaccaacttcccccagatgagcaaccctggccagttcaccgccccccagatgtag

SEQ ID NO: 162311 - DNA, 549 bp, synthetic construct
  misc_feature 1..549: note = Description of Artificial Sequence: Synthetic coding sequence
  source 1..549: mol_type = other DNA
atggccgaggagcaggtgaacagatctgctggcctggccccagactgtgaggccagcgccacagctgagaccaccgtgtcctctgtgggcacctgtgaggccgccggcaagagccctgagcccaaggactatgacagcacctgtgtgttctgcagaattgctggccggcaggaccctggaacagagctgctgcactgtgaaaatgaagatctcatctgcttcaaggacatcaagccagctgccacccaccactacctggtggtgcccaagaagcacatcggcaactgcaggaccctgaggaaggaccaggtggagctggtggagaacatggtgacagtgggcaagaccatcctggagaggaacaacttcacagacttcaccaacgtgaggatgggcttccacatgccacccttctgcagcatcagccacctgcacctgcacgtgctggcccctgtggaccagctgggcttcctgagcaagctggtgtacagagtgaacagctactggttcatcacagctgaccacctgattgagaagctgcggacctag

SEQ ID NO: 162312 - DNA, 552 bp, synthetic construct
  misc_feature 1..552: note = Description of Artificial Sequence: Synthetic coding sequence
  source 1..552: mol_type = other DNA
atgggcgccgcccacagcgtgtgggaggtggaccacctgtacaccttctttgtgcagtggagcccagatgtgtatggcaaggatgccaaggagcagggctttgtggtggtggagaaggaggagctgaacatgattgacaacttcttcagcgagcccaccaccaagtcctgggagatcatcaccgtggaggaggccaagaggaggaagagcacctgcagctactatgaagatgaagatgaggaggtgctgcctgtgctgcggccccacagcgccctgctggagaacatgcacatcgagcagctggcccggcggctgcctgcccgggtgcagggctacccctggaggctggcctacagcaccctggagcacggcaccagcctgaagaccctgtacaggaagagcgccagcctggacagccctgtgctgctggtgatcaaggacatggacaaccagatctttggagcctatgccacccaccccttcaagttcagtgaccactactacggcaccggggagaccttcctgtacaccttcagcccccacttcaagtag

SEQ ID NO: 162313 - DNA, 2829 bp, synthetic construct
  misc_feature 1..2829: note = Description of Artificial Sequence: Synthetic coding sequence
  source 1..2829: mol_type = other DNA
atggacaccaaggaggagaagaaggagaggaagcagagctactttgcccggctgaagaagaagaagcaggccaagcagaatgctgagacagccagcgctgtggccaccaggacccacacaggcaaggaggacaacaacacagtggtgctggagccagacaagtgcaacattgctgtggaggaggagtacatgacagatgagaagaagaagaggaagagcaaccagctgaaggagatccggaggacagagctgaagcgctactacagcattgatgacaaccagaacaagacccatgacaagaaggagaagaagatggtggtgcagaagccccacggcaccatggagtacacagctggcaaccaggacaccctgaacagcatcgccctgaagttcaacatcacccccaacaagctggtggagctgaacaagctgttcacccacaccatcgtgcccggccaggtgctgtttgtgcctgatgccaacagccccagcagcaccctgcggctgagcagcagcagccctggggccaccgtgagccccagcagcagtgatgctgaatatgacaagctgcctgatgctgacctggccaggaaggccctgaagcccatcgagcgggtgctgagcagcaccagtgaagaagatgagcccggggtggtgaagttcctgaagatgaactgccgctacttcacagatggaaaaggagtggtgggcggcgtgatgattgtgacccccaacaacatcatgtttgacccccacaagagtgaccccctggtgattgaaaatggctgtgaggagtatggcctcatctgccccatggaggaggtggtgtccatcgccctgtacaatgacatcagccacatgaagatcaaggatgccctgcccagcgacctgccccaggacctgtgccccctgtacagacctggagagtgggaggacctggccagcgagaaggacatcaaccccttcagcaagttcaagagcatcaacaaggagaagaggcagcagaatggagagaagatcatgaccagtgacagccggcccatcgtgcccctggagaagagcacaggccacacccccaccaagcccagcggcagctctgtgtctgagaagctgaagaagctggacagcagccgggagaccagccacggcagccccaccgtgaccaagctgagcaaggagcccagcgacaccagcagcgcctttgagagcacagccaaggagaacttcctgggggaggatgatgactttgtggacctggaggagctgagcagccagacaggaggcggcatgcacaagaaggacaccctgaaggagtgcctgagcctggaccctgaggagaggaagaaggccgagagccagatcaacaacagcgctgtggagatgcaggtgcagagcgccctggccttcctgggcacagaaaatgatgtggagctgaagggggccctggacctggagacctgtgagaagcaggacatcatgcctgaggtggacaagcagagcggcagccctgagagccgggtggagaacaccctgaacatccacgaggacctggacaaggtgaagctgattgagtactacctgaccaagaacaaggagggcccccaggtgtctgagaacctgcagaagacagagctgagtgatggcaagagcattgagcccggcggcatcgacatcaccctgagcagcagcctgagccaggccggggaccccatcacagagggcaacaaggagccagacaagacctgggtgaagaagggggagcccctgcctgtgaagctgaacagcagcacagaggccaacgtcatcaaggaggccctggacagcagcctggagagcaccctggacaacagctgccagggcgcccagatggacaacaagtctgaggtgcagctgtggctgctgaagaggatccaggtgcccatcgaggacatcctgcccagcaaggaggagaagagcaagaccccacccatgttcctgtgcatcaaggtgggcaagcccatgaggaagagctttgccacccacacagctgccatggtgcagcagtatggcaagaggaggaagcagcctgagtactggtttgctgtgccccgggagcgggtggaccacctgtacaccttctttgtgcagtggagcccagatgtgtatggcaaggatgccaaggagcagggctttgtggtggtggagaaggaggagctgaacatgattgacaacttcttcagcgagcccaccaccaagtcctgggagatcatcaccgtggaggaggccaagaggaggaagagcacctgcagctactatgaagatgaagatgaggaggtgctgcctgtgctgcggccccacagcgccctgctggagaacatgcacatcgagcagctggcccggcggctgcctgcccgggtgcagggctacccctggaggctggcctacagcaccctggagcacggcaccagcctgaagaccctgtacaggaagagcgccagcctggacagccctgtgctgctggtgatcaaggacatggacaaccagatctttggagcctatgccacccaccccttcaagttcagtgaccactactacggcaccggggagaccttcctgtacaccttcagcccccacttcaaggtgttcaagtggagcggggagaacagctacttcatcaacggggacatcagcagcctggagctgggcggcggcggcggccgcttcggcctgtggctggatgctgacctgtaccacggccgcagcaacagctgcagcaccttcaacaatgacatcctgagcaagaaggaggacttcatcgtgcaggacctggaggtgtgggcctttgattag

SEQ ID NO: 162314 - DNA, 2829 bp, synthetic construct; identical to SEQ ID NO: 162313
  misc_feature 1..2829: note = Description of Artificial Sequence: Synthetic coding sequence
  source 1..2829: mol_type = other DNA

SEQ ID NO: 162315 - DNA, 1323 bp, synthetic construct
  misc_feature 1..1323: note = Description of Artificial Sequence: Synthetic coding sequence
  source 1..1323: mol_type = other DNA
gatgctgacctggccaggaaggccctgaagcccatcgagcgggtgctgagcagcaccagcgaggaggatgagcccggggtggtgaagttcctgaagatgaactgccgctacttcacagatggcaagggcgtggtgggcggcgtgatgattgtgacccccaacaacatcatgtttgacccccacaagagtgaccccctggtgattgaaaatggctgtgaggagtatggcctcatctgccccatggaggaggtggtgtccatcgccctgtacaatgacatcagccacatgaagatcaaggatgccctgcccagccctggagagtgggaggacctggccagcgagaaggacatcaaccccttcagcaagttcaagagcatcaacaaggagaagaggcagcagaatggagagaagatcatgaccagtgacagccggcccatcgtgcccctggagaagagcacaggccacacccccaccaagcccagcggcagctctgtgtctgagaagctgaagaagctggacagcagccgggagaccagccacggcagccccaccgtgaccaagctgagcaaggagcccagcgacaccagcagcgcctttgagagcacagccaaggagaacttcctgggggaggatgatgactttgtggacctggaggagctgagcagccagacaggaggcggcatgcacaagaaggacaccctgaaggagtgcctgagcctggaccctgaggagaggaagaaggccgagagccagatcaacaacagcgctgtggagatgcaggtgcagagcgccctggccttcctgggcacagaaaatgatgtggagctgaagggggccctggacctggagacctgtgagaagcaggacatcatgcctgaggtggacaagcagagcggcagccctgagagccgggtggagaacaccctgaacatccacgaggacctggacaaggtgaagctgattgagtactacctgaccaagaacaaggagggcccccaggtgtctgagaacctgcagaagacagagctgagtgatggcaagagcattgagcccggcggcatcgacatcaccctgagcagcagcctgagccaggccggggaccccatcacagagggcaacaaggagccagacaagacctgggtgaagaagggggagcccctgcctgtgaagctgaacagcagcacagaggccaacgtcatcaaggaggccctggacagcagcctggagagcaccctggacaacagctgccagggcgcccagatggacaacaagtctgaggtgcagctgtggctgctgaagaggatccaggtgcccattgaatag

SEQ ID NO: 162316 - DNA, 576 bp, synthetic construct
  misc_feature 1..576: note = Description of Artificial Sequence: Synthetic coding sequence
  source 1..576: mol_type = other DNA
atggacaccaaggaggagaagaaggagaggaagcagagctactttgcccggctgaagaagaagaagcaggccaagcagaatgctgagacagccagcgctgtggccaccaggacccacacaggcaaggaggacaacaacacagtggtgctggagccagacaagtgcaacattgctgtggaggaggagtacatgacagatgagaagaagaagaggaagagcaaccagctgaaggagatccggaggacagagctgaagcgctactacagcattgatgacaaccagaacaagacccatgacaagaaggagaagaagatggtggtgcagaagccccacggcaccatggagtacacagctggcaaccaggacaccctgaacagcatcgccctgaagttcaacatcacccccaacaagctggtggagctgaacaagctgttcacccacaccatcgtgcccggccaggtgctgtttgtgcctgatgccaacagccccagcagcaccctgcggctgagcagcagcagccctggggccaccgtgagccccagcagcagtgatgctgaatatgacaagctgccctag

SEQ ID NO: 162317 - DNA, 354 bp, synthetic construct
  misc_feature 1..354: note = Description of Artificial Sequence: Synthetic coding sequence
  source 1..354: mol_type = other DNA
atggacaccaaggaggagaagaaggagaggaagcagagctactttgcccggctgaagaagaagaagcaggccaagcagaatgctgagacagccagcgctgtggccaccaggacccacacaggcaaggaggacaacaacacagtggtgctggagccagacaagtgcaacattgctgtggaggaggagtacatgacagatgagaagaagaagaggaagagcaaccagctgaaggagatccggaggacagagctgaagcgctactacagcattgatgacaaccagaacaagacccatgacaagaaggagaagaagatggtggtgcagaagccccacggcaccatggagtacacctag

SEQ ID NO: 162318 - DNA, 273 bp, synthetic construct
  misc_feature 1..273: note = Description of Artificial Sequence: Synthetic coding sequence
  source 1..273: mol_type = other DNA
atggacaccaaggaggagaagaaggagaggaagcagagctactttgcccggctgaagaagaagaagcaggccaagcagaatgctgagacagccagcgctgtggccaccaggacccacacaggcaaggaggacaacaacacagtggtgctggagccagacaagtgcaacattgctgtggaggaggagtacatgacagatgagaagaagaagaggaagagcaaccagctgaaggagatccggaggacagagctgaagcgctactacagcatctag

SEQ ID NO: 162319 - DNA, 273 bp, synthetic construct; identical to SEQ ID NO: 162318
  misc_feature 1..273: note = Description of Artificial Sequence: Synthetic coding sequence
  source 1..273: mol_type = other DNA

SEQ ID NO: 162320 - DNA, 552 bp, synthetic construct; identical to SEQ ID NO: 162312
  misc_feature 1..552: note = Description of Artificial Sequence: Synthetic coding sequence
  source 1..552: mol_type = other DNA

SEQ ID NO: 162321 - DNA, 714 bp, synthetic construct
  misc_feature 1..714: note = Description of Artificial Sequence: Synthetic coding sequence
  source 1..714: mol_type = other DNA
tgagagaagacctgcagcagcctggagcgggagccccacttcagcctgctgaccatgaggggccagaggctgcccctggacatccagatcttctactgtgcccggccagatgaggagccctttgtgaagatcatcaccgtggaggaggccaagaggaggaagagcacctgcagctactatgaagatgaagatgaggaggtgctgcctgtgctgcggccccacagcgccctgctggagaacatgcacatcgagcagctggcccggcggctgcctgcccgggtgcagggctacccctggaggctggcctacagcaccctggagcacggcaccagcctgaagaccctgtacaggaagagcgccagcctggacagccctgtgctgctggtgatcaaggacatggacaaccagatctttggagcctatgccacccaccccttcaagttcagtgaccactactatggaactggagagaccttcctgtacaccttcagcccccacttcaaggtgttcaagtggagcggagaaaattcctacttcatcaatggagacatcagcagcctggagctgggcggcggcggcggccgcttcggcctgtggctggatgctgacctgtaccacggccgcagcaacagctgcagcaccttcaacaatgacatcctgagcaagaaggaggacttcatcgtgcaggacctggaggtgtgggcctttgattag

SEQ ID NO: 162322 - DNA, 534 bp, synthetic construct
  misc_feature 1..534: note = Description of Artificial Sequence: Synthetic coding sequence
  source 1..534: mol_type = other DNA
tgagagaagacctgcagcagcctggagcgggagccccacttcagcctgctgaccatgaggggccagaggctgcccctggacatccagatcttctactgtgcccggccagatgaggagccctttgtgaagatcatcaccgtggaggaggccaagaggaggaagagcacctgcagctactatgaagatgaagatgaggaggtgctgcctgtgctgcggccccacagcgccctgctggagaacatgcacatcgagcagctggcccggcggctgcctgcccgggtgcagggctacccctggaggctggcctacagcaccctggagcacggcaccagcctgaagaccctgtacaggaagagcgccagcctggacagccctgtgctgctggtgatcaaggacatggacaaccagatctttggagcctatgccacccaccccttcaagttcagtgaccactactatggaactggagagaccttcctgtacaccttcagcccccacttcaagggcaccatctggttcatggcccgctgctag

SEQ ID NO: 162323 - DNA, 573 bp, synthetic construct
  misc_feature 1..573: note = Description of Artificial Sequence: Synthetic coding sequence
  source 1..573: mol_type = other DNA
tgagagaagacctgcagcagcctggagcgggagccccacttcagcctgctgaccatgaggggccagaggctgcccctggacatccagatcttctactgtgcccggccagatgaggagccctttgtgaagatcatcaccgtggaggaggccaagaggaggaagagcacctgcagctactatgaagatgaagatgaggaggtgctgcctgtgctgcggccccacagcgccctgctggagaacatgcacatcgagcagctggcccggcggctgcctgcccgggtgcagggctacccctggaggctggcctacagcaccctggagcacggcaccagcctgaagaccctgtacaggaagagcgccagcctggacagccctgtgctgctggtgatcaaggacatggacaaccagatctttggagcctatgccacccaccccttcaagttcagtgaccactactatggaactggagagaccttcctgtacaccttcagcccccacttcaagtggagcggggagaacagctacttcatcaacggggacatcagcagcctggagctgggcggcggcggctag

SEQ ID NO: 162324 - DNA, 273 bp, synthetic construct; identical to SEQ ID NO: 162318
  misc_feature 1..273: note = Description of Artificial Sequence: Synthetic coding sequence
  source 1..273: mol_type = other DNA

SEQ ID NO: 162325 - DNA, 7566 bp, synthetic construct
  misc_feature 1..7566: note = Description of Artificial Sequence: Synthetic coding sequence
  source 1..7566: mol_type = other DNA
atgagcggcagcacccagcctgtggcccagacctggagggccacagagccccgctacccaccccacagcctgagctaccctgtgcagatcgcccggacccacacagatgtgggcctgctggagtaccagcaccacagccgggactatgccagccacctgagccctggcagcatcatccagccccagaggcggcggcccagcctgctgtctgagttccagcctggaaatgaaagaagccaggagctgcacctgcggcctgagagccacagctacctgcctgagctgggcaagtctgagatggagttcatcgagagcaagaggccccggctggagctgctgcctgaccccctgctgcggcccagccccctgctggccaccggccagcctgctggcagcgaggacctgaccaaggacaggagcctgaccgggaagctggagcctgtgagcccccccagccccccccacacagatcctgagctggagctggtgcccccccggctgagcaaggaggagctgatccagaacatggacagagtggaccgggagatcaccatggtggagcagcagatcagcaagctgaagaagaagcagcagcagctggaggaggaggccgccaagcccccagagcctgagaagcctgtgagccccccacccatcgagagcaagcacaggagcctggtgcagatcatctatgatgaaaataggaagaaggccgaggccgcccaccgcatcctggagggcctgggcccccaggtggagctgcccctgtacaaccagcccagcgacacccggcagtaccacgagaacatcaagatcaaccaggccatgaggaagaagctgatcctgtacttcaagagaagaaatcatgccaggaagcagtgggagcagaagttctgccagagatatgaccagctgatggaggcctgggagaagaaggtggagagaattgagaacaacccccggcggcgggccaaggagagcaaggtgcgggagtactatgagaagcagtttcctgagatcaggaagcagcgggagctgcaggagaggatgcagagccgggtgggccagaggggcagcggcctgtccatgtctgctgcccggtctgagcacgaggtgtctgagatcattgatggcctgtctgagcaggagaacctggagaagcagatgaggcagctggccgtcatcccccccatgctgtatgatgctgaccagcagaggatcaagttcatcaacatgaatggcctgatggctgaccccatgaaggtgtacaaggaccggcaggtgatgaacatgtggagcgagcaggagaaggagaccttccgggagaagttcatgcagcaccccaagaactttggcctcatcgccagcttcctggagaggaagacagtggctgaatgtgtgctgtactactacctgaccaagaagaatgaaaactacaagagcctggtgcggcgcagctacagaagaagaggcaagagccagcagcagcagcagcagcagcagcagcagcagcagcagcagcagcagcagcccatgcccaggagcagccaggaggagaaggatgagaaggagaaggagaaggaggccgagaaggaggaggagaagccagaggtggagaatgacaaggaggacctgctgaaggagaagacagatgacaccagcggggaggacaatgatgagaaggaggccgtggccagcaaaggaaggaagacagccaacagccagggccgcaggaagggccgcatcaccaggtccatggccaatgaggccaacagcgaggaggccatcaccccccagcagagcgctgagctggcctccatggagctgaatgaaagcagccgctggacagaggaggagatggagacagccaagaagggcctgctggagcacggcaggaactggagcgccatcgccaggatggtgggcagcaagacagtgtcccagtgcaagaacttctacttcaactacaagaagaggcagaacctggatgagatcctgcagcagcacaagctgaagatggagaaggagagaaatgcccggaggaagaagaagaaggccccagctgctgccagcgaggaggccgccttcccccctgtggtggaggatgaggagatggaggccagcggcgtgtctggaaatgaggaggagatggtggaggaggccgaggccctgcacgccagcggaaatgaggtgcccagaggagaatgttctggccctgccaccgtgaacaacagcagtgacacagagagcatccccagcccccacacagaggccgccaaggacaccggccagaatggccccaagcccccagccaccctgggcgcagatggccccccacctggcccccccaccccacctcctgaggacatcccagcccccacagagcccaccccagccagcgaggccactggagcccccaccccacctccagccccacccagccccagcgcccctcctcctgtggtgcccaaggaggagaaggaggaggagacagctgctgcccctcctgtggaggagggggaggagcagaagcccccagctgctgaggagctggccgtggacaccgggaaggccgaggagcctgtgaagtcagaatgtacagaggaggccgaggagggccctgccaagggcaaggatgctgaggccgctgaggccacagctgagggcgccctgaaggccgagaagaaggagggcggcagcggccgggccaccacagccaagagcagcggggccccccaggacagcgacagcagcgccacctgcagcgcagatgaggtggatgaagctgagggcggggacaagaaccggctgctgagcccccggcccagcctgctgacccccaccggggacccccgggccaatgccagcccccagaagcccctggacctgaagcagctgaagcagagagctgctgccatcccccccatcgtgaccaaggtgcatgagcccccccgggaggatgctgcccccaccaagccagcccccccagcccctcctccaccccagaacctgcagcctgagagtgatgccccccagcagcccggcagcagcccccggggcaagagccgcagccctgcccctcctgctgacaaggaggccgagaagcctgtgttcttccctgcctttgctgctgaggcccagaagctgcccggggaccccccctgctggaccagcggcctgcccttccctgtgcccccccgggaggtgatcaaggccagcccccacgccccagaccccagcgccttctcctatgcccctcctggccaccccctgcccctgggcctgcatgacacagcccggcctgtgctgccccggccccccaccatcagcaaccccccacccctcatcagcagcgccaagcaccccagcgtgctggagcggcagattggagccatcagccagggcatgtctgtgcagctgcacgtgccctacagcgagcacgccaaggcccctgtgggccctgtgaccatgggcctgcccctgcccatggaccccaagaagctggcccccttcagcggcgtgaagcaggagcagctgagcccccggggccaggccggccccccagagagcctgggcgtgcccacagcccaggaggcctctgtgctgcggggcacagccctgggctctgtgcctgggggcagcatcaccaagggcatccccagcaccagggtgcccagcgacagcgccatcacctaccggggcagcatcacccacggcaccccagcagatgtgctgtacaagggcaccatcacccgcatcatcggggaggacagccccagccggctggaccggggccgggaggacagcctgcccaagggccacgtgatctatgagggcaagaagggccacgtgctgtcctatgaaggaggcatgtctgtgacccagtgcagcaaagaagatggccgcagcagcagcggcccccctcatgaaacagctgcccccaagaggacctatgacatgatggagggccgggtgggccgggccatcagcagcgccagcattgagggcctgatgggccgggccatccccccagagcggcacagcccccaccacctgaaggagcagcaccacatccggggcagcatcacccagggcatccccaggagctatgtggaggcccaggaggactacctgcggcgggaggccaagctgctgaagcgggagggcaccccacctcctcctccacccagccgggacctgacagaggcctacaagacccaggccctgggccccctgaagctgaagccagcccacgagggcctggtggccaccgtgaaggaggccggccgcagcatccacgagatcccccgggaggagctgcggcacaccccagagctgcccctggccccccggcccctgaaggagggcagcatcacccagggcacccccctgaagtatgacaccggggccagcaccaccggcagcaagaagcatgatgtgcgcagcctcatcggcagccctggccgcaccttcccccctgtgcaccccctggatgtgatggctgatgcccgggccctggagcgggcctgctatgaggagagcctgaagagcaggcctggaacagccagcagcagcggcggcagcatcgcccggggggcccctgtgattgtgcctgagctgggcaagccccggcagagccccctgacctatgaagatcatggagccccctttgctggccacctgccccggggcagccctgtgaccacccgggagcccaccccccggctgcaggagggcagcctgagcagcagcaaggccagccaggacaggaagctgaccagcaccccccgggagatcgccaagagcccccacagcacagtgcctgagcaccacccccaccccatcagcccctatgagcacctgctgcggggcgtgtctggagtggacctgtaccgcagccacatccccctggcctttgaccccaccagcatcccccggggcatccccctggatgctgctgctgcctactacctgcccaggcacctggcccccaaccccacctacccccacctgtacccaccctacctgatccggggctacccagacacagctgccctggagaaccggcagaccatcatcaatgactacatcaccagccagcagatgcaccacaatgctgccacagccatggcccagagagctgacatgctgcggggcctgagcccccgggagagcagcctggccctgaactatgctgctggcccccggggcatcatcgacctgagccaggtgccccacctgcctgtgctggtgccccccaccccaggcaccccagccacagccatggaccggctggcctacctgcccacagccccccagcccttcagcagccgccacagcagcagccccctgagccctgggggccccacccacctgaccaagcccaccaccaccagcagcagcgagcgggagcgggaccgggaccgggagcgggaccgggaccgggagcgggagaagagcatcctgaccagcaccaccaccgtggagcacgcccccatctggaggcctggaacagagcagagcagcggcagcagcggcggcggcggcggcagcagcagcaggcctgccagccacagccacgcccaccagcacagccccatcagccccaggacccaggatgccctgcagcagaggcccagcgtgctgcacaacacaggcatgaagggcatcatcacagctgtggagcccagcacccccaccgtgctgcggagcaccagcaccagcagccctgtgcggcctgctgccaccttccccccagccacccactgccccctgggcggcaccctggatggagtgtaccccaccctgatggagcctgtgctgctgcccaaggaggccccccgggtggcccggcctgagcggcccagggctgacaccggccacgccttcctggccaagcccccagcccggagcggcctggagcccgccagcagccccagcaaaggaagtgagccccggcccctggtgccccctgtgtctggccacgccaccatcgcccggaccccagccaagaacctggccccccaccacgccagcccagaccccccagcccccccagccagcgccagtgacccccaccgggagaagacccagagcaagcccttcagcatccaggagctggagctgcggagcctgggctaccacggcagcagctacagccctgagggcgtggagcctgtgtcccctgtgagcagccccagcctgacccatgacaagggcctgcccaagcacctggaggagctggacaagagccacctggagggggagctgcggcccaagcagcccggccctgtgaagctgggcggggaggccgcccacctgccccacctgcggcccctgcctgagagccagcccagcagcagccccctgctgcagacagcccctggggtgaagggccaccagagggtggtgaccctggcccagcacatcagcgaggtgatcacccaggactacaccaggcaccacccccagcagctgagcgcccccctgcctgcccccctgtacagcttccctggggccagctgccctgtgctggacctgcggcggcccccaagtgacctgtacctgcccccaccagaccacggggccccagcccggggcagcccccacagcgagggcggcaagaggagccctgagcccaacaagacctctgtgctgggcggcggagaagatggcatcgagcctgtgtccccacctgagggcatgacagagcccggccacagccgctctgctgtgtaccccctgctgtacagagatggagagcagacagagcccagcaggatgggcagcaagagccctggcaacaccagccagcccccagccttcttcagcaagctgacagagagcaacagcgccatggtgaagagcaagaagcaggagatcaacaagaagctgaacacccacaacagaaatgaacctgagtacaacatcagccagcctggaacagagatcttcaacatgcctgccatcaccggcaccggcctgatgacctaccgcagccaggccgtgcaggagcacgccagcaccaacatgggcctggaggccatcatcaggaaggccctgatgggcaagtatgaccagtgggaggagagcccccccctgagcgccaatgccttcaaccccctgaatgccagcgccagcctgcctgctgccatgcccatcacagctgctgatggccgcagtgaccacaccctgaccagccctgggggcggcggcaaggccaaggtgtctggccggcccagcagcaggaaggccaagagccctgcccctggcctggccagcggggacaggcctccttctgtgtcctctgtgcacagcgagggggactgcaacagaaggacccccctgaccaacagagtgtgggaggaccggcccagcagcgctggcagcacccccttcccctacaaccccctcatcatgaggctgcaggccggcgtgatggccagccccccacctcctggcctgcctgctggcagcggccccctggccggcccccaccacgcctgggatgaggagcccaagcccctgctgtgcagccagtatgagaccctgagtgacagcgagtag

SEQ ID NO: 162326 - DNA, 7380 bp, synthetic construct
  misc_feature 1..7380: note = Description of Artificial Sequence: Synthetic coding sequence
  source 1..7380: mol_type = other DNA
atgagcggcagcacccagcctgtggcccagacctggagggccacagagccccgctacccaccccacagcctgagctaccctgtgcagatcgcccggacccacacagatgtgggcctgctggagtaccagcaccacagccgggactatgccagccacctgagccctggcagcatcatccagccccagaggcggcggcccagcctgctgtctgagttccagcctggaaatgaaagaagccaggagctgcacctgcggcctgagagccacagctacctgcctgagctgggcaagtctgagatggagttcatcgagagcaagaggccccggctggagctgctgcctgaccccctgctgcggcccagccccctgctggccaccggccagcctgctggcagcgaggacctgaccaaggacaggagcctgaccgggaagctggagcctgtgagcccccccagccccccccacacagatcctgagctggagctggtgcccccccggctgagcaaggaggagctgatccagaacatggacagagtggaccgggagatcaccatggtggagcagcagatcagcaagctgaagaagaagcagcagcagctggaggaggaggccgccaagcccccagagcctgagaagcctgtgagccccccacccatcgagagcaagcacaggagcctggtgcagatcatctatgatgaaaataggaagaaggccgaggccgcccaccgcatcctggagggcctgggcccccaggtggagctgcccctgtacaaccagcccagcgacacccggcagtaccacgagaacatcaagatcaaccaggccatgaggaagaagctgatcctgtacttcaagagaagaaatcatgccaggaagcagtgggagcagaagttctgccagagatatgaccagctgatggaggcctgggagaagaaggtggagagaattgagaacaacccccggcggcgggccaaggagagcaaggtgcgggagtactatgagaagcagtttcctgagatcaggaagcagcgggagctgcaggagaggatgcagagccgggtgggccagaggggcagcggcctgtccatgtctgctgcccggtctgagcacgaggtgtctgagatcattgatggcctgtctgagcaggagaacctggagaagcagatgaggcagctggccgtcatcccccccatgctgtatgatgctgaccagcagaggatcaagttcatcaacatgaatggcctgatggctgaccccatgaaggtgtacaaggaccggcaggtgatgaacatgtggagcgagcaggagaaggagaccttccgggagaagttcatgcagcaccccaagaactttggcctcatcgccagcttcctggagaggaagacagtggctgaatgtgtgctgtactactacctgaccaagaagaatgaaaactacaagagcctggtgcggcgcagctacagaagaagaggcaagagccagcagcagcagcagcagcagcagcagcagcagcagcagcagcagcagcagcccatgcccaggagcagccaggaggagaaggatgagaaggagaaggagaaggaggccgagaaggaggaggagaagccagaggtggagaatgacaaggaggacctgctgaaggagaagacagatgacaccagcggggaggacaatgatgagaaggaggccgtggccagcaaaggaaggaagacagccaacagccagggccgcaggaagggccgcatcaccaggtccatggccaatgaggccaacagcgaggaggccatcaccccccagcagagcgctgagctggcctccatggagctgaatgaaagcagccgctggacagaggaggagatggagacagccaagaagggcctgctggagcacggcaggaactggagcgccatcgccaggatggtgggcagcaagacagtgtcccagtgcaagaacttctacttcaactacaagaagaggcagaacctggatgagatcctgcagcagcacaagctgaagatggagaaggagagaaatgcccggaggaagaagaagaaggccccagctgctgccagcgaggaggccgccttcccccctgtggtggaggatgaggagatggaggccagcggcgtgtctggaaatgaggaggagatggtggaggaggccgaggccaccgtgaacaacagcagtgacacagagagcatccccagcccccacacagaagctgccaaggacaccggccagaatggccccaagcccccagccaccctgggcgcagatggccccccacctggcccccccaccccacctcctgaggacatcccagcccccacagagcccaccccagccagcgaggccaccggggcccccaccccacctccagccccacccagccccagcgcccctcctcctgtggtgcccaaggaggagaaggaggaggagacagctgctgcccctcctgtggaggagggggaggagcagaagcccccagctgctgaggagctggccgtggacaccgggaaggccgaggagcctgtgaagtctgagtgcacagaggaggccgaggagggccctgccaagggcaaggatgctgaggccgctgaggccacagctgagggcgccctgaaggccgagaagaaggagggcggcagcggccgggccaccacagccaagagcagcggggccccccaggacagcgacagcagcgccacctgcagcgcagatgaggtggatgaggccgagggcggggacaagaaccggctgctgagcccccggcccagcctgctgacccccactggagacccccgggccaatgccagcccccagaagcccctggacctgaagcagctgaagcagagagctgctgccatcccccccatccaggtgaccaaggtgcatgagcccccccgggaggatgctgcccccaccaagccagcccccccagcccctcctccaccccagaacctgcagcctgagagtgatgccccccagcagcccggcagcagcccccggggcaagagccgcagccctgcccctcctgctgacaaggaggccgagaagcctgtgttcttccctgcctttgctgctgaggcccagaagctgcccggggaccccccctgctggaccagcggcctgcccttccctgtgcccccccgggaggtgatcaaggccagcccccacgccccagaccccagcgccttctcctatgcccctcctggccaccccctgcccctgggcctgcatgacacagcccggcctgtgctgccccggccccccaccatcagcaaccccccacccctcatcagcagcgccaagcaccccagcgtgctggagcggcagattggagccatcagccagggcatgtctgtgcagctgcacgtgccctacagcgagcacgccaaggcccctgtgggccctgtgaccatgggcctgcccctgcccatggaccccaagaagctggcccccttcagcggcgtgaagcaggagcagctgagcccccggggccaggccggccccccagagagcctgggcgtgcccacagcccaggaggcctctgtgctgcggggcacagccctgggctctgtgcctgggggcagcatcaccaagggcatccccagcaccagggtgcccagcgacagcgccatcacctaccggggcagcatcacccacggcaccccagcagatgtgctgtacaagggcaccatcacccgcatcatcggggaggacagccccagccggctggaccggggccgggaggacagcctgcccaagggccacgtgatctatgagggcaagaagggccacgtgctgtcctatgaaggaggcatgtctgtgacccagtgcagcaaagaagatggccgcagcagcagcggcccccctcatgaaacagctgcccccaagaggacctatgacatgatggagggccgggtgggccgggccatcagcagcgccagcattgagggcctgatgggccgggccatccccccagagcggcacagcccccaccacctgaaggagcagcaccacatccggggcagcatcacccagggcatccccaggagctatgtggaggcccaggaggactacctgcggcgggaggccaagctgctgaagcgggagggcaccccacctcctcctccacccagccgggacctgacagaggcctacaagacccaggccctgggccccctgaagctgaagccagcccacgagggcctggtggccaccgtgaaggaggccggccgcagcatccacgagatcccccgggaggagctgcggcacaccccagagctgcccctggccccccggcccctgaaggagggcagcatcacccagggcacccccctgaagtatgacaccggggccagcaccaccggcagcaagaagcatgatgtgcgcagcctcatcggcagccctggccgcaccttcccccctgtgcaccccctggatgtgatggctgatgcccgggccctggagcgggcctgctatgaggagagcctgaagagcaggcctggaacagccagcagcagcggcggcagcatcgcccggggggcccctgtgattgtgcctgagctgggcaagccccggcagagccccctgacctatgaagatcatggagccccctttgctggccacctgccccggggcagccctgtgaccacccgggagcccaccccccggctgcaggagggcagcctgagcagcagcaaggccagccaggacaggaagctgaccagcaccccccgggagatcgccaagagcccccacagcacagtgcctgagcaccacccccaccccatcagcccctatgagcacctgctgcggggcgtgtctggagtggacctgtaccgcagccacatccccctggcctttgaccccaccagcatcccccggggcatccccctggatgctgctgctgcctactacctgcccaggcacctggcccccaaccccacctacccccacctgtacccaccctacctgatccggggctacccagacacagctgccctggagaaccggcagaccatcatcaatgactacatcaccagccagcagatgcaccacaatgctgccacagccatggcccagagagctgacatgctgcggggcctgagcccccgggagagcagcctggccctgaactatgctgctggcccccggggcatcatcgacctgagccaggtgccccacctgcctgtgctggtgccccccaccccaggcaccccagccacagccatggaccggctggcctacctgcccacagccccccagcccttcagcagccgccacagcagcagccccctgagccctgggggccccacccacctgaccaagcccaccaccaccagcagcagcgagcgggagcgggaccgggaccgggagcgggaccgggaccgggagcgggagaagagcatcctgaccagcaccaccaccgtggagcacgcccccatctggaggcctggaacagagcagagcagcggcagcagcggcggcggcggcggcagcagcagcaggcctgccagccacagccacgcccaccagcacagccccatcagccccaggacccaggatgccctgcagcagaggcccagcgtgctgcacaacacaggcatgaagggcatcatcacagctgtggagcccagcacccccaccgtgctgcggagcaccagcaccagcagccctgtgcggcctgctgccaccttccccccagccacccactgccccctgggcggcaccctggatggagtgtaccccaccctgatggagcctgtgctgctgcccaaggaggccccccgggtggcccggcctgagcggcccagggctgacaccggccacgccttcctggccaagcccccagcccggagcggcctggagcccgccagcagccccagcaaaggaagtgagccccggcccctggtgccccctgtgtctggccacgccaccatcgcccggaccccagccaagaacctggccccccaccacgccagcccagaccccccagcccccccagccagcgccagtgacccccaccgggagaagacccagagcaagcccttcagcatccaggagctggagctgcggagcctgggctaccacggcagcagctacagccctgagggcgtggagcctgtgtcccctgtgagcagccccagcctgacccatgacaagggcctgcccaagcacctggaggagctggacaagagccacctggagggggagctgcggcccaagcagcccggccctgtgaagctgggcggggaggccgcccacctgccccacctgcggcccctgcctgagagccagcccagcagcagccccctgctgcagacagcccctggggtgaagggccaccagagggtggtgaccctggcccagcacatcagcgaggtgatcacccaggactacaccaggcaccacccccagcagctgagcgcccccctgcctgcccccctgtacagcttccctggggccagctgccctgtgctggacctgcggcggcccccaagtgacctgtacctgcccccaccagaccacggggccccagcccggggcagcccccacagcgagggcggcaagaggagccctgagcccaacaagacctctgtgctgggcggcggagaagatggcatcgagcctgtgtccccacctgagggcatgacagagcccggccacagccgctctgctgtgtaccccctgctgtacagagatggagagcagacagagcccagcaggatgggcagcaagagccctggcaacaccagccagcccccagccttcttcagcaagctgacagagagcaacagcgccatggtgaagagcaagaagcaggagatcaacaagaagctgaacacccacaacagaaatgaacctgagtacaacatcagccagcctggaacagagatcttcaacatgcctgccatcaccggcaccggcctgatgacctaccgcagccaggccgtgcaggagcacgccagcaccaacatgggcctggaggccatcatcaggaaggccctgatgggcggcggcggcaaggccaaggtgtctggccggcccagcagcaggaaggccaagagccctgcccctggcctggccagcggggacaggcctccttctgtgtcctctgtgcacagcgagggggactgcaacagaaggacccccctgaccaacagagtgtgggaggaccggcccagcagcgctggcagcacccccttcccctacaaccccctcatcatgaggctgcaggccggcgtgatggccagccccccacctcctggcctgcctgctggcagcggccccctggccggcccccaccacgcctgggatgaggagcccaagcccctgctgtgcagccagtatgagaccctgagtgacagcgagtag

SEQ ID NO: 162327 - DNA, 6228 bp, synthetic construct
  misc_feature 1..6228: note = Description of Artificial Sequence: Synthetic coding sequence
  source 1..6228: mol_type = other DNA
atgtggagcgagcaggagaaggagaccttccgggagaagttcatgcagcaccccaagaactttggcctcatcgccagcttcctggagaggaagacagtggctgaatgtgtgctgtactactacctgaccaagaagaatgaaaactacaagagcctggtgcggcgcagctacagaagaagaggcaagagccagcagcagcagcagcagcagcagcagcagcagcagcagcagcagcagcagcccatgcccaggagcagccaggaggagaaggatgagaaggagaaggagaaggaggccgagaaggaggaggagaagccagaggtggagaatgacaaggaggacctgctgaaggagaagacagatgacaccagcggggaggacaatgatgagaaggaggccgtggccagcaaaggaaggaagacagccaacagccagggccgcaggaagggccgcatcaccaggtccatggccaatgaggccaacagcgaggaggccatcaccccccagcagagcgctgagctggcctccatggagctgaatgaaagcagccgctggacagaggaggagatggagacagccaagaagggcctgctggagcacggcaggaactggagcgccatcgccaggatggtgggcagcaagacagtgtcccagtgcaagaacttctacttcaactacaagaagaggcagaacctggatgagatcctgcagcagcacaagctgaagatggagaaggagagaaatgcccggaggaagaagaagaaggccccagctgctgccagcgaggaggccgccttcccccctgtggtggaggatgaggagatggaggccagcggcgtgtctggaaatgaggaggagatggtggaggaggccgaggccaccgtgaacaacagcagtgacacagagagcatccccagcccccacacagaagctgccaaggacaccggccagaatggccccaagcccccagccaccctgggcgcagatggccccccacctggcccccccaccccacctcctgaggacatcccagcccccacagagcccaccccagccagcgaggccaccggggcccccaccccacctccagccccacccagccccagcgcccctcctcctgtggtgcccaaggaggagaaggaggaggagacagctgctgcccctcctgtggaggagggggaggagcagaagcccccagctgctgaggagctggccgtggacaccgggaaggccgaggagcctgtgaagtctgagtgcacagaggaggccgaggagggccctgccaagggcaaggatgctgaggccgctgaggccacagctgagggcgccctgaaggccgagaagaaggagggcggcagcggccgggccaccacagccaagagcagcggggccccccaggacagcgacagcagcgccacctgcagcgcagatgaggtggatgaggccgagggcggggacaagaaccggctgctgagcccccggcccagcctgctgacccccactggagacccccgggccaatgccagcccccagaagcccctggacctgaagcagctgaagcagagagctgctgccatcccccccatccaggtgaccaaggtgcatgagcccccccgggaggatgctgcccccaccaagccagcccccccagcccctcctccaccccagaacctgcagcctgagagtgatgccccccagcagcccggcagcagcccccggggcaagagccgcagccctgcccctcctgctgacaaggaggccgagaagcctgtgttcttccctgcctttgctgctgaggcccagaagctgcccggggaccccccctgctggaccagcggcctgcccttccctgtgcccccccgggaggtgatcaaggccagcccccacgccccagaccccagcgccttctcctatgcccctcctggccaccccctgcccctgggcctgcatgacacagcccggcctgtgctgccccggccccccaccatcagcaaccccccacccctcatcagcagcgccaagcaccccagcgtgctggagcggcagattggagccatcagccagggcatgtctgtgcagctgcacgtgccctacagcgagcacgccaaggcccctgtgggccctgtgaccatgggcctgcccctgcccatggaccccaagaagctggcccccttcagcggcgtgaagcaggagcagctgagcccccggggccaggccggccccccagagagcctgggcgtgcccacagcccaggaggcctctgtgctgcggggcacagccctgggctctgtgcctgggggcagcatcaccaagggcatccccagcaccagggtgcccagcgacagcgccatcacctaccggggcagcatcacccacggcaccccagcagatgtgctgtacaagggcaccatcacccgcatcatcggggaggacagccccagccggctggaccggggccgggaggacagcctgcccaagggccacgtgatctatgagggcaagaagggccacgtgctgtcctatgaaggaggcatgtctgtgacccagtgcagcaaagaagatggccgcagcagcagcggcccccctcatgaaacagctgcccccaagaggacctatgacatgatggagggccgggtgggccgggccatcagcagcgccagcattgagggcctgatgggccgggccatccccccagagcggcacagcccccaccacctgaaggagcagcaccacatccggggcagcatcacccagggcatccccaggagctatgtggaggcccaggaggactacctgcggcgggaggccaagctgctgaagcgggagggcaccccacctcctcctccacccagccgggacctgacagaggcctacaagacccaggccctgggccccctgaagctgaagccagcccacgagggcctggtggccaccgtgaaggaggccggccgcagcatccacgagatcccccgggaggagctgcggcacaccccagagctgcccctggccccccggcccctgaaggagggcagcatcacccagggcacccccctgaagtatgacaccggggccagcaccaccggcagcaagaagcatgatgtgcgcagcctcatcggcagccctggccgcaccttcccccctgtgcaccccctggatgtgatggctgatgcccgggccctggagcgggcctgctatgaggagagcctgaagagcaggcctggaacagccagcagcagcggcggcagcatcgcccggggggcccctgtgattgtgcctgagctgggcaagccccggcagagccccctgacctatgaagatcatggagccccctttgctggccacctgccccggggcagccctgtgaccacccgggagcccaccccccggctgcaggagggcagcctgagcagcagcaaggccagccaggacaggaagctgaccagcaccccccgggagatcgccaagagcccccacagcacagtgcctgagcaccacccccaccccatcagcccctatgagcacctgctgcggggcgtgtctggagtggacctgtaccgcagccacatccccctggcctttgaccccaccagcatcccccggggcatccccctggatgctgctgctgcctactacctgcccaggcacctggcccccaaccccacctacccccacctgtacccaccctacctgatccggggctacccagacacagctgccctggagaaccggcagaccatcatcaatgactacatcaccagccagcagatgcaccacaatgctgccacagccatggcccagagagctgacatgctgcggggcctgagcccccgggagagcagcctggccctgaactatgctgctggcccccggggcatcatcgacctgagccaggtgccccacctgcctgtgctggtgccccccaccccaggcaccccagccacagccatggaccggctggcctacctgcccacagccccccagcccttcagcagccgccacagcagcagccccctgagccctgggggccccacccacctgaccaagcccaccaccaccagcagcagcgagcgggagcgggaccgggaccgggagcgggaccgggaccgggagcgggagaagagcatcctgaccagcaccaccaccgtggagcacgcccccatctggaggcctggaacagagcagagcagcggcagcagcggcggcggcggcggcagcagcagcaggcctgccagccacagccacgcccaccagcacagccccatcagccccaggacccaggatgccctgcagcagaggcccagcgtgctgcacaacacaggcatgaagggcatcatcacagctgtggagcccagcacccccaccgtgctgcggagcaccagcaccagcagccctgtgcggcctgctgccaccttccccccagccacccactgccccctgggcggcaccctggatggagtgtaccccaccctgatggagcctgtgctgctgcccaaggaggccccccgggtggcccggcctgagcggcccagggctgacaccggccacgccttcctggccaagcccccagcccggagcggcctggagcccgccagcagccccagcaaaggaagtgagccccggcccctggtgccccctgtgtctggccacgccaccatcgcccggaccccagccaagaacctggccccccaccacgccagcccagaccccccagcccccccagccagcgccagtgacccccaccgggagaagacccagagcaagcccttcagcatccaggagctggagctgcggagcctgggctaccacggcagcagctacagccctgagggcgtggagcctgtgtcccctgtgagcagccccagcctgacccatgacaagggcctgcccaagcacctggaggagctggacaagagccacctggagggggagctgcggcccaagcagcccggccctgtgaagctgggcggggaggccgcccacctgccccacctgcggcccctgcctgagagccagcccagcagcagccccctgctgcagacagcccctggggtgaagggccaccagagggtggtgaccctggcccagcacatcagcgaggtgatcacccaggactacaccaggcaccacccccagcagctgagcgcccccctgcctgcccccctgtacagcttccctggggccagctgccctgtgctggacctgcggcggcccccaagtgacctgtacctgcccccaccagaccacggggccccagcccggggcagcccccacagcgagggcggcaagaggagccctgagcccaacaagacctctgtgctgggcggcggagaagatggcatcgagcctgtgtccccacctgagggcatgacagagcccggccacagccgctctgctgtgtaccccctgctgtacagagatggagagcagacagagcccagcaggatgggcagcaagagccctggcaacaccagccagcccccagccttcttcagcaagctgacagagagcaacagcgccatggtgaagagcaagaagcaggagatcaacaagaagctgaacacccacaacagaaatgaacctgagtacaacatcagccagcctggaacagagatcttcaacatgcctgccatcaccggcaccggcctgatgacctaccgcagccaggccgtgcaggagcacgccagcaccaacatgggcctggaggccatcatcaggaaggccctgatgggcaagtatgaccagtgggaggagagcccccccctgagcgccaatgccttcaaccccctgaatgccagcgccagcctgcctgctgccatgcccatcacagctgctgatggccgcagtgaccacaccctgaccagccctgggggcggcggcaaggccaaggtgtctggccggcccagcagcaggaaggccaagagccctgcccctggcctggccagcggggacaggcctccttctgtgtcctctgtgcacagcgagggggactgcaacagaaggacccccctgaccaacagagtgtgggaggaccggcccagcagcgctggcagcacccccttcccctacaaccccctcatcatgaggctgcaggccggcgtgatggccagccccccacctcctggcctgcctgctggcagcggccccctggccggcccccaccacgcctgggatgaggagcccaagcccctgctgtgcagccagtatgagaccctgagtgacagcgagtag

SEQ ID NO: 162328 - DNA, 7377 bp, synthetic construct
  misc_feature 1..7377: note = Description of Artificial Sequence: Synthetic coding sequence
  source 1..7377: mol_type = other DNA
atgagcggcagcacccagcctgtggcccagacctggagggccacagagccccgctacccaccccacagcctgagctaccctgtgcagatcgcccggacccacacagatgtgggcctgctggagtaccagcaccacagccgggactatgccagccacctgagccctggcagcatcatccagccccagaggcggcggcccagcctgctgtctgagttccagcctggaaatgaaagaagccaggagctgcacctgcggcctgagagccacagctacctgcctgagctgggcaagtctgagatggagttcatcgagagcaagaggccccggctggagctgctgcctgaccccctgctgcggcccagccccctgctggccaccggccagcctgctggcagcgaggacctgaccaaggacaggagcctgaccgggaagctggagcctgtgagcccccccagccccccccacacagatcctgagctggagctggtgcccccccggctgagcaaggaggagctgatccagaacatggacagagtggaccgggagatcaccatggtggagcagcagatcagcaagctgaagaagaagcagcagcagctggaggaggaggccgccaagcccccagagcctgagaagcctgtgagccccccacccatcgagagcaagcacaggagcctggtgcagatcatctatgatgaaaataggaagaaggccgaggccgcccaccgcatcctggagggcctgggcccccaggtggagctgcccctgtacaaccagcccagcgacacccggcagtaccacgagaacatcaagatcaaccaggccatgaggaagaagctgatcctgtacttcaagagaagaaatcatgccaggaagcagtgggagcagaagttctgccagagatatgaccagctgatggaggcctgggagaagaaggtggagagaattgagaacaacccccggcggcgggccaaggagagcaaggtgcgggagtactatgagaagcagtttcctgagatcaggaagcagcgggagctgcaggagaggatgcagagggtgggccagaggggcagcggcctgtccatgtctgctgcccggagtgaacatgaggtgtctgagatcattgatggcctgtctgagcaggagaacctggagaagcagatgaggcagctggccgtcatcccccccatgctgtatgatgctgaccagcagaggatcaagttcatcaacatgaatggcctgatggctgaccccatgaaggtgtacaaggaccggcaggtgatgaacatgtggagcgagcaggagaaggagaccttccgggagaagttcatgcagcaccccaagaactttggcctgattgccagcttcctggagaggaagacagtggccgagtgtgtgctgtactactacctgaccaagaagaatgaaaactacaagagcctggtgagaagaagctacagaagaagaggcaagagccagcagcagcagcagcagcagcagcagcagcagcagcagcagcagcagcagcccatgcccaggagcagccaggaggagaaggatgagaaggagaaggagaaggaggccgagaaggaggaggagaagccagaggtggagaatgacaaggaggacctgctgaaggagaagacagatgacaccagcggagaagataatgatgagaaggaggccgtggccagcaagggcaggaagacagccaacagccagggccgcaggaagggccgcatcaccaggtccatggccaatgaggccaacagcgaggaggccatcaccccccagcagagcgctgagctggcctccatggagctgaatgaaagcagccgctggacagaggaggagatggagacagccaagaagggcctgctggagcacggcaggaactggagcgccatcgccaggatggtgggcagcaagacagtgtcccagtgcaagaacttctacttcaactacaagaagaggcagaacctggatgagatcctgcagcagcacaagctgaagatggagaaggagagaaatgcccggaggaagaagaagaaggccccagctgctgccagcgaggaggccgccttcccccctgtggtggaggatgaggagatggaggccagcggcgtgtctggaaatgaggaggagatggtggaggaggccgaggccaccgtgaacaacagcagtgacacagagagcatccccagcccccacacagaggccgccaaggacaccggccagaatggccccaagcccccagccaccctgggcgcagatggccccccacctggcccccccaccccacctcctgaggacatcccagcccccacagagcccaccccagccagcgaggccactggagcccccaccccacctccagccccacccagccccagcgcccctcctcctgtggtgcccaaggaggagaaggaggaggagacagctgctgcccctcctgtggaggagggggaggagcagaagcccccagctgctgaggagctggccgtggacaccgggaaggccgaggagcctgtgaagtcagaatgtacagaggaggccgaggagggccctgccaagggcaaggatgctgaggccgctgaggccacagctgagggcgccctgaaggccgagaagaaggagggcggcagcggccgggccaccacagccaagagcagcggggccccccaggacagcgacagcagcgccacctgcagcgcagatgaggtggatgaagctgagggcggggacaagaaccggctgctgagcccccggcccagcctgctgacccccaccggggacccccgggccaatgccagcccccagaagcccctggacctgaagcagctgaagcagagagctgctgccatcccccccatccaggtgaccaaggtgcatgagcccccaagagaagatgctgcccccaccaagccagcccccccagcccctcctccaccccagaacctgcagcctgagagtgatgccccccagcagcccggcagcagcccccggggcaagagccgcagccctgcccccccagctgacaaggaggccgagaagcctgtgttcttccctgcctttgctgctgaggcccagaagctgcccggggaccccccctgctggaccagcggcctgcccttccctgtgcccccccgggaggtgatcaaggccagcccccacgccccagaccccagcgccttctcctatgcccctcctggccaccccctgcccctgggcctgcatgacacagcccggcctgtgctgcccaggcctcccaccatcagcaaccccccacccctcatcagcagcgccaagcaccccagcgtgctggagcggcagatcggggccatcagccagggcatgtctgtgcagctgcacgtgccctacagcgagcacgccaaggcccctgtgggccctgtgaccatgggcctgcccctgcccatggaccccaagaagctggcccccttctctggagtgaagcaggagcagctgagcccccggggccaggccggccccccagagagcctgggcgtgcccacagcccaggaggcctctgtgctgcggggcacagccctgggctctgtgcctgggggcagcatcaccaagggcatccccagcaccagggtgcccagcgacagcgccatcacctaccggggcagcatcacccacggcaccccagcagatgtgctgtacaagggcaccatcacccgcatcattggagaggacagccccagccggctggaccggggccgggaggacagcctgcccaagggccacgtgatctatgagggcaagaagggccacgtgctgtcctatgagggcggcatgtctgtgacccagtgcagcaaggaggatggccgcagcagcagcggcccccctcatgaaacagctgcccccaagaggacctatgacatgatggagggccgggtgggccgggccatcagcagcgccagcattgagggcctgatgggccgggccatccccccagagcggcacagcccccaccacctgaaggagcagcaccacatccggggcagcatcacccagggcatccccaggagctatgtggaggcccaggaggactacctgcggcgggaggccaagctgctgaagcgggagggcaccccacctcctcctccacccagccgggacctgacagaggcctacaagacccaggccctgggccccctgaagctgaagccagcccacgagggcctggtggccaccgtgaaggaggccggccgcagcatccacgagatcccccgggaggagctgcggcacaccccagagctgcccctggccccccggcccctgaaggagggcagcatcacccagggcacccccctgaagtatgacacaggagccagcaccaccggcagcaagaagcatgatgtgcgcagcctgattggcagccctggccgcaccttcccccctgtgcaccccctggatgtgatggctgatgcccgggccctggagcgggcctgctatgaggagagcctgaagagccggcccggcacagccagcagcagcggcggcagcatcgcccggggggcccctgtgattgtgcctgagctgggcaagccccggcagagccccctgacctatgaggaccacggggccccctttgctggccacctgccccggggcagccctgtgaccacccgggagcccaccccccggctgcaggagggcagcctgagcagcagcaaggccagccaggacaggaagctgaccagcaccccccgggagatcgccaagagcccccacagcacagtgcctgagcaccacccccaccccatcagcccctatgagcacctgctgcggggcgtgtctggagtggacctgtaccgcagccacatccccctggcctttgaccccaccagcatcccccggggcatccccctggatgctgctgctgcctactacctgcccaggcacctggcccccaaccccacctacccccacctgtacccaccctacctgatccggggctacccagacacagctgccctggagaaccggcagaccatcatcaatgactacatcaccagccagcagatgcaccacaatgctgccacagccatggcccagagagctgacatgctgcggggcctgagcccccgggagagcagcctggccctgaactatgctgctggcccccggggcatcatcgacctgagccaggtgccccacctgcctgtgctggtgccccccaccccaggcaccccagccacagccatggaccggctggcctacctgcccacagccccccagcccttcagcagccgccacagcagcagccccctgagccctgggggccccacccacctgaccaagcccaccaccaccagcagcagcgagcgggagcgggaccgggaccgggagcgggaccgggaccgggagcgggagaagagcatcctgaccagcaccaccaccgtggagcacgcccccatctggaggcctggaacagagcagagcagcggcagcagcggcggcggcggcggcagcagcagcaggcctgccagccacagccacgcccaccagcacagccccatcagccccaggacccaggatgccctgcagcagaggccttctgtgctgcacaacacaggcatgaagggcatcatcacagctgtggagcccagcacccccaccgtgctgcggagcaccagcaccagcagccctgtgcggcctgctgccaccttccccccagccacccactgccccctgggcggcaccctggatggagtgtaccccaccctgatggagcctgtgctgctgcccaaggaggccccccgggtggcccggcctgagcggcccagggctgacaccggccacgccttcctggccaagcccccagcccggagcggcctggagcccgccagcagccccagcaagggcagcgagccccggcccctggtgccccctgtgtctggccacgccaccatcgcccggaccccagccaagaacctggccccccaccacgccagcccagaccccccagcccccccagccagcgccagtgacccccaccgggagaagacccagagcaagcccttcagcatccaggagctggagctgcggagcctgggctaccacggcagcagctacagccctgagggcgtggagcctgtgtcccctgtgagcagccccagcctgacccatgacaagggcctgcccaagcacctggaggagctggacaagagccacctggagggggagctgcggcccaagcagcccggccctgtgaagctgggcggggaggccgcccacctgccccacctgcggcccctgcctgagagccagcccagcagcagccccctgctgcagacagcccctggggtgaagggccaccagagggtggtgaccctggcccagcacatcagcgaggtgatcacccaggactacaccaggcaccacccccagcagctgagcgcccccctgcctgcccccctgtacagcttccctggggccagctgccctgtgctggacctgcggcggccccccagcgacctgtacctgcccccaccagaccatggagccccagcccggggcagcccccacagcgagggcggcaagaggagccctgagcccaacaagacctctgtgctgggcggcggggaggatggcatcgagcctgtgagccccccagagggcatgacagagcccggccacagccgctctgctgtgtaccccctgctgtacagagatggagagcagacagagcccagcaggatgggcagcaagagccctggcaacaccagccagcccccagccttcttcagcaagctgacagagagcaacagcgccatggtgaagagcaagaagcaggagatcaacaagaagctgaacacccacaacagaaatgaacctgagtacaacatcagccagcccggcacagagatcttcaacatgcctgccatcactggaacaggcctgatgacctaccgcagccaggccgtgcaggagcacgccagcaccaacatgggcctggaggccatcatcaggaaggccctgatgggcggcggcggcaaggccaaggtgtctggccggcccagcagcaggaaggccaagagccctgcccctggcctggccagcggggaccggccccccagcgtgtcctctgtgcacagcgagggggactgcaacagaaggacccccctgaccaacagagtgtgggaggaccggcccagcagcgctggcagcacccccttcccctacaaccccctcatcatgaggctgcaggccggcgtgatggccagccccccacctcctggcctgcctgctggcagcggccccctggccggcccccaccacgcctgggatgaggagcccaagcccctgctgtgcagccagtatgagaccctgagtgacagcgagtag

SEQ ID NO: 162329 - DNA, 7545 bp, synthetic construct
  misc_feature 1..7545: note = Description of Artificial Sequence: Synthetic coding sequence
  source 1..7545: mol_type = other DNA
atgagcggcagcacccagcctgtggcccagacctggagggccacagagccccgctacccaccccacagcctgagctaccctgtgcagatcgcccggacccacacagatgtgggcctgctggagtaccagcaccacagccgggactatgccagccacctgagccctggcagcatcatccagccccagaggcggcggcccagcctgctgtctgagttccagcctggaaatgaaagaagccaggagctgcacctgcggcctgagagccacagctacctgcctgagctgggcaagtctgagatggagttcatcgagagcaagaggccccggctggagctgctgcctgaccccctgctgcggcccagccccctgctggccaccggccagcctgctggcagcgaggacctgaccaaggacaggagcctgaccgggaagctggagcctgtgagcccccccagccccccccacacagatcctgagctggagctggtgcccccccggctgagcaaggaggagctgatccagaacatggacagagtggaccgggagatcaccatggtggagcagcagatcagcaagctgaagaagaagcagcagcagctggaggaggaggccgccaagcccccagagcctgagaagcctgtgagccccccacccatcgagagcaagcacaggagcctggtgcagatcatctatgatgaaaataggaagaaggccgaggccgcccaccgcatcctggagggcctgggcccccaggtggagctgcccctgtacaaccagcccagcgacacccggcagtaccacgagaacatcaagatcaaccaggccatgaggaagaagctgatcctgtacttcaagagaagaaatcatgccaggaagcagtgggagcagaagttctgccagagatatgaccagctgatggaggcctgggagaagaaggtggagagaattgagaacaacccccggcggcgggccaaggagagcaaggtgcgggagtactatgagaagcagtttcctgagatcaggaagcagcgggagctgcaggagaggatgcagagccgggtgggccagaggggcagcggcctgtccatgtctgctgcccggtctgagcacgaggtgtctgagatcattgatggcctgtctgagcaggagaacctggagaagcagatgaggcagctggccgtcatcccccccatgctgtatgatgctgaccagcagaggatcaagttcatcaacatgaatggcctgatggctgaccccatgaaggtgtacaaggaccggcaggtgatgaacatgtggagcgagcaggagaaggagaccttccgggagaagttcatgcagcaccccaagaactttggcctcatcgccagcttcctggagaggaagacagtggctgaatgtgtgctgtactactacctgaccaagaagaatgaaaactacaagagcctggtgcggcgcagctacagaagaagaggcaagagccagcagcagcagcagcagcagcagcagcagcagcagcagcagcagcagcagcccatgcccaggagcagccaggaggagaaggatgagaaggagaaggagaaggaggccgagaaggaggaggagaagccagaggtggagaatgacaaggaggacctgctgaaggagaagacagatgacaccagcggggaggacaatgatgagaaggaggccgtggccagcaaaggaaggaagacagccaacagccagggccgcaggaagggccgcatcaccaggtccatggccaatgaggccaacagcgaggaggccatcaccccccagcagagcgctgagctggcctccatggagctgaatgaaagcagccgctggacagaggaggagatggagacagccaagaagggcctgctggagcacggcaggaactggagcgccatcgccaggatggtgggcagcaagacagtgtcccagtgcaagaacttctacttcaactacaagaagaggcagaacctggatgagatcctgcagcagcacaagctgaagatggagaaggagagaaatgcccggaggaagaagaagaaggccccagctgctgccagcgaggaggccgccttcccccctgtggtggaggatgaggagatggaggccagcggcgtgtctggaaatgaggaggagatggtggaggaggccgaggccctgcacgccagcggaaatgaggtgcccagaggagaatgttctggccctgccaccgtgaacaacagcagtgacacagagagcatccccagcccccacacagaggccgccaaggacaccggccagaatggccccaagcccccagccaccctgggcgcagatggccccccacctggcccccccaccccacctcctgaggacatcccagcccccacagagcccaccccagccagcgaggccactggagcccccaccccacctccagccccacccagccccagcgcccctcctcctgtggtgcccaaggaggagaaggaggaggagacagctgctgcccctcctgtggaggagggggaggagcagaagcccccagctgctgaggagctggccgtggacaccgggaaggccgaggagcctgtgaagtcagaatgtacagaggaggccgaggagggccctgccaagggcaaggatgctgaggccgctgaggccacagctgagggcgccctgaaggccgagaagaaggagggcggcagcggccgggccaccacagccaagagcagcggggccccccaggacagcgacagcagcgccacctgcagcgcagatgaggtggatgaagctgagggcggggacaagaaccggctgctgagcccccggcccagcctgctgacccccaccggggacccccgggccaatgccagcccccagaagcccctggacctgaagcagctgaagcagagagctgctgccatcccccccatccaggtgaccaaggtgcatgagcccccaagagaagatgctgcccccaccaagccagcccccccagcccctcctccaccccagaacctgcagcctgagagtgatgccccccagcagcccggcagcagcccccggggcaagagccgcagccctgcccccccagctgacaaggaggcctttgctgctgaggcccagaagctgcccggggaccccccctgctggaccagcggcctgcccttccctgtgcccccccgggaggtgatcaaggccagcccccacgccccagaccccagcgccttctcctatgcccctcctggccaccccctgcccctgggcctgcatgacacagcccggcctgtgctgcccaggcctcccaccatcagcaaccccccacccctcatcagcagcgccaagcaccccagcgtgctggagcggcagatcggggccatcagccagggcatgtctgtgcagctgcacgtgccctacagcgagcacgccaaggcccctgtgggccctgtgaccatgggcctgcccctgcccatggaccccaagaagctggcccccttctctggagtgaagcaggagcagctgagcccccggggccaggccggccccccagagagcctgggcgtgcccacagcccaggaggcctctgtgctgcggggcacagccctgggctctgtgcctgggggcagcatcaccaagggcatccccagcaccagggtgcccagcgacagcgccatcacctaccggggcagcatcacccacggcaccccagcagatgtgctgtacaagggcaccatcacccgcatcattggagaggacagccccagccggctggaccggggccgggaggacagcctgcccaagggccacgtgatctatgagggcaagaagggccacgtgctgtcctatgagggcggcatgtctgtgacccagtgcagcaaggaggatggccgcagcagcagcggcccccctcatgaaacagctgcccccaagaggacctatgacatgatggagggccgggtgggccgggccatcagcagcgccagcattgagggcctgatgggccgggccatccccccagagcggcacagcccccaccacctgaaggagcagcaccacatccggggcagcatcacccagggcatccccaggagctatgtggaggcccaggaggactacctgcggcgggaggccaagctgctgaagcgggagggcaccccacctcctcctccacccagccgggacctgacagaggcctacaagacccaggccctgggccccctgaagctgaagccagcccacgagggcctggtggccaccgtgaaggaggccggccgcagcatccacgagatcccccgggaggagctgcggcacaccccagagctgcccctggccccccggcccctgaaggagggcagcatcacccagggcacccccctgaagtatgacacaggagccagcaccaccggcagcaagaagcatgatgtgcgcagcctgattggcagccctggccgcaccttcccccctgtgcaccccctggatgtgatggctgatgcccgggccctggagcgggcctgctatgaggagagcctgaagagccggcccggcacagccagcagcagcggcggcagcatcgcccggggggcccctgtgattgtgcctgagctgggcaagccccggcagagccccctgacctatgaggaccacggggccccctttgctggccacctgccccggggcagccctgtgaccacccgggagcccaccccccggctgcaggagggcagcctgagcagcagcaaggccagccaggacaggaagctgaccagcaccccccgggagatcgccaagagcccccacagcacagtgcctgagcaccacccccaccccatcagcccctatgagcacctgctgcggggcgtgtctggagtggacctgtaccgcagccacatccccctggcctttgaccccaccagcatcccccggggcatccccctggatgctgctgctgcctactacctgcccaggcacctggcccccaaccccacctacccccacctgtacccaccctacctgatccggggctacccagacacagctgccctggagaaccggcagaccatcatcaatgactacatcaccagccagcagatgcaccacaatgctgccacagccatggcccagagagctgacatgctgcggggcctgagcccccgggagagcagcctggccctgaactatgctgctggcccccggggcatcatcgacctgagccaggtgccccacctgcctgtgctggtgccccccaccccaggcaccccagccacagccatggaccggctggcctacctgcccacagccccccagcccttcagcagccgccacagcagcagccccctgagccctgggggccccacccacctgaccaagcccaccaccaccagcagcagcgagcgggagcgggaccgggaccgggagcgggaccgggaccgggagcgggagaagagcatcctgaccagcaccaccaccgtggagcacgcccccatctggaggcctggaacagagcagagcagcggcagcagcggcggcggcggcggcagcagcagcaggcctgccagccacagccacgcccaccagcacagccccatcagccccaggacccaggatgccctgcagcagaggccttctgtgctgcacaacacaggcatgaagggcatcatcacagctgtggagcccagcacccccaccgtgctgcggagcaccagcaccagcagccctgtgcggcctgctgccaccttccccccagccacccactgccccctgggcggcaccctggatggagtgtaccccaccctgatggagcctgtgctgctgcccaaggaggccccccgggtggcccggcctgagcggcccagggctgacaccggccacgccttcctggccaagcccccagcccggagcggcctggagcccgccagcagccccagcaagggcagcgagccccggcccctggtgccccctgtgtctggccacgccaccatcgcccggaccccagccaagaacctggccccccaccacgccagcccagaccccccagcccccccagccagcgccagtgacccccaccgggagaagacccagagcaagcccttcagcatccaggagctggagctgcggagcctgggctaccacggcagcagctacagccctgagggcgtggagcctgtgtcccctgtgagcagccccagcctgacccatgacaagggcctgcccaagcacctggaggagctggacaagagccacctggagggggagctgcggcccaagcagcccggccctgtgaagctgggcggggaggccgcccacctgccccacctgcggcccctgcctgagagccagcccagcagcagccccctgctgcagacagcccctggggtgaagggccaccagagggtggtgaccctggcccagcacatcagcgaggtgatcacccaggactacaccaggcaccacccccagcagctgagcgcccccctgcctgcccccctgtacagcttccctggggccagctgccctgtgctggacctgcggcggccccccagcgacctgtacctgcccccaccagaccatggagccccagcccggggcagcccccacagcgagggcggcaagaggagccctgagcccaacaagacctctgtgctgggcggcggggaggatggcatcgagcctgtgagccccccagagggcatgacagagcccggccacagccgctctgctgtgtaccccctgctgtacagagatggagagcagacagagcccagcaggatgggcagcaagagccctggcaacaccagccagcccccagccttcttcagcaagctgacagagagcaacagcgccatggtgaagagcaagaagcaggagatcaacaagaagctgaacacccacaacagaaatgaacctgagtacaacatcagccagcccggcacagagatcttcaacatgcctgccatcactggaacaggcctgatgacctaccgcagccaggccgtgcaggagcacgccagcaccaacatgggcctggaggccatcatcaggaaggccctgatgggcaagtatgaccagtgggaggagagcccccccctgagcgccaatgccttcaaccccctgaatgccagcgccagcctgcctgctgccatgcccatcacagctgctgatggccgcagtgaccacaccctgaccagccctgggggcggcggcaaggccaaggtgtctggccggcccagcagcaggaaggccaagagccctgcccctggcctggccagcggggaccggccccccagcgtgtcctctgtgcacagcgagggggactgcaacagaaggacccccctgaccaacagagtgtgggaggaccggcccagcagcgctggcagcacccccttcccctacaaccccctcatcatgaggctgcaggccggcgtgatggccagccccccacctcctggcctgcctgctggcagcggccccctggccggcccccaccacgcctgggatgaggagcccaagcccctgctgtgcagccagtatgagaccctgagtgacagcgagtag

SEQ ID NO: 162330 - DNA, 7515 bp, synthetic construct
  misc_feature 1..7515: note = Description of Artificial Sequence: Synthetic coding sequence
  source 1..7515: mol_type = other DNA
atgagcggcagcacccagcctgtggcccagacctggagggccacagagccccgctacccaccccacagcctgagctaccctgtgcagatcgcccggacccacacagatgtgggcctgctggagtaccagcaccacagccgggactatgccagccacctgagccctggcagcatcatccagccccagaggcggcggcccagcctgctgtctgagttccagcctggaaatgaaagaagccaggagctgcacctgcggcctgagagccacagctacctgcctgagctgggcaagtctgagatggagttcatcgagagcaagaggccccggctggagctgctgcctgaccccctgctgcggcccagccccctgctggccaccggccagcctgctggcagcgaggacctgaccaaggacaggagcctgaccgggaagctggagcctgtgagcccccccagccccccccacacagatcctgagctggagctggtgcccccccggctgagcaaggaggagctgatccagaacatggacagagtggaccgggagatcaccatggtggagcagcagatcagcaagctgaagaagaagcagcagcagctggaggaggaggccgccaagcccccagagcctgagaagcctgtgagccccccacccatcgagagcaagcacaggagcctggtgcagatcatctatgatgaaaataggaagaaggccgaggccgcccaccgcatcctggagggcctgggcccccaggtggagctgcccctgtacaaccagcccagcgacacccggcagtaccacgagaacatcaagatcaaccaggccatgaggaagaagctgatcctgtacttcaagagaagaaatcatgccaggaagcagtgggagcagaagttctgccagagatatgaccagctgatggaggcctgggagaagaaggtggagagaattgagaacaacccccggcggcgggccaaggagagcaaggtgcgggagtactatgagaagcagtttcctgagatcaggaagcagcgggagctgcaggagaggatgcagagggtgggccagaggggcagcggcctgtccatgtctgctgcccggagtgaacatgaggtgtctgagatcattgatggcctgtctgagcaggagaacctggagaagcagatgaggcagctggccgtcatcccccccatgctgtatgatgctgaccagcagaggatcaagttcatcaacatgaatggcctgatggctgaccccatgaaggtgtacaaggaccggcaggtgatgaacatgtggagcgagcaggagaaggagaccttccgggagaagttcatgcagcaccccaagaactttggcctgattgccagcttcctggagaggaagacagtggccgagtgtgtgctgtactactacctgaccaagaagaatgaaaactacaagagcctggtgagaagaagctacagaagaagaggcaagagccagcagcagcagcagcagcagcagcagcagcagcagcagcagcagcagcagcccatgcccaggagcagccaggaggagaaggatgagaaggagaaggagaaggaggccgagaaggaggaggagaagccagaggtggagaatgacaaggaggacctgctgaaggagaagacagatgacaccagcggagaagataatgatgagaaggaggccgtggccagcaagggcaggaagacagccaacagccagggccgcaggaagggccgcatcaccaggtccatggccaatgaggccaacagcgaggaggccatcaccccccagcagagcgctgagctggcctccatggagctgaatgaaagcagccgctggacagaggaggagatggagacagccaagaagggcctgctggagcacggcaggaactggagcgccatcgccaggatggtgggcagcaagacagtgtcccagtgcaagaacttctacttcaactacaagaagaggcagaacctggatgagatcctgcagcagcacaagctgaagatggagaaggagagaaatgcccggaggaagaagaagaaggccccagctgctgccagcgaggaggccgccttcccccctgtggtggaggatgaggagatggaggccagcggcgtgtctggaaatgaggaggagatggtggaggaggccgaggccaccgtgaacaacagcagtgacacagagagcatccccagcccccacacagaggccgccaaggacaccggccagaatggccccaagcccccagccaccctgggcgcagatggccccccacctggcccccccaccccacctcctgaggacatcccagcccccacagagcccaccccagccagcgaggccactggagcccccaccccacctccagccccacccagccccagcgcccctcctcctgtggtgcccaaggaggagaaggaggaggagacagctgctgcccctcctgtggaggagggggaggagcagaagcccccagctgctgaggagctggccgtggacaccgggaaggccgaggagcctgtgaagtcagaatgtacagaggaggccgaggagggccctgccaagggcaaggatgctgaggccgctgaggccacagctgagggcgccctgaaggccgagaagaaggagggcggcagcggccgggccaccacagccaagagcagcggggccccccaggacagcgacagcagcgccacctgcagcgcagatgaggtggatgaagctgagggcggggacaagaaccggctgctgagcccccggcccagcctgctgacccccaccggggacccccgggccaatgccagcccccagaagcccctggacctgaagcagctgaagcagagagctgctgccatcccccccatccaggtgaccaaggtgcatgagcccccaagagaagatgctgcccccaccaagccagcccccccagcccctcctccaccccagaacctgcagcctgagagtgatgccccccagcagcccggcagcagcccccggggcaagagccgcagccctgcccccccagctgacaaggaggccgagaagcctgtgttcttccctgcctttgctgctgaggcccagaagctgcccggggaccccccctgctggaccagcggcctgcccttccctgtgcccccccgggaggtgatcaaggccagcccccacgccccagaccccagcgccttctcctatgcccctcctggccaccccctgcccctgggcctgcatgacacagcccggcctgtgctgcccaggcctcccaccatcagcaaccccccacccctcatcagcagcgccaagcaccccagcgtgctggagcggcagatcggggccatcagccagggcatgtctgtgcagctgcacgtgccctacagcgagcacgccaaggcccctgtgggccctgtgaccatgggcctgcccctgcccatggaccccaagaagctggcccccttctctggagtgaagcaggagcagctgagcccccggggccaggccggccccccagagagcctgggcgtgcccacagcccaggaggcctctgtgctgcggggcacagccctgggctctgtgcctgggggcagcatcaccaagggcatccccagcaccagggtgcccagcgacagcgccatcacctaccggggcagcatcacccacggcaccccagcagatgtgctgtacaagggcaccatcacccgcatcattggagaggacagccccagccggctggaccggggccgggaggacagcctgcccaagggccacgtgatctatgagggcaagaagggccacgtgctgtcctatgagggcggcatgtctgtgacccagtgcagcaaggaggatggccgcagcagcagcggcccccctcatgaaacagctgcccccaagaggacctatgacatgatggagggccgggtgggccgggccatcagcagcgccagcattgagggcctgatgggccgggccatccccccagagcggcacagcccccaccacctgaaggagcagcaccacatccggggcagcatcacccagggcatccccaggagctatgtggaggcccaggaggactacctgcggcgggaggccaagctgctgaagcgggagggcaccccacctcctcctccacccagccgggacctgacagaggcctacaagacccaggccctgggccccctgaagctgaagccagcccacgagggcctggtggccaccgtgaaggaggccggccgcagcatccacgagatcccccgggaggagctgcggcacaccccagagctgcccctggccccccggcccctgaaggagggcagcatcacccagggcacccccctgaagtatgacacaggagccagcaccaccggcagcaagaagcatgatgtgcgcagcctgattggcagccctggccgcaccttcccccctgtgcaccccctggatgtgatggctgatgcccgggccctggagcgggcctgctatgaggagagcctgaagagccggcccggcacagccagcagcagcggcggcagcatcgcccggggggcccctgtgattgtgcctgagctgggcaagccccggcagagccccctgacctatgaggaccacggggccccctttgctggccacctgccccggggcagccctgtgaccacccgggagcccaccccccggctgcaggagggcagcctgagcagcagcaaggccagccaggacaggaagctgaccagcaccccccgggagatcgccaagagcccccacagcacagtgcctgagcaccacccccaccccatcagcccctatgagcacctgctgcggggcgtgtctggagtggacctgtaccgcagccacatccccctggcctttgaccccaccagcatcccccggggcatccccctggatgctgctgctgcctactacctgcccaggcacctggcccccaaccccacctacccccacctgtacccaccctacctgatccggggctacccagacacagctgccctggagaaccggcagaccatcatcaatgactacatcaccagccagcagatgcaccacaatgctgccacagccatggcccagagagctgacatgctgcggggcctgagcccccgggagagcagcctggccctgaactatgctgctggcccccggggcatcatcgacctgagccaggtgccccacctgcctgtgctggtgccccccaccccaggcaccccagccacagccatggaccggctggcctacctgcccacagccccccagcccttcagcagccgccacagcagcagccccctgagccctgggggccccacccacctgaccaagcccaccaccaccagcagcagcgagcgggagcgggaccgggaccgggagcgggaccgggaccgggagcgggagaagagcatcctgaccagcaccaccaccgtggagcacgcccccatctggaggcctggaacagagcagagcagcggcagcagcggcggcggcggcggcagcagcagcaggcctgccagccacagccacgcccaccagcacagccccatcagccccaggacccaggatgccctgcagcagaggccttctgtgctgcacaacacaggcatgaagggcatcatcacagctgtggagcccagcacccccaccgtgctgcggagcaccagcaccagcagccctgtgcggcctgctgccaccttccccccagccacccactgccccctgggcggcaccctggatggagtgtaccccaccctgatggagcctgtgctgctgcccaaggaggccccccgggtggcccggcctgagcggcccagggctgacaccggccacgccttcctggccaagcccccagcccggagcggcctggagcccgccagcagccccagcaagggcagcgagccccggcccctggtgccccctgtgtctggccacgccaccatcgcccggaccccagccaagaacctggccccccaccacgccagcccagaccccccagcccccccagccagcgccagtgacccccaccgggagaagacccagagcaagcccttcagcatccaggagctggagctgcggagcctgggctaccacggcagcagctacagccctgagggcgtggagcctgtgtcccctgtgagcagccccagcctgacccatgacaagggcctgcccaagcacctggaggagctggacaagagccacctggagggggagctgcggcccaagcagcccggccctgtgaagctgggcggggaggccgcccacctgccccacctgcggcccctgcctgagagccagcccagcagcagccccctgctgcagacagcccctggggtgaagggccaccagagggtggtgaccctggcccagcacatcagcgaggtgatcacccaggactacaccaggcaccacccccagcagctgagcgcccccctgcctgcccccctgtacagcttccctggggccagctgccctgtgctggacctgcggcggccccccagcgacctgtacctgcccccaccagaccatggagccccagcccggggcagcccccacagcgagggcggcaagaggagccctgagcccaacaagacctctgtgctgggcggcggggaggatggcatcgagcctgtgagccccccagagggcatgacagagcccggccacagccgctctgctgtgtaccccctgctgtacagagatggagagcagacagagcccagcaggatgggcagcaagagccctggcaacaccagccagcccccagccttcttcagcaagctgacagagagcaacagcgccatggtgaagagcaagaagcaggagatcaacaagaagctgaacacccacaacagaaatgaacctgagtacaacatcagccagcccggcacagagatcttcaacatgcctgccatcactggaacaggcctgatgacctaccgcagccaggccgtgcaggagcacgccagcaccaacatgggcctggaggccatcatcaggaaggccctgatgggcaagtatgaccagtgggaggagagcccccccctgagcgccaatgccttcaaccccctgaatgccagcgccagcctgcctgctgccatgcccatcacagctgctgatggccgcagtgaccacaccctgaccagccctgggggcggcggcaaggccaaggtgtctggccggcccagcagcaggaaggccaagagccctgcccctggcctggccagcggggaccggccccccagcgtgtcctctgtgcacagcgagggggactgcaacagaaggacccccctgaccaacagagtgtgggaggaccggcccagcagcgctggcagcacccccttcccctacaaccccctcatcatgaggctgcaggccggcgtgatggccagccccccacctcctggcctgcctgctggcagcggccccctggccggcccccaccacgcctgggatgaggagcccaagcccctgctgtgcagccagtatgagaccctgagtgacagcgagtag

SEQ ID NO: 162331 - DNA, 7542 bp, synthetic construct
  misc_feature 1..7542: note = Description of Artificial Sequence: Synthetic coding sequence
  source 1..7542: mol_type = other DNA
atgagcggcagcacccagcctgtggcccagacctggagggccacagagccccgctacccaccccacagcctgagctaccctgtgcagatcgcccggacccacacagatgtgggcctgctggagtaccagcaccacagccgggactatgccagccacctgagccctggcagcatcatccagccccagaggcggcggcccagcctgctgtctgagttccagcctggaaatgaaagaagccaggagctgcacctgcggcctgagagccacagctacctgcctgagctgggcaagtctgagatggagttcatcgagagcaagaggccccggctggagctgctgcctgaccccctgctgcggcccagccccctgctggccaccggccagcctgctggcagcgaggacctgaccaaggacaggagcctgaccgggaagctggagcctgtgagcccccccagccccccccacacagatcctgagctggagctggtgcccccccggctgagcaaggaggagctgatccagaacatggacagagtggaccgggagatcaccatggtggagcagcagatcagcaagctgaagaagaagcagcagcagctggaggaggaggccgccaagcccccagagcctgagaagcctgtgagccccccacccatcgagagcaagcacaggagcctggtgcagatcatctatgatgaaaataggaagaaggccgaggccgcccaccgcatcctggagggcctgggcccccaggtggagctgcccctgtacaaccagcccagcgacacccggcagtaccacgagaacatcaagatcaaccaggccatgaggaagaagctgatcctgtacttcaagagaagaaatcatgccaggaagcagtgggagcagaagttctgccagagatatgaccagctgatggaggcctgggagaagaaggtggagagaattgagaacaacccccggcggcgggccaaggagagcaaggtgcgggagtactatgagaagcagtttcctgagatcaggaagcagcgggagctgcaggagaggatgcagagccgggtgggccagaggggcagcggcctgtccatgtctgctgcccggtctgagcacgaggtgtctgagatcattgatggcctgtctgagcaggagaacctggagaagcagatgaggcagctggccgtcatcccccccatgctgtatgatgctgaccagcagaggatcaagttcatcaacatgaatggcctgatggctgaccccatgaaggtgtacaaggaccggcaggtgatgaacatgtggagcgagcaggagaaggagaccttccgggagaagttcatgcagcaccccaagaactttggcctcatcgccagcttcctggagaggaagacagtggctgaatgtgtgctgtactactacctgaccaagaagaatgaaaactacaagagcctggtgcggcgcagctacagaagaagaggcaagagccagcagcagcagcagcagcagcagcagcagcagcagcagcagcagcagcagcccatgcccaggagcagccaggaggagaaggatgagaaggagaaggagaaggaggccgagaaggaggaggagaagccagaggtggagaatgacaaggaggacctgctgaaggagaagacagatgacaccagcggggaggacaatgatgagaaggaggccgtggccagcaaaggaaggaagacagccaacagccagggccgcaggaagggccgcatcaccaggtccatggccaatgaggccaacagcgaggaggccatcaccccccagcagagcgctgagctggcctccatggagctgaatgaaagcagccgctggacagaggaggagatggagacagccaagaagggcctgctggagcacggcaggaactggagcgccatcgccaggatggtgggcagcaagacagtgtcccagtgcaagaacttctacttcaactacaagaagaggcagaacctggatgagatcctgcagcagcacaagctgaagatggagaaggagagaaatgcccggaggaagaagaagaaggccccagctgctgccagcgaggaggccgccttcccccctgtggtggaggatgaggagatggaggccagcggcgtgtctggaaatgaggaggagatggtggaggaggccgaggccctgcacgccagcggaaatgaggtgcccagaggagaatgttctggccctgccaccgtgaacaacagcagtgacacagagagcatccccagcccccacacagaggccgccaaggacaccggccagaatggccccaagcccccagccaccctgggcgcagatggccccccacctggcccccccaccccacccaggaggaccagccggcccacagagcccaccccagccagcgaggccaccggggcccccaccccacctccagccccacccagccccagcgcccctcctcctgtggtgcccaaggaggagaaggaggaggagacagctgctgcccctcctgtggaggagggggaggagcagaagcccccagctgctgaggagctggccgtggacaccgggaaggccgaggagcctgtgaagtctgagtgcacagaggaggccgaggagggccctgccaagggcaaggatgctgaggccgctgaggccacagctgagggcgccctgaaggccgagaagaaggagggcggcagcggccgggccaccacagccaagagcagcggggccccccaggacagcgacagcagcgccacctgcagcgcagatgaggtggatgaggccgagggcggggacaagaaccggctgctgagcccccggcccagcctgctgacccccactggagacccccgggccaatgccagcccccagaagcccctggacctgaagcagctgaagcagagagctgctgccatcccccccatccaggtgaccaaggtgcatgagcccccccgggaggatgctgcccccaccaagccagcccccccagcccctcctccaccccagaacctgcagcctgagagtgatgccccccagcagcccggcagcagcccccggggcaagagccgcagccctgcccctcctgctgacaaggaggcctttgctgctgaggcccagaagctgcccggggaccccccctgctggaccagcggcctgcccttccctgtgcccccccgggaggtgatcaaggccagcccccacgccccagaccccagcgccttctcctatgcccctcctggccaccccctgcccctgggcctgcatgacacagcccggcctgtgctgccccggccccccaccatcagcaaccccccacccctcatcagcagcgccaagcaccccagcgtgctggagcggcagattggagccatcagccagggcatgtctgtgcagctgcacgtgccctacagcgagcacgccaaggcccctgtgggccctgtgaccatgggcctgcccctgcccatggaccccaagaagctggcccccttcagcggcgtgaagcaggagcagctgagcccccggggccaggccggccccccagagagcctgggcgtgcccacagcccaggaggcctctgtgctgcggggcacagccctgggctctgtgcctgggggcagcatcaccaagggcatccccagcaccagggtgcccagcgacagcgccatcacctaccggggcagcatcacccacggcaccccagcagatgtgctgtacaagggcaccatcacccgcatcatcggggaggacagccccagccggctggaccggggccgggaggacagcctgcccaagggccacgtgatctatgagggcaagaagggccacgtgctgtcctatgaaggaggcatgtctgtgacccagtgcagcaaagaagatggccgcagcagcagcggcccccctcatgaaacagctgcccccaagaggacctatgacatgatggagggccgggtgggccgggccatcagcagcgccagcattgagggcctgatgggccgggccatccccccagagcggcacagcccccaccacctgaaggagcagcaccacatccggggcagcatcacccagggcatccccaggagctatgtggaggcccaggaggactacctgcggcgggaggccaagctgctgaagcgggagggcaccccacctcctcctccacccagccgggacctgacagaggcctacaagacccaggccctgggccccctgaagctgaagccagcccacgagggcctggtggccaccgtgaaggaggccggccgcagcatccacgagatcccccgggaggagctgcggcacaccccagagctgcccctggccccccggcccctgaaggagggcagcatcacccagggcacccccctgaagtatgacaccggggccagcaccaccggcagcaagaagcatgatgtgcgcagcctcatcggcagccctggccgcaccttcccccctgtgcaccccctggatgtgatggctgatgcccgggccctggagcgggcctgctatgaggagagcctgaagagcaggcctggaacagccagcagcagcggcggcagcatcgcccggggggcccctgtgattgtgcctgagctgggcaagccccggcagagccccctgacctatgaagatcatggagccccctttgctggccacctgccccggggcagccctgtgaccacccgggagcccaccccccggctgcaggagggcagcctgagcagcagcaaggccagccaggacaggaagctgaccagcaccccccgggagatcgccaagagcccccacagcacagtgcctgagcaccacccccaccccatcagcccctatgagcacctgctgcggggcgtgtctggagtggacctgtaccgcagccacatccccctggcctttgaccccaccagcatcccccggggcatccccctggatgctgctgctgcctactacctgcccaggcacctggcccccaaccccacctacccccacctgtacccaccctacctgatccggggctacccagacacagctgccctggagaaccggcagaccatcatcaatgactacatcaccagccagcagatgcaccacaatgctgccacagccatggcccagagagctgacatgctgcggggcctgagcccccgggagagcagcctggccctgaactatgctgctggcccccggggcatcatcgacctgagccaggtgccccacctgcctgtgctggtgccccccaccccaggcaccccagccacagccatggaccggctggcctacctgcccacagccccccagcccttcagcagccgccacagcagcagccccctgagccctgggggccccacccacctgaccaagcccaccaccaccagcagcagcgagcgggagcgggaccgggaccgggagcgggaccgggaccgggagcgggagaagagcatcctgaccagcaccaccaccgtggagcacgcccccatctggaggcctggaacagagcagagcagcggcagcagcggcggcggcggcggcagcagcagcaggcctgccagccacagccacgcccaccagcacagccccatcagccccaggacccaggatgccctgcagcagaggcccagcgtgctgcacaacacaggcatgaagggcatcatcacagctgtggagcccagcacccccaccgtgctgcggagcaccagcaccagcagccctgtgcggcctgctgccaccttccccccagccacccactgccccctgggcggcaccctggatggagtgtaccccaccctgatggagcctgtgctgctgcccaaggaggccccccgggtggcccggcctgagcggcccagggctgacaccggccacgccttcctggccaagcccccagcccggagcggcctggagcccgccagcagccccagcaaaggaagtgagccccggcccctggtgccccctgtgtctggccacgccaccatcgcccggaccccagccaagaacctggccccccaccacgccagcccagaccccccagcccccccagccagcgccagtgacccccaccgggagaagacccagagcaagcccttcagcatccaggagctggagctgcggagcctgggctaccacggcagcagctacagccctgagggcgtggagcctgtgtcccctgtgagcagccccagcctgacccatgacaagggcctgcccaagcacctggaggagctggacaagagccacctggagggggagctgcggcccaagcagcccggccctgtgaagctgggcggggaggccgcccacctgccccacctgcggcccctgcctgagagccagcccagcagcagccccctgctgcagacagcccctggggtgaagggccaccagagggtggtgaccctggcccagcacatcagcgaggtgatcacccaggactacaccaggcaccacccccagcagctgagcgcccccctgcctgcccccctgtacagcttccctggggccagctgccctgtgctggacctgcggcggcccccaagtgacctgtacctgcccccaccagaccacggggccccagcccggggcagcccccacagcgagggcggcaagaggagccctgagcccaacaagacctctgtgctgggcggcggagaagatggcatcgagcctgtgtccccacctgagggcatgacagagcccggccacagccgctctgctgtgtaccccctgctgtacagagatggagagcagacagagcccagcaggatgggcagcaagagccctggcaacaccagccagcccccagccttcttcagcaagctgacagagagcaacagcgccatggtgaagagcaagaagcaggagatcaacaagaagctgaacacccacaacagaaatgaacctgagtacaacatcagccagcctggaacagagatcttcaacatgcctgccatcaccggcaccggcctgatgacctaccgcagccaggccgtgcaggagcacgccagcaccaacatgggcctggaggccatcatcaggaaggccctgatgggcaagtatgaccagtgggaggagagcccccccctgagcgccaatgccttcaaccccctgaatgccagcgccagcctgcctgctgccatgcccatcacagctgctgatggccgcagtgaccacaccctgaccagccctgggggcggcggcaaggccaaggtgtctggccggcccagcagcaggaaggccaagagccctgcccctggcctggccagcggggacaggcctccttctgtgtcctctgtgcacagcgagggggactgcaacagaaggacccccctgaccaacagagtgtgggaggaccggcccagcagcgctggcagcacccccttcccctacaaccccctcatcatgaggctgcaggccggcgtgatggccagccccccacctcctggcctgcctgctggcagcggccccctggccggcccccaccacgcctgggatgaggagcccaagcccctgctgtgcagccagtatgagaccctgagtgacagcgagtag

SEQ ID NO: 162332 - DNA, 1821 bp, synthetic construct
  misc_feature 1..1821: note = Description of Artificial Sequence: Synthetic coding sequence
  source 1..1821: mol_type = other DNA
ctgcagagcggggccacccactgccccctgggcggcaccctggatggagtgtaccccaccctgatggagcctgtgctgctgcccaaggaggccccccgggtggcccggcctgagcggcccagggctgacaccggccacgccttcctggccaagcccccagcccggagcggcctggagcccgccagcagccccagcaagggcagcgagccccggcccctggtgccccctgtgtctggccacgccaccatcgcccggaccccagccaagaacctggccccccaccacgccagcccagaccccccagcccccccagccagcgccagtgacccccaccgggagaagacccagagcaagcccttcagcatccaggagctggagctgcggagcctgggctaccacggcagcagctacagccctgagggcgtggagcctgtgtcccctgtgagcagccccagcctgacccatgacaagggcctgcccaagcacctggaggagctggacaagagccacctggagggggagctgcggcccaagcagcccggccctgtgaagctgggcggggaggccgcccacctgccccacctgcggcccctgcctgagagccagcccagcagcagccccctgctgcagacagcccctggggtgaagggccaccagagggtggtgaccctggcccagcacatcagcgaggtgatcacccaggactacaccaggcaccacccccagcagctgagcgcccccctgcctgcccccctgtacagcttccctggggccagctgccctgtgctggacctgcggcggccccccagcgacctgtacctgcccccaccagaccatggagccccagcccggggcagcccccacagcgagggcggcaagaggagccctgagcccaacaagacctctgtgctgggcggcggggaggatggcatcgagcctgtgagccccccagagggcatgacagagcccggccacagccgctctgctgtgtaccccctgctgtacagagatggagagcagacagagcccagcaggatgggcagcaagagccctggcaacaccagccagcccccagccttcttcagcaagctgacagagagcaacagcgccatggtgaagagcaagaagcaggagatcaacaagaagctgaacacccacaacagaaatgaacctgagtacaacatcagccagcccggcacagagatcttcaacatgcctgccatcactggaacaggcctgatgacctaccgcagccaggccgtgcaggagcacgccagcaccaacatgggcctggaggccatcatcaggaaggccctgatgggcaagtatgaccagtgggaggagagcccccccctgagcgccaatgccttcaaccccctgaatgccagcgccagcctgcctgctgccatgcccatcacagctgctgatggccgcagtgaccacaccctgaccagccctgggggcggcggcaaggccaaggtgtctggccggcccagcagcaggaaggccaagagccctgcccctggcctggccagcggggaccggccccccagcgtgtcctctgtgcacagcgagggggactgcaacagaaggacccccctgaccaacagagtgtgggaggaccggcccagcagcgctggcagcacccccttcccctacaaccccctcatcatgaggctgcaggccggcgtgatggccagccccccacctcctggcctgcctgctggcagcggccccctggccggcccccaccacgcctgggatgaggagcccaagcccctgctgtgcagccagtatgagaccctgagtgacagcgagtag

SEQ ID NO: 162333 - DNA, 726 bp, synthetic construct
  misc_feature 1..726: note = Description of Artificial Sequence: Synthetic coding sequence
  source 1..726: mol_type = other DNA
atgttctacagcggcctgctgacagagggcggcaggaaggagacagacatgagggaggccgccagcctgcggcagcagaggaggatgaagcaggccgtgcagttcatccacaaggacagcgctgacctgctgcccctggatggcctgaagaagctgggcagcagcaaggacatgcagccccacaacatcctgcagaggcggctgatggagaccaacctgagcaagctgcggagcggcccccgggtgccctgggccagcaagaccaacaagctgaaccaggccaagtctgagggcctgaagaagtctgaggaggatgacatgatcctggtgtcctgccagtgtgccggcaaggatgtgaaggccctggtggacaccggctgcctgtacaacctgatcagcctggcctgtgtggaccggctgggcctgaaggagcacgtgaagagccacaagcatgaaggagagaagctgagcctgcccaggcacctgaaggtggtgggccagatcgagcacctggtgatcaccctgggcagcctgcggctggactgcccagctgctgtggtggatgacaatgagaagaacctgagcctgggcctgcagaccctgcggagcctgaagtgcatcatcaacctggacaagcacaggctcatcatgggcaagacagacaaggaggagatcccctttgtggagaccgtgtccctgaatgaagacaacaccagcgaggcctag

SEQ ID NO: 162334 - DNA, 774 bp, synthetic construct
  misc_feature 1..774: note = Description of Artificial Sequence: Synthetic coding sequence
  source 1..774: mol_type = other DNA
atgagcaccagccagcccggggcctgcccctgccagggcgccgccagcaggcctgccatcctgtatgccctgctgagcagcagcctgaaggctgtgccccggcccaggagccgctgcctgtgccggcagcacaggcctgtgcagctgtgtgccccccacaggacctgccgggaggccctggatgtgctggccaagacagtggccttcctgaggaacctgcccagcttctggcagctgcccccccaggaccagaggcggctgctgcagggctgctggggccccctcttcctgctgggcctggcccaggatgctgtgacctttgaggtggccgaggcccctgtgcccagcatcctgaagaagatcctgctggaggagcccagcagcagcggcggcagcggccagctgcctgaccggccccagcccagcctggccgctgtgcagtggctgcagtgctgcctggagagcttctggagcctggagctgagccccaaggagtatgcctgcctgaagggcaccatcctcttcaacccagatgtgcccggcctgcaggccgccagccacatcggccacctgcagcaggaggcccactgggtgctgtgtgaggtgctggagccctggtgcccagctgcccagggccgcctgaccagggtgctgctgacagccagcaccctgaagagcatccccaccagcctgctgggggacctcttcttccggcccatcattggagatgtggacattgctggcctgctgggggacatgctgctgctgaggtag

SEQ ID NO: 162335 - DNA, 1845 bp, synthetic construct
  misc_feature 1..1845: note = Description of Artificial Sequence: Synthetic coding sequence
  source 1..1845: mol_type = other DNA
atgaccaccctggacagcaacaacaacacaggaggagtcatcacctacatcggcagcagcggcagcagccccagcaggaccagccctgagagcctgtacagcgacaacagcaatggcagcttccagagcctgacccagggctgccccacctacttcccccccagccccaccggcagcctgacccaggaccctgcccggagctttggcagcatcccccccagcctgagtgatgatggcagccccagcagcagcagcagcagcagcagcagcagcagcagcttctacaacggcagccccccaggcagcctgcaggtggccatggaggacagcagccgggtgagccccagcaagagcaccagcaacatcaccaagctgaatggcatggtgctgctgtgcaaggtgtgtggagatgtggccagcggcttccactacggcgtgcacgcctgtgagggctgcaagggcttcttcagaagaagcatccagcagaacatccagtacaagcgctgcctgaagaatgaaaactgcagcatcgtgcgcatcaacagaaaccgctgccagcagtgccgcttcaagaagtgcctgtctgtgggcatgagcagagatgctgtgcgcttcggccgcatccccaagcgggagaagcagaggatgctggccgagatgcagagcgccatgaacctggccaacaaccagctgagcagccagtgccccctggagaccagccccacccagcaccccaccccaggccccatgggccccagccccccaccagcccctgtgcccagccccctggtgggcttcagccagttcccccagcagctgaccccacccaggagccccagccctgagcccaccgtggaggatgtgatcagccaggtggcccgggcccaccgggagatcttcacctacgcccatgacaagctgggcagcagccctggcaacttcaatgccaaccacgccagcggcagccccccagccaccaccccccaccgctgggagaaccagggctgccccccagccccaaatgacaacaacaccctggccgcccagaggcacaatgaggccctgaatggcctgcggcaggcccccagcagctacccacccacctggcccccaggccctgcccaccacagctgccaccagagcaacagcaatggccaccggctgtgccccacccacgtgtatgctgcccctgagggcaaggccccagccaacagcccccggcagggcaacagcaagaatgtgctgctggcctgccccatgaacatgtacccccacggccgcagcggccgcacagtgcaggagatctgggaggacttctccatgtccttcaccccagctgtgcgggaggtggtggagtttgccaagcacatccctggcttccgggacctgagccagcacgaccaggtgaccctgctgaaggccggcacctttgaggtgctgatggtgcgctttgccagcctcttcaacgtgaaggaccagacagtgatgttcctgagcaggaccacctacagcctgcaggagctgggcgccatgggcatgggagacctgctgagcgccatgtttgacttcagcgagaagctgaacagcctggccctgacagaggaggagctgggcctcttcaccgctgtggtgctggtgtctgctgacagaagtggcatggagaacagcgcctctgtggagcagctgcaggagaccctgctgcgggccctgcgggccctggtgctgaagaaccggcccctggagaccagccgcttcaccaagctgctgctgaagctgcctgacctgcggaccctgaacaacatgcacagcgagaagctgctgtccttccgggtggatgcccagtag

SEQ ID NO: 162336 - DNA, 1383 bp, synthetic construct
  misc_feature 1..1383: note = Description of Artificial Sequence: Synthetic coding sequence
  source 1..1383: mol_type = other DNA
atgagcagccccaccaccagcagcctggacacccccctgcctggaaatggccccccccagcccggggcccccagcagcagccccaccgtgaaggaggagggccctgagccctggccaggcggccctgaccctgatgtgcctggaacagatgaggccagcagcgcctgcagcacagactgggtgatcccagaccctgaggaggagcctgagaggaagaggaagaagggccctgcccccaagatgctgggccacgagctgtgccgggtgtgtggggacaaggccagcggcttccactacaacgtgctgagctgtgagggctgcaagggcttcttccgccgctctgtggtgcggggcggggccaggagatatgcctgccggggcggcggcacctgccagatggatgccttcatgaggaggaagtgccagcagtgccgcctgaggaagtgcaaggaggccggcatgagggagcagtgtgtgctgtctgaggagcagatcaggaagaagaagatcaggaagcagcagcaggagagccagagccagagccagagccctgtgggcccccagggcagcagcagcagcgccagcggccctggggccagccctgggggcagcgaggccggcagccagggcagcggggagggggagggcgtgcagctgacagctgcccaggagctgatgatccagcagctggtggccgcccagctgcagtgcaacaagaggagcttcagtgaccagcccaaggtgaccccctggcccctgggcgctgacccccagagcagagatgcccggcagcagagatttgcccacttcacagagctggccatcatctctgtgcaggagatcgtggactttgccaagcaggtgcccggcttcctgcagctgggccgggaggaccagatcgccctgctgaaggccagcaccatcgagatcatgctgctggagacagcccggcgctacaaccatgaaacagagtgcatcaccttcctgaaggacttcacctacagcaaggatgacttccaccgggccggcctgcaggtggagttcatcaaccccatctttgagttcagccgggccatgaggcggctgggcctggatgatgctgaatatgccctgctgattgccatcaacatcttctctgctgaccggcccaacgtgcaggagcccggccgggtggaggccctgcagcagccctacgtggaggccctgctgagctacacccgcatcaagaggccccaggaccagctgcgcttccccaggatgctgatgaagctggtgtccctgcggaccctgagctctgtgcacagcgagcaggtgtttgccctgcggctgcaggacaagaagctgccccccctgctgtctgagatctgggatgtgcatgaatag

SEQ ID NO: 162337 - DNA, 1377 bp, synthetic construct
  misc_feature 1..1377: note = Description of Artificial Sequence: Synthetic coding sequence
  source 1..1377: mol_type = other DNA
atgagcagccccaccaccagcagcctggacacccccctgcctggaaatggccccccccagcccggggcccccagcagcagccccaccgtgaaggaggagggccctgagccctggccaggcggccctgaccctgatgtgcctggaacagatgaggccagcagcgcctgcagcacagactgggtgatcccagaccctgaggaggagcctgagaggaagaggaagaagggccctgcccccaagatgctgggccacgagctgtgccgggtgtgtggggacaaggccagcggcttccactacaacgtgctgagctgtgagggctgcaagggcttcttccgccgctctgtggtgcggggcggggccaggagatatgcctgccggggcggcggcacctgccagatggatgccttcatgaggaggaagtgccagcagtgccgcctgaggaagtgcaaggaggccggcatgagggagcagtgtgtgctgtctgaggagcagatcaggaagaagaagatcaggaagcagcagcaggagagccagagccagagccagagccctgtgggcccccagggcagcagcagcagcgccagcggccctggggccagccctgggggcagcgaggccggcagccagggcagcggggagggggagggcgtgcagctgacagctgcccaggagctgatgatccagcagctggtggccgcccagctgcagtgcaacaagaggagcttcagtgaccagcccaaggtgaccccctggcccctgggcgctgacccccagagcagagatgcccggcagcagagatttgcccacttcacagagctggccatcatctctgtgcaggagatcgtggactttgccaagcaggtgcccggcttcctgcagctgggccgggaggaccagatcgccctgctgaaggccagcaccatcgagatcatgctgctggagacagcccggcgctacaaccatgaaacagagtgcatcaccttcctgaaggacttcacctacagcaaggatgacttccaccgggccggcctgcaggtggagttcatcaaccccatctttgagttcagccgggccatgaggcggctgggcctggatgatgctgaatatgccctgctgattgccatcaacatcttctctgctgaccggcccaacggggccggcccccggggcggcgtggccgccgccctgcggggcggcgctgctgtgctgcacgcccaccaggaggccgctgaccagctgcgcttccccaggatgctgatgaagctggtgtccctgcggaccctgagctctgtgcacagcgagcaggtgtttgccctgcggctgcaggacaagaagctgccccccctgctgtctgagatctgggatgtgcatgaatag

SEQ ID NO: 162338 - DNA, 1092 bp, synthetic construct
  misc_feature 1..1092: note = Description of Artificial Sequence: Synthetic coding sequence
  source 1..1092: mol_type = other DNA
atgagcagccccaccaccagcagcctggacacccccctgcctggaaatggccccccccagcccggggcccccagcagcagccccaccgtgaaggaggagggccctgagccctggccaggcggccctgaccctgatgtgcctggaacagatgaggccagcagcgcctgcagcacagactggggcgtgctgtctgaggagcagatcaggaagaagaagatcaggaagcagcagcaggagagccagagccagagccagagccctgtgggcccccagggcagcagcagcagcgccagcggccctggggccagccctgggggcagcgaggccggcagccagggcagcggggagggggagggcgtgcagctgacagctgcccaggagctgatgatccagcagctggtggccgcccagctgcagtgcaacaagaggagcttcagtgaccagcccaaggtgaccccctggcccctgggcgctgacccccagagcagagatgcccggcagcagagatttgcccacttcacagagctggccatcatctctgtgcaggagatcgtggactttgccaagcaggtgcccggcttcctgcagctgggccgggaggaccagatcgccctgctgaaggccagcaccatcgagatcatgctgctggagacagcccggcgctacaaccacgagacagagtgcatcaccttcctgaaggacttcacctacagcaaggatgacttccacagagctggcctgcaggtggagttcatcaaccccatctttgagttcagccgggccatgaggcggctgggcctggatgatgctgaatatgccctgctgattgccatcaacatcttctctgctgaccggcccaacgtgcaggagcccggccgggtggaggccctgcagcagccctacgtggaggccctgctgagctacacccgcatcaagaggccccaggaccagctgcgcttccccaggatgctgatgaagctggtgtccctgcggaccctgagctctgtgcacagcgagcaggtgtttgccctgcggctgcaggacaagaagctgccccccctgctgtctgagatctgggatgtgcatgaatag

SEQ ID NO: 162339 - DNA, 576 bp, synthetic construct
  misc_feature 1..576: note = Description of Artificial Sequence: Synthetic coding sequence
  source 1..576: mol_type = other DNA
atgatccagcagctggtggccgcccagctgcagtgcaacaagaggagcttcagtgaccagcccaaggtgaccctgggccgggaggaccagatcgccctgctgaaggccagcaccatcgagatcatgctgctggagacagcccggcgctacaaccacgagacagagtgcatcaccttcctgaaggacttcacctacagcaaggatgacttccacagagctggcctgcaggtggagttcatcaaccccatctttgagttcagccgggccatgaggcggctgggcctggatgatgctgaatatgccctgctgattgccatcaacatcttctctgctgaccggcccaacgtgcaggagcccggccgggtggaggccctgcagcagccctacgtggaggccctgctgagctacacccgcatcaagaggccccaggaccagctgcgcttccccaggatgctgatgaagctggtgtccctgcggaccctgagctctgtgcacagcgagcaggtgtttgccctgcggctgcaggacaagaagctgccccccctgctgtctgagatctgggatgtgcatgaatag

SEQ ID NO: 162340 - DNA, 1422 bp, synthetic construct
  misc_feature 1..1422: note = Description of Artificial Sequence: Synthetic coding sequence
  source 1..1422: mol_type = other DNA
atgacagtgaccaggacccaccacttcaaggagggcagcctgcgggccccagccatccccctgcacagcgctgctgctgagctggccagcaaccacccccggggccctgaggccaacctggaggtgcggcccaaggagagctggaaccacgccgactttgtgcactgtgaggacacagaatctgtgcctgggaagcccagcgtgaatgctgatgaggaggtgggcggcccccagatctgccgggtgtgtggggacaaggccaccggctaccacttcaacgtgatgacctgtgagggctgcaagggcttcttcagaagagccatgaagagaaatgcccggctgcgctgccccttcaggaagggggcctgtgagatcaccaggaagacccggcggcagtgccaggcctgccgcctgaggaagtgcctggagagcggcatgaagaaggagatgatcatgtctgatgaggccgtggaggagcggcgggccctgatcaagaggaagaagtctgagaggacaggcacccagcccctgggcgtgcagggcctgacagaggagcagaggatgatgatccgggagctgatggatgcccagatgaagacctttgacaccaccttcagccacttcaagaacttccggctgcccggggtgctgagcagcggctgtgagctgcctgagagcctgcaggcccccagccgggaggaggccgccaagtggagccaggtgaggaaggacctgtgcagcctgaaggtgtccctgcagctgcggggagaagatggctctgtgtggaactacaagcccccagctgacagcggcggcaaggagatcttcagcctgctgccccacatggctgacatgagcacctacatgttcaagggcatcatcagctttgccaaggtgatctcctacttccgggacctgcccatcgaggaccagatcagcctgctgaagggggccgcctttgagctgtgccagctgcgcttcaacacagtgttcaatgctgagaccggcacctgggagtgtggccgcctgagctactgcctggaggacacagctgggggcttccagcagctgctgctggagcccatgctgaagttccactacatgctgaagaagctgcagctgcacgaggaggagtatgtgctgatgcaggccatcagcctcttctccccagacaggcctggggtgctgcagcaccgggtggtggaccagctgcaggagcagtttgccatcaccctgaagagctacatcgagtgcaaccggccccagcctgcccaccgcttcctgttcctgaagatcatggccatgctgacagagctgcggagcatcaatgcccagcacacccagaggctgctgcgcatccaggacatccacccctttgccacccccctgatgcaggagctgtttggcatcaccggcagctag

SEQ ID NO: 162341 - DNA, 1305 bp, synthetic construct
  misc_feature 1..1305: note = Description of Artificial Sequence: Synthetic coding sequence
  source 1..1305: mol_type = other DNA
ctggaggtgcggcccaaggagagctggaaccacgccgactttgtgcactgtgaggacacagagagcgtgcctgggaagcccagcgtgaatgctgatgaggaggtgggcggcccccagatctgccgggtgtgtggggacaaggccaccggctaccacttcaacgtgatgacctgtgagggctgcaagggcttcttccggcgggccatgaagagaaatgcccggctgcgctgccccttcagaaaaggagcctgtgagatcaccaggaagacccggcggcagtgccaggcctgccgcctgaggaagtgcctggagagcggcatgaagaaggagatgatcatgtctgatgaagctgtggaggagcggcgggccctgatcaagaggaagaagtctgagaggacaggcacccagcccctgggcgtgcagggcctgacagaggagcagaggatgatgatccgggagctgatggatgcccagatgaagacctttgacaccaccttcagccacttcaagaacttccggctgcccggggtgctgagcagcggctgtgagctgcctgagagcctgcaggcccccagccgggaggaggccgccaagtggagccaggtgaggaaggacctgtgcagcctgaaggtgtccctgcagctgcggggggaggatggctctgtgtggaactacaagcccccagctgacagcggcggcaaggagatcttcagcctgctgccccacatggctgacatgagcacctacatgttcaagggcatcatcagctttgccaaggtgatctcctacttccgggacctgcccatcgaggaccagatcagcctgctgaagggagctgcctttgagctgtgccagctgcgcttcaacacagtgttcaatgctgagaccggcacctgggagtgtggccgcctgagctactgcctggaggacacagctgggggcttccagcagctgctgctggagcccatgctgaagttccactacatgctgaagaagctgcagctgcacgaggaggagtatgtgctgatgcaggccatcagcctcttctccccagacaggcctggggtgctgcagcaccgggtggtggaccagctgcaggagcagtttgccatcaccctgaagagctacatcgagtgcaaccggccccagcctgcccaccgcttcctgttcctgaagatcatggccatgctgacagagctgcggagcatcaatgcccagcacacccagaggctgctgcgcatccaggacatccacccctttgccacccccctgatgcaggagctgtttggcatcaccggcagctag

SEQ ID NO: 162342 - DNA, 1194 bp, synthetic construct
  misc_feature 1..1194: note = Description of Artificial Sequence: Synthetic coding sequence
  source 1..1194: mol_type = other DNA
ctggaggtgcggcccaaggagagctggaaccacgccgactttgtgcactgtgaggacacagagagcgtgcctgggaagcccagcgtgaatgctgatgaggaggtgggcggcccccagatctgccgggtgtgtggggacaaggccaccggctaccacttcaacgtgatgacctgtgagggctgcaagggcttcttccggcgggccatgaagagaaatgcccggctgcgctgccccttcagaaaaggagcctgtgagatcaccaggaagacccggcggcagtgccaggcctgccgcctgaggaagtgcctggagagcggcatgaagaaggagatgatcatgtctgatgaagctgtggaggagcggcgggccctgatcaagaggaagaagtctgagaggacaggcacccagcccctgggcgtgcagggcctgacagaggagcagaggatgatgatccgggagctgatggatgcccagatgaagacctttgacaccaccttcagccacttcaagaacttccgggtgtccctgcagctgcggggagaagatggctctgtgtggaactacaagcccccagctgacagcggcggcaaggagatcttcagcctgctgccccacatggctgacatgagcacctacatgttcaagggcatcatcagctttgccaaggtgatctcctacttccgggacctgcccatcgaggaccagatcagcctgctgaagggggccgcctttgagctgtgccagctgcgcttcaacacagtgttcaatgctgagaccggcacctgggagtgtggccgcctgagctactgcctggaggacacagctgggggcttccagcagctgctgctggagcccatgctgaagttccactacatgctgaagaagctgcagctgcacgaggaggagtatgtgctgatgcaggccatcagcctcttctccccagacaggcctggggtgctgcagcaccgggtggtggaccagctgcaggagcagtttgccatcaccctgaagagctacatcgagtgcaaccggccccagcctgcccaccgcttcctgttcctgaagatcatggccatgctgacagagctgcggagcatcaatgcccagcacacccagaggctgctgcgcatccaggacatccacccctttgccacccccctgatgcaggagctgtttggcatcaccggcagctag

SEQ ID NO: 162343 - DNA, 1848 bp, synthetic construct
  misc_feature 1..1848: note = Description of Artificial Sequence: Synthetic coding sequence
  source 1..1848: mol_type = other DNA
atgaccagccccagcccccgcatccagatcatcagcacagattctgctgtggccagcccccagaggatccagggcagcgagcccgccagcggccccctgagcgtcttcaccagcctgaacaaggagaagatcgtgacagaccagcagacaggccagaagatccagatcgtgacagctgtggatgccagcggcagccccaagcagcagttcatcctgaccagcccagatggagctggcaccgggaaggtgatcctggccagccctgagaccagcagcgccaagcagctgatcttcaccaccagtgacaacctggtgcccggccgcatccagatcgtgacagattctgcctctgtggagcggctgctgggcaagacagatgtgcagaggccccaggtggtggagtactgtgtggtgtgtggggacaaggccagcggccgccactacggggctgtgtcctgtgagggctgcaagggcttcttcaagaggtctgtgaggaagaacctgacctacagctgccgcagcaaccaggactgcatcatcaacaagcaccacaggaaccgctgccagttctgccgcctgaagaagtgcctggagatgggcatgaagatggagagcgtgcagagcgagaggaagccctttgatgtgcagcgggagaagcccagcaactgtgccgccagcacagagaagatctacatcaggaaggacctgcggagccccctgattgccacccccacctttgtggccgacaaggatggagcccggcagacaggcctgctggaccccggcatgctggtgaacatccagcagcccctcatccgggaggatggcaccgtgctgctggccacagacagcaaggccgagaccagccagggcgccctgggcaccctggccaacgtggtgaccagcctggccaacctgtctgagagcctgaacaacggggacaccagcgagatccagcctgaggaccagagcgccagcgagatcacccgggcctttgacaccctggccaaggccctgaacaccacagacagcagcagcagccccagcctggctgatggcatcgacaccagcggcggcggcagcatccacgtgatcagccgggaccagagcacccccatcatcgaggtggagggccccctgctgagtgacacccacgtgaccttcaagctgaccatgcccagccccatgcctgagtacctgaatgtgcactacatctgtgagagcgccagccggctgctcttcctgtccatgcactgggcccggagcatcccagccttccaggccctgggccaggactgcaacaccagcctggtgcgggcctgctggaatgaactcttcaccctgggcctggcccagtgtgcccaggtgatgagcctgagcaccatcctggccgccatcgtgaaccacctgcagaacagcatccaggaggacaagctgagcggggaccgcatcaagcaggtgatggagcacatctggaagctgcaggagttctgcaacagcatggccaagctggacattgatggctatgaatatgcctacctgaaggccatcgtgctcttctccccagaccaccctggcctgaccagcaccagccagatcgagaagttccaggagaaggcccagatggagctgcaggactatgtgcagaagacctacagcgaggacacctaccgcctggcccgcatcctggtgcggctgcctgccctgcggctgatgagcagcaacatcacagaggagctgttcttcaccggcctgattggaaatgtgtccattgacagcatcatcccctacatcctgaagatggagacagctgagtacaacggccagatcactggagccagcctgtag

SEQ ID NO: 162344 - DNA, 1791 bp, synthetic construct
  misc_feature 1..1791: note = Description of Artificial Sequence: Synthetic coding sequence
  source 1..1791: mol_type = other DNA
atgaccagccccagcccccgcatccagatcatcagcacagattctgctgtggccagcccccagaggatccagatcgtgacagaccagcagacaggccagaagatccagatcgtgacagctgtggatgccagcggcagccccaagcagcagttcatcctgaccagcccagatggagctggcaccgggaaggtgatcctggccagccctgagaccagcagcgccaagcagctgatcttcaccaccagtgacaacctggtgcccggccgcatccagatcgtgacagacagcgcctctgtggagcggctgctgggcaagacagatgtgcagaggccccaggtggtggagtactgtgtggtgtgtggggacaaggccagcggccgccactatggagctgtgtcctgtgagggctgcaagggcttcttcaagaggtctgtgaggaagaacctgacctacagctgccgcagcaaccaggactgcatcatcaacaagcaccacaggaaccgctgccagttctgccgcctgaagaagtgcctggagatgggcatgaagatggagagcgtgcagagcgagaggaagccctttgatgtgcagcgggagaagcccagcaactgtgccgccagcacagagaagatctacatcaggaaggacctgcggagccccctcatcgccacccccacctttgtggccgacaaggatggagcccggcagacaggcctgctggaccccggcatgctggtgaacatccagcagcccctcatcagagaagatggcaccgtgctgctggccacagacagcaaggccgagaccagccagggcgccctgggcaccctggccaacgtggtgaccagcctggccaacctgtctgagagcctgaacaatggagacaccagcgagatccagcctgaggaccagagcgccagcgagatcacccgggcctttgacaccctggccaaggccctgaacaccacagacagcagcagcagccccagcctggctgatggcatcgacaccagcggcggcggcagcatccacgtgatcagccgggaccagagcacccccatcatcgaggtggagggccccctgctgagtgacacccacgtgaccttcaagctgaccatgcccagccccatgcctgagtacctgaatgtgcactacatctgtgagagcgccagccggctgctcttcctgtccatgcactgggcccggagcatcccagccttccaggccctgggccaggactgcaacaccagcctggtgcgggcctgctggaatgagctgttcaccctgggcctggcccagtgtgcccaggtgatgagcctgagcaccatcctggccgccatcgtgaaccacctgcagaacagcatccaggaggacaagctgagcggggaccgcatcaagcaggtgatggagcacatctggaagctgcaggagttctgcaacagcatggccaagctggacattgatggctatgaatatgcctacctgaaggccatcgtgctcttctccccagaccaccctggcctgaccagcaccagccagatcgagaagttccaggagaaggcccagatggagctgcaggactatgtgcagaagacctacagcgaggacacctaccgcctggcccgcatcctggtgcggctgcctgccctgcggctgatgagcagcaacatcacagaggagctgttcttcaccggcctgattggaaatgtgtccattgacagcatcatcccctacatcctgaagatggagacagctgagtacaacggccagatcaccggggccagcctgtag

SEQ ID NO: 162345 - DNA, 1791 bp, synthetic construct; identical to SEQ ID NO: 162344
  misc_feature 1..1791: note = Description of Artificial Sequence: Synthetic coding sequence
  source 1..1791: mol_type = other DNA

SEQ ID NO: 162346 - DNA, 1791 bp, synthetic construct; identical to SEQ ID NO: 162344
  misc_feature 1..1791: note = Description of Artificial Sequence: Synthetic coding sequence
  source 1..1791: mol_type = other DNA

SEQ ID NO: 162347 - DNA, 111 bp, synthetic construct
  misc_feature 1..111: note = Description of Artificial Sequence: Synthetic coding sequence
  source 1..111: mol_type = other DNA
atgaccagccccagcccccgcatccagatcatcagcacagattctgctgtggccagcccccagaggatccagggcagcgagcccgccagcggccccctgagcgtcttctag

SEQ ID NO: 162348 - DNA, 618 bp, synthetic construct
  misc_feature 1..618: note = Description of Artificial Sequence: Synthetic coding sequence
  source 1..618: mol_type = other DNA
atgaccagccccagcccccgcatccagatcatcagcacagattctgctgtggccagcccccagaggatccagggcagcgagcccgccagcggccccctgagcgtcttcaccagcctgaacaaggagaagatcgtgacagaccagcagacaggccagaagatccagatcgtgacagctgtggatgccagcggcagccccaagcagcagttcatcctgaccagcccagatggagctggcaccgggaaggtgatcctggccagccctgagaccagcagcgccaagcagctgatcttcaccaccagtgacaacctggtgcccggccgcatccagatcgtgacagattctgcctctgtggagcggctgctgggcaagacagatgtgcagaggccccaggtggtggagtactgtgtggtgtgtggggacaaggccagcggccgccactacggggctgtgtcctgtgagggctgcaagggcttcttcaagaggtctgtgaggaagaacctgacctacagctgccgcagcaaccaggactgcatcatcaacaagcaccacaggaaccgctgccagttctgccgcctgaagaagtgcctggagatgggcatgaagatggagtgctag

SEQ ID NO: 162349 - DNA, 1269 bp, synthetic construct
  misc_feature 1..1269: note = Description of Artificial Sequence: Synthetic coding sequence
  source 1..1269: mol_type = other DNA
atgttccgggccggggctgagggcgctgagaaggagcccagccccaggcctgagtgcagagctgaccccggccctggcctgggcttccccctgggcagcggcctgccctggcccagcctgctggagagccctgggggccgcatcctggacatcccctgcaaggtgtgtggggacaggagcagcggcaagcactatggagtgtatgcctgtgatggctgcagcggcttcttcaagaggagcatcagaagaaacagaacctacgtgtgcaagagcggcaaccagggcggctgccctgtggacaagacccacaggaaccagtgccgggcctgccgcctgaagaagtgcctggaggtgaacatgaacaaggatgctgtgcagcacgagcggggccccaggaccagcaccatcaggaagcaggtggccctgtacttccggggccacaaggaggagaatggagctgctgcccacttccccagcgctgccctgcctgccccagccttcttcaccgctgtgacccagctggagccccacggcctggagctggccgctgtgtccaccaccccagagcggcagaccctggtgtccctggcccagcccacccccaagtacccccatgaggtgaatggcacccccatgtacctgtatgaggtggccacagaatctgtgtgtgagagcgctgcccggctgctcttcatgagcatcaagtgggccaagtctgtgcctgccttcagcaccctgagcctgcaggaccagctgatgctgctggaggatgcctggagggagctgtttgtgctgggcatcgcccagtgggccatccctgtggatgccaacaccctgctggccgtgtctggcatgaatggagacaacacagacagccagaagctgaacaagatcatcagcgagatccaggccctgcaggaggtggtggcccgcttccggcagctgcggctggatgccacagaatttgcctgcctgaagtgcatcgtgaccttcaaggctgtgcccacccacagcggcagcgagctgcggagcttcagaaatgctgctgccatcgccgccctgcaggatgaggcccagctgaccctgaacagctacatccacacccgctaccccacccagccctgccgctttgggaagctgctgctgctgctgcctgccctgcggagcatcagccccagcaccatcgaggaggtgttcttcaagaagaccatcggaaatgtgcccatcacccggctgctgagtgacatgtacaagagcagtgacatctag

SEQ ID NO: 162350 - DNA, 1158 bp, synthetic construct
  misc_feature 1..1158: note = Description of Artificial Sequence: Synthetic coding sequence
  source 1..1158: mol_type = other DNA
atgagcaagccagctggcagcaccagccgcatcctggacatcccctgcaaggtgtgtggggacaggagcagcggcaagcactacggcgtgtatgcctgtgatggctgcagcggcttcttcaagaggagcatcagaagaaacagaacctacgtgtgcaagagcggcaaccagggcggctgccctgtggacaagacccacaggaaccagtgccgggcctgccgcctgaagaagtgcctggaggtgaacatgaacaaggatgctgtgcagcacgagcggggccccaggaccagcaccatcaggaagcaggtggccctgtacttccggggccacaaggaggagaatggagctgctgcccacttccccagcgctgccctgcctgccccagccttcttcaccgctgtgacccagctggagccccacggcctggagctggccgctgtgtccaccaccccagagcggcagaccctggtgtccctggcccagcccacccccaagtacccccatgaggtgaatggcacccccatgtacctgtatgaggtggccacagagagcgtgtgtgagagcgctgcccggctgctcttcatgagcatcaagtgggccaagtctgtgcctgccttcagcaccctgagcctgcaggaccagctgatgctgctggaggatgcctggagggagctgtttgtgctgggcatcgcccagtgggccatccctgtggatgccaacaccctgctggccgtgtctggcatgaatggagacaacacagacagccagaagctgaacaagatcatcagcgagatccaggccctgcaggaggtggtggcccgcttccggcagctgcggctggatgccacagaatttgcctgcctgaagtgcatcgtgaccttcaaggctgtgcccacccacagcggcagcgagctgcgctccttcagaaatgctgctgccatcgccgccctgcaggatgaggcccagctgaccctgaacagctacatccacacccgctaccccacccagccctgccgctttgggaagctgctgctgctgctgcctgccctgcggagcatcagccccagcaccatcgaggaggtgttcttcaagaagaccatcggaaatgtgcccatcacccggctgctgagtgacatgtacaagagcagtgacatctag

SEQ ID NO: 162351 - DNA, 141 bp, synthetic construct
  misc_feature 1..141: note = Description of Artificial Sequence: Synthetic coding sequence
  source 1..141: mol_type = other DNA
atgaacaaggatgctgtgcagcacgagcggggccccaggaccagcaccatcaggaagcaggtggccctgtacttccggggccacaaggaggagaatggagctgctgcccacttccccagcgctgccctgcctgccccctag

SEQ ID NO: 162352 - DNA, 1272 bp, synthetic construct
  misc_feature 1..1272: note = Description of Artificial Sequence: Synthetic coding sequence
  source 1..1272: mol_type = other DNA
atggccatggtggtgtcctcctggagggacccccaggatgatgtggccggcggcaaccctgggggccccaacccagctgcccaggccgcccggggcggcggcggcggggccggggagcagcagcagcaggccggcagcggggccccccacaccccccagaccccaggccagcccggggccccagccaccccaggcacagctggggacaagggccagggccccccaggcagcggccagagccagcagcacattgaatgtgtggtgtgtggggacaagagcagcggcaagcactacggccagttcacctgtgagggctgcaagagcttcttcaagaggtctgtgagaagaaacctgacctacacctgccgggccaacagaaactgccccatcgaccagcaccacaggaaccagtgccagtactgccgcctgaagaagtgcctgaaggtgggcatgaggcgggaggccgtgcagaggggccgcatgccacccacccagcccaaccctggccagtatgccctgaccaatggagaccccctgaatggccactgctacctgagcggctacatcagcctgctgctgcgggcagagccctaccccaccagccgctatggcagccagtgcatgcagcccaacaacatcatgggcatcgagaacatctgtgagctggccgcccggctgctcttctctgctgtggagtgggccaggaacatccccttcttcccagacctgcagatcacagaccaggtgtccctgctgcggctgacctggagcgagctgtttgtgctgaatgctgcccagtgcagcatgcccctgcacgtggcccccctgctggccgccgccggcctgcacgccagccccatgtctgctgacagagtggtggccttcatggaccacatccgcatcttccaggagcaggtggagaagctgaaggccctgcacgtggacagcgctgagtacagctgcctgaaggccatcgtgctcttcaccagtgatgcctgtggcctgagtgatgctgcccacatcgagagcctgcaggagaagagccagtgtgccctggaggagtatgtgcgcagccagtaccccaaccagcccagcagatttgggaagctgctgctgcggctgcccagcctgaggacagtgagcagctctgtgattgagcagctgttctttgtgcggctggtgggcaagacccccatcgagaccctcatccgggacatgctgctgagcggcagcagcttcaactggccctacatgagcatccagtgcagctag

SEQ ID NO: 162353 - DNA, 1245 bp, synthetic construct
  misc_feature 1..1245: note = Description of Artificial Sequence: Synthetic coding sequence
  source 1..1245: mol_type = other DNA
atggccatggtggtgtccacctggagggacccccaggatgaggtgcccggcagccagggcagccaggccagccaggcccctcctgtgcccggccccccacctggggccccccacaccccccagaccccaggccagggcggccctgccagcaccccagcccagacagctgctgggggccagggcggccctgggggccctggcagtgacaagcagcagcagcagcagcacattgaatgtgtggtgtgtggggacaagagcagcggcaagcactacggccagttcacctgtgagggctgcaagagcttcttcaagaggtctgtgagaagaaacctgagctacacctgccgggccaacagaaactgccccatcgaccagcaccacaggaaccagtgccagtactgccgcctgaagaagtgcctgaaggtgggcatgagaagagaggccgtgcagaggggccgcatgccacccacccagcccacccacggccagtttgccctgaccaacggggaccccctgaactgccacagctacctgagcggctacatcagcctgctgctgcgggcagagccctaccccaccagccgcttcggcagccagtgcatgcagcccaacaacatcatgggcatcgagaacatctgtgagctggccgccaggatgctgttctctgctgtggagtgggccaggaacatccccttcttcccagacctgcagatcacagaccaggtggccctgctgcggctgacctggagcgagctgtttgtgctgaatgctgcccagtgcagcatgcccctgcacgtggcccccctgctggccgctgctggcctgcacgccagccccatgtctgctgacagagtggtggccttcatggaccacatccgcatcttccaggagcaggtggagaagctgaaggccctgcacgtggacagcgctgagtacagctgcctgaaggccatcgtgctcttcaccagtgatgcctgtggcctgagtgatgtggcccacgtggagagcctgcaggagaagagccagtgtgccctggaggagtatgtgcgcagccagtaccccaaccagcccaccaggtttgggaagctgctgctgcggctgcccagcctgaggacagtgagcagcagcgtcatcgagcagctgttctttgtgcggctggtgggcaagacccccatcgagaccctcatccgggacatgctgctgagcggcagcagcttcaactggccctacatggccatccagtag

SEQ ID NO: 162354 - DNA, 786 bp, synthetic construct
  misc_feature 1..786: note = Description of Artificial Sequence: Synthetic coding sequence
  source 1..786: mol_type = other DNA
atgccacccacccagcccacccacggccagtttgccctgaccaatggagaccccctgaactgccacagctacctgagcggctacatcagcctgctgctgcgggcagagccctaccccaccagcagatttggcagccagtgcatgcagcccaacaacatcatgggcatcgagaacatctgtgagctggccgccaggatgctgttctctgctgtggagtgggccaggaacatccccttcttcccagacctgcagatcacagaccaggtggccctgctgcggctgacctggagcgagctgtttgtgctgaatgctgcccagtgcagcatgcccctgcacgtggcccccctgctggccgccgccggcctgcacgccagccccatgtctgctgacagagtggtggccttcatggaccacatccgcatcttccaggagcaggtggagaagctgaaggccctgcacgtggacagcgctgagtacagctgcctgaaggccatcgtgctcttcaccagtgatgcctgtggcctgagtgatgtggcccacgtggagagcctgcaggagaagagccagtgtgccctggaggagtatgtgcgcagccagtaccccaaccagcccaccaggtttgggaagctgctgctgcggctgcccagcctgaggacagtgagcagctctgtgattgagcagctgttctttgtgcggctggtgggcaagacccccatcgagaccctcatccgggacatgctgctgagcggcagcagcttcaactggccctacatggccatccagtag

SEQ ID NO: 162355 - DNA, 846 bp, synthetic construct
  misc_feature 1..846: note = Description of Artificial Sequence: Synthetic coding sequence
  source 1..846: mol_type = other DNA
atgcaggccgtgtgggacctggagcagggcaagtatggctttgctgtgcagaggggccgcatgccacccacccagcccacccacggccagtttgccctgaccaatggagaccccctgaactgccacagctacctgagcggctacatcagcctgctgctgcgggcagagccctaccccaccagcagatttggcagccagtgcatgcagcccaacaacatcatgggcatcgagaacatctgtgagctggccgccaggatgctgttctctgctgtggagtgggccaggaacatccccttcttcccagacctgcagatcacagaccaggtggccctgctgcggctgacctggagcgagctgtttgtgctgaatgctgcccagtgcagcatgcccctgcacgtggcccccctgctggccgccgccggcctgcacgccagccccatgtctgctgacagagtggtggccttcatggaccacatccgcatcttccaggagcaggtggagaagctgaaggccctgcacgtggacagcgctgagtacagctgcctgaaggccatcgtgctcttcaccagtgatgcctgtggcctgagtgatgtggcccacgtggagagcctgcaggagaagagccagtgtgccctggaggagtatgtgcgcagccagtaccccaaccagcccaccaggtttgggaagctgctgctgcggctgcccagcctgaggacagtgagcagctctgtgattgagcagctgttctttgtgcggctggtgggcaagacccccatcgagaccctcatccgggacatgctgctgagcggcagcagcttcaactggccctacatggccatccagtag

SEQ ID NO: 162356 - DNA, 786 bp, synthetic construct; identical to SEQ ID NO: 162354
  misc_feature 1..786: note = Description of Artificial Sequence: Synthetic coding sequence
  source 1..786: mol_type = other DNA

SEQ ID NO: 162357 - DNA, 1215 bp, synthetic construct
  misc_feature 1..1215: note = Description of Artificial Sequence: Synthetic coding sequence
  source 1..1215: mol_type = other DNA
atggccatggtgactggaggctggggcggccctggaggagacaccaacggggtggacaaggccggcggctaccccagggctgctgaagatgacagcgccagccccccaggggccgccagtgatgctgagcctggagatgaggagcggcccggcctgcaggtggactgtgtggtgtgtggggacaagagcagcggcaagcactacggcgtcttcacctgtgagggctgcaagagcttcttcaagaggagcatcagaagaaacctgagctacacctgccgcagcaacagagactgccagattgaccagcaccacaggaaccagtgccagtactgccgcctgaagaagtgcttccgggtgggcatgaggaaggaggccgtgcagaggggccgcatcccccacagcctgcccggggctgtggccgccagcagcggcagccccccaggcagcgccctggccgctgtggccagcggcggggacctcttccctggccagcctgtgtctgagctgattgcccagctgctgcgggcagagccctacccagctgctgctggccgctttggagctgggggcggcgctgctggagctgtgctgggcatcgacaacgtgtgtgagctggccgcccggctgctcttcagcacagtggagtgggcccggcatgcccccttcttccctgagctgcctgtggccgaccaggtggccctgctgcggctgtcctggagcgagctgtttgtgctgaatgctgcccaggccgccctgcccctgcacacagcccccctgctggccgctgctggcctgcatgctgcccccatggctgctgagagagctgtggccttcatggaccaggtgcgggccttccaggagcaggtggacaagctgggccgcctgcaggtggacagcgcagaatatggctgcctgaaggccatcgccctcttcaccccagatgcctgtggcctgagtgaccctgcccacgtggagagcctgcaggagaaggcccaggtggccctgacagaatatgtgcgggcccagtaccccagccagccccagcgcttcggccgcctgctgctgcggctgcctgccctgcgggctgtgcctgccagcctcatcagccagctgttcttcatgaggctggtgggcaagacccccatcgagaccctcatccgggacatgctgctgagcggcagcaccttcaactggccctacggcagcggccagtag

SEQ ID NO: 162358 - DNA, 1134 bp, synthetic construct
  misc_feature 1..1134: note = Description of Artificial Sequence: Synthetic coding sequence
  source 1..1134: mol_type = other DNA
atggccatggtgactggaggctggggcggccctggaggagatgctgagcctggagatgaggagaggcctggcctgcaggtggactgtgtggtgtgtggggacaagagcagcggcaagcactatggagtcttcacctgtgagggctgcaagagcttcttcaagaggagcatcagaagaaacctgagctacacctgccgcagcaacagagactgccagattgaccagcaccacaggaaccagtgccagtactgccgcctgaagaagtgcttccgggtgggcatgaggaaggaggccgtgcagaggggccgcatcccccacagcctgcctggagctgtggccgccagcagcggcagccccccaggcagcgccctggccgctgtggccagcggcggggacctcttccctggccagcctgtgtctgagctgattgcccagctgctgcgggcagagccctacccagctgctgctggccgctttggagctgggggcggggccgccggggctgtgctgggcatcgacaacgtgtgtgagctggccgcccggctgctcttcagcacagtggagtgggcccggcatgcccccttcttccctgagctgcctgtggccgaccaggtggccctgctgcggctgtcctggagcgagctgtttgtgctgaatgctgcccaggccgccctgcccctgcacacagcccccctgctggccgccgccggcctgcacgccgcccccatggctgctgagagagctgtggccttcatggaccaggtgcgggccttccaggagcaggtggacaagctgggccgcctgcaggtggacagcgcagaatatggctgcctgaaggccatcgccctcttcaccccagatgcctgtggcctgagtgaccctgcccacgtggagagcctgcaggagaaggcccaggtggccctgacagaatatgtgcgggcccagtaccccagccagccccagagatttggccgcctgctgctgcggctgcctgccctgcgggctgtgcctgccagcctcatcagccagctgttcttcatgaggctggtgggcaagacccccatcgagaccctcatccgggacatgctgctgagcggcagcaccttcaactggccctacggcagcggccagtag

SEQ ID NO: 162359 - DNA, 2121 bp, synthetic construct
  misc_feature 1..2121: note = Description of Artificial Sequence: Synthetic coding sequence
  source 1..2121: mol_type = other DNA
atggagaccaagggctaccacagcctgcctgagggcctggacatggagcggcgctggggccaggtgtcccaggccgtggagaggagcagcctgggccccacagagaggacagatgagaacaactacatggagatcgtgaatgtgtcctgtgtgtctggggccatccccaacaacagcacccagggcagcagcaaggagaagcaggagctgctgccctgcctgcagcaggacaacaacagacctggcatcctgaccagtgacatcaagacagagctggagagcaaggagctgagcgccaccgtggccgagagcatgggcctgtacatggattctgtgagagatgctgactacagctatgagcagcagaaccagcagggctccatgagccctgccaagatctaccagaatgtggagcagctggtgaagttctacaagggaaatggccaccggcccagcaccctgagctgtgtgaacacccccctgcgctccttcatgtctgacagcggcagctctgtgaatggaggagtgatgagagctgtggtgaagagccccatcatgtgccacgagaagagccccagcgtgtgcagccccctgaacatgaccagctctgtgtgcagccctgctggcatcaacagcgtgagcagcaccacagccagctttggcagcttccctgtgcacagccccatcacccagggcacccccctgacctgcagccccaacgtggagaacagaggcagccgcagccacagccctgcccacgccagcaatgtgggcagccccctgagcagccccctgagctccatgaagagcagcatcagcagcccccccagccactgcagcgtgaagagccctgtgagcagccccaacaacgtgaccctgcggagctctgtgagcagccctgccaacatcaacaacagccgctgcagcgtgagcagccccagcaacaccaacaacagaagcaccctgagcagccctgctgccagcacagtgggcagcatctgcagccctgtgaacaatgccttctcctacacagccagcggcaccagcgctggcagcagcaccctgagagatgtggtgcccagcccagacacccaggagaagggggcccaggaggtgcccttccccaagacagaggaggtggagagcgccatcagcaatggagtgacaggccagctgaacatcgtgcagtacatcaagccagagccagatggagccttcagcagcagctgcctgggcggcaacagcaagatcaacagcgacagcagcttctctgtgcccatcaagcaggagagcaccaagcacagctgcagcggcaccagcttcaagggcaaccccaccgtgaaccccttccccttcatggatggcagctacttctccttcatggatgacaaggactactacagcctgagcggcatcctgggcccccctgtgcccggctttgatggcaactgtgagggcagcggcttccctgtgggcatcaagcaggagccagatgatggcagctactacccagaggccagcatccccagcagcgccatcgtgggcgtgaacagcggcggccagagcttccactacagaattggagcccagggcaccatcagcctgagccgcagcgcccgggaccagagcttccagcacctgagcagcttcccccctgtgaacaccctggtggagagctggaagagccatggagacctgagcagcagaagaagtgatggctaccctgtgctggagtacatcccagaaaatgtgagcagcagcaccctgcggtctgtgtccacaggcagcagccggcccagcaagatctgcctggtgtgtggagatgaggccagcggctgccactatggagtggtgacctgtggcagctgcaaggtgttcttcaagagagctgtggagggccagcacaactacctgtgtgccggcagaaatgactgcatcatcgacaagatccggaggaagaactgcccagcctgccgcctgcagaagtgcctgcaggccggcatgaacctgggggagcggcgctgcatcagcctgccctgcatgaactatgcccggggctgcaccaagagcgccttcagcagctttgactgcagcagccccctgaagaacacccccagctag

SEQ ID NO: 162360 - DNA, 2955 bp, synthetic construct
  misc_feature 1..2955: note = Description of Artificial Sequence: Synthetic coding sequence
  source 1..2955: mol_type = other DNA
atggagaccaagggctaccacagcctgcctgagggcctggacatggagcggcgctggggccaggtgtcccaggccgtggagaggagcagcctgggccccacagagaggacagatgagaacaactacatggagatcgtgaatgtgtcctgtgtgtctggggccatccccaacaacagcacccagggcagcagcaaggagaagcaggagctgctgccctgcctgcagcaggacaacaacagacctggcatcctgaccagtgacatcaagacagagctggagagcaaggagctgagcgccaccgtggccgagagcatgggcctgtacatggattctgtgagagatgctgactacagctatgagcagcagaaccagcagggctccatgagccctgccaagatctaccagaatgtggagcagctggtgaagttctacaagggaaatggccaccggcccagcaccctgagctgtgtgaacacccccctgcgctccttcatgtctgacagcggcagctctgtgaatggaggagtgatgagagctgtggtgaagagccccatcatgtgccacgagaagagccccagcgtgtgcagccccctgaacatgaccagctctgtgtgcagccctgctggcatcaacagcgtgagcagcaccacagccagctttggcagcttccctgtgcacagccccatcacccagggcacccccctgacctgcagccccaacgtggagaacagaggcagccgcagccacagccctgcccacgccagcaatgtgggcagccccctgagcagccccctgagctccatgaagagcagcatcagcagcccccccagccactgcagcgtgaagagccctgtgagcagccccaacaacgtgaccctgcggagctctgtgagcagccctgccaacatcaacaacagccgctgcagcgtgagcagccccagcaacaccaacaacagaagcaccctgagcagccctgctgccagcacagtgggcagcatctgcagccctgtgaacaatgccttctcctacacagccagcggcaccagcgctggcagcagcaccctgagagatgtggtgcccagcccagacacccaggagaagggggcccaggaggtgcccttccccaagacagaggaggtggagagcgccatcagcaatggagtgacaggccagctgaacatcgtgcagtacatcaagccagagccagatggagccttcagcagcagctgcctgggcggcaacagcaagatcaacagcgacagcagcttctctgtgcccatcaagcaggagagcaccaagcacagctgcagcggcaccagcttcaagggcaaccccaccgtgaaccccttccccttcatggatggcagctacttctccttcatggatgacaaggactactacagcctgagcggcatcctgggcccccctgtgcccggctttgatggcaactgtgagggcagcggcttccctgtgggcatcaagcaggagccagatgatggcagctactacccagaggccagcatccccagcagcgccatcgtgggcgtgaacagcggcggccagagcttccactacagaattggagcccagggcaccatcagcctgagccgcagcgcccgggaccagagcttccagcacctgagcagcttcccccctgtgaacaccctggtggagagctggaagagccatggagacctgagcagcagaagaagtgatggctaccctgtgctggagtacatcccagaaaatgtgagcagcagcaccctgcggtctgtgtccacaggcagcagccggcccagcaagatctgcctggtgtgtggagatgaggccagcggctgccactatggagtggtgacctgtggcagctgcaaggtgttcttcaagagagctgtggagggccagcacaactacctgtgtgccggcagaaatgactgcatcatcgacaagatccggaggaagaactgcccagcctgccgcctgcagaagtgcctgcaggccggcatgaacctgggcgccaggaagagcaagaagctgggcaagctgaagggcatccacgaggagcagccccagcagcagcagcccccacctcctcctcctccaccccagagccctgaggagggcaccacctacatcgccccagccaaggagcccagcgtgaacacagccctggtgccccagctgagcaccatcagccgggccctgacccccagccctgtgatggtgctggagaacatcgagcctgagatcgtgtatgccggctatgacagcagcaagccagacacagctgagaacctgctgagcaccctgaaccggctggccggcaagcagatgatccaggtggtgaagtgggccaaggtgctgcccggcttcaagaacctgcccctggaggaccagatcaccctcatccagtacagctggatgtgcctgagcagctttgccctgtcctggaggagctacaagcacaccaacagccagttcctgtactttgccccagacctggtgttcaatgaggagaagatgcaccagagcgccatgtatgagctgtgccagggcatgcaccagatcagcctgcagtttgtgcggctgcagctgacctttgaggagtacaccatcatgaaggtgctgctgctgctgagcaccatccccaaggatggcctgaagagccaggccgcctttgaggagatgaggaccaactacatcaaggagctgaggaagatggtgaccaagtgccccaacaacagcggccagagctggcagcgcttctaccagctgaccaagctgctggacagcatgcatgacctggtgtctgacctgctggagttctgcttctacaccttccgggagagccacgccctgaaggtggagttccctgccatgctggtggagatcatcagtgaccagctgcccaaggtggagagcggaaatgccaagcccctgtacttccacaggaagtag

SEQ ID NO: 162361 - DNA, 2967 bp, synthetic construct
  misc_feature 1..2967: note = Description of Artificial Sequence: Synthetic coding sequence
  source 1..2967: mol_type = other DNA
atggagaccaagggctaccacagcctgcctgagggcctggacatggagcggcgctggggccaggtgtcccaggccgtggagaggagcagcctgggccccacagagaggacagatgagaacaactacatggagatcgtgaatgtgtcctgtgtgtctggggccatccccaacaacagcacccagggcagcagcaaggagaagcaggagctgctgccctgcctgcagcaggacaacaacagacctggcatcctgaccagtgacatcaagacagagctggagagcaaggagctgagcgccaccgtggccgagagcatgggcctgtacatggattctgtgagagatgctgactacagctatgagcagcagaaccagcagggctccatgagccctgccaagatctaccagaatgtggagcagctggtgaagttctacaagggaaatggccaccggcccagcaccctgagctgtgtgaacacccccctgcgctccttcatgtctgacagcggcagctctgtgaatggaggagtgatgagagctgtggtgaagagccccatcatgtgccacgagaagagccccagcgtgtgcagccccctgaacatgaccagctctgtgtgcagccctgctggcatcaacagcgtgagcagcaccacagccagctttggcagcttccctgtgcacagccccatcacccagggcacccccctgacctgcagccccaacgtggagaacagaggcagccgcagccacagccctgcccacgccagcaatgtgggcagccccctgagcagccccctgagctccatgaagagcagcatcagcagcccccccagccactgcagcgtgaagagccctgtgagcagccccaacaacgtgaccctgcggagctctgtgagcagccctgccaacatcaacaacagccgctgcagcgtgagcagccccagcaacaccaacaacagaagcaccctgagcagccctgctgccagcacagtgggcagcatctgcagccctgtgaacaatgccttctcctacacagccagcggcaccagcgctggcagcagcaccctgagagatgtggtgcccagcccagacacccaggagaagggggcccaggaggtgcccttccccaagacagaggaggtggagagcgccatcagcaatggagtgacaggccagctgaacatcgtgcagtacatcaagccagagccagatggagccttcagcagcagctgcctgggcggcaacagcaagatcaacagcgacagcagcttctctgtgcccatcaagcaggagagcaccaagcacagctgcagcggcaccagcttcaagggcaaccccaccgtgaaccccttccccttcatggatggcagctacttctccttcatggatgacaaggactactacagcctgagcggcatcctgggcccccctgtgcccggctttgatggcaactgtgagggcagcggcttccctgtgggcatcaagcaggagccagatgatggcagctactacccagaggccagcatccccagcagcgccatcgtgggcgtgaacagcggcggccagagcttccactacagaattggagcccagggcaccatcagcctgagccgcagcgcccgggaccagagcttccagcacctgagcagcttcccccctgtgaacaccctggtggagagctggaagagccatggagacctgagcagcagaagaagtgatggctaccctgtgctggagtacatcccagaaaatgtgagcagcagcaccctgcggtctgtgtccacaggcagcagccggcccagcaagatctgcctggtgtgtggagatgaggccagcggctgccactatggagtggtgacctgtggcagctgcaaggtgttcttcaagagagctgtggagggcaagtgctcctggcagcacaactacctgtgtgccggcagaaatgactgcatcatcgacaagatccggaggaagaactgcccagcctgccgcctgcagaagtgcctgcaggccggcatgaacctgggcgccaggaagagcaagaagctgggcaagctgaagggcatccacgaggagcagccccagcagcagcagcccccacctcctcctcctccaccccagagccctgaggagggcaccacctacatcgccccagccaaggagcccagcgtgaacacagccctggtgccccagctgagcaccatcagccgggccctgacccccagccctgtgatggtgctggagaacatcgagcctgagatcgtgtatgccggctatgacagcagcaagccagacacagctgagaacctgctgagcaccctgaaccggctggccggcaagcagatgatccaggtggtgaagtgggccaaggtgctgcccggcttcaagaacctgcccctggaggaccagatcaccctcatccagtacagctggatgtgcctgagcagctttgccctgtcctggaggagctacaagcacaccaacagccagttcctgtactttgccccagacctggtgttcaatgaggagaagatgcaccagagcgccatgtatgagctgtgccagggcatgcaccagatcagcctgcagtttgtgcggctgcagctgacctttgaggagtacaccatcatgaaggtgctgctgctgctgagcaccatccccaaggatggcctgaagagccaggccgcctttgaggagatgaggaccaactacatcaaggagctgaggaagatggtgaccaagtgccccaacaacagcggccagagctggcagcgcttctaccagctgaccaagctgctggacagcatgcatgacctggtgtctgacctgctggagttctgcttctacaccttccgggagagccacgccctgaaggtggagttccctgccatgctggtggagatcatcagtgaccagctgcccaaggtggagagcggaaatgccaagcccctgtacttccacaggaagtag

SEQ ID NO: 162362 - DNA, 2955 bp, synthetic construct; identical to SEQ ID NO: 162360
  misc_feature 1..2955: note = Description of Artificial Sequence: Synthetic coding sequence
  source 1..2955: mol_type = other DNA

SEQ ID NO: 162363 - DNA, 2967 bp, synthetic construct; identical to SEQ ID NO: 162361
  misc_feature 1..2967: note = Description of Artificial Sequence: Synthetic coding sequence
  source 1..2967: mol_type = other DNA

SEQ ID NO: 162364 - DNA, 2604 bp, synthetic construct
  misc_feature 1..2604: note = Description of Artificial Sequence: Synthetic coding sequence
  source 1..2604: mol_type = other DNA
atggagaccaagggctaccacagcctgcctgagggcctggacatggagcggcgctggggccaggtgtcccaggccgtggagaggagcagcctgggccccacagagaggacagatgagaacaactacatggagatcgtgaatgtgtcctgtgtgtctggggccatccccaacaacagcacccagggcagcagcaaggagaagcaggagctgctgccctgcctgcagcaggacaacaacagacctggcatcctgaccagtgacatcaagacagagctggagagcaaggagctgagcgccaccgtggccgagagcatgggcctgtacatggattctgtgagagatgctgactacagctatgagcagcagaaccagcagggctccatgagccctgccaagatctaccagaatgtggagcagctggtgaagttctacaagggaaatggccaccggcccagcaccctgagctgtgtgaacacccccctgcgctccttcatgtctgacagcggcagctctgtgaatggaggagtgatgagagctgtggtgaagagccccatcatgtgccacgagaagagccccagcgtgtgcagccccctgaacatgaccagctctgtgtgcagccctgctggcatcaacagcgtgagcagcaccacagccagctttggcagcttccctgtgcacagccccatcacccagggcacccccctgacctgcagccccaacgtggagaacagaggcagccgcagccacagccctgcccacgccagcaatgtgggcagccccctgagcagccccctgagctccatgaagagcagcatcagcagcccccccagccactgcagcgtgaagagccctgtgagcagccccaacaacgtgaccctgcggagctctgtgagcagccctgccaacatcaacaacagccgctgcagcgtgagcagccccagcaacaccaacaacagaagcaccctgagcagccctgctgccagcacagtgggcagcatctgcagccctgtgaacaatgccttctcctacacagccagcggcaccagcgctggcagcagcaccctgagagatgtggtgcccagcccagacacccaggagaagggggcccaggaggtgcccttccccaagacagaggaggtggagagcgccatcagcaatggagtgacaggccagctgaacatcgtgcagtacatcaagccagagccagatggagccttcagcagcagctgcctgggcggcaacagcaagatcaacagcgacagcagcttctctgtgcccatcaagcaggagagcaccaagcacagctgcagcggcaccagcttcaagggcaaccccaccgtgaaccccttccccttcatggatggcagctacttctccttcatggatgacaaggactactacagcctgagcggcatcctgggcccccctgtgcccggctttgatggcaactgtgagggcagcggcttccctgtgggcatcaagcaggagccagatgatggcagctactacccagaggccagcatccccagcagcgccatcgtgggcgtgaacagcggcggccagagcttccactacagaattggagcccagggcaccatcagcctgagccgcagcgcccgggaccagagcttccagcacctgagcagcttcccccctgtgaacaccctggtggagagctggaagagccatggagacctgagcagcagaagaagtgatggctaccctgtgctggagtacatcccagaaaatgtgagcagcagcaccctgcggtctgtgtccacaggcagcagccggcccagcaagatctgcctggtgtgtggagatgaggccagcggctgccactatggagtggtgacctgtggcagctgcaaggtgttcttcaagagagctgtggagggccagcacaactacctgtgtgccggcagaaatgactgcatcatcgacaagatccggaggaagaactgcccagcctgccgcctgcagaagtgcctgcaggccggcatgaacctgggcggcttcaagaacctgcccctggaggaccagatcaccctcatccagtacagctggatgtgcctgagcagctttgccctgtcctggaggagctacaagcacaccaacagccagttcctgtactttgccccagacctggtgttcaatgaggagaagatgcaccagagcgccatgtatgagctgtgccagggcatgcaccagatcagcctgcagtttgtgcggctgcagctgacctttgaggagtacaccatcatgaaggtgctgctgctgctgagcaccatccccaaggatggcctgaagagccaggccgcctttgaggagatgaggaccaactacatcaaggagctgaggaagatggtgaccaagtgccccaacaacagcggccagagctggcagcgcttctaccagctgaccaagctgctggacagcatgcatgacctggtgtctgacctgctggagttctgcttctacaccttccgggagagccacgccctgaaggtggagttccctgccatgctggtggagatcatcagtgaccagctgcccaaggtggagagcggaaatgccaagcccctgtacttccacaggaagtag

SEQ ID NO: 162365 - DNA, 1920 bp, synthetic construct
  misc_feature 1..1920: note = Description of Artificial Sequence: Synthetic coding sequence
  source 1..1920: mol_type = other DNA
atggagaccaagggctaccacagcctgcctgagggcctggacatggagcggcgctggggccaggtgtcccaggccgtggagaggagcagcctgggccccacagagaggacagatgagaacaactacatggagatcgtgaatgtgtcctgtgtgtctggggccatccccaacaacagcacccagggcagcagcaaggagaagcaggagctgctgccctgcctgcagcaggacaacaacagacctggcatcctgaccagtgacatcaagacagagctggagagcaaggagctgagcgccaccgtggccgagagcatgggcctgtacatggattctgtgagagatgctgactacagctatgagcagcagaaccagcagggctccatgagccctgccaagatctaccagaatgtggagcagctggtgaagttctacaagggaaatggccaccggcccagcaccctgagctgtgtgaacacccccctgcgctccttcatgtctgacagcggcagctctgtgaatggaggagtgatgagagctgtggtgaagagccccatcatgtgccacgagaagagccccagcgtgtgcagccccctgaacatgaccagctctgtgtgcagccctgctggcatcaacagcgtgagcagcaccacagccagctttggcagcttccctgtgcacagccccatcacccagggcacccccctgacctgcagccccaacgtggagaacagaggcagccgcagccacagccctgcccacgccagcaatgtgggcagccccctgagcagccccctgagctccatgaagagcagcatcagcagcccccccagccactgcagcgtgaagagccctgtgagcagccccaacaacgtgaccctgcggagctctgtgagcagccctgccaacatcaacaacagccgctgcagcgtgagcagccccagcaacaccaacaacagaagcaccctgagcagccctgctgccagcacagtgggcagcatctgcagccctgtgaacaatgccttctcctacacagccagcggcaccagcgctggcagcagcaccctgagagatgtggtgcccagcccagacacccaggagaagggggcccaggaggtgcccttccccaagacagaggaggtggagagcgccatcagcaatggagtgacaggccagctgaacatcgtgcagtacatcaagccagagccagatggagccttcagcagcagctgcctgggcggcaacagcaagatcaacagcgacagcagcttctctgtgcccatcaagcaggagagcaccaagcacagctgcagcggcaccagcttcaagggcaaccccaccgtgaaccccttccccttcatggatggcagctacttctccttcatggatgacaaggactactacagcctgagcggcatcctgggcccccctgtgcccggctttgatggcaactgtgagggcagcggcttccctgtgggcatcaagcaggagccagatgatggcagctactacccagaggccagcatccccagcagcgccatcgtgggcgtgaacagcggcggccagagcttccactacagaattggagcccagggcaccatcagcctgagccgcagcgcccgggaccagagcttccagcacctgagcagcttcccccctgtgaacaccctggtggagagctggaagagccatggagacctgagcagcagaagaagtgatggctaccctgtgctggagtacatcccagaaaatgtgagcagcagcaccctgcggtctgtgtccacaggcagcagccggcccagcaagaagaacatctaccgcttcctgctgtgcaacaacagaacccggggcgtgggccagcagctgcccctgagccccaggagcagcacagtgttctgcatcaccggcatccacaccaggtag

SEQ ID NO: 162366 - DNA, 1797 bp, synthetic construct
  misc_feature 1..1797: note = Description of Artificial Sequence: Synthetic coding sequence
  source 1..1797: mol_type = other DNA
atgccctgcatccaggcccagtatggcaccccagcccccagccctggcccccgggaccacctggccagtgaccccctgaccccagagttcatcaagcccaccatggacctggccagccctgaggccgccccagctgcccccacagccctgcccagcttcagcaccttcatggatggctacacaggagaatttgacaccttcctgtaccagctgcccggcaccgtgcagccctgcagcagcgccagcagcagcgccagcagcaccagcagcagcagcgccaccagccctgccagcgccagcttcaagtttgaggacttccaggtgtatggctgctacccaggccccctgagcggccctgtggatgaggccctgagcagcagcggcagtgactactacggcagcccctgcagcgcccccagccccagcacccccagcttccagcccccccagctgagcccctgggatggcagctttggccacttcagccccagccagacctatgagggcctgcgggcctggacagagcagctgcccaaggccagcggccccccccagcccccagccttcttctccttcagcccccccaccggccccagccccagcctggcccagagccccctgaagctgttccccagccaggccacccaccagctgggggagggggagagctacagcatgcccacagccttccctggcctggcccccaccagcccccacctggagggcagcggcatcctggacacccctgtgaccagcaccaaggcccggagcggggcccctgggggcagcgagggccgctgtgctgtgtgtggggacaatgccagctgccagcactatggagtgaggacctgtgagggctgcaagggcttcttcaagaggacagtgcagaagaatgccaagtacatctgcctggccaacaaggactgccctgtggacaagagaagaagaaaccgctgccagttctgccgcttccagaagtgcctggccgtgggcatggtgaaggaggtggtgaggacagacagcctgaagggcagaagaggccgcctgcccagcaagcccaagcagcccccagatgccagccctgccaacctgctgaccagcctggtgcgggcccacctggacagcggccccagcacagccaagctggactacagcaagttccaggagctggtgctgccccactttgggaaggaggatgctggagatgtgcagcagttctatgacctgctgagcggcagcctggaggtgatcaggaagtgggccgagaagatccctggctttgctgagctgagccctgctgaccaggacctgctgctggagagcgccttcctggagctgttcatcctgcggctggcctaccgcagcaagccaggagagggcaagctgatcttctgcagcggcctggtgctgcaccggctgcagtgtgcccggggctttggagactggattgacagcatcctggccttcagccgcagcctgcacagcctgctggtggatgtgcctgcctttgcctgcctgagcgccctggtgctgatcacagacagacatggcctgcaggagccccggcgggtggaggagctgcagaacagaattgccagctgcctgaaggagcacgtggccgctgtggccggggagccccagcctgccagctgcctgagccggctgctgggcaagctgcctgagctgcggaccctgtgcacccagggcctgcagaggatcttctacctgaagctggaggacctggtgcccccaccacccatcatcgacaagatcttcatggacaccctgcccttctag

SEQ ID NO: 162367 - DNA, 1836 bp, synthetic construct
  misc_feature 1..1836: note = Description of Artificial Sequence: Synthetic coding sequence
  source 1..1836: mol_type = other DNA
atgtggctggccaaggcctgctggagcatccagagcgagatgccctgcatccaggcccagtatggcaccccagcccccagccctggcccccgggaccacctggccagtgaccccctgaccccagagttcatcaagcccaccatggacctggccagccctgaggccgccccagctgcccccacagccctgcccagcttcagcaccttcatggatggctacaccggggagtttgacaccttcctgtaccagctgcccggcaccgtgcagccctgcagcagcgccagcagcagcgccagcagcaccagcagcagcagcgccaccagccctgccagcgccagcttcaagtttgaggacttccaggtgtatggctgctacccaggccccctgagcggccctgtggatgaggccctgagcagcagcggcagtgactactacggcagcccctgcagcgcccccagccccagcacccccagcttccagcccccccagctgagcccctgggatggcagctttggccacttcagccccagccagacctatgagggcctgcgggcctggacagagcagctgcccaaggccagcggccccccccagcccccagccttcttctccttcagccccccaacaggccccagccccagcctggcccagagccccctgaagctgttccccagccaggccacccaccagctgggggagggggagagctacagcatgcccacagccttccctggcctggcccccaccagcccccacctggagggcagcggcatcctggacacccctgtgaccagcaccaaggcccggagcggggcccctgggggcagcgagggccgctgtgctgtgtgtggggacaatgccagctgccagcactacggcgtgaggacctgtgagggctgcaagggcttcttcaagaggacagtgcagaagaatgccaagtacatctgcctggccaacaaggactgccctgtggacaagagaagaagaaaccgctgccagttctgccgcttccagaagtgcctggccgtgggcatggtgaaggaggtggtgaggacagacagcctgaagggccggcggggccgcctgcccagcaagcccaagcagcccccagatgccagccctgccaacctgctgaccagcctggtgcgggcccacctggacagcggccccagcacagccaagctggactacagcaagttccaggagctggtgctgccccactttgggaaggaggatgctggagatgtgcagcagttctatgacctgctgagcggcagcctggaggtgatcaggaagtgggccgagaagatccctggctttgctgagctgagccctgctgaccaggacctgctgctggagagcgccttcctggagctgttcatcctgcggctggcctaccgcagcaagccaggagagggcaagctgatcttctgcagcggcctggtgctgcaccggctgcagtgtgcccggggctttggagactggattgacagcatcctggccttcagccgcagcctgcacagcctgctggtggatgtgcctgcctttgcctgcctgagcgccctggtgctgatcacagacagacatggcctgcaggagcccaggagagtggaggagctgcagaaccgcatcgccagctgcctgaaggagcacgtggccgctgtggccggggagccccagcctgccagctgcctgagccggctgctgggcaagctgcctgagctgcggaccctgtgcacccagggcctgcagaggatcttctacctgaagctggaggacctggtgcccccaccacccatcatcgacaagatcttcatggacaccctgcccttctag

SEQ ID NO: 162368 - DNA, 1797 bp, synthetic construct; identical to SEQ ID NO: 162366
  misc_feature 1..1797: note = Description of Artificial Sequence: Synthetic coding sequence
  source 1..1797: mol_type = other DNA

SEQ ID NO: 162369 - DNA, 1797 bp, synthetic construct; identical to SEQ ID NO: 162366
  misc_feature 1..1797: note = Description of Artificial Sequence: Synthetic coding sequence
  source 1..1797: mol_type = other DNA

SEQ ID NO: 162370 - DNA, 1959 bp, synthetic construct
  misc_feature 1..1959: note = Description of Artificial Sequence: Synthetic coding sequence
  source 1..1959: mol_type = other DNA
atgaccagcgcccagtacaagatcaagatcctgattgagggcctgcaccacggccagaggcctggccctgccccaccccggcagcccggcagcttctgctgggccctgaaggcagatggcatcatgtggctggccaaggcctgctggagcatccagagcgagatgccctgcatccaggcccagtatggcaccccagcccccagccctggcccccgggaccacctggccagtgaccccctgaccccagagttcatcaagcccaccatggacctggccagccctgaggccgccccagctgcccccacagccctgcccagcttcagcaccttcatggatggctacacaggagaatttgacaccttcctgtaccagctgcccggcaccgtgcagccctgcagcagcgccagcagcagcgccagcagcaccagcagcagcagcgccaccagccctgccagcgccagcttcaagtttgaggacttccaggtgtatggctgctacccaggccccctgagcggccctgtggatgaggccctgagcagcagcggcagtgactactacggcagcccctgcagcgcccccagccccagcacccccagcttccagcccccccagctgagcccctgggatggcagctttggccacttcagccccagccagacctatgagggcctgcgggcctggacagagcagctgcccaaggccagcggccccccccagcccccagccttcttctccttcagcccccccaccggccccagccccagcctggcccagagccccctgaagctgttccccagccaggccacccaccagctgggggagggggagagctacagcatgcccacagccttccctggcctggcccccaccagcccccacctggagggcagcggcatcctggacacccctgtgaccagcaccaaggcccggagcggggcccctgggggcagcgagggccgctgtgctgtgtgtggggacaatgccagctgccagcactatggagtgaggacctgtgagggctgcaagggcttcttcaagaggacagtgcagaagaatgccaagtacatctgcctggccaacaaggactgccctgtggacaagagaagaagaaaccgctgccagttctgccgcttccagaagtgcctggccgtgggcatggtgaaggaggtggtgaggacagacagcctgaagggcagaagaggccgcctgcccagcaagcccaagcagcccccagatgccagccctgccaacctgctgaccagcctggtgcgggcccacctggacagcggccccagcacagccaagctggactacagcaagttccaggagctggtgctgccccactttgggaaggaggatgctggagatgtgcagcagttctatgacctgctgagcggcagcctggaggtgatcaggaagtgggccgagaagatccctggctttgctgagctgagccctgctgaccaggacctgctgctggagagcgccttcctggagctgttcatcctgcggctggcctaccgcagcaagccaggagagggcaagctgatcttctgcagcggcctggtgctgcaccggctgcagtgtgcccggggctttggagactggattgacagcatcctggccttcagccgcagcctgcacagcctgctggtggatgtgcctgcctttgcctgcctgagcgccctggtgctgatcacagacagacatggcctgcaggagccccggcgggtggaggagctgcagaacagaattgccagctgcctgaaggagcacgtggccgctgtggccggggagccccagcctgccagctgcctgagccggctgctgggcaagctgcctgagctgcggaccctgtgcacccagggcctgcagaggatcttctacctgaagctggaggacctggtgcccccaccacccatcatcgacaagatcttcatggacaccctgcccttctag

SEQ ID NO: 162371 - DNA, 978 bp, synthetic construct
  misc_feature 1..978: note = Description of Artificial Sequence: Synthetic coding sequence
  source 1..978: mol_type = other DNA
atgccctgcatccaggcccagtatggcaccccagcccccagccctggcccccgggaccacctggccagtgaccccctgaccccagagttcatcaagcccaccatggacctggccagccctgaggccgccccagctgcccccacagccctgcccagcttcagcaccttcatggatggctacacaggagaatttgacaccttcctgtaccagctgcccggcaccgtgcagccctgcagcagcgccagcagcagcgccagcagcaccagcagcagcagcgccaccagccctgccagcgccagcttcaagtttgaggacttccaggtgtatggctgctacccaggccccctgagcggccctgtggatgaggccctgagcagcagcggcagtgactactacggcagcccctgcagcgcccccagccccagcacccccagcttccagcccccccagctgagcccctgggatggcagctttggccacttcagccccagccagacctatgagggcctgcgggcctggacagagcagctgcccaaggccagcggccccccccagcccccagccttcttctccttcagcccccccaccggccccagccccagcctggcccagagccccctgaagctgttccccagccaggccacccaccagctgggggagggggagagctacagcatgcccacagccttccctggcctggcccccaccagcccccacctggagggcagcggcatcctggacacccctgtgaccagcaccaaggcccggagcggggcccctgggggcagcgagggccgctgtgctgtgtgtggggacaatgccagctgccagcactatggagtgaggacctgtgagggctgcaagggcttcttcaaggtgcccaggagcccccgctggggcctgctgctggagatggagcggggctggccccaccccatcggcacctgtggcctgcccctgggcagcccccccagctag

SEQ ID NO: 162372 - DNA, 1836 bp, synthetic construct; identical to SEQ ID NO: 162367
  misc_feature 1..1836: note = Description of Artificial Sequence: Synthetic coding sequence
  source 1..1836: mol_type = other DNA

SEQ ID NO: 162373 - DNA, 1797 bp, synthetic construct
  misc_feature 1..1797: note = Description of Artificial Sequence: Synthetic coding sequence
  source 1..1797: mol_type = other DNA
atgccctgtgtgcaggcccagtatggcagcagcccccagggcgccagccctgccagccagagctacagctaccacagcagtggagagtacagcagtgacttcctgaccccagagtttgtgaagttctccatggacctgaccaacacagagatcacagccaccaccagcctgcccagcttcagcaccttcatggacaactacagcacaggctatgatgtgaagccaccctgcctgtaccagatgcccctgagcggccagcagagcagcatcaaggtggaggacatccagatgcacaactaccagcagcacagccacctgcccccccagagcgaggagatgatgccccacagcggctctgtgtactacaagcccagcagcccccccacccccaccaccccaggcttccaggtgcagcacagccccatgtgggatgaccccggcagcctgcacaacttccaccagaactacgtggccaccacccacatgattgagcagaggaagacccctgtgtcccggctgagcctcttctccttcaagcagagccccccaggcacccctgtgagcagctgccagatgagatttgatggccccctgcacgtgcccatgaaccctgagcctgctggcagccaccacgtggtggatggccagacctttgctgtgcccaaccccatcaggaagccagcctccatgggcttccctggcctgcagattggacatgccagccagctgctggacacccaggtgcccagcccccccagccggggcagccccagcaatgaaggcctgtgtgctgtgtgtggggacaatgctgcctgccagcactatggagtgaggacctgtgagggctgcaagggcttcttcaagaggacagtgcagaagaatgccaagtatgtgtgcctggccaacaagaactgccctgtggacaagagaagaagaaaccgctgccagtactgccgcttccagaagtgcctggccgtgggcatggtgaaggaggtggtgaggacagacagcctgaagggcagaagaggccgcctgcccagcaagcccaagagcccccaggagcccagcccccccagcccccctgtgtccctcatcagcgccctggtgcgggcccacgtggacagcaacccagccatgaccagcctggactacagccgcttccaggccaacccagactaccagatgtctggagatgacacccagcacatccagcagttctatgacctgctgaccggctccatggagatcatccggggctgggccgagaagatccctggctttgctgacctgcccaaggctgaccaggacctgctgtttgaaagtgccttcctggagctgtttgtgctgcggctggcctaccgcagcaaccctgtggagggcaagctgatcttctgcaatggagtggtgctgcaccggctgcagtgtgtgcggggctttggagagtggattgacagcatcgtggagttcagcagcaacctgcagaacatgaacatcgacatcagcgccttcagctgcatcgccgccctggccatggtgacagagcggcacggcctgaaggagcccaagagggtggaggagctgcagaacaagatcgtgaactgcctgaaggaccacgtgaccttcaacaatggaggcctgaaccggcccaactacctgagcaagctgctgggcaagctgcctgagctgcggaccctgtgcacccagggcctgcagaggatcttctacctgaagctggaggacctggtgcccccaccagccatcatcgacaagctgttcctggacaccctgcccttctag

SEQ ID NO: 162374 - DNA, 1797 bp, synthetic construct; identical to SEQ ID NO: 162373
  misc_feature 1..1797: note = Description of Artificial Sequence: Synthetic coding sequence
  source 1..1797: mol_type = other DNA

SEQ ID NO: 162375 - DNA, 1179 bp, synthetic construct
  misc_feature 1..1179: note = Description of Artificial Sequence: Synthetic coding sequence
  source 1..1179: mol_type = other DNA
atggacaactacagcacaggctatgatgtgaagccaccctgcctgtaccagatgcccctgagcggccagcagagcagcatcaaggtggaggacatccagatgcacaactaccagcagcacagccacctgcccccccagagcgaggagatgatgccccacagcggctctgtgtactacaagcccagcagcccccccacccccaccaccccaggcttccaggtgcagcacagccccatgtgggatgatcctggcagcctgcacaacttccaccagaactacgtggccaccacccacatgattgagcagaggaagacccctgtgtcccggctgagcctcttctccttcaagcagagccccccaggcacccctgtgagcagctgccagatgagatttgatggccccctgcacgtgcccatgaaccctgagcccgccggcagccaccacgtggtggatggccagacctttgctgtgcccaaccccatcaggaagccagcctccatgggcttccctggcctgcagatcggccacgccagccagctgctggacacccaggtgcccagcccccccagccggggcagccccagcaatgaaggcctgtgtgctgtgtgtggggacaatgctgcctgccagcactacggcgtgaggacctgtgagggctgcaagggcttcttcaagaggacagtgcagaagaatgccaagtatgtgtgcctggccaacaagaactgccctgtggacaagagaagaagaaaccgctgccagtactgccgcttccagaagtgcctggccgtgggcatggtgaaggaggtggtgaggacagacagcctgaagggccggcggggccgcctgcccagcaagcccaagagcccccaggagcccagcccccccagcccccctgtgtccctcatcagcgccctggtgcgggcccacgtggacagcaacccagccatgaccagcctggactacagccgcttccaggccaacccagactaccagatgtctggagatgacacccagcacatccagcagttctatgacctgctgaccggctccatggagatcatccggggctgggccgagaagatccctggctttgctgacctgcccaaggctgaccaggacctgctgtttgagagcgccttcctggagctgtttgtgctgcggctggcctaccgcatctag

SEQ ID NO: 162376 - DNA, 1179 bp, synthetic construct; identical to SEQ ID NO: 162375
  misc_feature 1..1179: note = Description of Artificial Sequence: Synthetic coding sequence
  source 1..1179: mol_type = other DNA

SEQ ID NO: 162377 - DNA, 777 bp, synthetic construct
  misc_feature 1..777: note = Description of Artificial Sequence: Synthetic coding sequence
  source 1..777: mol_type = other DNA
atgccctgtgtgcaggcccagtatggcagcagcccccagggcgccagccctgccagccagagctacagctaccacagcagtggagagtacagcagtgacttcctgaccccagagtttgtgaagttctccatggacctgaccaacacagagatcacagccaccaccagcctgcccagcttcagcaccttcatggacaactacagcacaggctatgatgtgaagccaccctgcctgtaccagatgcccctgagcggccagcagagcagcatcaaggtggaggacatccagatgcacaactaccagcagcacagccacctgcccccccagagcgaggagatgatgccccacagcggctctgtgtactacaagcccagcagcccccccacccccaccaccccaggcttccaggtgcagcacagccccatgtgggatgaccccggcagcctgcacaacttccaccagaactacgtggccaccacccacatgattgagcagaggaagacccctgtgtcccggctgagcctcttctccttcaagcagagccccccaggcacccctgtgagcagctgccagatgagatttgatggccccctgcacgtgcccatgaaccctgagcctgctggcagccaccacgtggtggatggccagacctttgctgtgcccaaccccatcaggaagccagcctccatgggcttccctggcctgcagattggacatgccagccagctgctggacacccaggtgcccagcccccccagccggggcagccccagctag

SEQ ID NO: 162378 - DNA, 1608 bp, synthetic construct
  misc_feature 1..1608: note = Description of Artificial Sequence: Synthetic coding sequence
  source 1..1608: mol_type = other DNA
atggacaactacagcacaggctatgatgtgaagccaccctgcctgtaccagatgcccctgagcggccagcagagcagcatcaaggtggaggacatccagatgcacaactaccagcagcacagccacctgcccccccagagcgaggagatgatgccccacagcggctctgtgtactacaagcccagcagcccccccacccccaccaccccaggcttccaggtgcagcacagccccatgtgggatgatcctggcagcctgcacaacttccaccagaactacgtggccaccacccacatgattgagcagaggaagacccctgtgtcccggctgagcctcttctccttcaagcagagccccccaggcacccctgtgagcagctgccagatgagatttgatggccccctgcacgtgcccatgaaccctgagcccgccggcagccaccacgtggtggatggccagacctttgctgtgcccaaccccatcaggaagccagcctccatgggcttccctggcctgcagatcggccacgccagccagctgctggacacccaggtgcccagcccccccagccggggcagccccagcaatgaaggcctgtgtgctgtgtgtggggacaatgctgcctgccagcactacggcgtgaggacctgtgagggctgcaagggcttcttcaagaggacagtgcagaagaatgccaagtatgtgtgcctggccaacaagaactgccctgtggacaagagaagaagaaaccgctgccagtactgccgcttccagaagtgcctggccgtgggcatggtgaaggaggtggtgaggacagacagcctgaagggccggcggggccgcctgcccagcaagcccaagagcccccaggagcccagcccccccagcccccctgtgtccctcatcagcgccctggtgcgggcccacgtggacagcaacccagccatgaccagcctggactacagccgcttccaggccaacccagactaccagatgtctggagatgacacccagcacatccagcagttctatgacctgctgaccggctccatggagatcatccggggctgggccgagaagatccctggctttgctgacctgcccaaggctgaccaggacctgctgtttgagagcgccttcctggagctgtttgtgctgcggctggcctaccgcagcaaccctgtggagggcaagctgatcttctgcaatggagtggtgctgcaccggctgcagtgtgtgcggggctttggagagtggattgacagcatcgtggagttcagcagcaacctgcagaacatgaacatcgacatcagcgccttcagctgcatcgccgccctggccatggtgacagaaagacatggcctgaaggagcccaagagggtggaggagctgcagaacaagatcgtgaactgcctgaaggaccacgtgaccttcaacaacggcggcctgaaccggcccaactacctgagcaagctgctgggcaagctgcctgagctgcggaccctgtgcacccagggcctgcagaggatcttctacctgaagctggaggacctggtgcccccaccagccatcatcgacaagctgttcctggacaccctgcccttctag

SEQ ID NO: 162379 - DNA, 1830 bp, synthetic construct
  misc_feature 1..1830: note = Description of Artificial Sequence: Synthetic coding sequence
  source 1..1830: mol_type = other DNA
atgaatgaagatagaagaggagagctgctgaccatgccctgtgtgcaggcccagtatggcagcagcccccagggcgccagccctgccagccagagctacagctaccacagcagcggggagtacagcagtgacttcctgaccccagagtttgtgaagttctccatggacctgaccaacacagagatcacagccaccaccagcctgcccagcttcagcaccttcatggacaactacagcacaggctatgatgtgaagccaccctgcctgtaccagatgcccctgagcggccagcagagcagcatcaaggtggaggacatccagatgcacaactaccagcagcacagccacctgcccccccagagcgaggagatgatgccccacagcggctctgtgtactacaagcccagcagcccccccacccccaccaccccaggcttccaggtgcagcacagccccatgtgggatgatcctggcagcctgcacaacttccaccagaactacgtggccaccacccacatgattgagcagaggaagacccctgtgtcccggctgagcctcttctccttcaagcagagccccccaggcacccctgtgagcagctgccagatgagatttgatggccccctgcacgtgcccatgaaccctgagcccgccggcagccaccacgtggtggatggccagacctttgctgtgcccaaccccatcaggaagccagcctccatgggcttccctggcctgcagatcggccacgccagccagctgctggacacccaggtgcccagcccccccagccggggcagccccagcaatgaaggcctgtgtgctgtgtgtggggacaatgctgcctgccagcactacggcgtgaggacctgtgagggctgcaagggcttcttcaagaggacagtgcagaagaatgccaagtatgtgtgcctggccaacaagaactgccctgtggacaagagaagaagaaaccgctgccagtactgccgcttccagaagtgcctggccgtgggcatggtgaaggaggtggtgaggacagacagcctgaagggccggcggggccgcctgcccagcaagcccaagagcccccaggagcccagcccccccagcccccctgtgtccctcatcagcgccctggtgcgggcccacgtggacagcaacccagccatgaccagcctggactacagccgcttccaggccaacccagactaccagatgtctggagatgacacccagcacatccagcagttctatgacctgctgaccggctccatggagatcatccggggctgggccgagaagatccctggctttgctgacctgcccaaggctgaccaggacctgctgtttgagagcgccttcctggagctgtttgtgctgcggctggcctaccgcagcaaccctgtggagggcaagctgatcttctgcaatggagtggtgctgcaccggctgcagtgtgtgcggggctttggagagtggattgacagcatcgtggagttcagcagcaacctgcagaacatgaacatcgacatcagcgccttcagctgcatcgccgccctggccatggtgacagaaagacatggcctgaaggagcccaagagggtggaggagctgcagaacaagatcgtgaactgcctgaaggaccacgtgaccttcaacaacggcggcctgaaccggcccaactacctgagcaagctgctgggcaagctgcctgagctgcggaccctgtgcacccagggcctgcagaggatcttctacctgaagctggaggacctggtgcccccaccagccatcatcgacaagctgttcctggacaccctgcccttctag

SEQ ID NO: 162380 - DNA, 738 bp, synthetic construct
  misc_feature 1..738: note = Description of Artificial Sequence: Synthetic coding sequence
  source 1..738: mol_type = other DNA
gtggaggaggagggagatgtgagcaacagaggagtggagctgctgcagctggagccagatgaggaccaggtgcgggcccgcatcctgggctgcctgcaggagcccaccaagagcaggccagaccagcctgctgccttcggcctgctgtgcaggatggctgaccagaccttcatcagcatcgtggactgggcccggcgctgcatggtgttcaaggagctggaggtggccgaccagatgaccctgctgcagaactgctggagcgagctgctggtgtttgaccacatctaccggcaggtgcagcacggcaaggagggcagcatcctgctggtgacaggccaggaggtggagctgaccaccgtggccacccaggccggcagcctgctgcacagcctggtgctgcgggcccaggagctggtgctgcagctgctggccctgcagctggaccggcaggagtttgtgtgcctgaagttcatcatcctcttcagcctggacctgaagttcctgaacaaccacatcctggtgaaggatgcccaggagaaggccaatgctgccctgctggactacaccctgtgccactacccccactgtggggacaagttccagcagctgctgctgtgcctggtggaggtgcgggccctgtccatgcaggccaaggagtacctgtaccacaagcacctgggcaatgagatgcccaggaacaacctgctgattgagatgctgcaggccaagcagacctag

SEQ ID NO: 162381 - DNA, 1386 bp, synthetic construct
  misc_feature 1..1386: note = Description of Artificial Sequence: Synthetic coding sequence
  source 1..1386: mol_type = other DNA
atggactacagctatgatgaggacctggatgagctgtgccctgtgtgtggggacaaggtgtctggctaccactacggcctgctgacctgtgagagctgcaagggcttcttcaagaggacagtgcagaacaacaagcactacacctgcacagagagccagagctgcaagattgacaagacccagaggaagcgctgccccttctgccgcttccagaagtgcctgactgtgggcatgaggctggaggccgtgcgggctgacaggatgaggggcggcaggaacaagtttggccccatgtacaagagggaccgggccctgaagcagcagaagaaggcccagatccgggccaacggcttcaagctggagaccggcccccccatgggcgtgcccccacctcctcctccagccccagactatgtgctgccccccagcctgcacggccctgagcccaagggcctggccgccggccccccagctggccccctgggggactttggagccccagccctgcccatggctgtgcctggggcccacggccccctggccggctacctgtacccagccttccctggccgggccatcaagtctgagtacccagagccctatgccagccccccccagcccggcctgccctacggctacccagagcccttcagcggcggccccaacgtgcctgagctgatcctgcagctgctgcagctggagccagatgaggaccaggtgcgggcccgcatcctgggctgcctgcaggagcccaccaagagcaggccagaccagcctgctgccttcggcctgctgtgcaggatggctgaccagaccttcatcagcatcgtggactgggcccggcgctgcatggtgttcaaggagctggaggtggccgaccagatgaccctgctgcagaactgctggagcgagctgctggtgtttgaccacatctaccggcaggtgcagcacggcaaggagggcagcatcctgctggtgacaggccaggaggtggagctgaccaccgtggccacccaggccggcagcctgctgcacagcctggtgctgcgggcccaggagctggtgctgcagctgctggccctgcagctggaccggcaggagtttgtgtgcctgaagttcatcatcctcttcagcctggacctgaagttcctgaacaaccacatcctggtgaaggatgcccaggagaaggccaatgctgccctgctggactacaccctgtgccactacccccactgtggggacaagttccagcagctgctgctgtgcctggtggaggtgcgggccctgtccatgcaggccaaggagtacctgtaccacaagcacctgggcaatgagatgcccaggaacaacctgctgattgagatgctgcaggccaagcagacctag

SEQ ID NO: 162382 - DNA, 537 bp, synthetic construct
  misc_feature 1..537: note = Description of Artificial Sequence: Synthetic coding sequence
  source 1..537: mol_type = other DNA
atggactacagctatgatgaggacctggatgagctgtgccctgtgtgtggggacaaggtgtctggctaccactacggcctgctgacctgtgagagctgcaagggcttcttcaagaggacagtgcagaacaacaagcactacacctgcacagagagccagagctgcaagattgacaagacccagaggaagcgctgccccttctgccgcttccagaagtgcctgactgtgggcatgaggctggaggccgtgcgggctgacaggatgaggggcggcaggaacaagtttggccccatgtacaagagggaccgggccctgaagcagcagaagaaggcccagatccgggccaacggcttcaagctggagaccggcccccccatgggcgtgcccccacctcctcctccagccccagactatgtgctgccccccagcctgcacggccctgagcccaagggcctggccgccggccccccagctggccccctgggggactttggagccccagccctgcccatggctgtgcctggggcccatggatag

SEQ ID NO: 162383 - DNA, 972 bp, synthetic construct
  misc_feature 1..972: note = Description of Artificial Sequence: Synthetic coding sequence
  source 1..972: mol_type = other DNA
gacctggaggagctgtgccctgtgtgtggggacaaggtgtctggctaccactacggcctgctgacctgtgagagctgcaagggcttcttcaagaggacagtgcagaacaacaagcgctacacctgcatcgagaaccagaactgccagattgacaagacccagaggaagcgctgcccctactgccgcttccagaagtgcctgtctgtgggcatgaagctggaggccgtgcgggctgacaggatgagaggaggaagaaacaagtttggccccatgtacaagagggaccgggccctgaagcagcagaagaaggccctgatccgggccaacggcctgaagctggaggccatgagccaggtgatccaggccatgcccagcgacctgaccatcagcagcgccatccagaacatccacagcgccagcaagggcctgcccctgaaccacgccgccctgcccccaacagattatgacaggagcccctttgtgaccagccccatctccatgaccatgccaccccacggcagcctgcagggctaccagacctacggccacttccccagccgggccatcaagtctgagtacccagacccctacaccagcagccctgagagcatcatgggctacagctacatggacagctaccagaccagcagccctgccagcatcccccacctgatcctggagctgctgaagtgtgagccagatgagccccaggtgcaggccaagatcatggcctacctgcagcaggagcaggccaacagaagcaagcatgagaagctgagcaccttcggcctgatgtgcaagatggctgaccagaccctcttcagcatcgtggagtgggcccggagcagcatcttcttccgggagctgaagggcctgaccctgagccccagcctggagtgcagcggctcctggctgatggccaccagcaccagctgcatccaggtgatccggctgccccagcccccagagtag

SEQ ID NO: 162384 - DNA, 1488 bp, synthetic construct
  misc_feature 1..1488: note = Description of Artificial Sequence: Synthetic coding sequence
  source 1..1488: mol_type = other DNA
atgagcagcaacagcgacacaggagacctgcaggagagcctgaagcacggcctgacccccatcgtgtcccagttcaagatggtgaactacagctatgatgaggacctggaggagctgtgccctgtgtgtggggacaaggtgtctggctaccactacggcctgctgacctgtgagagctgcaagggcttcttcaagaggacagtgcagaacaacaagcgctacacctgcatcgagaaccagaactgccagattgacaagacccagaggaagcgctgcccctactgccgcttccagaagtgcctgtctgtgggcatgaagctggaggccgtgcgggctgacaggatgagaggaggaagaaacaagtttggccccatgtacaagagggaccgggccctgaagcagcagaagaaggccctgatccgggccaacggcctgaagctggaggccatgagccaggtgatccaggccatgcccagcgacctgaccatcagcagcgccatccagaacatccacagcgccagcaagggcctgcccctgaaccacgccgccctgcccccaacagattatgacaggagcccctttgtgaccagccccatctccatgaccatgccaccccacggcagcctgcagggctaccagacctacggccacttccccagccgggccatcaagtctgagtacccagacccctacaccagcagccctgagagcatcatgggctacagctacatggacagctaccagaccagcagccctgccagcatcccccacctgatcctggagctgctgaagtgtgagccagatgagccccaggtgcaggccaagatcatggcctacctgcagcaggagcaggccaacagaagcaagcatgagaagctgagcaccttcggcctgatgtgcaagatggctgaccagaccctcttcagcatcgtggagtgggcccggagcagcatcttcttccgggagctgaaggtggatgaccagatgaagctgctgcagaactgctggagcgagctgctgatcctggaccacatctaccggcaggtggtgcacggcaaggagggcagcatcttcctggtgacaggccagcaggtggactacagcatcatcgccagccaggccggggccaccctgaacaacctgatgagccacgcccaggagctggtggccaagctgcggagcctgcagtttgaccagcgggagtttgtgtgcctgaagttcctggtgctcttcagcctggatgtgaagaacctggagaacttccagctggtggagggcgtgcaggagcaggtgaatgctgccctgctggactacaccatgtgcaactacccccagcagacagagaagtttggccagctgctgctgcggctgcctgagatccgggccatctccatgcaggccgaggagtacctgtactacaagcacctgaatggagatgtgccctacaacaacctgctgattgagatgctgcacgccaagagggcctag

SEQ ID NO: 162385 - DNA, 1134 bp, synthetic construct
  misc_feature 1..1134: note = Description of Artificial Sequence: Synthetic coding sequence
  source 1..1134: mol_type = other DNA
tgagacctggaggagctgtgccctgtgtgtggggacaaggtgtctggctaccactacggcctgctgacctgtgagagctgcaagggcttcttcaagaggacagtgcagaacaacaagcgctacacctgcatcgagaaccagaactgccagattgacaagacccagaggaagcgctgcccctactgccgcttccagaagtgcctgtctgtgggcatgaagctggaggccgtgcgggctgacaggatgaggggcggcaggaacaagtttggccccatgtacaagagggaccgggccctgaagcagcagaagaaggccctgatccgggccaacggcctgaagctggaggccatgagccaggtgatccaggccatgcccagcgacctgaccatcagcagcgccatccagaacatccacagcgccagcaagggcctgcccctgaaccacgccgccctgcccccaacagattatgacaggagcccctttgtgaccagccccatctccatgaccatgcctcctcatggcagcctgcagggctaccagacctacggccacttccccagccgggccatcaagtctgagtacccagacccctacaccagcagccctgagagcatcatgggctacagctacatggacagctaccagaccagcagccctgccagcatcccccacctgatcctggagctgctgaagtgtgagccagatgagccccaggtgcaggccaagatcatggcctacctgcagcaggagcaggccaacagaagcaagcatgagaagctgagcaccttcggcctgatgtgcaagatggctgaccagaccctcttcagcatcgtggagtgggcccggagcagcatcttcttccgggagctgaagggcctgaccctgagccccagcctggagtgcagcggcaccatcctggcccacggcaacctgcacctgctgcacagcagtgacagccctgccagcgccagccgggtggccggcatcaccggggtgcaccacaacacccacctgatctttgtgttcctggtggagatgggcttctgccacgtgggccaggccggcctgaagaccccagacctgcgggtcatctgcctgcccaggcctcccaaggtgctgggcctgtgggcctag

SEQ ID NO: 162386 - DNA, 1626 bp, synthetic construct
  misc_feature 1..1626: note = Description of Artificial Sequence: Synthetic coding sequence
  source 1..1626: mol_type = other DNA
atgagcagcaacagcgacacaggagacctgcaggagagcctgaagcacggcctgacccccatcggggccggcctgcctgacagacatggcagccccatcccagcccggggccgcctggtgatgctgcccaaggtggagacagaggccctgggcctggcccggagccacggggagcagggccagatgcctgagaacatgcaggtgtcccagttcaagatggtgaactacagctatgatgaggacctggaggagctgtgccctgtgtgtggggacaaggtgtctggctaccactacggcctgctgacctgtgagagctgcaagggcttcttcaagaggacagtgcagaacaacaagcgctacacctgcatcgagaaccagaactgccagattgacaagacccagaggaagcgctgcccctactgccgcttccagaagtgcctgtctgtgggcatgaagctggaggccgtgcgggctgacaggatgagaggaggaagaaacaagtttggccccatgtacaagagggaccgggccctgaagcagcagaagaaggccctgatccgggccaacggcctgaagctggaggccatgagccaggtgatccaggccatgcccagcgacctgaccatcagcagcgccatccagaacatccacagcgccagcaagggcctgcccctgaaccacgccgccctgcccccaacagattatgacaggagcccctttgtgaccagccccatctccatgaccatgccaccccacggcagcctgcagggctaccagacctacggccacttccccagccgggccatcaagtctgagtacccagacccctacaccagcagccctgagagcatcatgggctacagctacatggacagctaccagaccagcagccctgccagcatcccccacctgatcctggagctgctgaagtgtgagccagatgagccccaggtgcaggccaagatcatggcctacctgcagcaggagcaggccaacagaagcaagcatgagaagctgagcaccttcggcctgatgtgcaagatggctgaccagaccctcttcagcatcgtggagtgggcccggagcagcatcttcttccgggagctgaaggtggatgaccagatgaagctgctgcagaactgctggagcgagctgctgatcctggaccacatctaccggcaggtggtgcacggcaaggagggcagcatcttcctggtgacaggccagcaggtggactacagcatcatcgccagccaggccggggccaccctgaacaacctgatgagccacgcccaggagctggtggccaagctgcggagcctgcagtttgaccagcgggagtttgtgtgcctgaagttcctggtgctcttcagcctggatgtgaagaacctggagaacttccagctggtggagggcgtgcaggagcaggtgaatgctgccctgctggactacaccatgtgcaactacccccagcagacagagaagtttggccagctgctgctgcggctgcctgagatccgggccatctccatgcaggccgaggagtacctgtactacaagcacctgaatggagatgtgccctacaacaacctgctgattgagatgctgcacgccaagagggcctag

SEQ ID NO: 162387 - DNA, 216 bp, synthetic construct
  misc_feature 1..216: note = Description of Artificial Sequence: Synthetic coding sequence
  source 1..216: mol_type = other DNA
tgaagcctgaagcacggcctgacccccatcgaccggggcaactgccgcagcggctgcttctcctttgctgccaccctgcggcagaggagcctgctgaccagctgtgccggcctgcctgacagacatggcagccccatcccagcccggggccgcctggtgatgctgcccaaggtggagacagaggccctgggcctggcccggagccatggagagtag

SEQ ID NO: 162388 - DNA, 66 bp, synthetic construct
  misc_feature 1..66: note = Description of Artificial Sequence: Synthetic coding sequence
  source 1..66: mol_type = other DNA
atgagcagcaacagcgacacaggagacctgcaggagagcctgaagcacggcctgacccccatctag

SEQ ID NO: 162389 - DNA, 249 bp, synthetic construct
  misc_feature 1..249: note = Description of Artificial Sequence: Synthetic coding sequence
  source 1..249: mol_type = other DNA
atgagcagcaacagcgacacaggagacctgcaggagagcctgaagcacggcctgacccccatcgaccggggcaactgccgcagcggctgcttctcctttgctgccaccctgcggcagaggagcctgctgaccagctgtgccggcctgcctgacagacatggcagccccatcccagcccggggccgcctggtgatgctgcccaaggtggagacagaggccctgggcctggcccggagccacggggagtag

SEQ ID NO: 162390 - DNA, 1410 bp, synthetic construct
  misc_feature 1..1410: note = Description of Artificial Sequence: Synthetic coding sequence
  source 1..1410: mol_type = other DNA
atggtgaactacagctatgatgaggacctggaggagctgtgccctgtgtgtggggacaaggtgtctggctaccactacggcctgctgacctgtgagagctgcaagggcttcttcaagaggacagtgcagaacaacaagcgctacacctgcatcgagaaccagaactgccagattgacaagacccagaggaagcgctgcccctactgccgcttccagaagtgcctgtctgtgggcatgaagctggaggccgtgcgggctgacaggatgagaggaggaagaaacaagtttggccccatgtacaagagggaccgggccctgaagcagcagaagaaggccctgatccgggccaacggcctgaagctggaggccatgagccaggtgatccaggccatgcccagcgacctgaccatcagcagcgccatccagaacatccacagcgccagcaagggcctgcccctgaaccacgccgccctgcccccaacagattatgacaggagcccctttgtgaccagccccatctccatgaccatgccaccccacggcagcctgcagggctaccagacctacggccacttccccagccgggccatcaagtctgagtacccagacccctacaccagcagccctgagagcatcatgggctacagctacatggacagctaccagaccagcagccctgccagcatcccccacctgatcctggagctgctgaagtgtgagccagatgagccccaggtgcaggccaagatcatggcctacctgcagcaggagcaggccaacagaagcaagcatgagaagctgagcaccttcggcctgatgtgcaagatggctgaccagaccctcttcagcatcgtggagtgggcccggagcagcatcttcttccgggagctgaaggtggatgaccagatgaagctgctgcagaactgctggagcgagctgctgatcctggaccacatctaccggcaggtggtgcacggcaaggagggcagcatcttcctggtgacaggccagcaggtggactacagcatcatcgccagccaggccggggccaccctgaacaacctgatgagccacgcccaggagctggtggccaagctgcggagcctgcagtttgaccagcgggagtttgtgtgcctgaagttcctggtgctcttcagcctggatgtgaagaacctggagaacttccagctggtggagggcgtgcaggagcaggtgaatgctgccctgctggactacaccatgtgcaactacccccagcagacagagaagtttggccagctgctgctgcggctgcctgagatccgggccatctccatgcaggccgaggagtacctgtactacaagcacctgaatggagatgtgccctacaacaacctgctgattgagatgctgcacgccaagagggcctag

SEQ ID NO: 162391 - DNA, 681 bp, synthetic construct
  misc_feature 1..681: note = Description of Artificial Sequence: Synthetic coding sequence
  source 1..681: mol_type = other DNA
atgctgctgcggctggtgagcaacagctggccccaggtgatcctgccccccaggcctcccaaggtgctgggcctgcaggccccccggcgggccaggaagagagctgagggcacagccagcagcaatgtgttctccatgtttgaccagagccagatccaggagttcaaggagagcctggccctgagcccccggctggagagaaatggcatgatcagcgcccactgcaacctgtgcctgaccggcagcagcaacagccctgccagcgccagccaggccttcaccatcatggaccagaacagagatggcttcatcgacaaggaggacctgcgggacacctttgctgccctgggccgcatcaacgtgaagaatgaggagctggaggccatggtgaaggaggcccctggccccatcaacttcaccgtcttcctgaccatgtttggagagaagctgaagggcacagatcctgaggagaccatcctgcacgccttcaaggtgtttgacacagagggcaaaggatttgtgaaggcagatgtgatcaaggagaagctgatgacccaggccgaccgcttcagcgaggaggaggtgaagcagatgtttgctgccttccccccagatgtgtgtggcaacctggactacagaaacctgtgctacgtgatcacccatggagaggagaaggactag

SEQ ID NO: 162392 - DNA, 1569 bp, synthetic construct
  misc_feature 1..1569: note = Description of Artificial Sequence: Synthetic coding sequence
  source 1..1569: mol_type = other DNA
atggaggagcacggcgtgacccagacagagcacatggccaccatcgaggcccatgctgtggcccagcaggtgcagcaggtgcacgtggccacctacacagagcacagcatgctgtctgcagatgaggacagccccagcagccctgaggacaccagctatgatgacagcgacatcctgaacagcacagctgctgatgaggtgacagcccacctggccgccgccggccctgtgggcatggctgctgctgctgctgtggccaccgggaagaagaggaagaggcctcatgtgtttgagagcaaccccagcatcaggaagaggcagcagacccggctgctgaggaagctgcgggccaccctggatgagtacaccaccagggtgggccagcaggccatcgtgctgtgcatcagccccagcaagcccaaccctgtgttcaaggtgtttggagctgcccccctggagaatgtggtgaggaagtacaagtccatgatcctggaggacctggagagcgccctggccgagcacgccccagccccccaggaggtgaacagcgagctgccccccctgaccattgatggcatccctgtgtctgtggacaagatgacccaggcccagctgcgggccttcatccctgagatgctgaagtacagcacaggccggggcaagccaggctggggcaaggagagctgcaagcccatctggtggccagaggacatcccctgggccaacgtgcggagtgatgtgaggacagaggagcagaagcagagggtgtcctggacccaggccctgcggaccatcgtgaagaactgctacaagcagcacggccgggaggacctgctgtatgcctttgaggaccagcagacccagacccaggccacagccacccacagcatcgcccacctggtgcccagccagacagtggtgcagaccttcagcaacccagatggcaccgtgtccctcatccaggtgggcaccggggccaccgtggccaccctggctgatgccagcgagctgcccaccaccgtgacagtggcccaggtgaactacagcgctgtggctgatggagaggtggagcagaactgggccaccctgcagggcggggagatgaccatccagaccacccaggccagcgaggccacccaggccgtggccagcctggccgaggccgctgtggccgccagccaggagatgcagcagggcgccaccgtgaccatggccctgaacagcgaggccgccgcccatgctgtggccaccctggccgaggccaccctgcagggcggcggccagatcgtgctgagcggggagacagctgctgctgtgggcgccctgactggagtgcaggatgccaacggcctcttcatggctgacagagctggcaggaagtggatcctgacagacaaggccaccggcctggtgcagatccctgtgtccatgtaccagacagtggtgaccagcctggcccagggcaatggacctgtgcaggtggccatggcccctgtgaccacccgcatcagtgacagcgctgtgaccatggatggccaggccgtggaggtggtgaccctggagcagtag

SEQ ID NO: 162393 - DNA, 1314 bp, synthetic construct
  misc_feature 1..1314: note = Description of Artificial Sequence: Synthetic coding sequence
  source 1..1314: mol_type = other DNA
atggaggagcacggcgtgacccagacagagcacatggccaccatcgaggcccatgctgtggcccagcaggtgcagcaggtgcacgtggccacctacacagagcacagcatgctgtctgcagatgaggacagccccagcagccctgaggacaccagctatgatgacagcgacatcctgaacagcacagctgctgatgaggtgacagcccacctggccgccgccggccctgtgggcatggctgctgctgctgctgtggccaccgggaagaagaggaagaggcctcatgtgtttgagagcaaccccagcatcaggaagaggcagcagacccggctgctgaggaagctgcgggccaccctggatgagtacaccaccagggtgggccagcaggccatcgtgctgtgcatcagccccagcaagcccaaccctgtgttcaaggtgtttggagctgcccccctggagaatgtggtgaggaagtacaagtccatgatcctggaggacctggagagcgccctggccgagcacgccccagccccccaggaggtgaacagcgagctgccccccctgaccattgatggcatccctgtgtctgtggacaagatgacccaggcccagctgcgggccttcatccctgagatgctgaagtacagcacaggccggggcaagccaggctggggcaaggagagctgcaagcccatctggtggccagaggacatcccctgggccaacgtgcggagtgatgtgaggacagaggagcagaagcagagggtgggcaccggggccaccgtggccaccctggctgatgccagcgagctgcccaccaccgtgacagtggcccaggtgaactacagcgctgtggctgatggagaggtggagcagaactgggccaccctgcagggcggggagatgaccatccagaccacccaggccagcgaggccacccaggccgtggccagcctggccgaggccgctgtggccgccagccaggagatgcagcagggcgccaccgtgaccatggccctgaacagcgaggccgccgcccatgctgtggccaccctggccgaggccaccctgcagggcggcggccagatcgtgctgagcggggagacagctgctgctgtgggcgccctgactggagtgcaggatgccaacggcctggtgcagatccctgtgtccatgtaccagacagtggtgaccagcctggcccagggcaatggacctgtgcaggtggccatggcccctgtgaccacccgcatcagtgacagcgctgtgaccatggatggccaggccgtggaggtggtgaccctggagcagtag

SEQ ID NO: 162394 - DNA, 1512 bp, synthetic construct; identical to SEQ ID NO: 147082
  misc_feature 1..1512: note = Description of Artificial Sequence: Synthetic coding sequence
  source 1..1512: mol_type = other DNA

SEQ ID NO: 162395 - DNA, 1569 bp, synthetic construct; identical to SEQ ID NO: 162392
  misc_feature 1..1569: note = Description of Artificial Sequence: Synthetic coding sequence
  source 1..1569: mol_type = other DNA

SEQ ID NO: 162396 - DNA, 1512 bp, synthetic construct; identical to SEQ ID NO: 147082
  misc_feature 1..1512: note = Description of Artificial Sequence: Synthetic coding sequence
  source 1..1512: mol_type = other DNA

SEQ ID NO: 162397 - DNA, 633 bp, synthetic construct
  misc_feature 1..633: note = Description of Artificial Sequence: Synthetic coding sequence
  source 1..633: mol_type = other DNA
atggaggagcacggcgtgacccagacagagcacatggccaccatcgaggcccatgctgtggcccagcaggtgcagcaggtgcacgtggccacctacacagagcacagcatgctgtctgcagatgaggacagccccagcagccctgaggacaccagctatgatgacagcgacatcctgaacagcacagctgctgatgaggtgacagcccacctggccgccgccggccctgtgggcatggctgctgctgctgctgtggccaccgggaagaagaggaagaggcctcatgtgtttgagagcaaccccagcatcaggaagaggcagcagacccggctgctgaggaagctgcgggccaccctggatgagtacaccaccagggtgggccagcaggccatcgtgctgtgcatcagccccagcaagcccaaccctgtgttcaaggtgtttggagctgcccccctggagaatgtggtgaggaagtacaagtccatgatcctggaggacctggagagcgccctggccgagcacgccccagccccccaggaggtgaacagcgagctgccccccctgaccattgatggcatccctgtgtctgtggacaagatgacccaggcccagctgcgggccttcatcccctag

SEQ ID NO: 162398 - DNA, 1029 bp, synthetic construct
  misc_feature 1..1029: note = Description of Artificial Sequence: Synthetic coding sequence
  source 1..1029: mol_type = other DNA
atgatcctggaggacctggagagcgccctggccgagcacgccccagccccccaggaggtgaacagcgagctgccccccctgaccattgatggcatccctgtgtctgtggacaagatgacccaggcccagctgcgggccttcatccctgagatgctgaagtacagcacaggccggggcaagccaggctggggcaaggagagctgcaagcccatctggtggccagaggacatcccctgggccaacgtgcggagtgatgtgaggacagaggagcagaagcagagggtgtcctggacccaggccctgcggaccatcgtgaagaactgctacaagcagcacggccgggaggacctgctgtatgcctttgaggaccagcagacccagacccaggccacagccacccacagcatcgcccacctggtgcccagccagacagtggtgcagaccttcagcaacccagatggcaccgtgtccctcatccaggtgggcactggagccaccgtggccaccctggctgatgccagcgagctgcccaccaccgtgacagtggcccaggtgaactacagcgctgtggctgatggagaggtggagcagaactgggccaccctgcagggcggggagatgaccatccagaccacccaggccagcgaggccacccaggccgtggccagcctggccgaggccgctgtggccgccagccaggagatgcagcagggcgccaccgtgaccatggccctgaacagcgaggccgccgcccatgctgtggccaccctggccgaggccaccctgcagggcggcggccagatcgtgctgtctggagaaacagctgctgctgtgggcgccctgactggagtgcaggatgccaacggcctggtgcagatccctgtgtccatgtaccagacagtggtgaccagcctggcccagggcaatggacctgtgcaggtggccatggcccctgtgaccacccgcatcagtgacagcgctgtgaccatggatggccaggccgtggaggtggtgaccctggagcagtag

SEQ ID NO: 162399 - DNA, 1860 bp, synthetic construct
  misc_feature 1..1860: note = Description of Artificial Sequence: Synthetic coding sequence
  source 1..1860: mol_type = other DNA
atggctgatgagggcaagagctacagcgagcatgatgatgagcgggtgaacttcccccagaggaagaagaagggccggggccccttccgctggaagtatggagagggcaacagaagaagtggccggggcggcagcggcatccgcagcagccggctggaggaggatgatggagatgtggccatgtctgatgcccaggacggcccccgggtgcgctacaacccctacaccacccggcccaacagaagaggagacacctggcatgaccgggaccgcatccacgtgacagtgagaagagaccgggcccctcctgagcggggcggggccggcaccagccaggacggcaccagcaagaactggttcaagatcaccatcccctacggcaggaaatatgacaaggcctggctgctgtccatgatccagagcaagtgcagcgtgcccttcacccccatcgagttccactatgagaacacccgggcccagttctttgtggaggatgccagcacagccagcgccctgaaggctgtgaactacaagatcctggacagagaaaatcgccgcatcagcatcatcatcaacagcagcgccccaccccacaccatcctgaatgagctgaagccagagcaggtggagcagctgaagctgatcatgagcaagagatatgatggcagccagcaggccctggacctgaagggcctgcggagtgaccctgacctggtggcccagaacattgatgtggtgctgaacagaagaagctgcatggccgccaccctgcgcatcatcgaggagaacatccctgagctgctgagcctgaacctgagcaacaacagactctaccgcctggatgacatgagcagcatcgtgcagaaggcccccaacctgaagatcctgaacctgtctggaaatgagctgaagtctgagcgggagctggacaagatcaagggcctgaagctggaggagctgtggctggatggcaacagcctgtgtgacaccttccgggaccagagcacctacatcagcgccatccgggagcgcttccccaagctgctgcggctggatggccacgagctgcccccacccatcgcctttgatgtggaggcccccaccaccctgcccccctgcaagggcagctacttcggcacagagaacctgaagagcctggtgctgcacttcctgcagcagtactatgccatctatgacagcggggaccggcagggcctgctggatgcctaccatgatggagcctgctgcagcctgagcatccccttcatcccccagaacccagcccggagcagcctggccgagtacttcaaggacagcagaaatgtgaagaagctgaaggaccccaccctgcgcttccggctgctgaagcacacccggctgaatgtggtggccttcctgaatgagctgcccaagacccagcatgatgtgaacagctttgtggtggacatcagcgcccagaccagcaccctgctgtgcttctctgtgaatggagtcttcaaggaggtggatggcaagagccgggacagcctgcgggccttcaccaggaccttcatcgctgtgcctgccagcaacagcggcctgtgcatcgtgaatgatgagctgtttgtgagaaatgccagcagcgaggagatccagagggcctttgccatgcctgcccccacccccagcagcagccctgtgcccaccctgagccctgagcagcaggagatgctgcaggccttcagcacccagagcggcatgaacctggagtggagccagaagtgcctgcaggacaacaactgggactacaccaggtctgcccaggccttcacccacctgaaggccaagggggagatccctgaggtggccttcatgaagtag

SEQ ID NO: 162400 - DNA, 1071 bp, synthetic construct
  misc_feature 1..1071: note = Description of Artificial Sequence: Synthetic coding sequence
  source 1..1071: mol_type = other DNA
atggctgatgagggcaagagctacagcgagcatgatgatgagcgggtgaacttcccccagaggaagaagaagggccggggccccttccgctggaagtatggagagggcaacagaagaagtggccggggcggcagcggcatccgcagcagccggctggaggaggatgatggagatgtggccatgtctgatgcccaggacggcccccgggtgcgctacaacccctacaccacccggcccaacagaagaggagacacctggcatgaccgggaccgcatccacgtgacagtgagaagagaccgggcccctcctgagcggggcggggccggcaccagccaggacggcaccagcaagaactggttcaagatcaccatcccctacggcaggaaatatgacaaggcctggctgctgtccatgatccagagcaagtgcagcgtgcccttcacccccatcgagttccactatgagaacacccgggcccagttctttgtggaggatgccagcacagccagcgccctgaaggctgtgaactacaagatcctggacagagaaaatcgccgcatcagcatcatcatcaacagcagcgccccaccccacaccatcctgaatgagctgaagccagagcaggtggagcagctgaagctgatcatgagcaagagatatgatggcagccagcaggccctggacctgaagggcctgcggagtgaccctgacctggtggcccagaacattgatgtggtgctgaacagaagaagctgcatggccgccaccctgcgcatcatcgaggagaacatccctgagctgctgagcctgaacctgagcaacaacagactctaccgcctggatgacatgagcagcatcgtgcagaaggcccccaacctgaagatcctgaacctgtctggaaatgagctgaagtctgagcgggagctggacaagatcaagggcctgaagctggaggagctgtggctggatggcaacagcctgtgtgacaccttccgggaccagagcacctacatccgctctgtggtggcctgtgtgtccccacctggggacctgcaccccctgggcggctag

SEQ ID NO: 162401 - DNA, 1071 bp, synthetic construct; identical to SEQ ID NO: 162400
  misc_feature 1..1071: note = Description of Artificial Sequence: Synthetic coding sequence
  source 1..1071: mol_type = other DNA

SEQ ID NO: 162402 - DNA, 1860 bp, synthetic construct; identical to SEQ ID NO: 162399
  misc_feature 1..1860: note = Description of Artificial Sequence: Synthetic coding sequence
  source 1..1860: mol_type = other DNA

SEQ ID NO: 162403 - DNA, 1881 bp, synthetic construct
  misc_feature 1..1881: note = Description of Artificial Sequence: Synthetic coding sequence
  source 1..1881: mol_type = other DNA
atgtgcagcaccctgaagaagtgtggcacctacagaacagaggtggctgaatgtcatgaccacggcagcaccttccagggcaggaagaagggcggcagcagcttccgggacaactttgacaagaggagctgccactatgagcacggcggctatgagcggccccccagccactgccaggagaatgatggctctgtggagatgagagatgtgcacaaggaccagcagctgcggcacaccccctacagcatccgctgtgaaagaaggatgaagtggcacagtgaagatgagatccgcatcaccacctggaggaacaggaagcccccagagaggaagatgagccagaacacccaggacggctacaccaggaactggttcaaggtgaccatcccctacggcatcaagtatgacaaggcctggctgatgaacagcatccagagccactgcagcgaccgcttcacccctgtggacttccactacgtgaggaacagagcctgcttctttgtgcaggatgccagcgctgccagcgccctgaaggatgtgtcctacaagatctatgatgatgagaaccagaagatctgcatctttgtgaaccacagcacagccccctacagcgtgaagaacaagctgaagccaggccagatggagatgctgaagctgaccatgaacaagcgctacaacgtgtcccagcaggccctggacctgcagaacctgcgctttgatcctgacctgatgggccgggacatcgacatcatcctgaacagaagaaactgcatggccgccaccctgaagatcattgaaagaaacttccctgagctgctgagcctgaacctgtgcaacaacaagctgtaccagctggatggcctgagtgacatcacagagaaggcccccaaggtgaagaccctgaacctgagcaagaacaagctggagagcgcctgggagctgggcaaggtgaagggcctgaagctggaggagctgtggctggagggcaaccccctgtgcagcaccttcagtgaccagagcgcctacgtgtctgccatccgggactgcttccccaagctgctgcggctggatggccgggagctgagcgcccctgtgattgtggacatcgacagcagcgagaccatgaagccctgcaaggagaacttcaccggcagcgagaccctgaagcacctggtgctgcagttcctgcagcagtactacagcatctatgattctggggaccggcagggcctgctgggcgcctaccatgatgaggcctgcttcagcctggccatcccctttgaccccaaggacagcgcccccagcagcctgtgcaagtactttgaggacagcaggaacatgaagaccctgaaggacccctacctgaagggggagctgctgcggaggaccaagagggacatcgtggacagcctgagcgccctgcccaagacccagcacgacctgagcagcatcctggtggatgtgtggtgccagacagagaggatgctgtgcttctctgtgaatggagtcttcaaggaggtggagggccagagccagggctctgtgctggccttcaccaggaccttcatcgccaccccaggcagcagcagcagcctgtgcatcgtgaatgatgagctgtttgtgagagatgccagcccccaggagacccagagcgccttcagcatccctgtgtccaccctgagcagcagcagcgagcccagcctgagccaggagcagcaggagatggtgcaggccttcagcgcccagagcggcatgaagctggagtggagccagaagtgcctgcaggacaatgagtggaactacacccgggccggccaggccttcaccatgctgcagacagagggcaagatcccagctgaggccttcaagcagatctcctag

SEQ ID NO: 162404 - DNA, 1881 bp, synthetic construct; identical to SEQ ID NO: 162403
  misc_feature 1..1881: note = Description of Artificial Sequence: Synthetic coding sequence
  source 1..1881: mol_type = other DNA

SEQ ID NO: 162405 - DNA, 1881 bp, synthetic construct; identical to SEQ ID NO: 162403
  misc_feature 1..1881: note = Description of Artificial Sequence: Synthetic coding sequence
  source 1..1881: mol_type = other DNA

SEQ ID NO: 162406 - DNA, 1230 bp, synthetic construct
  misc_feature 1..1230: note = Description of Artificial Sequence: Synthetic coding sequence
  source 1..1230: mol_type = other DNA
atgaagtggcacagtgaagatgagatccgcatcaccacctggaggaacaggaagcccccagagaggaagatgagccagaacacccaggacggctacaccaggaactggttcaaggtgaccatcccctacggcatcaagtatgacaaggcctggctgatgaacagcatccagagccactgcagcgaccgcttcacccctgtggacttccactacgtgaggaacagagcctgcttctttgtgcaggatgccagcgctgccagcgccctgaaggatgtgtcctacaagatctatgatgatgagaaccagaagatctgcatctttgtgaaccacagcacagccccctacagcgtgaagaacaagctgaagccaggccagatggagatgctgaagctgaccatgaacaagcgctacaacgtgtcccagcaggccctggacctgcagaacctgcgctttgatcctgacctgatgggccgggacatcgacatcatcctgaacagaagaaactgcatggccgccaccctgaagatcattgaaagaaacttccctgagctgctgagcctgaacctgtgcaacaacaagctgtaccagctggatggcctgagtgacatcacagagaaggcccccaaggtgaagaccctgaacctgagcaagaacaagctggagagcgcctgggagctgggcaaggtgaagggcctgaagctggaggagctgtggctggagggcaaccccctgtgcagcaccttcagtgaccagagcgcctacgtgtctgccatccgggactgcttccccaagctgctgcggctggatggccgggagctgagcgcccctgtgattgtggacatcgacagcagcgagaccatgaagccctgcaaggagaacttcaccggcagcgagaccctgaagcacctggtgctgcagttcctgcagcagtactacagcatctatgattctggggaccggcagggcctgctgggcgcctaccatgatgaggcctgcttcagcctggccatcccctttgaccccaaggacagcgcccccagcagcctgtgcaagtactttgaggacagcaggaacatgaagaccctgaaggacccctacctgaagggggagctgctgcggaggaccaagagggacatcgtggacagcctgagcgccctgcccaagacccagcacgacctgagcagcatcctggtggatgtgtggtgccagacagtgcccagcggccagtag

SEQ ID NO: 162407 - DNA, 1881 bp, synthetic construct; identical to SEQ ID NO: 162403
  misc_feature 1..1881: note = Description of Artificial Sequence: Synthetic coding sequence
  source 1..1881: mol_type = other DNA

SEQ ID NO: 162408 - DNA, 1596 bp, synthetic construct
  misc_feature 1..1596: note = Description of Artificial Sequence: Synthetic coding sequence
  source 1..1596: mol_type = other DNA
atgagcctgcccagcggccacaccaccggccacacagaccaggtggtgcagaggcgggcccgctgctgggacatctaccagaggcgcttcagcagccgctctgagcctgtgaaccctggcatgcacagcagcagccaccagcagcaggatggagatgctgccatgcacggggcccacatggacagccctgtgcgctacaccccctacaccatcagcccctacaacaggaagggcagcttcaggaagcaggaccagacccacgtgaacatggagcgggagcagaagcccccagagaggaggatggagggcaacatgccagatggcaccctgggctcctggttcaagatcaccgtgcccttcggcatcaagtacaatgagaagtggctgctgaacctgatccagaatgaatgttctgtgccctttgtgcctgtggagttccactatgagaacatgcacgccagcttctttgtggagaatgccagcatcgcctatgccctgaagaatgtgtctgggaagatctgggatgaggacaatgagaagatcagcatctttgtgaacccagctggcatcccccactttgtgcaccgggagctgaagtctgagaaggtggagcagatcaagctggccatgaaccagcagtgtgatgtgtcccaggaggccctggacatccagaggctgcccttctacccagacatggtgaacagagacaccaagatggccagcaaccccaggaagtgcatggccgccagcctggatgtgcatgaggagaacatccccaccgtgatgtctgctggggagatggacaagtggaagggcatcgagcctggagagaagtgtgccgacaggagccctgtgtgcaccaccttcagtgacaccagcagcaacatcaacagcatcctggagctgttccccaagctgctgtgcctggatggccagcagagcccccgggccaccctgtgtggcacagaggcccacaagaggctgcccacctgcaagggcagcttcttcggcagcgagatgctgaagaacctggtgctgcagttcctgcagcagtactacctgatctatgacagcggggaccggcagggcctgctgagcgcctaccatgatgaggcctgcttcagcctgagcatccccttcaacccagaagattctgcccccagcagcttctgcaagttcttcaaggacagcaggaacatcaagatcctgaaggacccctacctgcggggggagctgctgaagcacaccaagctggacatcgtggacagcctgagcgccctgcccaagacccagcacgacctgagcagcttcctggtggacatgtggtaccagacagagtggatgctgtgcttctctgtgaatggagtcttcaaggaggtggagggccagagccagggctctgtgctggccttcaccaggaccttcatcgccaccccaggcagcagcagcagcctgtgcatcgtgaatgacaagctgtttgtgcgggacaccagccaccagggcacccagagcgccctcttcaccctggtgcccacagccttcagcagctctgtgcctgccttcagccaggagcagcagaagatgctgcccagctag

SEQ ID NO: 162409 - DNA, 702 bp, synthetic construct
  misc_feature 1..702: note = Description of Artificial Sequence: Synthetic coding sequence
  source 1..702: mol_type = other DNA
atggagcgggagcagaagcccccagagaggaggatggagggcaacatgccagatggcaccctgggctcctggttcaagatcaccgtgcccttcggcatcaagtacaatgagaagtggctgctgaacctgatccagaatgaatgttctgtgccctttgtgcctgtggagttccactatgagaacatgcacgccagcttctttgtggagaatgccagcatcgcctatgccctgaagaatgtgtctgggaagatctgggatgaagataatgagaagatcagcatctttgtgaacccagctggcatcccccactttgtgcaccgggagctgaagtctgagaaggtggagcagatcaagctggccatgaaccagcagtgtgatgtgtcccaggaggccctggacatccagaggctgcccttctacccagacatggtgaacagagacaccaagatggccagcaaccccaggaagtgcatggccgccagcctggatgtgcatgaggagaacatccccaccgtgatgtctgctggggagatggacaagtggaagggcatcgagcccggggagaagtgtgccgacaggagccctgtgtgcaccaccttcagtgacaccagcagcaacatcaagtctgtggtgcccagcgtgaccacctgggaccctgacctgtgcctgattgcccccttctgcagaagacggcagcactag

SEQ ID NO: 162410 - DNA, 612 bp, synthetic construct
  misc_feature 1..612: note = Description of Artificial Sequence: Synthetic coding sequence
  source 1..612: mol_type = other DNA
atggccagcagccaccctgagcagctgtatgtggtgctgaagcccacccggggctaccagcctgtgcgctactacctgatctatgacagcggggaccggcagggcctgctgagcgcctaccatgatgaggcctgcttcagcctgagcatccccttcaacccagaagattctgcccccagcagcttctgcaagttcttcaaggacagcaggaacatcaagatcctgaaggacccctacctgcggggggagctgctgaagcacaccaagctggacatcgtggacagcctgagcgccctgcccaagacccagcacgacctgagcagcttcctggtggacatgtggtaccagacagagtggatgctgtgcttctctgtgaatggagtcttcaaggaggtggagggccagagccagggctctgtgctggccttcaccaggaccttcatcgccaccccaggcagcagcagcagcctgtgcatcgtgaatgacaagctgtttgtgcgggacaccagccaccagggcacccagagcgccctcttcaccctggtgcccacagccttcagcagctctgtgcctgccttcagccaggagcagcagaagatgctgcccagctag

SEQ ID NO: 162411 - DNA, 1086 bp, synthetic construct
  misc_feature 1..1086: note = Description of Artificial Sequence: Synthetic coding sequence
  source 1..1086: mol_type = other DNA
tgaaatgagaagtggctgctgaacctgatccagaatgaatgttctgtgccctttgtgcctgtggagttccactatgagaacatgcacgccagcttctttgtggagaatgccagcatcgcctatgccctgaagaatgtgtctgggaagatctgggatgaagataatgagaagatcagcatctttgtgaacccagctggcatcccccactttgtgcaccgggagctgaagtctgagaaggtggagcagatcaagctggccatgaaccagcagtgtgatgtgtcccaggaggccctggacatccagaggctgcccttctacccagacatggtgaacagagacaccaagatggccagcaaccccaggaagtgcatggccgccagcctggatgtgcatgaggagaacatccccaccgtgatgtctgctggggagatggacaagtggaagggcatcgagcccggggagaagtgtgccgacaggagccctgtgtgcaccaccttcagtgacaccagcagcaacatcaacagcatcctggagctgttccccaagctgctgtgcctggatggccagcagagcccccgggccaccctgtgtggcacagaggcccacaagaggctgcccacctgcaagggcagcttctttggaagtgagatgctgaagaacctggtgctgcagttcctgcagcagtactacctgatctatgattctggggaccggcagggcctgctgagcgcctaccatgatgaggcctgcttcagcctgagcatccccttcaaccctgaggacagcgcccccagcagcttctgcaagttcttcaaggacagcaggaacatcaagatcctgaaggacccctacctgcggggggagctgctgaagcacaccaagctggacatcgtggacagcctgagcgccctgcccaagacccagcacgacctgagcagcttcctggtggacatgtggtaccagacagagtggatgctgtgcttctctgtgaatggagtcttcaaggaggtgtctggcttctgcagccggctgcacccagacctgcactgctacccctggcagcagttccagagcgtgcacaggtag

SEQ ID NO: 162412 - DNA, 1194 bp, synthetic construct
  misc_feature 1..1194: note = Description of Artificial Sequence: Synthetic coding sequence
  source 1..1194: mol_type = other DNA
atgagaagaaacacccaggatgagaacatgaggaagtggttcaaggtgaccatcccctacggcatcaagtatgacaaggcctggctgatgaacagcatccagagcaactgcagcgtgcccttcacccctgtggacttccactacatccggaacagagcctgcttctttgtgcaggtggccagcgctgccagcgccctgaaggatgtgtcctacaagatctatgatgatgagaaccagaagatctgcatctttgtgagccacttcaccgccccctacagcgtgaagaacaagctgaagccaggccagatggagatgctgaagctgaccatgaacaagcgctacaacgtgtcccagcaggccctggacctgcagaacctgcgctttgatcctgacctgatgggccgggacatcgacatcatcctgaacagaagaaactgcatggccgccaccctgaagatcacagagaggaacttccctgagctgctgagcctgaacctgtgcaacaacaagctgtaccagctggatggcctgagtgacatcacagagaaggcccccaaggtgaagaccctgaacctgagcaagaacaagctggagagcgcctgggagctgggcaaggtgaagggcctgaagctggaggagctgtggctggagggcaaccccctgtgcagcaccttcagtgaccagagcgcctacgtgtctgccatccgggactgcttccccaagctgctgcggctggatggccgggagctgagcgcccctgtgattgtggacatcgacagcagcgagaccatgaagccctgcaaggagaacttcaccggcagcgagaccctgaagcacctggtgctgcagttcctgcagcagagcaacctgtgcaagtacttcaaggacagcaggaacatcaagatcctgaaggacccctacctgcagaggaagctgctgaagcacaccaagtgccccagaaatgtggacagcctgagcgccctgcctgagacccagcacgacttcaccagcatcctggtggacatgtggtaccagacagtgaacacctgcttcctgcccagggctggccctgagagccagcgctggtggtgcctgctgagcctgaagtggaaggatggcctgcgggtgctgatcctgcccagctgtggccccagcagcctgcccctggccgccatccctgtgtgtgccagctag

SEQ ID NO: 162413 - DNA, 1194 bp, synthetic construct; identical to SEQ ID NO: 162412
  misc_feature 1..1194: note = Description of Artificial Sequence: Synthetic coding sequence
  source 1..1194: mol_type = other DNA

SEQ ID NO: 162414 - DNA, 1098 bp, synthetic construct
  misc_feature 1..1098: note = Description of Artificial Sequence: Synthetic coding sequence
  source 1..1098: mol_type = other DNA
atgagaagaaacacccaggatgagaacatgaggaagtggttcaaggtgaccatcccctacggcatcaagtatgacaaggcctggctgatgaacagcatccagagcaactgcagcgtgcccttcacccctgtggacttccactacatccggaacagagcctgcttctttgtgcaggtggccagcgctgccagcgccctgaaggatgtgtcctacaagatctatgatgatgagaaccagaagatctgcatctttgtgagccacttcaccgccccctacagcgtgaagaacaagctgaagccaggccagatggagatgctgaagctgaccatgaacaagcgctacaacgtgtcccagcaggccctggacctgcagaacctgcgctttgatcctgacctgatgggccgggacatcgacatcatcctgaacagaagaaactgcatggccgccaccctgaagatcacagagaggaacttccctgagctgctgagcctgaacctgtgcaacaacaagctgtaccagctggatggcctgagtgacatcacagagaaggcccccaaggtgaagaccctgaacctgagcaagaacaagctggagagcgcctgggagctgggcaaggtgaagggcctgaagctggaggagctgtggctggagggcaaccccctgtgcagcaccttcagtgaccagagcgcctacgtgtctgccatccgggactgcttccccaagctgctgcggctggatggccgggagctgagcgcccctgtgattgtggacatcgacagcagcgagaccatgaagccctgcaaggagaacttcaccggcagcgagaccctgaagcacctggtgctgcagttcctgcagcagagcaacctgtgcaagtacttcaaggacagcaggaacatcaagatcctgaaggacccctacctgcagaggaagctgctgaagcacaccaagtgccccagaaatgtggacagcctgagcgccctgcctgagacccagcacgacttcaccagcatcctggtggacatgtggtaccagacagtgaacacctgcttcctgcccagggctggccctgagagccagagcctgcggcccctgtag

SEQ ID NO: 162415 - DNA, 1098 bp, synthetic construct; identical to SEQ ID NO: 162414
  misc_feature 1..1098: note = Description of Artificial Sequence: Synthetic coding sequence
  source 1..1098: mol_type = other DNA

SEQ ID NO: 162416 - DNA, 1044 bp, synthetic construct
  misc_feature 1..1044: note = Description of Artificial Sequence: Synthetic coding sequence
  source 1..1044: mol_type = other DNA
atggagcagtacacagccaacagcaacagcagcacagagcagatcgtggtgcaggccggccagatccagcagcagcagcagggcggcgtgacagctgtgcagctgcagacagaggcccaggtggccagcgccagcggccagcaggtgcagaccctgcaggtggtgcagggccagcccctgatggtgcaggtgtctgggggccagctgatcaccagcacaggccagcccatcatggtgcaggccgtgcctgggggccagggccagaccatcatgcaggtgcctgtgtctggcacccagggcctgcagcagatccagctggtgcccccaggccagatccagatccagggcggccaggccgtgcaggtgcagggccagcagggccagacccagcagatcatcatccagcagccccagacagctgtgacagctggccagacccagacccagcagcagattgctgtgcagggccagcaggtggcccagacagctgagggccagaccatcgtgtaccagcctgtgaatgctgatggcaccatcctgcagcaggtgacagtgcctgtgtctggcatgatcaccatcccagctgccagcctggccggggcccagatcgtgcagacaggagccaacaccaacaccaccagcagcggccagggcaccgtgacagtgaccctgcctgtggccggaaatgtggtgaacagcggcggcatggtgatgatggtgcctggagctggctctgtgcctgccatccagaggatccccctgcctggagctgagatgctggaggaggagcccctgtatgtgaatgccaagcagtaccaccgcatcctgaagaggcggcaggcccgggccaagctggaggccgagggcaagatccccaaggagaggaggaagtacctgcacgagagccgccacagacatgccatggccaggaagagaggagagggcggccgcttcttcagccccaaggagaaggacagcccccacatgcaggaccccaaccaggctgatgaggaggccatgacccagatcatccgggtgtcctag

SEQ ID NO: 162417 - DNA, 957 bp, synthetic construct
  misc_feature 1..957: note = Description of Artificial Sequence: Synthetic coding sequence
  source 1..957: mol_type = other DNA
atggagcagtacacagccaacagcaacagcagcacagagcagatcgtggtgcaggccggccagatccagcagcaggtgcagggccagcccctgatggtgcaggtgtctgggggccagctgatcaccagcacaggccagcccatcatggtgcaggccgtgcctgggggccagggccagaccatcatgcaggtgcctgtgtctggcacccagggcctgcagcagatccagctggtgcccccaggccagatccagatccagggcggccaggccgtgcaggtgcagggccagcagggccagacccagcagatcatcatccagcagccccagacagctgtgacagctggccagacccagacccagcagcagattgctgtgcagggccagcaggtggcccagacagctgagggccagaccatcgtgtaccagcctgtgaatgctgatggcaccatcctgcagcaggtgacagtgcctgtgtctggcatgatcaccatcccagctgccagcctggccggggcccagatcgtgcagacaggagccaacaccaacaccaccagcagcggccagggcaccgtgacagtgaccctgcctgtggccggaaatgtggtgaacagcggcggcatggtgatgatggtgcctggggccggctctgtgcctgccatccagaggatccccctgcccggggctgagatgctggaggaggagcccctgtatgtgaatgccaagcagtaccaccgcatcctgaagaggcggcaggcccgggccaagctggaggccgagggcaagatccccaaggagaggaggaagtacctgcacgagagccgccacagacatgccatggccaggaagagaggagagggcggccgcttcttcagccccaaggagaaggacagcccccacatgcaggaccccaaccaggctgatgaggaggccatgacccagatcatccgggtgtcctag

SEQ ID NO: 162418 - DNA, 624 bp, synthetic construct
  misc_feature 1..624: note = Description of Artificial Sequence: Synthetic coding sequence
  source 1..624: mol_type = other DNA
atgaccatggatggagacagcagcaccacagatgccagccagctgggcatctctgctgactacatcggcggcagccactacgtgatccagccccatgatgacacagaggacagcatgaatgaccacgaggacaccaacggcagcaaggagagcttccgggagcaggacatctacctgcccatcgccaacgtggcccgcatcatgaagaatgccatcccccagacaggcaagatcgccaaggatgccaaggaatgtgtgcaggagtgtgtgtctgagttcatctccttcatcaccagcgaggccagcgagcgctgccaccaggagaagaggaagaccatcaacggggaggacatcctgtttgccatgagcaccctgggctttgacagctatgtggagcccctgaagctgtacctgcagaagttccgggaggccatgaagggggagaagggcattggaggagctgtgacagccacagatggcctgtctgaggagctgacagaggaggccttcaccaaccagctgcctgctggcctcatcaccacagatggccagcagcagaatgtgatggtgtacaccaccagctaccagcagatctctggagtgcagcagatccagttctcctag

SEQ ID NO: 162419 - DNA, 624 bp, synthetic construct; identical to SEQ ID NO: 162418
  misc_feature 1..624: note = Description of Artificial Sequence: Synthetic coding sequence
  source 1..624: mol_type = other DNA

SEQ ID NO: 162420 - DNA, 1377 bp, synthetic construct
  misc_feature 1..1377: note = Description of Artificial Sequence: Synthetic coding sequence
  source 1..1377: mol_type = other DNA
atgagcacagaaggaggctttggaggcaccagcagcagtgatgcccagcagagcctgcagagcttctggccccgggtgatggaggagatccggaacctgactgtgaaggacttccgggtgcaggagctgcccctggcccgcatcaagaagatcatgaagctggatgaagatgtgaagatgatctctgctgaggcccctgtgctgtttgccaaggccgcccagatcttcatcacagagctgaccctgcgggcctggatccacacagaggacaacaagaggaggaccctgcagagaaatgacatcgccatggccatcaccaagtttgaccagtttgacttcctgattgatattgtgcccagagatgagctgaagccacccaagaggcaggaggaggtgcggcagagcgtgaccccagctgagcctgtgcagtactacttcaccctggcccagcagcccacagctgtgcaggtgcagggccagcagcagggccagcagaccaccagcagcaccaccaccatccagcccggccagatcatcatcgcccagccccagcagggccagaccacccctgtgaccatgcaggtgggggagggccagcaggtgcagatcgtgcaggcccagccccagggccaggcccagcaggcccagagcggcaccggccagaccatgcaggtgatgcagcagatcatcaccaacacaggagagatccagcagatccctgtgcagctgaatgccggccagctgcagtacatccggctggcccagcctgtgtctggcacccaggtggtgcagggccagatccagaccctggccaccaatgcccagcagggccagagaaatgccagccagggcaagccccggcgctgcctgaaggagaccctgcagatcacccagacagaggtgcagcagggccagcagcagttcagccagttcacagatggccagaggaacagcgtgcagcaggcccgggtgtctgagctgaccggggaggccgagccccgggaggtgaaggccactggaaacagcaccccctgcaccagcagcctgcccaccacccacccccccagccacagagctggggccagctgtgtgtgctgcagccagccccagcagagcagcaccagccccccacccagtgatgccctgcagtgggtggtggtggaggtgtctggcacccccaaccagctggagacccaccgggagctgcacgcccccctgcccggcatgaccagcctgagccccctgcaccccagccagcagctgtaccagatccagcaggtgaccatgcctgctggccaggacctggcccagcccatgttcatccagagcgccaaccagcccagtgatggccaggccccccaggtgactggagactag

SEQ ID NO: 162421 - DNA, 1008 bp, synthetic construct
  misc_feature 1..1008: note = Description of Artificial Sequence: Synthetic coding sequence
  source 1..1008: mol_type = other DNA
atgagcacagaaggaggctttggaggcaccagcagcagtgatgcccagcagagcctgcagagcttctggccccgggtgatggaggagatccggaacctgactgtgaaggacttccgggtgcaggagctgcccctggcccgcatcaagaagatcatgaagctggatgaagatgtgaagatgatctctgctgaggcccctgtgctgtttgccaaggccgcccagatcttcatcacagagctgaccctgcgggcctggatccacacagaggacaacaagaggaggaccctgcagagaaatgacatcgccatggccatcaccaagtttgaccagtttgacttcctgattgatattgtgcccagagatgagctgaagccacccaagaggcaggaggaggtgcggcagagcgtgaccccagctgagcctgtgcagtactacttcaccctggcccagcagcccacagctgtgcaggtgcagggccagcagcagggccagcagaccaccagcagcaccaccaccatccagcccggccagatcatcatcgcccagccccagcagggccagaccacccctgtgaccatgcaggtgggggagggccagcaggtgcagatcgtgcaggcccagccccagggccaggcccagcaggcccagagcggcaccggccagaccatgcaggtgatgcagcagatcatcaccaacacaggagagatccagcagatccctgtgcagctgaatgccggccagctgcagtacatccggctggcccagcctgtgtctggcacccaggtggtgcagggccagatccagaccctggccaccaatgcccagcagatcacccagacagaggtgcagcagggccagcagcagttcagccagttcacagatggccagcagctgtaccagatccagcaggtgaccatgcctgctggccaggacctggcccagcccatgttcatccagagcgccaaccagcccagtgatggccaggccccccaggtgactggagactag

SEQ ID NO: 162422 - DNA, 1320 bp, synthetic construct
  misc_feature 1..1320: note = Description of Artificial Sequence: Synthetic coding sequence
  source 1..1320: mol_type = other DNA
atgagcacagaaggaggctttggaggcaccagcagcagtgatgcccagcagagcctgcagagcttctggccccgggtgatggaggagatccggaacctgactgtgaaggacttccgggtgcaggagctgcccctggcccgcatcaagaagatcatgaagctggatgaagatgtgaagatgatctctgctgaggcccctgtgctgtttgccaaggccgcccagatcttcatcacagagctgaccctgcgggcctggatccacacagaggacaacaagaggaggaccctgcagagaaatgacatcgccatggccatcaccaagtttgaccagtttgacttcctgattgatattgtgcccagagatgagctgaagccacccaagaggcaggaggaggtgcggcagagcgtgaccccagctgagcctgtgcagtactacttcaccctggcccagcagcccacagctgtgcaggtgcagggccagcagcagggccagcagaccaccagcagcaccaccaccatccagcccggccagatcatcatcgcccagccccagcagggccagaccacccctgtgaccatgcaggtgggggagggccagcaggtgcagatcgtgcaggcccagccccagggccaggcccagcaggcccagagcggcaccggccagaccatgcaggtgatgcagcagatcatcaccaacacaggagagatccagcagatccctgtgcagctgaatgccggccagctgcagtacatccggctggcccagcctgtgtctggcacccaggtggtgcagggccagatccagaccctggccaccaatgcccagcagatcacccagacagaggtgcagcagggccagcagcagttcagccagttcacagatggccagagaaattctgtgcagcaggcccgggtgtctgagctgactggagaggccgagccccgggaggtgaaggccaccggcaacagcaccccctgcaccagcagcctgcccaccacccacccccccagccaccgggccggggccagctgtgtgtgctgcagccagccccagcagagcagcaccagccccccacccagtgatgccctgcagtgggtggtggtggaggtgtctggcacccccaaccagctggagacccaccgggagctgcacgcccccctgcccggcatgaccagcctgagccccctgcaccccagccagcagctgtaccagatccagcaggtgaccatgcctgctggccaggacctggcccagcccatgttcatccagagcgccaaccagcccagtgatggccaggccccccaggtgactggagactag

SEQ ID NO: 162423 - DNA, 906 bp, synthetic construct
  misc_feature 1..906: note = Description of Artificial Sequence: Synthetic coding sequence
  source 1..906: mol_type = other DNA
atgagcacagaaggaggctttggaggcaccagcagcagtgatgcccagcagagcctgcagagcttctggccccgggtgatggaggagatccggaacctgactgtgaaggacttccgggtgcaggagctgcccctggcccgcatcaagaagatcatgaagctggatgaagatgtgaagatgatctctgctgaggcccctgtgctgtttgccaaggccgcccagatcttcatcacagagctgaccctgcgggcctggatccacacagaggacaacaagaggaggaccctgcagagaaatgacatcgccatggccatcaccaagtttgaccagtttgacttcctgattgatattgtgcccagagatgagctgaagccacccaagaggcaggaggaggtgcggcagagcgtgaccccagctgagcctgtgcagtactacttcaccctggcccagcagcccacagctgtgcaggtgcagggccagcagcagggccagcagaccaccagcagcaccaccaccatccagcccggccagatcatcatcgcccagccccagcagggccagaccatgcaggtgatgcagcagatcatcaccaacacaggagagatccagcagatccctgtgcagctgaatgccggccagctgcagtacatccggctggcccagcctgtgtctggcacccaggtggtgcagggccagatccagaccctggccaccaatgcccagcagatcacccagacagaggtgcagcagggccagcagcagttcagccagttcacagatggccagcagctgtaccagatccagcaggtgaccatgcctgctggccaggacctggcccagcccatgttcatccagagcgccaaccagcccagtgatggccaggccccccaggtgactggagactag

SEQ ID NO: 162424 - DNA, 1008 bp, synthetic construct; identical to SEQ ID NO: 162421
  misc_feature 1..1008: note = Description of Artificial Sequence: Synthetic coding sequence
  source 1..1008: mol_type = other DNA

SEQ ID NO: 162425 - DNA, 702 bp, synthetic construct
  misc_feature 1..702: note = Description of Artificial Sequence: Synthetic coding sequence
  source 1..702: mol_type = other DNA
atggccatcaccaagtttgaccagtttgacttcctgattgatattgtgcccagagatgagctgaagccacccaagaggcaggaggaggtgcggcagagcgtgaccccagctgagcctgtgcagtactacttcaccctggcccagcagcccacagctgtgcaggtgcagggccagcagcagggccagcagaccaccagcagcaccaccaccatccagcccggccagatcatcatcgcccagccccagcagggccagaccacccctgtgaccatgcaggtgggggagggccagcaggtgcagatcgtgcaggcccagccccagggccaggcccagcaggcccagagcggcaccggccagaccatgcaggtgatgcagcagatcatcaccaacacaggagagatccagcagatccctgtgcagctgaatgccggccagctgcagtacatccggctggcccagcctgtgtctggcacccaggtggtgcagggccagatccagaccctggccaccaatgcccagcagatcacccagacagaggtgcagcagggccagcagcagttcagccagttcacagatggccagcagctgtaccagatccagcaggtgaccatgagggcccggaccagccccagcccctgcagcagcagccagcccaccagccccccaactggacctcctggggaccggcggctgcgggcctag

SEQ ID NO: 162426 - DNA, 606 bp, synthetic construct
  misc_feature 1..606: note = Description of Artificial Sequence: Synthetic coding sequence
  source 1..606: mol_type = other DNA
atggccatcaccaagtttgaccagtttgacttcctgattgatattgtgcccagagatgagctgaagccacccaagaggcaggaggaggtgcggcagagcgtgaccccagctgagcctgtgcagtactacttcaccctggcccagcagcccacagctgtgcaggtgcagggccagcagcagggccagcagaccaccagcagcaccaccaccatccagcccggccagatcatcatcgcccagccccagcagggccagaccacccctgtgaccatgcaggtgggggagggccagcaggtgcagatcgtgcaggcccagccccagggccaggcccagcaggcccagagcggcaccggccagaccatgcaggtgatgcagcagatcatcaccaacacaggagagatccagcagatccctgtgcagctgaatgccggccagctgcagtacatccggctggcccagcctgtgtctggcacccaggtggtgcagggccagatccagacccaggccatggagaccttctttgccttcaagaggcagatctacagcctgtggagggtgggcggcttcatcgccaccctcttcagcccccgggaccccggcaactag

SEQ ID NO: 162427 - DNA, 942 bp, synthetic construct
  misc_feature 1..942: note = Description of Artificial Sequence: Synthetic coding sequence
  source 1..942: mol_type = other DNA
atgagcacagaaggaggctttggaggcaccagcagcagtgatgcccagcagagcctgcagagcttctggccccgggtgatggaggagatccggaacctgactgtgaaggacttccgggtgcaggagctgcccctggcccgcatcaagaagatcatgaagctggatgaagatgtgaagatgatctctgctgaggcccctgtgctgtttgccaaggccgcccagatcttcatcacagagctgaccctgcgggcctggatccacacagaggacaacaagaggaggaccctgcagagaaatgacatcgccatggccatcaccaagtttgaccagtttgacttcctgattgatattgtgcccagagatgagctgaagccacccaagaggcaggaggaggtgcggcagagcgtgaccccagctgagcctgtgcagtactacttcaccctggcccagcagcccacagctgtgcaggtgcagggccagcagcagggccagcagaccaccagcagcaccaccaccatccagcccggccagatcatcatcgcccagccccagcagggccagaccacccctgtgaccatgcaggtgggggagggccagcaggtgcagatcgtgcaggcccagccccagggccaggcccagcaggcccagagcggcaccggccagaccatgcaggtgatgcagcagatcatcaccaacacaggagagatccagcagatccctgagaccggcctggccgtgtccctgcggctgatgaagtgcagcggcctcatcagcgcccactgcagcttccggctgcccggcagcagtgacagccctgccagcgccagccgggtggccggcatcatcggggctgctgagtgcaggcctgctgctgtgtaccccctgagccctgcctgcatccgccacagcagctgtgccggcacagatcctgacacctgctag

SEQ ID NO: 162428 - DNA, 543 bp, synthetic construct
  misc_feature 1..543: note = Description of Artificial Sequence: Synthetic coding sequence
  source 1..543: mol_type = other DNA
atgagcacagaaggaggctttggaggcaccagcagcagtgatgcccagcagagcctgcagagcttctggccccgggtgatggaggagatccggaacctgactgtgaaggacttccgggtgcaggagctgcccctggcccgcatcaagaagatcatgaagctggatgaagatgtgaagatgatctctgctgaggcccctgtgctgtttgccaaggccgcccagatcttcatcacagagctgaccctgcgggcctggatccacacagaggacaacaagaggaggaccctgcaggaggaggtgcggcagagcgtgaccccagctgagcctgtgcagtactacttcaccctggcccagcagcccacagctgtgcaggtgcagggccagcagcagggccagcagaccaccagcagcaccaccaccatccagcccggccagatcatcatcgcccagccccagcagggccagaccacccctgtgaccatgcaggtgggggagggccagcaggtgcagatcgtgcaggcccagccccagggccaggcctag

SEQ ID NO: 162429 - DNA, 1065 bp, synthetic construct
  misc_feature 1..1065: note = Description of Artificial Sequence: Synthetic coding sequence
  source 1..1065: mol_type = other DNA
atgagcacagaaggaggctttggaggcaccagcagcagtgatgcccagcagagcctgcagagcttctggccccgggtgatggaggagatccggaacctgactgtgaaggacttccgggtgcaggagctgcccctggcccgcatcaagaagatcatgaagctggatgaagatgtgaagatgatctctgctgaggcccctgtgctgtttgccaaggccgcccagatcttcatcacagagctgaccctgcgggcctggatccacacagaggacaacaagaggaggaccctgcagagaaatgacatcgccatggccatcaccaagtttgaccagtttgacttcctgattgatattgtgcccagagatgagctgaagccacccaagaggcaggaggaggtgcggcagagcgtgaccccagctgagcctgtgcagtactacttcaccctggcccagcagcccacagctgtgcaggtgcagggccagcagcagggccagcagaccaccagcagcaccaccaccatccagcccggccagatcatcatcgcccagccccagcagggccagaccacccctgtgaccatgcaggtgggggagggccagcaggtgcagatcgtgcaggcccagccccagggccaggcccagcaggcccagagcggcaccggccagaccatgcaggtgatgcagcagatcatcaccaacacaggagagatccagcagatccctgtgcagctgaatgccggccagctgcagtacatccggctggcccagcctgtgtctggcacccaggtggtgcagggccagatccagaccctggccaccaatgcccagcagggccagagaaatgccagccagggcaagccccggcgctgcctgaaggagaccctgcagatcacccagacagaggtgcagcagggccagcagcagttcagccagttcacagatggccagcagctgtaccagatccagcaggtgaccatgcctgctggccaggacctggcccagcccatgttcatccagagcgccaaccagcccagtgatggccaggccccccaggtgactggagactag

SEQ ID NO: 162430 - DNA, 894 bp, synthetic construct
  misc_feature 1..894: note = Description of Artificial Sequence: Synthetic coding sequence
  source 1..894: mol_type = other DNA
atgagcacagaaggaggctttggaggcaccagcagcagtgatgcccagcagagcctgcagagcttctggccccgggtgatggaggagatccggaacctgactgtgaaggacttccgggtgcaggagctgcccctggcccgcatcaagaagatcatgaagctggatgaagatgtgaagagaaatgacatcgccatggccatcaccaagtttgaccagtttgacttcctgattgatattgtgcccagagatgagctgaagccacccaagaggcaggaggaggtgcggcagagcgtgaccccagctgagcctgtgcagtactacttcaccctggcccagcagcccacagctgtgcaggtgcagggccagcagcagggccagcagaccaccagcagcaccaccaccatccagcccggccagatcatcatcgcccagccccagcagggccagaccacccctgtgaccatgcaggtgggggagggccagcaggtgcagatcgtgcaggcccagccccagggccaggcccagcaggcccagagcggcaccggccagaccatgcaggtgatgcagcagatcatcaccaacacaggagagatccagcagatccctgtgcagctgaatgccggccagctgcagtacatccggctggcccagcctgtgtctggcacccaggtggtgcagggccagatccagaccctggccaccaatgcccagcagatcacccagacagaggtgcagcagggccagcagcagttcagccagttcacagatggccagcagctgtaccagatccagcaggtgaccatgcctgctggccaggacctggcccagcccatgttcatccagagcgccaaccagcccagtgatggccaggccccccaggtgactggagactag

SEQ ID NO: 162431 - DNA, 1008 bp, synthetic construct; identical to SEQ ID NO: 162421
  misc_feature 1..1008: note = Description of Artificial Sequence: Synthetic coding sequence
  source 1..1008: mol_type = other DNA

SEQ ID NO: 162432 - DNA, 1008 bp, synthetic construct; identical to SEQ ID NO: 162421
  misc_feature 1..1008: note = Description of Artificial Sequence: Synthetic coding sequence
  source 1..1008: mol_type = other DNA

SEQ ID NO: 162433 - DNA, 390 bp, synthetic construct
  misc_feature 1..390: note = Description of Artificial Sequence: Synthetic coding sequence
  source 1..390: mol_type = other DNA
atgagcacagaaggaggctttggaggcaccagcagcagtgatgcccagcagagcctgcagagcttctggccccgggtgatggaggagatccggaacctgactgtgaaggacttccgggtgcaggagctgcccctggcccgcatcaagaagatcatgaagctggatgaagatgtgaagatgatctctgctgaggcccctgtgctgtttgccaaggccgcccagatcttcatcacagagctgaccctgcgggcctggatccacacagaggacaacaagaggaggaccctgcagagaaatgacatcgccatggccatcaccaagtttgaccagtttgacttcctgattgatattgtgcccagagatgagctgaagccacccaagaggcagtag

SEQ ID NO: 162434 - DNA, 1005 bp, synthetic construct
  misc_feature 1..1005: note = Description of Artificial Sequence: Synthetic coding sequence
  source 1..1005: mol_type = other DNA
atgagcacagaaggaggctttggaggcaccagcagcagtgatgcccagcagagcctgcagagcttctggccccgggtgatggaggagatccggaacctgactgtgaaggacttccgggtgcaggagctgcccctggcccgcatcaagaagatcatgaagctggatgaagatgtgaagatgatctctgctgaggcccctgtgctgtttgccaaggccgcccagatcttcatcacagagctgaccctgcgggcctggatccacacagaggacaacaagaggaggaccctgcagagaaatgacatcgccatggccatcaccaagtttgaccagtttgacttcctgattgatattgtgcccagagatgagctgaagccacccaagaggcaggaggaggtgcggcagagcgtgaccccagctgagcctgtgcagtactacttcaccctggcccagcagcccacagctgtgcaggtgcagggccagcagcagggccagcagaccaccagcagcaccaccaccatccagcccggccagatcatcatcgcccagccccagcagggccagaccacccctgtgaccatgcaggtgggggagggccagcaggtgcagatcgtgcaggcccagccccagggccaggcccagcaggcccagagcggcaccggccagaccatgcaggtgatgcagcagatcatcaccaacacaggagagatccagcagatccctgtgcagctgaatgccggccagctgcagtacatccggctggcccagcctgtgtctggcacccaggtggtgcagggccagatccagaccctggccaccaatgcccagcagatcacccagacagaggtgcagcagggccagcagcagttcagccagttcacagatggccagctgtaccagatccagcaggtgaccatgcctgctggccaggacctggcccagcccatgttcatccagagcgccaaccagcccagtgatggccaggccccccaggtgactggagactag

SEQ ID NO: 162435 - DNA, 426 bp, synthetic construct
  misc_feature 1..426: note = Description of Artificial Sequence: Synthetic coding sequence
  source 1..426: mol_type = other DNA
atgagcacagaaggaggctttggaggcaccagcagcagtgatgcccagcagagcctgcagagcttctggccccgggtgatggaggagatccggaacctgactgtgaaggacttccgggtgcaggagctgcccctggcccgcatcaagaagatcatgaagctggatgaagatgtgaagatgatctctgctgaggcccctgtgctgtttgccaaggccgcccagatcttcatcacagagctgaccctgcgggcctggatccacacagaggacaacaagaggaggaccctgcagagaaatgacatcgccatggccatcaccaagtttgaccagtttgacttcctgattgatattgtgcccagagatgagctgaagccacccaagaggcaggaggtgcggcagagcgtgaccccagctgagcctgtgtag

SEQ ID NO: 162436 - DNA, 288 bp, synthetic construct
  misc_feature 1..288: note = Description of Artificial Sequence: Synthetic coding sequence
  source 1..288: mol_type = other DNA
atgagcacagaaggaggctttggaggcaccagcagcagtgatgcccagcagagcctgcagagcttctggccccgggtgatggaggagatccggaacctgactgtgatgatctctgctgaggcccctgtgctgtttgccaaggccgcccagatcttcatcacagagctgaccctgcgggcctggatccacacagaggacaacaagaggaggaccctgcagagaaatgacatcgccatggccatcaccaagtttgaccagtttgacttcctgattgatattgtgccctag

SEQ ID NO: 162437 - DNA, 183 bp, synthetic construct
  misc_feature 1..183: note = Description of Artificial Sequence: Synthetic coding sequence
  source 1..183: mol_type = other DNA
atgagcacagaaggaggctttggaggcaccagcagcagtgatgcccagcagagcctgcagagcttctggccccgggtgatggaggagatccggaacctgactgtgaaggacttccgggtgcaggagctgcccctggcccgcatcaagaagatcatgaagctggatgaagatgtgaagatgtag

SEQ ID NO: 162438 - DNA, 159 bp, synthetic construct
  misc_feature 1..159: note = Description of Artificial Sequence: Synthetic coding sequence
  source 1..159: mol_type = other DNA
atgagcacagaaggaggctttggaggcaccagcagcagtgatgcccagcagagcctgcagagcttctggccccgggtgatggaggagatccggaacctgactgtgaaggacttccgggtgcaggagctgcccctggcccgcatcaagaagatcatgtag

SEQ ID NO: 162439 - DNA, 555 bp, synthetic construct
  misc_feature 1..555: note = Description of Artificial Sequence: Synthetic coding sequence
  source 1..555: mol_type = other DNA
atggcccggagcctggtgcatgacacagtgttctactgcctgtctgtgtaccaggtgaagatcagccccaccccccagctgggcgccgccagcagcgctgagggccacgtgggccagggcgcccctggcctgatgggcaacatgaaccctgagggcggcgtgaaccatgaaaatggcatgaacagagatggcggcatgatccctgagggcggcggcggcaaccaggagccccggcagcagccccagcccccacctgaggagcccgcccaggccgccatggagggcccccagcctgagaacatgcagcccaggaccaggaggaccaagttcaccctgctgcaggtggaggagctggagagcgtcttccgccacacccagtacccagatgtgcccacccggcgggagctggccgagaacctgggcgtgacagaggacaaggtgcgggtgtggttcaagaacaagagggcccgctgcagaagacaccagcgggagctgatgctggccaatgagctgcgggctgaccctgatgactgtgtgtacatcgtggtggactag

SEQ ID NO: 162440 - DNA, 345 bp, synthetic construct
  misc_feature 1..345: note = Description of Artificial Sequence: Synthetic coding sequence
  source 1..345: mol_type = other DNA
atggacaagagaagaagagccctgacccggctgtacctggacaaggccaccctcatctggaatggaaatgctgtgtctggcctggatgccctgaacaacttctttgacaccctgcccagcagcgagttccaggtgaacatgctggactgccagcctgtgcatgagcaggccacccagagccagaccaccgtgctggtggtgaccagcggcaccgtgaagtttgatggcaacaagcagcacttcttcaaccagaacttcctgctgacagcccagagcacccccaacaacacagtgtggaagatcgccagtgactgcttccgcttccaggactggagcagcagctag

SEQ ID NO: 162441 - DNA, 429 bp, synthetic construct
  misc_feature 1..429: note = Description of Artificial Sequence: Synthetic coding sequence
  source 1..429: mol_type = other DNA
atggccaccagcctggacttcaagacctacgtggaccaggcctgcagagctgctgaggagtttgtgaacatctactatgagaccatggacaagagaagaagagccctgacccggctgtacctggacaaggccaccctcatctggaatggaaatgctgtgtctggcctggatgccctgaacaacttctttgacaccctgcccagcagcgagttccaggtgaacatgctggactgccagcctgtgcatgagcaggccacccagagccagaccaccgtgctggtggtgaccagcggcaccgtgaagtttgatggcaacaagcagcacttcttcaaccagaacttcctgctgacagcccagagcacccccaacaacacagtgtggaagatcgccagtgactgcttccgcttccaggactggagcagcagctag

SEQ ID NO: 162442 - DNA, 345 bp, synthetic construct; identical to SEQ ID NO: 162440
  misc_feature 1..345: note = Description of Artificial Sequence: Synthetic coding sequence
  source 1..345: mol_type = other DNA

SEQ ID NO: 162443 - DNA, 882 bp, synthetic construct
  misc_feature 1..882: note = Description of Artificial Sequence: Synthetic coding sequence
  source 1..882: mol_type = other DNA
atgacaggcctgtatgagctggtgtggagggtgctgcacgccctgctgtgcctgcacaggaccctgacctcctggctgcgggtgcgcttcggcacctggaactggatctggaggcgctgctgcagagctgccagcgctgctgtgctggcccccctgggcttcaccctgaggaagcccccagctgtgggcaggaacagaagacaccaccgccacccccggggcggcagctgcctggccgccgcccaccacaggatgcgctggagggcagatggccgcagcctggagaagctgcctgtgcacatgggcctggtgatcacagaggtggagcaggagcccagcttcagtgacatcgccagcctggtggtgtggtgcatggctgtgggcatctcctacatctctgtgtatgaccaccagggcatcttcaagaggaacaacagccggctgatggatgagatcctgaagcagcagcaggagctgctgggcctggactgcagcaagtacagccctgagtttgccaacagcaatgacaaggatgaccaggtgctgaactgccacctggccgtgaaggtgctgagcccagaagatggcaaggctgacatcgtgcgggccgcccaggacttctgccagctggtggcccagaagcagaagaggcccacagacctggatgtggacaccctggccagcctgctgagcagcaatggctgcccagaccctgacctggtgctgaagtttggacctgtggacagcaccctgggcttcctgccctggcacatccggctgacagaaattgtgtccctgcccagccacctgaacatctcctatgaggacttcttcagcgccctgcggcagtatgctgcctgtgagcagaggctgggcaagtag

SEQ ID NO: 162444 - DNA, 2571 bp, synthetic construct
  misc_feature 1..2571: note = Description of Artificial Sequence: Synthetic coding sequence
  source 1..2571: mol_type = other DNA
atgaagcccaggcctgctggctttgtggacaacaagctgaagcagagggtcatccagtacctgaccagcaacaagtgtgggaagtatgtggacatcggcgtgctggccagtgacctgcagagggtgtacagcattgattatggaagaaggaagagaaatgccttccgcatccaggtggagaaggtgttcagcatcatcagcagcgagaaggagctgaagaacctgacagagctggaggatgagcacctggccaagagggcccggcagggcgaggaggacaatgagtacacagagagctacagtgatgatgacagctccatggaggactacccagacccccagagcgccaaccacatgaacagcagcctgctgagcctgtacagaaaaggaaatccagacagcgtgagcaacaccccagagatggagcagcgggagaccaccagcagcaccccccgcatcagcagcaagacaggcagcatccccctgaagaccccagccaaggacagcgagggcggctggttcatcgacaagacccccagcgtgaagaaggacagcttcttcctggacctgagctgtgagaagagcaaccccaagaagcccatcacagagatccaggacagcaaggacagcagcctgctggagagtgacatgaagaggaagggcaagctgaagaacaagggcagcaagaggaagaaggaggacctgcaggaggtggatggagaaattgaggccgtgctgcagaagaaggccaaggcccggggcctggagttccagatcagcaatgtgaagtttgaagatgtgggcggcaatgacatgaccctgaaggaggtgtgcaagatgctgatccacatgaggcaccctgaggtgtaccaccacctgggcgtggtgcccccccggggcgtgctgctgcacggccccccaggctgcggcaagaccctgctggcccacgccatcgccggggagctggacctgcccatcctgaaggtggccgcccctgagatcgtgtctggagtgtctggagagagcgagcagaagctgcgggagctgtttgagcaggccgtgtccaatgccccctgcatcatcttcattgatgaaattgatgccatcacccccaagcgggaggtggccagcaaggacatggagcggcgcatcgtggcccagctgctgacctgcatggatgacctgaacaacgtggccgccacagcccgggtgctggtgattggagccaccaacagaccagacagcctggaccctgccctgcggcgggccggccgctttgaccgggagatctgcctgggcatcccagatgaggccagccgggagcgcatcctgcagaccctgtgcaggaagctgcggctgccccaggcctttgacttctgccacctggcccacctgaccccaggctttgtgggcgctgacctgatggccctgtgccgggaggccgccatgtgtgctgtgaacagagtgctgatgaagctgcaggagcagcagaagaagaaccctgagatggaggacctgcccagcaaaggagtgcaggaggagcggctgggcacagagcccaccagcgagacccaggatgagctgcagaggctgctgggcctgctgcgggaccaggaccccctgtctgaggagcagatgcagggcctgtgcatcgagctgaatgacttcatcgtggccctgagctctgtgcagcccagcgccaagcgggagggctttgtgacagtgcccaacgtgacctgggccgacattggagccctggaggacatccgggaggagctgaccatggccatcctggcccctgtgaggaacccagaccagttcaaggccctgggcctggtgaccccagctggggtgctgctggccggccccccaggctgtgggaagaccctgctggccaaggctgtggccaatgaaagtggcctgaacttcatctctgtgaagggccctgagctgctgaacatgtatgtgggggagagcgagagagctgtgcggcaggtgttccagagggccaagaacagcgccccctgcgtcatcttctttgatgaggtggatgccctgtgccccaggagaagtgaccgggagactggagcctctgtgcgggtggtgaaccagctgctgacagagatggatggcctggaggcccggcagcaggtgttcatcatggccgccaccaacagaccagacatcatcgaccctgccatcctgcggcccggccgcctggacaagaccctgtttgtgggcctgcccccacctgctgaccggctggccatcctgaagaccatcaccaagaatggcaccaagccacccctggatgctgatgtgaacctggaggccatcgccggggacctgcgctgtgactgctacacaggagctgacctgagcgccctggtgcgggaggccagcatctgtgccctgcggcaggagatggcccggcagaagtctggaaatgagaagggggagctgaaggtgagccacaagcactttgaggaggccttcaagaaggtgcgcagcagcatcagcaagaaggaccagatcatgtatgagcggctgcaggagagcctgagcaggtag

SEQ ID NO: 162445 - DNA, 2004 bp, synthetic construct
  misc_feature 1..2004: note = Description of Artificial Sequence: Synthetic coding sequence
  source 1..2004: mol_type = other DNA
atgaagaggaagggcaagctgaagaacaagggcagcaagaggaagaaggaggacctgcaggaggtggatggagaaattgaggccgtgctgcagaagaaggccaaggcccggggcctggagttccagatcagcaatgtgaagtttgaagatgtgggcggcaatgacatgaccctgaaggaggtgtgcaagatgctgatccacatgaggcaccctgaggtgtaccaccacctgggcgtggtgcccccccggggcgtgctgctgcacggccccccaggctgcggcaagaccctgctggcccacgccatcgccggggctgagtgcagcggcatgatcacagcccactgcagctttgacttcagcggcagcaatgaccccccagccagcgccagccaggagctggacctgcccatcctgaaggtggccgcccctgagatcgtgtctggagtgtctggagagagcgagcagaagctgcgggagctgtttgagcaggccgtgtccaatgccccctgcatcatcttcattgatgaaattgatgccatcacccccaagcgggaggtggccagcaaggacatggagaggagaattgtggcccagctgctgacctgcatggatgacctgaacaacgtggccgccacagcccgggtgctggtgattggagccaccaacagaccagacagcctggaccctgccctgcggcgggccggccgctttgaccgggagatctgcctgggcatcccagatgaggccagccgggagcgcatcctgcagaccctgtgcaggaagctgcggctgccccaggcctttgacttctgccacctggcccacctgaccccaggctttgtgggcgctgacctgatggccctgtgccgggaggccgccatgtgtgctgtgaacagagtgctgatgaagctgcaggagcagcagaagaagaaccctgagatggaggacctgcccagcaagggcgtgcaggaggagcggctgggcacagagcccaccagcgagacccaggatgagctgcagaggctgctgggcctgctgcgggaccaggaccccctgtctgaggagcagatgcagggcctgtgcatcgagctgaatgacttcatcgtggccctgagctctgtgcagcccagcgccaagcgggagggctttgtgacagtgcccaacgtgacctgggccgacatcggggccctggaggacatccgggaggagctgaccatggccatcctggcccctgtgagaaatccagaccagttcaaggccctgggcctggtgaccccagctggggtgctgctggccggccccccaggctgcggcaagaccctgctggccaaggctgtggccaatgaaagtggcctgaacttcatctctgtgaagggccctgagctgctgaacatgtatgtgggggagagcgagagagctgtgcggcaggtgttccagagggccaagaacagcgccccctgtgtgatcttctttgatgaggtggatgccctgtgcccccggcggagtgaccgggagaccggggcctctgtgcgggtggtgaaccagctgctgacagagatggatggcctggaggcccggcagcaggtgttcatcatggccgccaccaacagaccagacatcattgatcctgccatcctgcggcccggccgcctggacaagaccctgtttgtgggcctgcccccacctgctgaccggctggccatcctgaagaccatcaccaagaatggcaccaagccacccctggatgctgatgtgaacctggaggccatcgccggggacctgcgctgtgactgctacaccggggctgacctgagcgccctggtgcgggaggccagcatctgtgccctgcggcaggagatggcccggcagaagtctggaaatgaaaaaggagagctgaaggtgagccacaagcactttgaggaggccttcaagaaggtgcgcagcagcatcagcaagaaggaccagatcatgtatgaaaggctgcaggagagcctgagcaggtag

SEQ ID NO: 162446 - DNA, 1770 bp, synthetic construct
  misc_feature 1..1770: note = Description of Artificial Sequence: Synthetic coding sequence
  source 1..1770: mol_type = other DNA
atggaggactacccagacccccagagcgccaaccacatgaacagcagcctgctgagcctgtacagaaaaggaaatccagacagcgtgagcaacaccccagagatggagcagcgggagaccaccagcagcaccccccgcatcagcagcaagacaggcagcatccccctgaagaccccagccaaggacagcgagggcggctggttcatcgacaagacccccagcgtgaagaaggacagcttcttcctggacctgagctgtgagaagagcaaccccaagaagcccatcacagagatccaggacagcaaggacagcagcctgctggagagtgacatgaagaggaagggcaagctgaagaacaagggcagcaagaggaagaaggaggacctgcaggaggtggatggagaaattgaggccgtgctgcagaagaaggccaaggcccggggcctggagttccagatcagcaatgtgaagtttgaagatgtgggcggcaatgacatgaccctgaaggaggtgtgcaagatgctgatccacatgaggcaccctgaggtgtaccaccacctgggcgtggtgcccccccggggcgtgctgctgcacggccccccaggctgcggcaagaccctgctggcccacgccatcgccggggagctggacctgcccatcctgaaggtggccgcccctgagatcgtgtctggagtgtctggagagagcgagcagaagctgcgggagctgtttgagcaggccgtgtccaatgccccctgcatcatcttcattgatgaaattgatgccatcacccccaagcgggaggtggccagcaaggacatggagcggcgcatcgtggcccagctgctgacctgcatggatgacctgaacaacgtggccgccacagcccgggtgctggtgattggagccaccaacagaccagacagcctggaccctgccctgcggcgggccggccgctttgaccgggagatctgcctgggcatcccagatgaggccagccgggagcgcatcctgcagaccctgtgcaggaagctgcggctgccccaggcctttgacttctgccacctggcccacctgaccccaggctttgtgggcgctgacctgatggccctgtgccgggaggccgccatgtgtgctgtgaacagagtgctgatgaagctgcaggagcagcagaagaagaaccctgagatggaggacctgcccagcaaaggagtgcaggaggagcggctgggcacagagcccaccagcgagacccaggatgagctgcagaggctgctgggcctgctgcgggaccaggaccccctgtctgaggagcagatgcagggcctgtgcatcgagctgaatgacttcatcgtggccctgagctctgtgcagcccagcgccaagcgggagggctttgtgacagtgcccaacgtgacctgggccgacattggagccctggaggacatccgggaggagctgaccatggccatcctggcccctgtgaggaacccagaccagttcaaggccctgggcctggtgaccccagctggggtgctgctggccggccccccaggctgtgggaagaccctgctggccaaggctgtggccaatgaaagtggcctgaacttcatctctgtgaagggccctgagctgctgaacatgtatgtgggggagagcgagagagctgtgcggcaggtgttccagagggccaagaacagcgccccctgcgtcatcttctttgatgaggtggatgccctgtgccccaggagaagtgaccgggagatctag

SEQ ID NO: 162447 - DNA, 2253 bp, synthetic construct
  misc_feature 1..2253: note = Description of Artificial Sequence: Synthetic coding sequence
  source 1..2253: mol_type = other DNA
atggaggactacccagacccccagagcgccaaccacatgaacagcagcctgctgagcctgtacagaaaaggaaatccagacagcgtgagcaacaccccagagatggagcagcgggagaccaccagcagcaccccccgcatcagcagcaagacaggcagcatccccctgaagaccccagccaaggacagcgagggcggctggttcatcgacaagacccccagcgtgaagaaggacagcttcttcctggacctgagctgtgagaagagcaaccccaagaagcccatcacagagatccaggacagcaaggacagcagcctgctggagagtgacatgaagaggaagggcaagctgaagaacaagggcagcaagaggaagaaggaggacctgcaggaggtggatggagaaattgaggccgtgctgcagaagaaggccaaggcccggggcctggagttccagatcagcaatgtgaagtttgaagatgtgggcggcaatgacatgaccctgaaggaggtgtgcaagatgctgatccacatgaggcaccctgaggtgtaccaccacctgggcgtggtgcccccccggggcgtgctgctgcacggccccccaggctgcggcaagaccctgctggcccacgccatcgccggggagctggacctgcccatcctgaaggtggccgcccctgagatcgtgtctggagtgtctggagagagcgagcagaagctgcgggagctgtttgagcaggccgtgtccaatgccccctgcatcatcttcattgatgaaattgatgccatcacccccaagcgggaggtggccagcaaggacatggagcggcgcatcgtggcccagctgctgacctgcatggatgacctgaacaacgtggccgccacagcccgggtgctggtgattggagccaccaacagaccagacagcctggaccctgccctgcggcgggccggccgctttgaccgggagatctgcctgggcatcccagatgaggccagccgggagcgcatcctgcagaccctgtgcaggaagctgcggctgccccaggcctttgacttctgccacctggcccacctgaccccaggctttgtgggcgctgacctgatggccctgtgccgggaggccgccatgtgtgctgtgaacagagtgctgatgaagctgcaggagcagcagaagaagaaccctgagatggaggacctgcccagcaaaggagtgcaggaggagcggctgggcacagagcccaccagcgagacccaggatgagctgcagaggctgctgggcctgctgcgggaccaggaccccctgtctgaggagcagatgcagggcctgtgcatcgagctgaatgacttcatcgtggccctgagctctgtgcagcccagcgccaagcgggagggctttgtgacagtgcccaacgtgacctgggccgacattggagccctggaggacatccgggaggagctgaccatggccatcctggcccctgtgaggaacccagaccagttcaaggccctgggcctggtgaccccagctggggtgctgctggccggccccccaggctgtgggaagaccctgctggccaaggctgtggccaatgaaagtggcctgaacttcatctctgtgaagggccctgagctgctgaacatgtatgtgggggagagcgagagagctgtgcggcaggtgttccagagggccaagaacagcgccccctgcgtcatcttctttgatgaggtggatgccctgtgccccaggagaagtgaccgggagactggagcctctgtgcgggtggtgaaccagctgctgacagagatggatggcctggaggcccggcagcaggtgttcatcatggccgccaccaacagaccagacatcatcgaccctgccatcctgcggcccggccgcctggacaagaccctgtttgtgggcctgcccccacctgctgaccggctggccatcctgaagaccatcaccaagaatggcaccaagccacccctggatgctgatgtgaacctggaggccatcgccggggacctgcgctgtgactgctacacaggagctgacctgagcgccctggtgcgggaggccagcatctgtgccctgcggcaggagatggcccggcagaagtctggaaatgagaagggggagctgaaggtgagccacaagcactttgaggaggccttcaagaaggtgcgcagcagcatcagcaagaaggaccagatcatgtatgagcggctgcaggagagcctgagcaggtag

SEQ ID NO: 162448 - DNA, 2298 bp, synthetic construct
  misc_feature 1..2298: note = Description of Artificial Sequence: Synthetic coding sequence
  source 1..2298: mol_type = other DNA
atgaagcccaggcctgctggctttgtggacaacaagctgaagcagagggtcatccagtacctgaccagcaacaagtgtgggaagtatgtggacatcggcgtgctggccagtgacctgcagagggtgtacagcattgattatggaagaaggaagagaaatgccttccgcatccaggtggagaaggtgttcagcatcatcagcagcgagaaggagctgaagaacctgacagagctggaggatgagcacctggccaagagggcccggcagggcgaggaggacaatgagtacacagagagctacagtgatgatgacagctccatggaggactacccagacccccaggacagcaaggacagcagcctgctggagagtgacatgaagaggaagggcaagctgaagaacaagggcagcaagaggaagaaggaggacctgcaggaggtggatggagaaattgaagctgtgctgcagaagaaggccaaggcccggggcctggagttccagatcagcaatgtgaagtttgaagatgtgggcggcaatgacatgaccctgaaggaggtgtgcaagatgctgatccacatgaggcaccctgaggtgtaccaccacctgggcgtggtgcccccccggggcgtgctgctgcacggccccccaggctgtgggaagaccctgctggcccacgccatcgccggggagctggacctgcccatcctgaaggtggccgcccctgagatcgtgtctggagtgtctggagagagcgagcagaagctgcgggagctgtttgagcaggccgtgtccaatgccccctgcatcatcttcattgatgaaattgatgccatcacccccaagcgggaggtggccagcaaggacatggagaggagaattgtggcccagctgctgacctgcatggatgacctgaacaacgtggccgccacagcccgggtgctggtgattggagccaccaacagaccagacagcctggaccctgccctgcggcgggccggccgctttgaccgggagatctgcctgggcatcccagatgaggccagccgggagcgcatcctgcagaccctgtgcaggaagctgcggctgccccaggcctttgacttctgccacctggcccacctgaccccaggctttgtgggcgctgacctgatggccctgtgccgggaggccgccatgtgtgctgtgaacagagtgctgatgaagctgcaggagcagcagaagaagaaccctgagatggaggacctgcccagcaagggcgtgcaggaggagcggctgggcacagagcccaccagcgagacccaggatgagctgcagaggctgctgggcctgctgcgggaccaggaccccctgtctgaggagcagatgcagggcctgtgcatcgagctgaatgacttcatcgtggccctgagctctgtgcagcccagcgccaagcgggagggctttgtgacagtgcccaacgtgacctgggccgacatcggggccctggaggacatccgggaggagctgaccatggccatcctggcccctgtgagaaatccagaccagttcaaggccctgggcctggtgaccccagctggggtgctgctggccggccccccaggctgcggcaagaccctgctggccaaggctgtggccaatgaaagtggcctgaacttcatctctgtgaagggccctgagctgctgaacatgtatgtgggggagagcgagagagctgtgcggcaggtgttccagagggccaagaacagcgccccctgtgtgatcttctttgatgaggtggatgccctgtgcccccggcggagtgaccgggagaccggggcctctgtgcgggtggtgaaccagctgctgacagagatggatggcctggaggcccggcagcaggtgttcatcatggccgccaccaacagaccagacatcattgatcctgccatcctgcggcccggccgcctggacaagaccctgtttgtgggcctgcccccacctgctgaccggctggccatcctgaagaccatcaccaagaatggcaccaagccacccctggatgctgatgtgaacctggaggccatcgccggggacctgcgctgtgactgctacaccggggctgacctgagcgccctggtgcgggaggccagcatctgtgccctgcggcaggagatggcccggcagaagtctggaaatgaaaaaggagagctgaaggtgagccacaagcactttgaggaggccttcaagaaggtgcgcagcagcatcagcaagaaggaccagatcatgtatgaaaggctgcaggagagcctgagcaggtag

SEQ ID NO: 162449 - DNA, 1386 bp, synthetic construct
  misc_feature 1..1386: note = Description of Artificial Sequence: Synthetic coding sequence
  source 1..1386: mol_type = other DNA
atgccacccagcggcccccggggcaccctgctgctgctgcccctgctgctgctgctgctgctgcgggctgtgctggccgtgcccctggagcggggggcccccaacaaggaggagaccccagccacagagagcccagacaccggcctgtactaccaccgctacctgcaggaggtgattgatgtgctggagacagatggccacttccgggagaagctgcaggccgccaatgctgaggacatcaagagcggcaagctgagccgggagctggactttgtgagccaccacgtgaggaccaagctggatgagctgaagaggcaggaggtgtcccggctgaggatgctgctgaaggccaagatggatgctgagcaggaccccaacgtgcaggtggaccacctgaacctgctgaagcagtttgagcacctggacccccagaaccagcacacctttgaggcccgggacctggagctgctgatccagacagccacccgggacctggcccagtatgatgctgcccaccacgaggagttcaagagatatgagatgctgaaggagcatgaaagaagacgctacctggagagcctgggggaggagcagaggaaggaggccgagaggaagctggaggagcagcagaggaggcaccgggagcaccccaaggtgaatgtgcccggcagccaggcccagctgaaggaggtgtgggaggagctggatggcctggaccccaaccgcttcaaccccaagaccttcttcatcctgcatgacatcaacagtgatggagtgctggatgagcaggagctggaggccctcttcaccaaggagctggagaaggtgtatgaccccaagaatgaagaagatgacatgagggagatggaggaggagcggctgaggatgagggagcacgtgatgaagaatgtggacaccaaccaggaccggctggtgaccctggaggagttcctggccagcacccagaggaaggagtttggagacacaggagagggctgggagaccgtggagatgcacccagcctacacagaggaggagctgcggagatttgaggaggagctggccgcccgggaggccgagctgaatgccaaggcccagaggctgagccaggagacagaggccctgggccgcagccagggccgcctggaggcccagaagcgggagctgcagcaggccgtgctgcacatggagcagaggaagcagcagcagcagcagcagcagggccacaaggccccagctgcccaccctgagggccagctgaagttccacccagacacagatgatgtgcctgtgcctgccccagctggggaccagaaggaggtggacaccagcgagaagaagctgctggagcggctgcctgaggtggaggtgccccagcacctgtag

SEQ ID NO: 162450 - DNA, 1386 bp, synthetic construct; identical to SEQ ID NO: 162449
  misc_feature 1..1386: note = Description of Artificial Sequence: Synthetic coding sequence
  source 1..1386: mol_type = other DNA

SEQ ID NO: 162451 - DNA, 1386 bp, synthetic construct; identical to SEQ ID NO: 162449
  misc_feature 1..1386: note = Description of Artificial Sequence: Synthetic coding sequence
  source 1..1386: mol_type = other DNA

SEQ ID NO: 162452 - DNA, 375 bp, synthetic construct
  misc_feature 1..375: note = Description of Artificial Sequence: Synthetic coding sequence
  source 1..375: mol_type = other DNA
atgccacccagcggcccccggggcaccctgctgctgctgcccctgctgctgctgctgctgctgcgggctgtgctggccgtgcccctggagcggggggcccccaacaaggaggagaccccagccacagagagcccagacaccggcctgtactaccaccgctacctgcaggaggtgattgatgtgctggagacagatggccacttccgggagaagctgcaggccgccaatgctgaggacatcaagagcggcaagctgagccgggagctggactttgtgagccaccacgtgaggaccaagctggatgagctgaagaggcaggaggtgtcccggctgaggatgctgctgaaggccaagatggatgctgagcaggactag

SEQ ID NO: 162453 - DNA, 336 bp, synthetic construct
  misc_feature 1..336: note = Description of Artificial Sequence: Synthetic coding sequence
  source 1..336: mol_type = other DNA
atgccacccagcggcccccggggcaccctgctgctgctgcccctgctgctgctgctgctgctgcgggctgtgctggccgtgcccctggagcggggggcccccaacaaggaggagaccccagccacagagagcccagacaccggcctgtactaccaccgctacctgcaggaggtgattgatgtgctggagacagatggccacttccgggagaagctgcaggccgccaatgctgaggacatcaagagcggcaagctgagccgggagctggactttgtgagccaccacgtgaggaccaagctggatgagctgaagaggcaggaggtgtcccggctgtag

SEQ ID NO: 162454 - DNA, 1263 bp, synthetic construct
  misc_feature 1..1263: note = Description of Artificial Sequence: Synthetic coding sequence
  source 1..1263: mol_type = other DNA
atgcgctggaggaccatcctgctgcagtactgcttcctgctgatcacctgcctgctgacagccctggaggccgtgcccattgatattgacaagaccaaggtgcagaacatccaccctgtggagagcgccaagattgagcccccagacaccggcctgtactatgatgagtacctgaagcaggtgattgatgtgctggagacagacaagcacttccgggagaagctgcagaaggctgacatcgaggagatcaagagcggccgcctgagcaaggagctggacctggtgagccaccacgtgaggaccaagctggatgagctgaagaggcaggaggtgggccgcctgaggatgctgatcaaggccaagctggacagcctgcaggacatcggcatggaccaccaggccctgctgaagcagtttgaccacctgaaccacctgaacccagacaagtttgagagcacagacctggacatgctgatcaaggccgccaccagtgacctggagcactatgacaagaccaggcatgaggagttcaagaagtatgagatgatgaaggagcacgagcggcgggagtacctgaagaccctgaatgaggagaagaggaaggaggaggagagcaagtttgaggagatgaagaagaagcatgagaaccaccccaaggtgaaccaccctggcagcaaggaccagctgaaggaggtgtgggaggagacagatggcctggaccccaatgactttgaccccaagaccttcttcaagctgcatgatgtgaacagtgatggcttcctggatgagcaggagctggaggccctcttcaccaaggagctggagaaggtgtatgaccccaagaatgaggaggatgacatggtggagatggaggaggagcggctgaggatgagggagcacgtgatgtctgaggtggacaccaacaaggaccggctggtgaccctggaggagttcctgaaggccacagagaagaaggagttcctggagccagacagctgggagaccctggaccagcagcagttcttcacagaggaggagctgaaggagtatgagaacatcatcgccctgcaggagaatgagctgaagaagaaggcagatgagctgcagaagcagaaggaggagctgcagaggcagcacgaccagctggaggcccagaagctggagtaccaccaggtgatccagcagatggagcagaagaagctgcagcagggcatcccccccagcggccctgctggggagctgaagtttgagccccgggtgtag

SEQ ID NO: 162455 - DNA, 1173 bp, synthetic construct
  misc_feature 1..1173: note = Description of Artificial Sequence: Synthetic coding sequence
  source 1..1173: mol_type = other DNA
atgcgctggaggaccatcctgctgcagtactgcttcctgctgatcacctgcctgctgacagccctggaggccgtgcccattgatattgacaagaccaaggtgcagaacatccaccctgtggagagcgccaagattgagcccccagacaccggcctgtactatgatgagtacctgaagcaggtgattgatgtgctggagacagacaagcacttccgggagaagctgcagaaggctgacatcgaggagatcaagagcggccgcctgagcaaggagctggacctggtgagccaccacgtgaggaccaagctggatgagctgaagaggcaggaggtgggccgcctgaggatgctgatcaaggccaagctggacagcctgcaggacatcggcatggaccaccaggccctgctgaagcagtttgaccacctgaaccacctgaacccagacaagtttgagagcacagacctggacatgctgatcaaggccgccaccagtgacctggagcactatgacaagaccaggcatgaggagttcaagaagtatgagatgatgaaggagcacgagcggcgggagtacctgaagaccctgaatgaggagaagaggaaggaggaggagagcaagtttgaggagatgaagaagaagcatgagaaccaccccaaggtgaaccaccctggcagcaaggaccagctgaaggaggtgtgggaggagacagatggcctggaccccaatgactttgaccccaagaccttcttcaagctgcatgatgtgaacagtgatggcttcctggatgagcaggagctggaggccctcttcaccaaggagctggagaaggtgtatgaccccaagaatgaggaggatgacatggtggagatggaggaggagcggctgaggatgagggagcacgtgatgtctgagaccctggaccagcagcagttcttcacagaggaggagctgaaggagtatgagaacatcatcgccctgcaggagaatgagctgaagaagaaggcagatgagctgcagaagcagaaggaggagctgcagaggcagcacgaccagctggaggcccagaagctggagtaccaccaggtgatccagcagatggagcagaagaagctgcagcagggcatcccccccagcggccctgctggggagctgaagtttgagccccacatctag

SEQ ID NO: 162456 - DNA, 210 bp, synthetic construct
  misc_feature 1..210: note = Description of Artificial Sequence: Synthetic coding sequence
  source 1..210: mol_type = other DNA
atgcgctggaggaccatcctgctgcagtactgcttcctgctgatcacctgcctgctgacagccctggaggccgtgcccattgatattgacaagaccaaggtgcagaacatccaccctgtggagagcgccaagattgagcccccagacaccggcctgtactatgatgagtacctgaagcaggtgattgatgtgctggagacagacaagtag

SEQ ID NO: 162457 - DNA, 105 bp, synthetic construct
  misc_feature 1..105: note = Description of Artificial Sequence: Synthetic coding sequence
  source 1..105: mol_type = other DNA
atgcgctggaggaccatcctgctgcagtactgcttcctgctgatcacctgcctgctgacagccctggaggccgtgcccattgatattgacaagaccaaggtgtag

SEQ ID NO: 162458 - DNA, 1263 bp, synthetic construct
  misc_feature 1..1263: note = Description of Artificial Sequence: Synthetic coding sequence
  source 1..1263: mol_type = other DNA
atgcgctggaggaccatcctgctgcagtactgcttcctgctgatcacctgcctgctgacagccctggaggccgtgcccattgatattgacaagaccaaggtgcagaacatccaccctgtggagagcgccaagattgagcccccagacaccggcctgtactatgatgagtacctgaagcaggtgattgatgtgctggagacagacaagcacttccgggagaagctgcagaaggctgacatcgaggagatcaagagcggccgcctgagcaaggagctggacctggtgagccaccacgtgaggaccaagctggatgagctgaagaggcaggaggtgggccgcctgaggatgctgatcaaggccaagctggacagcctgcaggacatcggcatggaccaccaggccctgctgaagcagtttgaccacctgaaccacctgaacccagacaagtttgagagcacagacctggacatgctgatcaaggccgccaccagtgacctggagcactatgacaagaccaggcatgaggagttcaagaagtatgagatgatgaaggagcacgagcggcgggagtacctgaagaccctgaatgaggagaagaggaaggaggaggagagcaagtttgaggagatgaagaagaagcatgagaaccaccccaaggtgaaccaccctggcagcaaggaccagctgaaggaggtgtgggaggagacagatggcctggaccccaatgactttgaccccaagaccttcttcaagctgcatgatgtgaacagtgatggcttcctggatgagcaggagctggaggccctcttcaccaaggagctggagaaggtgtatgaccccaagaatgaggaggatgacatggtggagatggaggaggagcggctgaggatgagggagcacgtgatgtctgaggtggacaccaacaaggaccggctggtgaccctggaggagttcctgaaggccacagagaagaaggagttcctggagccagacagctgggagaccctggaccagcagcagttcttcacagaggaggagctgaaggagtatgagaacatcatcgccctgcaggagaatgagctgaagaagaaggcagatgagctgcagaagcagaaggaggagctgcagaggcagcacgaccagctggaggcccagaagctggagtaccaccaggtgatccagcagatggagcagaagaagctgcagcagggcatcccccccagcggccctgctggggagctgaagtttgagccccacatctag

SEQ ID NO: 162459 - DNA, 588 bp, synthetic construct
  misc_feature 1..588: note = Description of Artificial Sequence: Synthetic coding sequence
  source 1..588: mol_type = other DNA
atgcgctggaggaccatcctgctgcagtactgcttcctgctgatcacctgcctgctgacagccctggaggccgtgcccattgatattgacaagaccaaggtgcagaacatccaccctgtggagagcgccaagattgagcccccagacaccggcctgtactatgatgagtacctgaagcaggtgattgatgtgctggagacagacaagcacttccgggagaagctgcagaaggctgacatcgaggagatcaagagcggccgcctgagcaaggagctggacctggtgagccaccacgtgaggaccaagctggatgagctgaagaggcaggaggtgggccgcctgaggatgctgatcaaggccaagctggacagcctgcaggacatcggcatggaccaccaggccctgctgaagcagtttgaccacctgaaccacctgaacccagacaagtttgagagcacagacctggacatgctgatcaaggccgccaccagtgacctggagcactatgacaagaccaggcatgaggagttcaagaagtatgagatgatgaaggagcacgagcggcgggagtacctgaagaccctgtag

SEQ ID NO: 162460 - DNA, 597 bp, synthetic construct
  misc_feature 1..597: note = Description of Artificial Sequence: Synthetic coding sequence
  source 1..597: mol_type = other DNA
atgcgctggaggaccatcctgctgcagtactgcttcctgctgatcacctgcctgctgacagccctggaggccgtgcccattgatattgacaagaccaaggtgcagaacatccaccctgtggagagcgccaagattgagcccccagacaccggcctgtactatgatgagtacctgaagcaggtgattgatgtgctggagacagacaagcacttccgggagaagctgcagaaggctgacatcgaggagatcaagagcggccgcctgagcaaggagctggacctggtgagccaccacgtgaggaccaagctggatgagctgaagaggcaggaggtgggccgcctgaggatgctgatcaaggccaagctggacagcctgcaggacatcggcatggaccaccaggccctgctgaagcagtttgaccacctgaaccacctgaacccagacaagtttgagagcacagacctggacatgctgatcaaggccgccaccagtgacctggagcactatgacaagaccaggcatgaggagttcaagaagtatgagatgatgaaggagcacgagcggcgggagtacctgaagaccctgaatgaggagtag

SEQ ID NO: 162461 - DNA, 105 bp, synthetic construct; identical to SEQ ID NO: 162457
  misc_feature 1..105: note = Description of Artificial Sequence: Synthetic coding sequence
  source 1..105: mol_type = other DNA

SEQ ID NO: 162462 - DNA, 120 bp, synthetic construct
  misc_feature 1..120: note = Description of Artificial Sequence: Synthetic coding sequence
  source 1..120: mol_type = other DNA
atgcgctggaggaccatcctgctgcagtactgcttcctgctgatcacctgcctgctgacagccctggaggccgtgcccattgatattgacaagaccaaggtgcagaacatccacccctag

SEQ ID NO: 162463 - DNA, 210 bp, synthetic construct; identical to SEQ ID NO: 162456
  misc_feature 1..210: note = Description of Artificial Sequence: Synthetic coding sequence
  source 1..210: mol_type = other DNA

SEQ ID NO: 162464 - DNA, 273 bp, synthetic construct
  misc_feature 1..273: note = Description of Artificial Sequence: Synthetic coding sequence
  source 1..273: mol_type = other DNA
atgcgctggaggaccatcctgctgcagtactgcttcctgctgatcacctgcctgctgacagccctggaggccgtgcccattgatattgacaagaccaaggtgcagaacatccaccctgtggagagcgccaagattgagcccccagacaccggcctgtactatgatgagtacctgaagcaggtgattgatgtgctggagacagacaagcacttccgggagaagctgcagaaggctgacatcgaggagatcaagagcggccgcctgagcaagtag

SEQ ID NO: 162465 - DNA, 1323 bp, synthetic construct
  misc_feature 1..1323: note = Description of Artificial Sequence: Synthetic coding sequence
  source 1..1323: mol_type = other DNA
atgatcatccccagcctggaggagctggacagcctgaagtacagcgacctgcagaacctggccaagagcctgggcctgcgggccaacctgcgggccaccaagctgctgaaggccctgaagggctacatcaagcatgaggccaggaaaggaaatgaaaaccaggatgagagccagaccagcgccagcagctgtgatgaaacagagatccagatcagcaaccaggaggaggccgagcggcagcccctgggccacgtgaccaagacccggcggcgctgcaagacagtgcgggtggaccctgacagccagcagaaccacagcgagatcaagatcagcaaccccacagagttccagaaccacgagaagcaggagagccaggacctgcgggccacagccaaggtgcccagccccccagatgagcaccaggaggccgagaatgctgtgagcagcggcaacagagacagcaaggtgcccagcgagggcaagaagagcctgtacacagatgagagcagcaagccaggcaagaacaagaggacagccatcaccacccccaacttcaagaagctgcacgaggcccacttcaaggagatggagagcattgaccagtacattgaaaggaagaagaagcactttgaggagcacaacagcatgaatgagctgaagcagcccatcaacaagggcggcgtgaggacccctgtgcccccccggggccgcctgtctgtggccagcacccccatcagccagaggaggagccagggccgcagctgtggccctgccagccagagcaccctgggcctgaagggcagcctgaagaggtctgccatctctgctgccaagacaggagtgcgcttctctgctgccaccaaggacaatgagcacaagaggagcctgaccaagaccccagccaggaagagcgcccacgtgacagtgtctgggggcacccccaagggggaggccgtgctgggcacccacaagctgaagaccatcactggaaacagcgctgctgtgatcacccccttcaagctgaccacagaggccacccagacccctgtgagcaacaagaagcctgtgtttgacctgaaggccagcctgagccggcccctgaactatgagccccacaagggcaagctgaagccctggggccagagcaaggagaacaactacctgaaccagcacgtgaaccgcatcaacttctacaagaagacctacaagcagccccacctgcagaccaaggaggagcagaggaagaagcgggagcaggagaggaaggagaagaaggccaaggtgctgggcatgaggcggggcctcatcctggctgaagattag

SEQ ID NO: 162466 - DNA, 1209 bp, synthetic construct
  misc_feature 1..1209: note = Description of Artificial Sequence: Synthetic coding sequence
  source 1..1209: mol_type = other DNA
atgatcatccccagcctggaggagctggacagcctgaagtacagcgacctgcagaacctggccaagagcctgggcctgcgggccaacctgcgggccaccaagctgctgaaggccctgaagggctacatcaagcatgaggccaggaaaggaaatgaaaaccaggatgagagccagaccagcgccagcagctgtgatgaaacagagatccagatcagcaaccaggaggaggccgagcggcagcccctgggccacgtgaccaagacccggcggcgctgcaagacagtgcgggtggaccctgacagccagcagaaccacagcgagatcaagatcagcaaccccacagagttccagaaccacgagaagcaggagagccaggacctgcgggccacagccaaggtgcccagccccccagatgagcaccaggaggccgagaatgctgtgagcagcggcaacagagacagcaaggtgcccagcgagggcaagaagagcctgtacacagatgagagcagcaagccaggcaagaacaagaggacagccatcaccacccccaacttcaagaagctgcacgaggcccacttcaaggagatggagagcattgaccagtacattgaaaggaagaagaagcactttgaggagcacaacagcatgaatgagctgaagcagcagcccatcaacaagggcggcgtgaggacccctgtgcccccccggggccgcctgtctgtggccagcacccccatcagccagaggaggagccagggccgcagctgtggccctgccagccagagcaccctgggcctgaagggcagcctgaagaggtctgccatctctgctgccaagacaggagtgcgcttctctgctgccaccaaggacaatgagcacaagaggagcctgaccaagaccccagccaggaagagcgcccacgtgacagtgtctgggggcacccccaagggggaggccgtgctgggcacccacaagctgaagaccatcaccggcaacagcgctgctgggaagctgaagccctggggccagagcaaggagaacaactacctgaaccagcacgtgaaccgcatcaacttctacaagaagacctacaagcagccccacctgcagaccaaggaggagcagaggaagaagcgggagcaggagaggaaggagaagaaggccaaggtgctgggcatgaggcggggcctcatcctggctgaagattag

SEQ ID NO: 162467 - DNA, 1326 bp, synthetic construct
  misc_feature 1..1326: note = Description of Artificial Sequence: Synthetic coding sequence
  source 1..1326: mol_type = other DNA
atgatcatccccagcctggaggagctggacagcctgaagtacagcgacctgcagaacctggccaagagcctgggcctgcgggccaacctgcgggccaccaagctgctgaaggccctgaagggctacatcaagcatgaggccaggaaaggaaatgaaaaccaggatgagagccagaccagcgccagcagctgtgatgaaacagagatccagatcagcaaccaggaggaggccgagcggcagcccctgggccacgtgaccaagacccggcggcgctgcaagacagtgcgggtggaccctgacagccagcagaaccacagcgagatcaagatcagcaaccccacagagttccagaaccacgagaagcaggagagccaggacctgcgggccacagccaaggtgcccagccccccagatgagcaccaggaggccgagaatgctgtgagcagcggcaacagagacagcaaggtgcccagcgagggcaagaagagcctgtacacagatgagagcagcaagccaggcaagaacaagaggacagccatcaccacccccaacttcaagaagctgcacgaggcccacttcaaggagatggagagcattgaccagtacattgaaaggaagaagaagcactttgaggagcacaacagcatgaatgagctgaagcagcagcccatcaacaagggcggcgtgaggacccctgtgcccccccggggccgcctgtctgtggccagcacccccatcagccagaggaggagccagggccgcagctgtggccctgccagccagagcaccctgggcctgaagggcagcctgaagaggtctgccatctctgctgccaagacaggagtgcgcttctctgctgccaccaaggacaatgagcacaagaggagcctgaccaagaccccagccaggaagagcgcccacgtgacagtgtctgggggcacccccaagggggaggccgtgctgggcacccacaagctgaagaccatcaccggcaacagcgctgctgtgatcacccccttcaagctgaccacagaggccacccagacccctgtgagcaacaagaagcctgtgtttgacctgaaggccagcctgagccggcccctgaactatgagccccacaagggcaagctgaagccctggggccagagcaaagaaaacaactacctgaaccagcacgtgaaccgcatcaacttctacaagaagacctacaagcagccccacctgcagaccaaggaggagcagaggaagaagcgggagcaggagaggaaggagaagaaggccaaggtgctgggcatgagaagaggcctcatcctggccgaggactag

SEQ ID NO: 162468 - DNA, 1323 bp, synthetic construct
  misc_feature 1..1323: note = Description of Artificial Sequence: Synthetic coding sequence
  source 1..1323: mol_type = other DNA
atgatcatccccagcctggaggagctggacagcctgaagtacagcgacctgcagaacctggccaagagcctgggcctgcgggccaacctgcgggccaccaagctgctgaaggccctgaagggctacatcaagcatgaggccaggaaaggaaatgaaaaccaggatgagagccagaccagcgccagcagctgtgatgaaacagagatccagatcagcaaccaggaggaggccgagcggcagcccctgggccacgtgaccaagacccggcggcgctgcaagacagtgcgggtggaccctgacagccagaaccacagcgagatcaagatcagcaaccccacagagttccagaaccacgagaagcaggagagccaggacctgcgggccacagccaaggtgcccagccccccagatgagcaccaggaggctgaaaatgctgtgagcagcggcaacagagacagcaaggtgcccagcgagggcaagaagagcctgtacacagatgagagcagcaagccaggcaagaacaagaggacagccatcaccacccccaacttcaagaagctgcacgaggcccacttcaaggagatggagagcattgaccagtacatcgagaggaagaagaagcactttgaggagcacaacagcatgaatgagctgaagcagcagcccatcaacaagggcggcgtgaggacccctgtgcccccccggggccgcctgtctgtggccagcacccccatcagccagaggaggagccagggccgcagctgtggccctgccagccagagcaccctgggcctgaagggcagcctgaagaggtctgccatctctgctgccaagacaggagtgcgcttctctgctgccaccaaggacaatgagcacaagaggagcctgaccaagaccccagccaggaagagcgcccacgtgacagtgtctgggggcacccccaagggggaggccgtgctgggcacccacaagctgaagaccatcactggaaacagcgctgctgtgatcacccccttcaagctgaccacagaggccacccagacccctgtgagcaacaagaagcctgtgtttgacctgaaggccagcctgagccggcccctgaactatgagccccacaagggcaagctgaagccctggggccagagcaaggagaacaactacctgaaccagcacgtgaaccgcatcaacttctacaagaagacctacaagcagccccacctgcagaccaaggaggagcagaggaagaagcgggagcaggagaggaaggagaagaaggccaaggtgctgggcatgaggcggggcctcatcctggctgaagattag

SEQ ID NO: 162469 - DNA, 1320 bp, synthetic construct
  misc_feature 1..1320: note = Description of Artificial Sequence: Synthetic coding sequence
  source 1..1320: mol_type = other DNA
atgatcatccccagcctggaggagctggacagcctgaagtacagcgacctgcagaacctggccaagagcctgggcctgcgggccaacctgcgggccaccaagctgctgaaggccctgaagggctacatcaagcatgaggccaggaaaggaaatgaaaaccaggatgagagccagaccagcgccagcagctgtgatgaaacagagatccagatcagcaaccaggaggaggccgagcggcagcccctgggccacgtgaccaagacccggcggcgctgcaagacagtgcgggtggaccctgacagccagaaccacagcgagatcaagatcagcaaccccacagagttccagaaccacgagaagcaggagagccaggacctgcgggccacagccaaggtgcccagccccccagatgagcaccaggaggctgaaaatgctgtgagcagcggcaacagagacagcaaggtgcccagcgagggcaagaagagcctgtacacagatgagagcagcaagccaggcaagaacaagaggacagccatcaccacccccaacttcaagaagctgcacgaggcccacttcaaggagatggagagcattgaccagtacatcgagaggaagaagaagcactttgaggagcacaacagcatgaatgagctgaagcagcccatcaacaagggcggcgtgaggacccctgtgcccccccggggccgcctgtctgtggccagcacccccatcagccagaggaggagccagggccgcagctgtggccctgccagccagagcaccctgggcctgaagggcagcctgaagaggtctgccatctctgctgccaagacaggagtgcgcttctctgctgccaccaaggacaatgagcacaagaggagcctgaccaagaccccagccaggaagagcgcccacgtgacagtgtctgggggcacccccaagggggaggccgtgctgggcacccacaagctgaagaccatcaccggcaacagcgctgctgtgatcacccccttcaagctgaccacagaggccacccagacccctgtgagcaacaagaagcctgtgtttgacctgaaggccagcctgagccggcccctgaactatgagccccacaagggcaagctgaagccctggggccagagcaaagaaaacaactacctgaaccagcacgtgaaccgcatcaacttctacaagaagacctacaagcagccccacctgcagaccaaggaggagcagaggaagaagcgggagcaggagaggaaggagaagaaggccaaggtgctgggcatgagaagaggcctcatcctggccgaggactag

SEQ ID NO: 162470 - DNA, 1281 bp, synthetic construct
  misc_feature 1..1281: note = Description of Artificial Sequence: Synthetic coding sequence
  source 1..1281: mol_type = other DNA
atgatcatccccagcctggaggagctggacagcctgaagtacagcgacctgcagaacctggccaagagcctgggcctgcgggccaacctgcgggccaccaagctgctgaaggccctgaagggctacatcaagcatgaggccaggaaaggaaatgaaaaccaggatgagagccagaccagcgccagcagctgtgatgaaacagagatccagatcagcaaccaggaggaggccgagcggcagcccctgggccacgtgaccaagacccggcggcgctgcaagacagtgcgggtggaccctgacagccagaaccacgagaagcaggagagccaggacctgcgggccacagccaaggtgcccagccccccagatgagcaccaggaggctgaaaatgctgtgagcagcggcaacagagacagcaaggtgcccagcgagggcaagaagagcctgtacacagatgagagcagcaagccaggcaagaacaagaggacagccatcaccacccccaacttcaagaagctgcacgaggcccacttcaaggagatggagagcattgaccagtacatcgagaggaagaagaagcactttgaggagcacaacagcatgaatgagctgaagcagcagcccatcaacaagggcggcgtgaggacccctgtgcccccccggggccgcctgtctgtggccagcacccccatcagccagaggaggagccagggccgcagctgtggccctgccagccagagcaccctgggcctgaagggcagcctgaagaggtctgccatctctgctgccaagacaggagtgcgcttctctgctgccaccaaggacaatgagcacaagaggagcctgaccaagaccccagccaggaagagcgcccacgtgacagtgtctgggggcacccccaagggggaggccgtgctgggcacccacaagctgaagaccatcactggaaacagcgctgctgtgatcacccccttcaagctgaccacagaggccacccagacccctgtgagcaacaagaagcctgtgtttgacctgaaggccagcctgagccggcccctgaactatgagccccacaagggcaagctgaagccctggggccagagcaaggagaacaactacctgaaccagcacgtgaaccgcatcaacttctacaagaagacctacaagcagccccacctgcagaccaaggaggagcagaggaagaagcgggagcaggagaggaaggagaagaaggccaaggtgctgggcatgaggcggggcctcatcctggctgaagattag

SEQ ID NO: 162471 - DNA, 2250 bp, synthetic construct
  misc_feature 1..2250: note = Description of Artificial Sequence: Synthetic coding sequence
  source 1..2250: mol_type = other DNA
atggctgctgctggcagcaggaagaggcggctggccgagctgactgtggatgagttcctggccagcggctttgacagcgagagcgagagcgagagcgagaacagcccccaggccgagacccgggaggcccgggaggccgcccggagcccagacaagccaggcggcagccccagcgccagcaggaggaagggccgggccagcgagcacaaggaccagctgagccggctgaaggaccgggaccctgagttctacaagttcctgcaggagaatgaccagagcctgctgaacttcagtgacagcgacagcagcgaggaggaggagggccccttccacagcctgcctgatgtgctggaggaggccagcgaggaggaggatggagctgaggagggagaagatggagacagagtgccccggggcctgaagggcaagaagaacagcgtgcctgtgacagtggccatggtggagcgctggaagcaggccgccaagcagaggctgacccccaagctgttccacgaggtggtgcaggccttccgggctgctgtggccaccaccaggggggaccaggagagcgctgaggccaacaagttccaggtgacagattctgctgccttcaatgccctggtgaccttctgcatccgggacctgattggctgcctgcagaagctgctgtttgggaaggtggccaaggacagcagcaggatgctgcagcccagcagcagccccctgtggggcaagctgcgggtggacatcaaggcctacctgggcagcgccatccagctggtgtcctgcctgtctgagaccaccgtgctggccgctgtgctgcggcacatctctgtgctggtgccctgcttcctgaccttccccaagcagtgcaggatgctgctgaagaggatggtgattgtgtggagcactggagaggagagcctgcgggtgctggccttcctggtgctgagccgggtgtgccgccacaagaaggacaccttcctgggccctgtgctgaagcagatgtacatcacctacgtgaggaactgcaagttcaccagccctggggccctgcccttcatctccttcatgcagtggaccctgacagagctgctggccctggagcccggggtggcctaccagcacgccttcctgtacatccggcagctggccatccacctgagaaatgccatgaccaccaggaagaaggagacctaccagagcgtgtacaactggcagtatgtgcactgcctcttcctgtggtgccgggtgctgagcacagctggccccagcgaggccctgcagcccctggtgtaccccctggcccaggtgatcatcggctgcatcaagctgatccccacagcccgcttctaccccctgaggatgcactgcatccgggccctgaccctgctgagcggcagcagcggggccttcatccctgtgctgcccttcatcctggagatgttccagcaggtggacttcaacaggaagccaggccgcatgagcagcaagcccatcaacttcagcgtcatcctgaagctgagcaatgtgaacctgcaggagaaggcctacagagatggcctggtggagcagctgtatgacctgaccctggagtacctgcacagccaggcccactgcatcggcttccctgagctggtgctgcctgtggtgctgcagctgaagagcttcctgcgggagtgcaaggtggccaactactgccggcaggtgcagcagctgctgggcaaggtgcaggagaacagcgcctacatctgcagccggcggcagagggtgtcctttggagtgtctgagcagcaggccgtggaggcctgggagaagctgacccgggaggagggcacccccctgaccctgtactacagccactggaggaagctgcgggaccgggagatccagctggagatcagcggcaaggagcggctggaggacctgaacttccctgagatcaagaggaggaagatggctgacaggaaggatgaggacaggaagcagttcaaggacctgtttgacctgaacagcagtgaagaagatgacacagagggcttcagcgagcggggcatcctgcggcccctgagcaccaggcatggagtggaggatgatgaagaagatgaggaggagggggaggaggacagcagcaacagtgaagatggagaccctgatgctgaggccggcctggcccctggagagctgcagcagctggcccagggcccagaagatgagctggaggacctgcagctgtctgaagatgactag

SEQ ID NO: 162472 - DNA, 2403 bp, synthetic construct
  misc_feature 1..2403: note = Description of Artificial Sequence: Synthetic coding sequence
  source 1..2403: mol_type = other DNA
atgaagttcagaagaaacaagaagcagatccccagcttcaggaagctgatcaagaccagcaaggtgaagctggagaacaagctgaagaacaagcagttcaagcagcagagcaccctgaagaagtacaggaaggagcagaggaagctgcggcaggccgtgaaggatgctgtgtccaagaagcccatccccctggagaaccccaaggagaagaggcctgggaagagaattgaaagagaggaggaggaggaggaggaggccctgcccctggacatgatggatgaagatgacctgcagctgatgaaggacctgggccagagggtgtccttcctgacccgggacctgagcagcagcgagcctgtgcacgccaagaagaggaagcatgagcgcatcatcgacaagtatgagaagatccccaggaccctgcagacagcccctgagaaggagctgatccacctgctgcccatcaaggacaagagcggcatcatcccccagacccgggagaagcctgtgacagacagcaacaaggatgaggaggaccaggaggaggagcgggagctggaggaggagatcatcgaggaccccatccaggagctgaccatcgaggagcacctgattgaaaggaagaagaagctgcaggagaagaagatgcacatcgccgccctggccagcgccatcctgagtgaccctgagaacaacatcaagaagctgaaggagctgcgctccatgctgatggagcaggaccctgatgtggccgtgacagtgaggaagctggtgattgtgtccctgatggagctgttcaaggacatcacccccagctacaagatccggcccctgacagaagctgagaagagcaccaagaccaggaaggagacccagaagctgcgggagtttgaggagggcctggtgtcccagtacaagttctacctggagaacctggagcagatggtgaaggactggaagcagaggaagctgaagaagagcaatgtggtgtccctgaaggcctacaagggcctggccgaggtggccgtgaagagcctgtgtgagctgctggtggccctgccccacttcaacttccacaacaacatcatcgtgctgattgtgcccctgatgaatgacatgagcaagctgatcagcgagatgtgctgtgaggccgtgaagaagctgttcaagcaggacaagctgggccaggccagcctgggcgtcatcaaggtgatcagcggctttgtgaagggcaggaactatgaggtgcggcctgagatgctgaagaccttcctgtgcctgcgcatcaaggaggtggaggtgaagaaggacacagaggacatcaacaagcccaagaagttcatgaccttcaaggagaagaggaagagcctgagcaggatgcagaggaagtggaagaaggccgaggagaagctggagcgggagctgcgggaggccgaggccagcgagagcacagagaagaagctgaagctgcacacagagaccctgaacatcgtgtttgtgacctacttccgcatcctgaagaaggcccagaggagccccctgctgcctgctgtgctggagggcctggccaagtttgcccacctgatcaacgtggagttctttgatgacctgctggtggtgctgcacaccctgattgaaagtggggacctgagctaccaggagagcctgcactgtgtgcagacagccttccacatcctgagcggccagggagatgtgctgaacatcgaccccctgaagttctacacccacctgtacaagaccctcttcaagctgcatgctggggccaccaatgaaggagtggagatcgtgctgcagtgcctggatgtgatgctgaccaagaggaggaagcaggtgtcccagcagagggccctggccttcatcaagaggctgtgcaccctggccctgcacgtgctgcccaacagcagcatcggcatcctggccaccacccgcatcctgatgcacaccttccccaagacagacctgctgctggacagcgagagccagggcagcggggtcttcctgcctgagctggatgagcctgagtactgcaatgcccagaacacagccctgtgggagctgcacgccctgcggcggcactaccaccccatcgtgcagagatttgctgcccacctgattgctggggcccccagcgagggcagcggggccctgaagccagagctgagcagaagaagtgccacagagctgtttgaggcctacagcatggccgagatgaccttcaacccccctgtggagagcagcaaccccaagatcaagggcaagttcctgcagggcgacagcttcctgaatgaagacctgaaccagctgatcaagcgctacagcagcgaggtggccacagagagccccctggacttcaccaagtacctgaagaccagcctgcactag

SEQ ID NO: 162473 - DNA, 2403 bp, synthetic construct
  misc_feature 1..2403: note = Description of Artificial Sequence: Synthetic coding sequence
  source 1..2403: mol_type = other DNA
atgaaggcccggaggaacaagaagcagatccccagcttcaggaagctgatcaagaccagcaaggtgaagctggagaacaagctgaagaacaagcagttcaagcagcagagcaccctgaagaagtacaggaaggagcagaggaagctgcggcaggccgtgaaggatgctgtgtccaagaagcccatccccctggagaaccccaaggagaagaggcctgggaagagaattgaaagagaggaggaggaggaggaggaggccctgcccctggacatgatggatgaagatgacctgcagctgatgaaggacctgggccagagggtgtccttcctgacccgggacctgagcagcagcgagcctgtgcacgccaagaagaggaagcatgagcgcatcatcgacaagtatgagaagatccccaggaccctgcagacagcccctgagaaggagctgatccacctgctgcccatcaaggacaagagcggcatcatcccccagacccgggagaagcctgtgacagacagcaacaaggatgaggaggaccaggaggaggagcgggagctggaggaggagatcatcgaggaccccatccaggagctgaccatcgaggagcacctgattgaaaggaagaagaagctgcaggagaagaagatgcacatcgccgccctggccagcgccatcctgagtgaccctgagaacaacatcaagaagctgaaggagctgcgctccatgctgatggagcaggaccctgatgtggccgtgacagtgaggaagctggtgattgtgtccctgatggagctgttcaaggacatcacccccagctacaagatccggcccctgacagaagctgagaagagcaccaagaccaggaaggagacccagaagctgcgggagtttgaggagggcctggtgtcccagtacaagttctacctggagaacctggagcagatggtgaaggactggaagcagaggaagctgaagaagagcaatgtggtgtccctgaaggcctacaagggcctggccgaggtggccgtgaagagcctgtgtgagctgctggtggccctgccccacttcaacttccacaacaacatcatcgtgctgattgtgcccctgatgaatgacatgagcaagctgatcagcgagatgtgctgtgaggccgtgaagaagctgttcaagcaggacaagctgggccaggccagcctgggcgtcatcaaggtgatcagcggctttgtgaagggcaggaactatgaggtgcggcctgagatgctgaagaccttcctgtgcctgcgcatcaaggaggtggaggtgaagaaggacacagaggacatcaacaagcccaagaagttcatgaccttcaaggagaagaggaagagcctgagcaggatgcagaggaagtggaagaaggccgaggagaagctggagcgggagctgcgggaggccgaggccagcgagagcacagagaagaagctgaagctgcacacagagaccctgaacatcgtgtttgtgacctacttccgcatcctgaagaaggcccagaggagccccctgctgcctgctgtgctggagggcctggccaagtttgcccacctgatcaacgtggagttctttgatgacctgctggtggtgctgcacaccctgattgaaagtggggacctgagctaccaggagagcctgcactgtgtgcagacagccttccacatcctgagcggccagggagatgtgctgaacatcgaccccctgaagttctacacccacctgtacaagaccctcttcaagctgcatgctggggccaccaatgaaggagtggagatcgtgctgcagtgcctggatgtgatgctgaccaagaggaggaagcaggtgtcccagcagagggccctggccttcatcaagaggctgtgcaccctggccctgcacgtgctgcccaacagcagcatcggcatcctggccaccacccgcatcctgatgcacaccttccccaagacagacctgctgctggacagcgagagccagggcagcggggtcttcctgcctgagctggatgagcctgagtactgcaatgcccagaacacagccctgtgggagctgcacgccctgcggcggcactaccaccccatcgtgcagagatttgctgcccacctgattgctggggcccccagcgagggcagcggggccctgaagccagagctgagcagaagaagtgccacagagctgtttgaggcctacagcatggccgagatgaccttcaacccccctgtggagagcagcaaccccaagatcaagggcaagttcctgcagggcgacagcttcctgaatgaagacctgaaccagctgatcaagcgctacagcagcgaggtggccacagagagccccctggacttcaccaagtacctgaagaccagcctgcactag

SEQ ID NO: 162474 - DNA, 1506 bp, synthetic construct
  misc_feature 1..1506: note = Description of Artificial Sequence: Synthetic coding sequence
  source 1..1506: mol_type = other DNA
atggagctgttcaaggacatcacccccagctacaagatccggcccctgacagaagctgagaagagcaccaagaccaggaaggagacccagaagctgcgggagtttgaggagggcctggtgtcccagtacaagttctacctggagaacctggagcagatggtgaaggactggaagcagaggaagctgaagaagagcaatgtggtgtccctgaaggcctacaagggcctggccgaggtggccgtgaagagcctgtgtgagctgctggtggccctgccccacttcaacttccacaacaacatcatcgtgctgattgtgcccctgatgaatgacatgagcaagctgatcagcgagatgtgctgtgaggccgtgaagaagctgttcaagcaggacaagctgggccaggccagcctgggcgtcatcaaggtgatcagcggctttgtgaagggcaggaactatgaggtgcggcctgagatgctgaagaccttcctgtgcctgcgcatcaaggaggtggaggtgaagaaggacacagaggacatcaacaagcccaagaagttcatgaccttcaaggagaagaggaagagcctgagcaggatgcagaggaagtggaagaaggccgaggagaagctggagcgggagctgcgggaggccgaggccagcgagagcacagagaagaagctgaagctgcacacagagaccctgaacatcgtgtttgtgacctacttccgcatcctgaagaaggcccagaggagccccctgctgcctgctgtgctggagggcctggccaagtttgcccacctgatcaacgtggagttctttgatgacctgctggtggtgctgcacaccctgattgaaagtggggacctgagctaccaggagagcctgcactgtgtgcagacagccttccacatcctgagcggccagggagatgtgctgaacatcgaccccctgaagttctacacccacctgtacaagaccctcttcaagctgcatgctggggccaccaatgaaggagtggagatcgtgctgcagtgcctggatgtgatgctgaccaagaggaggaagcaggtgtcccagcagagggccctggccttcatcaagaggctgtgcaccctggccctgcacgtgctgcccaacagcagcatcggcatcctggccaccacccgcatcctgatgcacaccttccccaagacagacctgctgctggacagcgagagccagggcagcggggtcttcctgcctgagctggatgagcctgagtactgcaatgcccagaacacagccctgtgggagctgcacgccctgcggcggcactaccaccccatcgtgcagagatttgctgcccacctgattgctggggcccccagcgagggcagcggggccctgaagccagagctgagcagaagaagtgccacagagctgtttgaggcctacagcatggccgagatgaccttcaacccccctgtggagagcagcaaccccaagatcaaggtgaccaccaagggctag

SEQ ID NO: 162475 - DNA, 1551 bp, synthetic construct
  misc_feature 1..1551: note = Description of Artificial Sequence: Synthetic coding sequence
  source 1..1551: mol_type = other DNA
atggagcgggagcctggagctgctggggtgagaagagccctgggccggcggctggaggccgtgctggccagccgctctgaggccaatgctgtgtttgacatcctggccgtgctgcagagcgaggaccaggaggagatccaggaggccgtgaggacctgcagccggctgtttggagccctgctggagcggggggagctgtttgtgggccagctgcccagcgaggagatggtgatgacaggcagccagggcgccaccaggaagtacaaggtgtggatgaggcaccgctaccacagctgctgcaaccggctgggggagctgctgggccaccccagcttccaggtgaaggagctggccctgagcgccctgctgaagtttgtgcagctggagggcgcccaccccctggagaagagcaagtgggagggcaactacctgttcccccgggagctgttcaagctggtggtgggcggcctgctgagccctgaggaggaccagagcctgctgctgagccagttccgggagtacctggactatgatgacacccgctaccacaccatgcaggccgctgtggatgctgtggcccgggtgacaggccagcaccctgaggtgcccccagccttctggaacaatgccttcaccctgctgtctgctgtgtccctgccccggcgggagcccaccgtgagcagcttctacgtgaagagagctgagctgtgggacacctggaaggtggcccacctgaaggagcacagaagagtcttccaggccatgtggctgtccttcctgaagcacaagctgcccctgagcctgtacaagaaggtgctgctgattgtgcatgatgccatcctgccccagctggcccagcccaccctgatgattgacttcctgacccgggcctgtgacctgggcggggccctgagcctgctggccctgaatggcctcttcatcctgatccacaagcacaacctggagtacccagacttctacaggaagctgtatggcctgctggaccccagcgtcttccacgtgaagtaccgggcccgcttcttccacctggccgacctcttcctgagcagcagccacctgcctgcctacctggtggccgcctttgccaagaggctggcccggctggccctgacagcccctcctgaggccctgctgatggtgctgcccttcatctgcaacctgctgcggcggcacccagcctgccgggtgctggtgcaccggccccacggccctgagctggatgctgacccctatgaccccggggaggaggaccctgcccagagccgggccctggagagcagcctgtgggagctgcaggccctgcagaggcactaccaccctgaggtgtccaaggccgccagcgtcatcaaccaggccctgtccatgcctgaggtgtccatcgcccccctgctggagctgacagcctatgagatctttgagcgggacctgaagaagaagggccctgagcctgtgcccctggagttcatcccagcccagggcctgctgggccggcctggagagctgtgtgcccagcacttcaccctgtcctag

SEQ ID NO: 162476 - DNA, 252 bp, synthetic construct
  misc_feature 1..252: note = Description of Artificial Sequence: Synthetic coding sequence
  source 1..252: mol_type = other DNA
tgaccagaggagctgacctttgccagcgcccaggccgaggcccgggaggaggagaggagagtgcgggagaccgtgcggcgggacaagaccctgctgaaggagaagaggaagaggcgggaggagctgttcatcgagcagaagaagaggaagctgctgcctgacaccatcctggagaagctgaccacagccagccagaccaacatcaagaagagccctgggaaggtgaaggagggcatgaccatcctgatctag

SEQ ID NO: 162477 - DNA, 774 bp, synthetic construct
  misc_feature 1..774: note = Description of Artificial Sequence: Synthetic coding sequence
  source 1..774: mol_type = other DNA
atggtgcagctgcggccccgggccagccgggccccagccagcgctgaggccatggtggatgagggccagctggccagcgaggaggaggaggccgagcacggcctgctgctgggccagcccagcagcggggctgctgctgagcccctggaggaggatgaggagggagatgatgaatttgatgatgaggcccctgaggagctgacctttgccagcgcccaggccgaggcccgggaggaggagaggagagtgcgggagaccgtgcggcgggacaagaccctgctgaaggagaagaggaagaggcgggaggagctgttcatcgagcagaagaagaggaagctgctgcctgacaccatcctggagaagctgaccacagccagccagaccaacatcaagaagagccctgggaaggtgaaggaggtgaacctgcagaagaagaatgaagactgtgagaagggaaatgacagcaagaaggtgaaggtgcagaaggtgcagagcgtgtcccagaacaagagctacctggccgtgcggctgaaggaccaggacctgcgggacagccggcagcaggccgcccaggccttcatccacaacagcctgtatggccctggcaccaacagaaccaccgtgaacaagttcctgagcctggccaacaagaggctgcctgtgaagagagctgctgtgcagttcctgaacaatgcctggggcatccagaagaagcagaatgccaagcgcttcaagaggcgctggatggtgaggaagatgaagaccaagaagtag

SEQ ID NO: 162478 - DNA, 3300 bp, synthetic construct
  misc_feature 1..3300: note = Description of Artificial Sequence: Synthetic coding sequence
  source 1..3300: mol_type = other DNA
atgtctgtgctgaacaagaccaagtggaagggcggcaccctgcagatccagctggccaaggagagcttcctgcaccggctggcccaggagcgggaggccgccaaggccaagaaggaggagagcaccactggaaatgccaacctgctggagaagacaggaggagtggacttccacatgaaggctgtgcctggaacagaggtgcccggccacaagaactgggtggtgtccaagtttggccgggtgctgcctgtgctgcacctgaagaaccagcacaagaggaagatcatcaagtatgaccccagcaagtactgccacaacctgaagaagatcggggaggacttcagcaacaccatccccatcagcagcctgacctgggagctggagggcggcaatgaccccatgagcaagaagagaagaggagagttcagtgacttccacggcccccccaagaagatcatcaaggtgcagaaggatgagagcagcacaggcagcctggccatgagcacccggccccggcgggtgattgagcggccccccctgacccagcagcaggccgcccagaagaggacctgtgacagcatcacccccagcaagagcagccctgtgcctgtgtctgacacccagaagctgaagaacctgcccttcaagaccagcggcctggagacagccaagaagaggaacagcatcagtgatgatgacacagacagtgaagatgagctgaggatgatgattgccaaggaggagaacctgcagaggaccacccagcccagcatcaatgaaagtgaaagtgacccctttgaggtggtgagagatgacttcaagtctggagtgcacaagctgcacagcctcatcggcctgggcatcaagaacagagtgtcctgccacgacagtgatgatgacatcatgagaaatgaccgggagtatgacagcggggacacagatgagatcatcgccatgaagaagaatgtggccaaggtgaagaacagcacagagttcagccagatggagaagagcaccaagaagaccagcttcaagaaccgggagaactgtgagctgagtgaccactgcatcaagctgcagaagaggaagagcaatgtggagagcgccctgagccacggcctgaagagcctgaacaggaagagccccagccacagcagcagcagtgaagatgctgacagcgccagcgagctggccgacagcgagggcggggaggagtacaatgccatgatgaagaactgcctgcgggtgaacctgaccctggccgacctggagcagctggccggcagtgacctgaaggtgcccaatgaagacaccaagagtgatggccctgagaccaccacccagtgcaagtttgaccggggcagcaagagccccaagacccccaccggcctgcggcggggccggcagtgcatccggcctgctgagatcgtggccagcctgctggagggggaggagaacacctgtgggaagcagaagcccaaggagaacaacctgaagcccaagttccaggccttcaagggcgtgggctgcctgtatgagaaggagagcatgaagaagagcctgaaggacagcgtggccagcaacaacaaggaccagaacagcatgaagcatgaggaccccagcatcatctccatggaggatggcagcccctacgtgaatggcagcctgggggaggtgaccccctgccagcacgccaagaaggccaacggccccaactacatccagccccagaagaggcagaccacctttgagagccaggacaggaaggctgtgagccccagcagcagcgagaagaggagcaagaaccccatcagccggcccctggagggcaagaagagcctgagcctgagcgccaagacccacaacattggatttgacaaggacagctgccacagcaccaccaagacagaggccagccaggaggagaggagtgacagcagcggcctgaccagcctgaagaagagccccaaggtgagcagcaaggacacccgggagatcaagacagacttcagcctgagcatcagcaacagcagtgatgtgtctgccaaggacaagcatgctgaggacaatgagaagaggctggccgccctggaggcccggcagaaggccaaggaggtgcagaagaagctggtgcacaatgccctggccaacctggatggccaccctgaggacaagcccacccacatcatctttggaagtgacagtgaatgtgaaacagaggagaccagcacccaggagcagagccaccctggagaggagtgggtgaaggagagcatgggcaagaccagcggcaagctgtttgacagcagtgatgatgatgaaagtgacagtgaagatgacagcaaccgcttcaagatcaagccccagtttgagggccgggccggccagaagctgatggacctgcagagccactttggaacagatgaccgcttcaggatggacagccgcttcctggagacagacagcgaggaggagcaggaggaggtgaatgagaagaagacagctgaggaggaggagctggccgaggagaagaagaaggccctgaatgtggtgcagagcgtgctgcagatcaacctgagcaacagcaccaacagaggctctgtggccgccaagaagttcaaggacatcatccactatgaccccaccaagcaggaccacgccacctatgaaaggaagagagatgacaagcccaaggagagcaaggccaagaggaagaagaagcgggaggaggccgagaagctgcctgaggtgtccaaggagatgtactacaacatcgccatggacctgaaggagatcttccagaccaccaagtacaccagcgagaaggaggagggcaccccctggaatgaagactgtgggaaggagaagccagaggagatccaggaccctgctgccctgaccagtgatgctgagcagcccagcggcttcaccttctccttctttgacagcgacaccaaggacatcaaggaggagacctacagagtggagaccgtgaagccaggcaagatcgtgtggcaggaggacccccggctgcaggacagcagcagcgaggaggaggatgtgacagaggagacagaccacaggaacagcagccctggagaggccagcctgctggagaaggagaccacccgcttcttcttcttcagcaagaatgatgagcggctgcagggcagtgacctcttctggaggggcgtgggcagcaacatgagcagaaattcctgggaggcccggaccaccaacctgaggatggactgcaggaagaagcacaaggatgccaagaggaagatgaagcccaagtag

SEQ ID NO: 162479 - DNA, 3396 bp, synthetic construct
  misc_feature 1..3396: note = Description of Artificial Sequence: Synthetic coding sequence
  source 1..3396: mol_type = other DNA
atgaaggtgaaccgggagaccaagaggctgtatgtgggcggcctgagccaggacatcagcgaggccgacctgcagaaccagttcagcagatttggagaggtgtctgatgtggagatcatcaccaggaaggatgaccagggcaacccccagaaggtgtttgcctacatcaacatctctgtggccgaggccgacctgaagaagtgcatgtctgtgctgaacaagaccaagtggaagggcggcaccctgcagatccagctggccaaggagagcttcctgcaccggctggcccaggagcgggaggccgccaaggccaagaaggaggagagcaccactggaaatgccaacctgctggagaagacaggaggagtggacttccacatgaaggctgtgcctggaacagaggtgcccggccacaagaactgggtggtgtccaagtttggccgggtgctgcctgtgctgcacctgaagaaccagcacaagcacctgaggaacatcatcaagtatgaccccagcaagtactgccacaacctgaagaagatcggggaggacttcagcaacaccatccccatcagcagcctgacctgggagctggagggcggcaatgaccccatgagcaagaagagaagaggagagttcagtgacttccacggcccccccaagaagatcatcaaggtgcagaaggatgagagcagcacaggcagcctggccatgagcacccggccccggcgggtgattgagcggccccccctgacccagcagcaggccgcccagaagaggacctgtgacagcatcacccccagcaagagcagccctgtgcctgtgtctgacacccagaagctgaagaacctgcccttcaagaccagcggcctggagacagccaagaagaggaacagcatcagtgatgatgacacagacagtgaagatgagctgaggatgatgattgccaaggaggagaacctgcagaggaccacccagcccagcatcaatgaaagtgaaagtgacccctttgaggtggtgagagatgacttcaagtctggagtgcacaagctgcacagcctcatcggcctgggcatcaagaacagagtgtcctgccacgacagtgatgatgacatcatgagaaatgaccgggagtatgacagcggggacacagatgagatcatcgccatgaagaagaatgtggccaaggtgaagaacagcacagagttcagccagatggagaagagcaccaagaagaccagcttcaagaaccgggagaactgtgagctgagtgaccactgcatcaagctgcagaagaggaagagcaatgtggagagcgccctgagccacggcctgaagagcctgaacaggaagagccccagccacagcagcagcagtgaagatgctgacagcgccagcgagctggccgacagcgagggcggggaggagtacaatgccatgatgaagaactgcctgcgggtgaacctgaccctggccgacctggagcagctggccggcagtgacctgaaggtgcccaatgaagacaccaagagtgatggccctgagaccaccacccagtgcaagtttgaccggggcagcaagagccccaagacccccaccggcctgcggcggggccggcagtgcatccggcctgctgagatcgtggccagcctgctggagggggaggagaacacctgtgggaagcagaagcccaaggagaacaacctgaagcccaagttccaggccttcaagggcgtgggctgcctgtatgagaaggagagcatgaagaagagcctgaaggacagcgtggccagcaacaacaaggaccagaacagcatgaagcatgaggaccccagcatcatctccatggaggatggcagcccctacgtgaatggcagcctgggggaggtgaccccctgccagcacgccaagaaggccaacggccccaactacatccagccccagaagaggcagaccacctttgagagccaggacaggaaggctgtgagccccagcagcagcgagaagaggagcaagaaccccatcagccggcccctggagggcaagaagagcctgagcctgagcgccaagacccacaacattggatttgacaaggacagctgccacagcaccaccaagacagaggccagccaggaggagaggagtgacagcagcggcctgaccagcctgaagaagagccccaaggtgagcagcaaggacacccgggagatcaagacagacttcagcctgagcatcagcaacagcagtgatgtgtctgccaaggacaagcatgctgaggacaatgagaagaggctggccgccctggaggcccggcagaaggccaaggaggtgcagaagaagctggtgcacaatgccctggccaacctggagagcatgggcaagaccagcggcaagctgtttgacagcagtgatgatgatgaaagtgacagtgaagatgacagcaaccgcttcaagatcaagccccagtttgagggccgggccggccagaagctgatggacctgcagagccactttggaacagatgaccgcttcaggatggacagccgcttcctggagacagacagcgaggaggagcaggaggaggtgaatgagaagaagacagctgaggaggaggagctggccgaggagaagaagaaggccctgaatgtggtgcagagcgtgctgcagatcaacctgagcaacagcaccaacagaggctctgtggccgccaagaagttcaaggacatcatccactatgaccccaccaagcaggaccacgccacctatgaaaggaagagagatgacaagcccaaggagagcaaggccaagaggaagaagaagcgggaggaggccgagaagctgcctgaggtgtccaaggagatgtactacaacatcgccatggacctgaaggagatcttccagaccaccaagtacaccagcgagaaggaggagggcaccccctggaatgaagactgtgggaaggagaagccagaggagatccaggaccctgctgccctgaccagtgatgctgagcagcccagcggcttcaccttctccttctttgacagcgacaccaaggacatcaaggaggagacctacagagtggagaccgtgaagccaggcaagatcgtgtggcaggaggacccccggctgcaggacagcagcagcgaggaggaggatgtgacagaggagacagaccacaggaacagcagccctggagaggccagcctgctggagaaggagaccacccgcttcttcttcttcagcaagaatgatgagcggctgcagggcagtgacctcttctggaggggcgtgggcagcaacatgagcagaaattcctgggaggcccggaccaccaacctgaggatggactgcaggaagaagcacaaggatgccaagaggaagatgaagcccaagtag

SEQ ID NO: 162480 - DNA, 777 bp, synthetic construct
  misc_feature 1..777: note = Description of Artificial Sequence: Synthetic coding sequence
  source 1..777: mol_type = other DNA
atgaaggtgaaccgggagaccaagaggctgtatgtgggcggcctgagccaggacatcagcgaggccgacctgcagaaccagttcagcagatttggagaggtgtctgatgtggagatcatcaccaggaaggatgaccagggcaacccccagaaggtgtttgcctacatcaacatctctgtggccgaggccgacctgaagaagtgcatgtctgtgctgaacaagaccaagtggaagggcggcaccctgcagatccagctggccaaggagagcttcctgcaccggctggcccaggagcgggaggccgccaaggccaagaaggaggagagcaccactggaaatgccaacctgctggagaagacaggaggagtggacttccacatgaaggctgtgcctggaacagaggtgcccggccacaagaactgggtggtgtccaagtttggccgggtgctgcctgtgctgcacctgaagaaccagcacaagaggaagatcatcaagtatgaccccagcaagtactgccacaacctgaagaagatcggggaggacttcagcaacaccatccccatcagcagcctgacctgggagctggagggcggcaatgaccccatgagcaagaagagaagaggagagttcagtgacttccacggcccccccaagaagatcatcaaggtgcagaaggatgagagcagcacaggcagcctggccatgagcacccggccccggcgggtgattgagcggccccccctgacccagcagcaggccgcccagaagaggacatag

SEQ ID NO: 162481 - DNA, 2913 bp, synthetic construct
  misc_feature 1..2913: note = Description of Artificial Sequence: Synthetic coding sequence
  source 1..2913: mol_type = other DNA
atgaaggtgaaccgggagaccaagaggctgtatgtgggcggcctgagccaggacatcagcgaggccgacctgcagaaccagttcagcagatttggagaggtgtctgatgtggagatcatcaccaggaaggatgaccagggcaacccccagaaggtgtttgcctacatcaacatctctgtggccgaggccgacctgaagaagtgcatgtctgtgctgaacaagaccaagtggaagggcggcaccctgcagatccagctggccaaggagagcttcctgcaccggctggcccaggagcgggaggccgccaaggccaagaaggaggagagcaccactggaaatgccaacctgctggagaagacaggaggagtggacttccacatgaaggctgtgcctggaacagaggtgcccggccacaagaactgggtggtgtccaagtttggccgggtgctgcctgtgctgcacctgaagaaccagcacaagaggaagatcatcaagtatgaccccagcaagtactgccacaacctgaagaagatcggggaggacttcagcaacaccatccccatcagcagcctgacctgggagctggagggcggcaatgaccccatgagcaagaagagaagaggagagttcagtgacttccacggcccccccaagaagatcatcaaggtgcagaaggatgagagcagcacaggcagcctggccatgagcacccggccccggcgggtgattgagcggccccccctgacccagcagcaggccgcccagaagaggacctgtgacagcatcacccccagcaagagcagccctgtgcctgtgtctgacacccagaagctgaagaacctgcccttcaagaccagcggcctggagacagccaagaagaggaacagcatcagtgatgatgacacagacagtgaagatgagctgaggatgatgattgccaaggaggagaacctgcagaggaccacccagcccagcatcaatgaaagtgaaagtgacccctttgaggtggtgagagatgacttcaagtctggagtgcacaagctgcacagcctcatcggcctgggcatcaagaacagagtgtcctgccacgacagtgatgatgacatcatgagaaatgaccgggagtatgacagcggggacacagatgagatcatcgccatgaagaagaatgtggccaaggtgaagaacagcacagagttcagccagatggagaagagcaccaagaagaccagcttcaagaaccgggagaactgtgagctgagtgaccactgcatcaagctgcagaagaggaagagcaatgtggagagcgccctgagccacggcctgaagagcctgaacaggaagagccccagccacagcagcagcagtgaagatgctgacagcgccagcgagctggccgacagcgagggcggggaggagtacaatgccatgatgaagaactgcctgcgggtgaacctgaccctggccgacctggagcagctggccggcagtgacctgaaggtgcccaatgaagacaccaagagtgatggccctgagaccaccacccagtgcaagtttgaccggggcagcaagagccccaagacccccaccggcctgcggcggggccggcagtgcatccggcctgctgagatcgtggccagcctgctggagggggaggagaacacctgtgggaagcagaagcccaaggagaacaacctgaagcccaagttccaggccttcaagggcgtgggctgcctgtatgagaaggagagcatgaagaagagcctgaaggacagcgtggccagcaacaacaaggaccagaacagcatgaagcatgaggaccccagcatcatctccatggaggatggcagcccctacgtgaatggcagcctgggggaggtgaccccctgccagcacgccaagaaggccaacggccccaactacatccagccccagaagaggcagaccacctttgagagccaggacaggaaggctgtgagccccagcagcagcgagaagaggagcaagaaccccatcagccggcccctggagggcaagaagagcctgagcctgagcgccaagacccacaacattggatttgacaaggacagctgccacagcaccaccaagacagaggccagccaggaggagaggagtgacagcagcggcctgaccagcctgaagaagagccccaaggtgagcagcaaggacacccgggagatcaagacagacttcagcctgagcatcagcaacagcagtgatgtgtctgccaaggacaagcatgctgaggacaatgagaagaggctggccgccctggaggcccggcagaaggccaaggaggtgcagaagaagctggtgcacaatgccctggccaacctggatggccaccctgaggacaagcccacccacatcatctttggaagtgacagtgaatgtgaaacagaggagaccagcacccaggagcagagccaccctggagaggagtgggtgaaggagagcatgggcaagaccagcggcaagctgtttgacagcagtgatgatgatgaaagtgacagtgaagatgacagcaaccgcttcaagatcaagccccagtttgagggccgggccggccagaagctgatggacctgcagagccactttggaacagatgaccgcttcaggatggacagccgcttcctggagacagacagcgaggaggagcaggaggaggtgaatgagaagaagacagctgaggaggaggagctggccgaggagaagaagaaggccctgaatgtggtgcagagcgtgctgcagatcaacctgagcaacagcaccaacagaggctctgtggccgccaagaagttcaaggacatcatccactatgaccccaccaagcaggaccacgccacctatgaaaggaagagagatgacaagcccaaggagagcaaggcctag

SEQ ID NO: 162482 - DNA, 1242 bp, synthetic construct
  misc_feature 1..1242: note = Description of Artificial Sequence: Synthetic coding sequence
  source 1..1242: mol_type = other DNA
atgaaggtgaaccgggagaccaagaggctgtatgtgggcggcctgagccaggacatcagcgaggccgacctgcagaaccagttcagcagatttggagaggtgtctgatgtggagatcatcaccaggaaggatgaccagggcaacccccagaaggtgtttgcctacatcaacatctctgtggccgaggccgacctgaagaagtgcatgtctgtgctgaacaagaccaagtggaagggcggcaccctgcagatccagctggccaaggagagcttcctgcaccggctggcccaggagcgggaggccgccaaggccaagaaggaggagagcaccactggaaatgccaacctgctggagaagacaggaggagtggacttccacatgaaggctgtgcctggaacagaggtgcccggccacaagaactgggtggtgtccaagtttggccgggtgctgcctgtgctgcacctgaagaaccagcacaagaggaagatcatcaagtatgaccccagcaagtactgccacaacctgaagaagatcggggaggacttcagcaacaccatccccatcagcagcctgacctgggagctggagggcggcaatgaccccatgagcaagaagagaagaggagagttcagtgacttccacggcccccccaagaagatcatcaaggtgcagaaggatgagagcagcacaggcagcctggccatgagcacccggccccggcgggtgattgagcggccccccctgacccagcagcaggccgcccagaagaggacctgtgacagcatcacccccagcaagagcagccctgtgcctgtgtctgacacccagaagctgaagaacctgcccttcaagaccagcggcctggagacagccaagaagaggaacagcatcagtgatgatgacacagacagtgaagatgagctgaggatgatgattgccaaggaggagaacctgcagaggaccacccagcccagcatcaatgaaagtgaaagtgacccctttgaggtggtgagagatgacttcaagtctggagtgcacaagctgcacagcctcatcggcctgggcatcaagaacagagtgtcctgccacgacagtgatgatgacatcatgagaaatgaccgggagtatgacagcggggacacagatgagatcatcgccatgaagaagaatgtggccaaggtgaagaacagcacagagttcagccagatggagaagagcaccaagaagaccagcttcaagtag

SEQ ID NO: 162483 - DNA, 3504 bp, synthetic construct
  misc_feature 1..3504: note = Description of Artificial Sequence: Synthetic coding sequence
  source 1..3504: mol_type = other DNA
atgaaggtgaaccgggagaccaagaggctgtatgtgggcggcctgagccaggacatcagcgaggccgacctgcagaaccagttcagcagatttggagaggtgtctgatgtggagatcatcaccaggaaggatgaccagggcaacccccagaaggtgtttgcctacatcaacatctctgtggccgaggccgacctgaagaagtgcatgtctgtgctgaacaagaccaagtggaagggcggcaccctgcagatccagctggccaaggagagcttcctgcaccggctggcccaggagcgggaggccgccaaggccaagaaggaggagagcaccactggaaatgccaacctgctggagaagacaggaggagtggacttccacatgaaggctgtgcctggaacagaggtgcccggccacaagaactgggtggtgtccaagtttggccgggtgctgcctgtgctgcacctgaagaaccagcacaagaggaagatcatcaagtatgaccccagcaagtactgccacaacctgaagaagatcggggaggacttcagcaacaccatccccatcagcagcctgacctgggagctggagggcggcaatgaccccatgagcaagaagagaagaggagagttcagtgacttccacggcccccccaagaagatcatcaaggtgcagaaggatgagagcagcacaggcagcctggccatgagcacccggccccggcgggtgattgagcggccccccctgacccagcagcaggccgcccagaagaggacctgtgacagcatcacccccagcaagagcagccctgtgcctgtgtctgacacccagaagctgaagaacctgcccttcaagaccagcggcctggagacagccaagaagaggaacagcatcagtgatgatgacacagacagtgaagatgagctgaggatgatgattgccaaggaggagaacctgcagaggaccacccagcccagcatcaatgaaagtgaaagtgacccctttgaggtggtgagagatgacttcaagtctggagtgcacaagctgcacagcctcatcggcctgggcatcaagaacagagtgtcctgccacgacagtgatgatgacatcatgagaaatgaccgggagtatgacagcggggacacagatgagatcatcgccatgaagaagaatgtggccaaggtgaagaacagcacagagttcagccagatggagaagagcaccaagaagaccagcttcaagaaccgggagaactgtgagctgagtgaccactgcatcaagctgcagaagaggaagagcaatgtggagagcgccctgagccacggcctgaagagcctgaacaggaagagccccagccacagcagcagcagtgaagatgctgacagcgccagcgagctggccgacagcgagggcggggaggagtacaatgccatgatgaagaactgcctgcgggtgaacctgaccctggccgacctggagcagctggccggcagtgacctgaaggtgcccaatgaagacaccaagagtgatggccctgagaccaccacccagtgcaagtttgaccggggcagcaagagccccaagacccccaccggcctgcggcggggccggcagtgcatccggcctgctgagatcgtggccagcctgctggagggggaggagaacacctgtgggaagcagaagcccaaggagaacaacctgaagcccaagttccaggccttcaagggcgtgggctgcctgtatgagaaggagagcatgaagaagagcctgaaggacagcgtggccagcaacaacaaggaccagaacagcatgaagcatgaggaccccagcatcatctccatggaggatggcagcccctacgtgaatggcagcctgggggaggtgaccccctgccagcacgccaagaaggccaacggccccaactacatccagccccagaagaggcagaccacctttgagagccaggacaggaaggctgtgagccccagcagcagcgagaagaggagcaagaaccccatcagccggcccctggagggcaagaagagcctgagcctgagcgccaagacccacaacattggatttgacaaggacagctgccacagcaccaccaagacagaggccagccaggaggagaggagtgacagcagcggcctgaccagcctgaagaagagccccaaggtgagcagcaaggacacccgggagatcaagacagacttcagcctgagcatcagcaacagcagtgatgtgtctgccaaggacaagcatgctgaggacaatgagaagaggctggccgccctggaggcccggcagaaggccaaggaggtgcagaagaagctggtgcacaatgccctggccaacctggatggccaccctgaggacaagcccacccacatcatctttggaagtgacagtgaatgtgaaacagaggagaccagcacccaggagcagagccaccctggagaggagtgggtgaaggagagcatgggcaagaccagcggcaagctgtttgacagcagtgatgatgatgaaagtgacagtgaagatgacagcaaccgcttcaagatcaagccccagtttgagggccgggccggccagaagctgatggacctgcagagccactttggaacagatgaccgcttcaggatggacagccgcttcctggagacagacagcgaggaggagcaggaggaggtgaatgagaagaagacagctgaggaggaggagctggccgaggagaagaagaaggccctgaatgtggtgcagagcgtgctgcagatcaacctgagcaacagcaccaacagaggctctgtggccgccaagaagttcaaggacatcatccactatgaccccaccaagcaggaccacgccacctatgaaaggaagagagatgacaagcccaaggagagcaaggccaagaggaagaagaagcgggaggaggccgagaagctgcctgaggtgtccaaggagatgtactacaacatcgccatggacctgaaggagatcttccagaccaccaagtacaccagcgagaaggaggagggcaccccctggaatgaagactgtgggaaggagaagccagaggagatccaggaccctgctgccctgaccagtgatgctgagcagcccagcggcttcaccttctccttctttgacagcgacaccaaggacatcaaggaggagacctacagagtggagaccgtgaagccaggcaagatcgtgtggcaggaggacccccggctgcaggacagcagcagcgaggaggaggatgtgacagaggagacagaccacaggaacagcagccctggagaggccagcctgctggagaaggagaccacccgcttcttcttcttcagcaagaatgatgagcggctgcagggcagtgacctcttctggaggggcgtgggcagcaacatgagcagaaattcctgggaggcccggaccaccaacctgaggatggactgcaggaagaagcacaaggatgccaagaggaagatgaagcccaagtag

SEQ ID NO: 162484 - DNA, 438 bp, synthetic construct
  misc_feature 1..438: note = Description of Artificial Sequence: Synthetic coding sequence
  source 1..438: mol_type = other DNA
atgaaggtgaaccgggagaccaagaggctgtatgtgggcggcctgagccaggacatcagcgaggccgacctgcagaaccagttcagcagatttggagaggtgtctgatgtggagatcatcaccaggaaggatgaccagggcaacccccagaaggtgtttgcctacatcaacatctctgtggccgaggccgacctgaagaagtgcatgtctgtgctgaacaagaccaagtggaagggcggcaccctgcagatccagctggccaaggagagcttcctgcaccggctggcccaggagcgggaggccgccaaggccaagaaggaggagagcaccactggaaatgccaacctgctggagaagacaggaggagtggacttccacatgaaggctgtgcctggaacagaggtgcccggccacaagaactgggtggtgtccaagtag

SEQ ID NO: 162485 - DNA, 3504 bp, synthetic construct; identical to SEQ ID NO: 162483
  misc_feature 1..3504: note = Description of Artificial Sequence: Synthetic coding sequence
  source 1..3504: mol_type = other DNA

SEQ ID NO: 162486 - DNA, 261 bp, synthetic construct
  misc_feature 1..261: note = Description of Artificial Sequence: Synthetic coding sequence
  source 1..261: mol_type = other DNA
atgaaggtgaaccgggagaccaagaggctgtatgtgggcggcctgagccaggacatcagcgaggccgacctgcagaaccagttcagcagatttggagaggtgtctgatgtggagatcatcaccaggaaggatgaccagggcaacccccagaaggtgtttgcctacatcaacatctctgtggccgaggccgacctgaagaagagcatcttccacgtgatccagagggacagcagtgatgaggagaacagcagcatcgtgtag

SEQ ID NO: 162487 - DNA, 3441 bp, synthetic construct
  misc_feature 1..3441: note = Description of Artificial Sequence: Synthetic coding sequence
  source 1..3441: mol_type = other DNA
atgggccctgccccagctggggagcagctgcggggggccaccggggagcctgaggtgatggagcccgccctggagggcaccgggaaggagggcaagaaggccagcagcaggaagaggaccctggccgagcccccagccaagggcctgctgcagcctgtgaagctgagcagagctgagctgtacaaggagcccaccaatgaggagctgaaccggctgcgggagacagagatcctcttccacagcagcctgctgcggctgcaggtggaggagctgctgaaggaggtgcggctgtctgagaagaagaaggacagaattgatgccttcctgcgggaggtgaaccagagggtggtgcgggtgcccagcgtgcctgagacagagctgacagaccaggcctggctgcctgctggggtgcgggtgcccctgcaccaggtgccctatgctgtgaagggctgcttccgcttcctgcccccagcccaggtgacagtggtgggcagctacctgctgggcacctgcatccggccagacatcaacgtggatgtggccctgaccatgccccgggagatcctgcaggacaaggatggcctgaaccagcgctacttcaggaagagggccctgtacctggcccacctggcccaccacctggcccaggaccccctgtttggatctgtgtgcttctcctacaccaacggctgccacctgaagcccagcctgctgctgcggccccggggcaaggatgagcggctggtgacagtgcggctgcacccctgccccccaccagacttcttccggccctgccgcctgctgcccaccaagaacaacgtgcgcagcgcctggtaccggggccagagccctgctggagatggcagccctgagccccccaccccccgctacaacacctgggtgctgcaggacacagtgctggagagccacctgcagctgctgagcaccatcctgagcagcgcccagggcctgaaggatggagtggccctgctgaaggtgtggctgcggcagcgggagctggacaagggccagggcggcttcaccggcttcctggtgtccatgctggtggtgttcctggtgtccaccaggaagatccacaccaccatgagcggctaccaggtgctgcggtctgtgctgcagttcctggccaccacagacctgactgtgaatggcatcagcctgtgcctgagcagtgaccccagcctgcctgccctggccgacttccaccaggccttctctgtggtgttcctggacagcagcggccacctgaacctgtgtgctgatgtgacagccagcacctaccaccaggtgcagcacgaggcccggctgtccatgatgctgctggacagcagagcagatgatggcttccacctgctgctgatgacccccaagcccatgatccgggcctttgaccacgtgctgcacctgcggcccctgagccggctgcaggccgcctgccaccggctgaagctgtggccagagctgcaggacaatggaggagactatgtgtctgctgccctgggccccctgaccaccctgctggagcagggcctgggcgcccggctgaacctgctggcccacagccggccccctgtgcctgagtgggacatcagccaggacccccccaagcacaaggacagcggcaccctgaccctgggcctgctgctgcggcctgagggcctgacctctgtgctggagctgggccctgaggccgaccagcctgaggccgccaagttccggcagttctggggcagccgctctgagctgcggcgcttccaggatggagccatccgggaggccgtggtgtgggaggccgcctccatgagccagaagaggctcatcccccaccaggtggtgacccacctgctggccctgcatgctgacatccctgagacctgtgtgcactacgtgggcggccccctggatgccctgatccagggcctgaaggagaccagcagcactggagaggaggccctggtggccgctgtgcgctgctatgatgacctgagccggctgctgtggggcctggagggcctgcccctgactgtgtctgctgtgcagggcgcccaccctgtgctgcgctacacagaggtgttcccccccacccctgtgcggcctgccttctccttctatgagaccctgcgggagaggagcagcctgctgccccggctggacaagccctgcccagcctacgtggagcccatgacagtggtgtgccacctggagggcagcggccagtggccccaggatgctgaggccgtgcagagggtgcgggccgccttccagctgcggctggccgagctgctgacccagcagcacggcctgcagtgccgggccacagccacccacacagatgtgctgaaggatggctttgtgttccgcatccgggtggcctaccagcgggagccccagatcctgaaggaggtgcagagccctgagggcatgatcagcctgcgggacacagctgccagcctgcggctggagcgggacacccggcagctgcccctgctgaccagcgccctgcacggcctgcagcagcagcacccagccttcagcggcgtggcccggctggccaagcgctgggtgcgggcccagctgctgggggagggctttgctgatgagagcctggacctggtggccgccgccctcttcctgcaccctgagcccttcaccccacccagcagcccccaggtgggcttcctgcgcttcctgttcctggtgtccacctttgactggaagaacaaccccctgtttgtgaacctgaacaatgagctgactgtggaggagcaggtggagatccgcagcggcttcctggccgcccgggcccagctgcctgtgatggtgattgtgaccccccaggacaggaagaacagcgtgtggacccaggacggccccagcgcccagatcctgcagcagctggtggtgctggccgctgaggccctgcccatgctggagaagcagctgatggacccccggggccctggggacatcagaacagtgttccggccccccctggacatctatgatgtgctgatccggctgagccccaggcacatccccaggcaccggcaggccgtggacagccctgctgccagcttctgccggggcctgctgagccagcccggccccagcagcctgatgcctgtgctgggctatgaccccccccagctgtacctgacccagctgcgggaggccttcggggacctggccctcttcttctatgaccagcacggcggggaggtgattggagtgctgtggaagcccaccagcttccagccccagcccttcaaggccagcagcaccaagggccgcatggtgatgagccggggcggggagctggtgatggtgcccaacgtggaggccatcctggaggactttgctgtgctgggggagggcctggtgcagacagtggaggcccggtctgagcgctggacagtgtag

SEQ ID NO: 162488 - DNA, 3024 bp, synthetic construct
  misc_feature 1..3024: note = Description of Artificial Sequence: Synthetic coding sequence
  source 1..3024: mol_type = other DNA
atgggccctgccccagctggggagcagctgcggggggccaccggggagcctgaggtgatggagcccgccctggagggcaccgggaaggagggcaagaaggccagcagcaggaagaggaccctggccgagcccccagccaagggcctgctgcagcctgtgaagctgagcagagctgagctgtacaaggagcccaccaatgaggagctgaaccggctgcgggagacagagatcctcttccacagcagcctgctgcggctgcaggtggaggagctgctgaaggaggtgcggctgtctgagaagaagaaggacagaattgatgccttcctgcgggaggtgaaccagagggtggtgcgggtgcccagcgtgcctgagacagagctgacagaccaggcctggctgcctgctggggtgcgggtgcccctgcaccaggtgccctatgctgtgaagggctgcttccgcttcctgcccccagcccaggtgacagtggtgggcagctacctgctgggcacctgcatccggccagacatcaacgtggatgtggccctgaccatgccccgggagatcctgcaggacaaggatggcctgaaccagcgctacttcaggaagagggccctgtacctggcccacctggcccaccacctggcccaggaccccctgtttggatctgtgtgcttctcctacaccaacggctgccacctgaagcccagcctgctgctgcggccccggggcaaggatgagcggctggtgacagtgcggctgcacccctgccccccaccagacttcttccggccctgccgcctgctgcccaccaagaacaacgtgcgcagcgcctggtaccggggccagagccctgctggagatggcagccctgagccccccaccccccgctacaacacctgggtgctgcaggacacagtgctggagagccacctgcagctgctgagcaccatcctgagcagcgcccagggcctgaaggatggagtggccctgctgaaggtgtggctgcggcagcgggagctggacaagggccagggcggcttcaccggcttcctggtgtccatgctggtggtgttcctggtgtccaccaggaagatccacaccaccatgagcggctaccaggtgctgcggtctgtgctgcagttcctggccaccacagacctgactgtgaatggcatcagcctgtgcctgagcagtgaccccagcctgcctgccctggccgacttccaccaggccttctctgtggtgttcctggacagcagcggccacctgaacctgtgtgctgatgtgacagccagcacctaccaccaggtgcagcacgaggcccggctgtccatgatgctgctggacagcagagcagatgatggcttccacctgctgctgatgacccccaagcccatgatccgggcctttgaccacgtgctgcacctgcggcccctgagccggctgcaggccgcctgccaccggctgaagctgtggccagagctgcaggacaatggaggagactatgtgtctgctgccctgggccccctgaccaccctgctggagcagggcctgggcgcccggctgaacctgctggcccacagccggccccctgtgcctgagtgggacatcagccaggacccccccaagcacaaggacagcggcaccctgaccctgggcctgctgctgcggcctgagggcctgacctctgtgctggagctgggccctgaggccgaccagcctgaggccgccaagttccggcagttctggggcagccgctctgagctgcggcgcttccaggatggagccatccgggaggccgtggtgtgggaggccgcctccatgagccagaagaggctcatcccccaccaggtggtgacccacctgctggccctgcatgctgacatccctgagacctgtgtgcactacgtgggcggccccctggatgccctgatccagggcctgaaggagaccagcagcactggagaggaggccctggtggccgctgtgcgctgctatgatgacctgagccggctgctgtggggcctggagggcctgcccctgactgtgtctgctgtgcagggcgcccaccctgtgctgcgctacacagaggtgttcccccccacccctgtgcggcctgccttctccttctatgagaccctgcgggagaggagcagcctgctgccccggctggacaagccctgcccagcctacgtggagcccatgacagtggtgtgccacctggagggcagcggccagtggccccaggatgctgaggccgtgcagagggtgcgggccgccttccagctgcggctggccgagctgctgacccagcagcacggcctgcagtgccgggccacagccacccacacagatgtgctgaaggatggctttgtgttccgcatccgggtggcctaccagcgggagccccagatcctgaaggaggtgcagagccctgagggcatgatcagcctgcgggacacagctgccagcctgcggctggagcgggacacccggcagctgcccctgctgaccagcgccctgcacggcctgcagcagcagcacccagccttcagcggcgtggcccggctggccaagcgctgggtgcgggcccagctgctgggggagggctttgctgatgagagcctggacctggtggccgccgccctcttcctgcaccctgagcccttcaccccacccagcagcccccaggtgggcttcctgcgcttcctgttcctggtgtccacctttgactggaagaacaaccccctgtttgtgaacctgaacaatgagctgactgtggaggagcaggtggagatccgcagcggcttcctggccgcccgggcccagctgcctgtgatggtgattgtgaccccccaggacaggaagaacagcgtgtggacccaggacggccccagcgcccagatcctgcagcagctggtggtgctggccgctgaggccctgcccatgctggagaagcagctgatggacccccggggccctggggacatccgctgggaccctgccaagatgtggcccttctag

SEQ ID NO: 162489 - DNA, 2100 bp, synthetic construct
  misc_feature 1..2100: note = Description of Artificial Sequence: Synthetic coding sequence
  source 1..2100: mol_type = other DNA
atgggccctgccccagctggggagcagctgcggggggccaccggggagcctgaggtgatggagcccgccctggagggcaccgggaaggagggcaagaaggccagcagcaggaagaggaccctggccgagcccccagccaagggcctgctgcagcctgtgaagctgagcagagctgagctgtacaaggagcccaccaatgaggagctgaaccggctgcgggagacagagatcctcttccacagcagcctgctgcggctgcaggtggaggagctgctgaaggaggtgcggctgtctgagaagaagaaggacagaattgatgccttcctgcgggaggtgaaccagagggtggtgcgggtgcccagcgtgcctgagacagagctgacagaccaggcctggctgcctgctggggtgcgggtgcccctgcaccaggtgccctatgctgtgaagggctgcttccgcttcctgcccccagcccaggtgacagtggtgggcagctacctgctgggcacctgcatccggccagacatcaacgtggatgtggccctgaccatgccccgggagatcctgcaggacaaggatggcctgaaccagcgctacttcaggaagagggccctgtacctggcccacctggcccaccacctggcccaggaccccctgtttggatctgtgtgcttctcctacaccaacggctgccacctgaagcccagcctgctgctgcggccccggggcaaggatgagcggctggtgacagtgcggctgcacccctgccccccaccagacttcttccggccctgccgcctgctgcccaccaagaacaacgtgcgcagcgcctggtaccggggccagagccctgctggagatggcagccctgagccccccaccccccgctacaacacctgggtgctgcaggacacagtgctggagagccacctgcagctgctgagcaccatcctgagcagcgcccagggcctgaaggatggagtggccctgctgaaggtgtggctgcggcagcgggagctggacaagggccagggcggcttcaccggcttcctggtgtccatgctggtggtgttcctggtgtccaccaggaagatccacaccaccatgagcggctaccaggtgctgcggtctgtgctgcagttcctggccaccacagacctgactgtgaatggcatcagcctgtgcctgagcagtgaccccagcctgcctgccctggccgacttccaccaggccttctctgtggtgttcctggacagcagcggccacctgaacctgtgtgctgatgtgacagccagcacctaccaccaggtgcagcacgaggcccggctgtccatgatgctgctggacagcagagcagatgatggcttccacctgctgctgatgacccccaagcccatgatccgggcctttgaccacgtgctgcacctgcggcccctgagccggctgcaggccgcctgccaccggctgaagctgtggccagagctgcaggacaatggaggagactatgtgtctgctgccctgggccccctgaccaccctgctggagcagggcctgggcgcccggctgaacctgctggcccacagccggccccctgtgcctgagtgggacatcagccaggacccccccaagcacaaggacagcggcaccctgaccctgggcctgctgctgcggcctgagggcctgacctctgtgctggagctgggccctgaggccgaccagcctgaggccgccaagttccggcagttctggggcagccgctctgagctgcggcgcttccaggatggagccatccgggaggccgtggtgtgggaggccgcctccatgagccagaagaggctcatcccccaccaggtggtgacccacctgctggccctgcatgctgacatccctgagacctgtgtgcactacgtgggcggccccctggatgccctgatccagggcctgaaggaggccagcagcaccaagggccgcatggtgatgagcagaggaggagagctggtgatggtgcccaacgtggaggccatcctggaggactttgctgtgctgggggagggcctggtgcagacagtggaggcccggtctgagcgctggacagtgtag

SEQ ID NO: 162490 - DNA, 603 bp, synthetic construct
  misc_feature 1..603: note = Description of Artificial Sequence: Synthetic coding sequence
  source 1..603: mol_type = other DNA
atggtgattgtgaccccccaggacaggaagaacagcgtgtggacccaggacggccccagcgcccagatcctgcagcagctggtggtgctggccgctgaggccctgcccatgctggagaagcagctgatggacccccggggccctggggacatcagaacagtgttccggccccccctggacatctatgatgtgctgatccggctgagccccaggcacatccccaggcaccggcaggccgtggacagccctgctgccagcttctgccggggcctgctgagccagcccggccccagcagcctgatgcctgtgctgggctatgaccccccccagctgtacctgacccagctgcgggaggccttcggggacctggccctcttcttctatgaccagcacggcggggaggtgattggagtgctgtggaagcccaccagcttccagccccagcccttcaaggccagcagcaccaagggccgcatggtgatgagccggggcggggagctggtgatggtgcccaacgtggaggccatcctggaggactttgctgtgctgggggagggcctggtgcagacagtggaggcccggtctgagcgctggacagtgtag

SEQ ID NO: 162491 - DNA, 3072 bp, synthetic construct
  misc_feature 1..3072: note = Description of Artificial Sequence: Synthetic coding sequence
  source 1..3072: mol_type = other DNA
atgggccctgccccagctggggagcagctgcggggggccaccggggagcctgaggtgatggagcccgccctggagggcaccgggaaggagggcaagaaggccagcagcaggaagaggaccctggccgagcccccagccaagggcctgctgcagcctgtgaagctgagcagagctgagctgtacaaggagcccaccaatgaggagctgaaccggctgcgggagacagagatcctcttccacagcagcctgctgcggctgcaggtggaggagctgctgaaggaggtgcggctgtctgagaagaagaaggacagaattgatgccttcctgcgggaggtgaaccagagggtggtgcgggtgcccagcgtgcctgagacagagctgacagaccaggcctggctgcctgctggggtgcgggtgcccctgcaccaggtgccctatgctgtgaagggctgcttccgcttcctgcccccagcccaggtgacagtggtgggcagctacctgctgggcacctgcatccggccagacatcaacgtggatgtggccctgaccatgccccgggagatcctgcaggacaaggatggcctgaaccagcgctacttcaggaagagggccctgtacctggcccacctggcccaccacctggcccaggaccccctgtttggatctgtgtgcttctcctacaccaacggctgccacctgaagcccagcctgctgctgcggccccggggcaaggatgagcggctggtgacagtgcggctgcacccctgccccccaccagacttcttccggccctgccgcctgctgcccaccaagaacaacgtgcgcagcgcctggtaccggggccagagccctgctggagatggcagccctgagccccccaccccccgctacaacacctgggtgctgcaggacacagtgctggagagccacctgcagctgctgagcaccatcctgagcagcgcccagggcctgaaggatggagtggccctgctgaaggtgtggctgcggcagcgggagctggacaagggccagggcggcttcaccggcttcctggtgtccatgctggtggtgttcctggtgtccaccaggaagatccacaccaccatgagcggctaccaggtgctgcggtctgtgctgcagttcctggccaccacagacctgactgtgaatggcatcagcctgtgcctgagcagtgaccccagcctgcctgccctggccgacttccaccaggccttctctgtggtgttcctggacagcagcggccacctgaacctgtgtgctgatgtgacagccagcacctaccaccaggtgcagcacgaggcccggctgtccatgatgctgctggacagcagagcagatgatggcttccacctgctgctgatgacccccaagcccatgatccgggcctttgaccacgtgctgcacctgcggcccctgagccggctgcaggccgcctgccaccggctgaagctgtggccagagctgcaggacaatggaggagactatgtgtctgctgccctgggccccctgaccaccctgctggagcagggcctgggcgcccggctgaacctgctggcccacagccggccccctgtgcctgagtgggacatcagccaggacccccccaagcacaaggacagcggcaccctgaccctgggcctgctgctgcggcctgagggcctgacctctgtgctggagctgggccctgaggccgaccagcctgaggccgccaagttccggcagttctggggcagccgctctgagctgcggcgcttccaggatggagccatccgggaggccgtggtgtgggaggccgcctccatgagccagaagaggctcatcccccaccaggtggtgacccacctgctggccctgcatgctgacatccctgagacctgtgtgcactacgtgggcggccccctggatgccctgatccagggcctgaaggagaccagcagcactggagaggaggccctggtggccgctgtgcgctgctatgatgacctgagccggctgctgtggggcctggagggcctgcccctgactgtgtctgctgtgcagggcgcccaccctgtgctgcgctacacagaggtgttcccccccacccctgtgcggcctgccttctccttctatgagaccctgcgggagaggagcagcctgctgccccggctggacaagccctgcccagcctacgtggagcccatgacagtggtgtgccacctggagggcagcggccagtggccccaggatgctgaggccgtgcagagggtgcgggccgccttccagctgcggctggccgagctgctgacccagcagcacggcctgcagtgccgggccacagccacccacacagatgtgctgaaggatggctttgtgttccgcatccgggtggcctaccagcgggagccccagatcctgaaggaggtgcagagccctgagggcatgatcagcctgcgggacacagctgccagcctgcggctggagcgggacacccggcagctgcccctgctgaccagcgccctgcacggcctgcagcagcagcacccagccttcagcggcgtggcccggctggccaagcgctgggtgcgggcccagctgctgggggagggctttgctgatgagagcctggacctggtggccgccgccctcttcctgcaccctgagcccttcaccccacccagcagcccccaggtgggcttcctgcgcttcctgttcctggtgtccacctttgactggaagaacaaccccctgtttgtgaacctgaacaatgagctgactgtggaggagcaggtggagatccgcagcggcttcctggccgcccgggcccagctgcctgtgatggtgattgtgaccccccaggacaggaagaacagcgtgtggacccaggacggccccagcgcccagatcctgcagcagctggtggtgctggccgctgaggccctgcccatgctggagaagcagctgatggacccccggggccctggggacatccgcatgggccccagtgaaaatgtggccctgctgagccacatcacagacacagagcagtggaagggggccatctgtgtgtag

SEQ ID NO: 162492 - DNA, 3285 bp, synthetic construct
  misc_feature 1..3285: note = Description of Artificial Sequence: Synthetic coding sequence
  source 1..3285: mol_type = other DNA
atgggccctgccccagctggggagcagctgcggggggccaccggggagcctgaggtgatggagcccgccctggagggcaccgggaaggagggcaagaaggccagcagcaggaagaggaccctggccgagcccccagccaagggcctgctgcagcctgtgaagctgagcagagctgagctgtacaaggagcccaccaatgaggagctgaaccggctgcgggagacagagatcctcttccacagcagcctgctgcggctgcaggtggaggagctgctgaaggaggtgcggctgtctgagaagaagaaggacagaattgatgccttcctgcgggaggtgaaccagagggtggtgcgggtgcccagcgtgcctgagacagaggagatcctgcaggacaaggatggcctgaaccagcgctacttcaggaagagggccctgtacctggcccacctggcccaccacctggcccaggaccccctgtttggatctgtgtgcttctcctacaccaacggctgccacctgaagcccagcctgctgctgcggccccggggcaaggatgagcggctggtgacagtgcggctgcacccctgccccccaccagacttcttccggccctgccgcctgctgcccaccaagaacaacgtgcgcagcgcctggtaccggggccagagccctgctggagatggcagccctgagccccccaccccccgctacaacacctgggtgctgcaggacacagtgctggagagccacctgcagctgctgagcaccatcctgagcagcgcccagggcctgaaggatggagtggccctgctgaaggtgtggctgcggcagcgggagctggacaagggccagggcggcttcaccggcttcctggtgtccatgctggtggtgttcctggtgtccaccaggaagatccacaccaccatgagcggctaccaggtgctgcggtctgtgctgcagttcctggccaccacagacctgactgtgaatggcatcagcctgtgcctgagcagtgaccccagcctgcctgccctggccgacttccaccaggccttctctgtggtgttcctggacagcagcggccacctgaacctgtgtgctgatgtgacagccagcacctaccaccagggctggagcctgctgtggctgcaggtgcagcacgaggcccggctgtccatgatgctgctggacagcagagcagatgatggcttccacctgctgctgatgacccccaagcccatgatccgggcctttgaccacgtgctgcacctgcggcccctgagccggctgcaggccgcctgccaccggctgaagctgtggccagagctgcaggacaatggaggagactatgtgtctgctgccctgggccccctgaccaccctgctggagcagggcctgggcgcccggctgaacctgctggcccacagccggccccctgtgcctgagtgggacatcagccaggacccccccaagcacaaggacagcggcaccctgaccctgggcctgctgctgcggcctgagggcctgacctctgtgctggagctgggccctgaggccgaccagcctgaggccgccaagttccggcagttctggggcagccgctctgagctgcggcgcttccaggatggagccatccgggaggccgtggtgtgggaggccgcctccatgagccagaagaggctcatcccccaccaggtggtgacccacctgctggccctgcatgctgacatccctgagacctgtgtgcactacgtgggcggccccctggatgccctgatccagggcctgaaggagaccagcagcactggagaggaggccctggtggccgctgtgcgctgctatgatgacctgagccggctgctgtggggcctggagggcctgcccctgactgtgtctgctgtgcagggcgcccaccctgtgctgcgctacacagaggtgttcccccccacccctgtgcggcctgccttctccttctatgagaccctgcgggagaggagcagcctgctgccccggctggacaagccctgcccagcctacgtggagcccatgacagtggtgtgccacctggagggcagcggccagtggccccaggatgctgaggccgtgcagagggtgcgggccgccttccagctgcggctggccgagctgctgacccagcagcacggcctgcagtgccgggccacagccacccacacagatgtgctgaaggatggctttgtgttccgcatccgggtggcctaccagcgggagccccagatcctgaaggaggtgcagagccctgagggcatgatcagcctgcgggacacagctgccagcctgcggctggagcgggacacccggcagctgcccctgctgaccagcgccctgcacggcctgcagcagcagcacccagccttcagcggcgtggcccggctggccaagcgctgggtgcgggcccagctgctgggggagggctttgctgatgagagcctggacctggtggccgccgccctcttcctgcaccctgagcccttcaccccacccagcagcccccaggtgggcttcctgcgcttcctgttcctggtgtccacctttgactggaagaacaaccccctgtttgtgaacctgaacaatgagctgactgtggaggagcaggtggagatccgcagcggcttcctggccgcccgggcccagctgcctgtgatggtgattgtgaccccccaggacaggaagaacagcgtgtggacccaggacggccccagcgcccagatcctgcagcagctggtggtgctggccgctgaggccctgcccatgctggagaagcagctgatggacccccggggccctggggacatcagaacagtgttccggccccccctggacatctatgatgtgctgatccggctgagccccaggcacatccccaggcaccggcaggccgtggacagccctgctgccagcttctgccggggcctgctgagccagcccggccccagcagcctgatgcctgtgctgggctatgaccccccccagctgtacctgacccagctgcgggaggccttcggggacctggccctcttcttctatgaccagcacggcggggaggtgattggagtgctgtggaagcccaccagcttccagccccagcccttcaaggccagcagcaccaagggccgcatggtgatgagccggggcggggagctggtgatggtgcccaacgtggaggccatcctggaggactttgctgtgctgggggagggcctggtgcagacagtggaggcccggtctgagcgctggacagtgtag

SEQ ID NO: 162493 - DNA, 2109 bp, synthetic construct
  misc_feature 1..2109: note = Description of Artificial Sequence: Synthetic coding sequence
  source 1..2109: mol_type = other DNA
atgatgctgctggacagcagagcagatgatggcttccacctgctgctgatgacccccaagcccatgatccgggcctttgaccacgtgctgcacctgcggcccctgagccggctgcaggccgcctgccaccggctgaagctgtggccagagctgcaggacaatggaggagactatgtgtctgctgccctgggccccctgaccaccctgctggagcagggcctgggcgcccggctgaacctgctggcccacagccggccccctgtgcctgagtgggacatcagccaggacccccccaagcacaaggacagcggcaccctgaccctgggcctgctgctgcggcctgagggcctgacctctgtgctggagctgggccctgaggccgaccagcctgaggccgccaagttccggcagttctggggcagccgctctgagctgcggcgcttccaggatggagccatccgggaggccgtggtgtgggaggccgcctccatgagccagaagaggctcatcccccaccaggtggtgacccacctgctggccctgcatgctgacatccctgagacctgtgtgcactacgtgggcggccccctggatgccctgatccagggcctgaaggagaccagcagcactggagaggaggccctggtggccgctgtgcgctgctatgatgacctgagccggctgctgtggggcctggagggcctgcccctgactgtgtctgctgtgcagggcgcccaccctgtgctgcgctacacagaggtgttcccccccacccctgtgcggcctgccttctccttctatgagaccctgcgggagaggagcagcctgctgccccggctggacaagccctgcccagcctacgtggagcccatgacagtggtgtgccacctggagggcagcggccagtggccccaggatgctgaggccgtgcagagggtgcgggccgccttccagctgcggctggccgagctgctgacccagcagcacggcctgcagtgccgggccacagccacccacacagatgtgctgaaggatggctttgtgttccgcatccgggtggcctaccagcgggagccccagatcctgaaggaggtgcagagccctgagggcatgatcagcctgcgggacacagctgccagcctgcggctggagcgggacacccggcagctgcccctgctgaccagcgccctgcacggcctgcagcagcagcacccagccttcagcggcgtggcccggctggccaagcgctgggtgcgggcccagctgctgggggagggctttgctgatgagagcctggacctggtggccgccgccctcttcctgcaccctgagcccttcaccccacccagcagcccccaggtgggcttcctgcgcttcctgttcctggtgtccacctttgactggaagaacaaccccctgtttgtgaacctgaacaatgagctgactgtggaggagcaggtggagatccgcagcggcttcctggccgcccgggcccagctgcctgtgatggtgattgtgaccccccaggacaggaagaacagcgtgtggacccaggacggccccagcgcccagatcctgcagcagctggtggtgctggccgctgaggccctgcccatgctggagaagcagctgatggacccccggggccctggggacatcagaacagtgttccggccccccctggacatctatgatgtgctgatccggctgagccccaggcacatccccaggcaccggcaggccgtggacagccctgctgccagcttctgccggggcctgctgagccagcccggccccagcagcctgatgcctgtgctgggctatgaccccccccagctgtacctgacccagctgcgggaggccttcggggacctggccctcttcttctatgaccagcacggcggggaggtgattggagtgctgtggaagcccaccagcttccagccccagcccttcaaggccagcagcaccaagggccgcatggtgatgagccggggcggggagctggtgatggtgcccaacgtggaggccatcctggaggactttgctgtgctgggggagggcctggtgcagacagtggaggcccggtctgagcgctggacagtgtag

SEQ ID NO: 162494 - DNA, 645 bp, synthetic construct
  misc_feature 1..645: note = Description of Artificial Sequence: Synthetic coding sequence
  source 1..645: mol_type = other DNA
atgaacctgagcagcgccagcagcacagaggagaaggctgtgaccaccgtgctgtggggctgtgagctgagccaggagaggaggacctggaccttccggccccagctggagggcaagcagagctgccgcctgctgctgcacaccatctgcctgggggagaaggccaaggaggagatgcaccgggtggagatcctgcccccagccaaccaggaggacaagaagatgcagcctgtgaccatcgccagcctgcaggcctctgtgctgcccatggtgtccatggtgggcgtgcagctgagcccccctgtgaccttccagctgcgggccggcagcggccctgtgttcctgagcggccaggagagatatgaggccagtgacctgacctgggaggaggaggaggaggaggagggggaggaggaggaggaggaggaggaggatgatgaagatgaagatgctgacatcagcctggaggagcagagccctgtgaagcaggtgaagaggctggtgccccagaagcaggcctctgtggccaagaagaagaagctggagaaggaggaggaggagatccgggcctctgtgcgggacaagagccctgtgaagaaggccaaggccacagcccgggccaagaagccaggcttcaagaagtag

SEQ ID NO: 162495 - DNA, 411 bp, synthetic construct
  misc_feature 1..411: note = Description of Artificial Sequence: Synthetic coding sequence
  source 1..411: mol_type = other DNA
atgaacctgagcagcgccagcagcacagaggagaaggctgtgaccaccgtgctgtggggctgtgagctgagccaggagaggaggacctggaccttccggccccagctggagggcaagcagagctgccgcctgctgctgcacaccatctgcctgggggagaaggccaaggaggagatgcaccgggtggagatcctgcccccagccaaccaggaggacaagaagatgcagcctgtgaccatcgccagcctgcaggcctctgtgctgcccatggtgtccatggtgggcgtgcagctgagcccccctgtgaccttccagctgcgggccggcagcggccctgtgttcctgagcggccaggagagatatgagaagaaggccggcaagagaagaagaggcaacaagagccagaggtag

SEQ ID NO: 162496 - DNA, 645 bp, synthetic construct; identical to SEQ ID NO: 162494
  misc_feature 1..645: note = Description of Artificial Sequence: Synthetic coding sequence
  source 1..645: mol_type = other DNA

SEQ ID NO: 162497 - DNA, 645 bp, synthetic construct; identical to SEQ ID NO: 162494
  misc_feature 1..645: note = Description of Artificial Sequence: Synthetic coding sequence
  source 1..645: mol_type = other DNA

SEQ ID NO: 162498 - DNA, 645 bp, synthetic construct; identical to SEQ ID NO: 162494
  misc_feature 1..645: note = Description of Artificial Sequence: Synthetic coding sequence
  source 1..645: mol_type = other DNA

SEQ ID NO: 162499 - DNA, 537 bp, synthetic construct
  misc_feature 1..537: note = Description of Artificial Sequence: Synthetic coding sequence
  source 1..537: mol_type = other DNA
atggctgctggaacagctgctgccctggccttcctgagccaggagagcaggacccgggccggcggcgtgggcggcctgcgggtgcctgcccctgtgaccatggacagcttcttcttcggctgtgagctgagcggccacaccaggagcttcaccttcaaggtggaggaggaggatgatgctgagcacgtgctggccctgaccatgctgtgcctgacagagggcgccaaggatgagtgcaatgtggtggaggtggtggccagaaatcatgaccaccaggagattgctgtgcctgtggccaacctgaagctgagctgccagcccatgctgagcctggatgacttccagctgcagccccctgtgaccttccggctgaagagcggcagcggccctgtgcgcatcaccggccgccaccagatcgtgaccatgagcaatgatgtgtctgaggaggagagcgaggaggaggaggaggacagtgatgaggaggaggtggagctgtgccccatcctgcctgccaagaagcagggcggccggccctag

SEQ ID NO: 162500 - DNA, 501 bp, synthetic construct
  misc_feature 1..501: note = Description of Artificial Sequence: Synthetic coding sequence
  source 1..501: mol_type = other DNA
atgaagtacaccagctacatcctggccttccagctgtgcatcgtgctgggcagcctgggctgctactgccaggacccctacgtgaaggaggccgagaacctgaagaagtacttcaatgccggccacagtgatgtggccgacaatggcaccctcttcctgggcatcctgaagaactggaaggaggagagtgacaggaagatcatgcagagccagatcgtgtccttctacttcaagctgttcaagaacttcaaggatgaccagagcatccagaagtctgtggagaccatcaaggaggacatgaatgtgaagttcttcaacagcaacaagaagaagagagatgactttgagaagctgaccaactacagcgtgacagacctgaatgtgcagaggaaggccatccacgagctgatccaggtgatggccgagctgagccctgctgccaagacaggcaagaggaagaggagccagatgctgttccggggccggcgggccagccagtag

SEQ ID NO: 162501 - DNA, 2061 bp, synthetic construct
  misc_feature 1..2061: note = Description of Artificial Sequence: Synthetic coding sequence
  source 1..2061: mol_type = other DNA
atgtccatgttcagtgacttcctgcagagcttcctgaagcacagcagcagcacagtgtttgacctggtggaggagtatgagaacatctgtggcagccaggtgaacatcctgagcaagatcgtgtcccgggccaccccaggcctgcagaagttcagcaagacagcctccatgctgtggctgctgcagcaggagatggtgacctggaggctgctggccagcctgtacagagaccgcatccagagcgccctggaggaggagagcgtgtttgctgtgacagctgtgaatgccagcgagaagacagtggtggaggccctcttccagagggacagcctggtgcggcagagccagctggtggtggactggctggagagcatcgccaaggatgagatcggggagttcagtgacaacatcgagttctacgccaagtctgtgtactgggagaacaccctgcacaccctgaagcagaggcagctgaccagctatgtgggctctgtgcggcccctggtgacagagctggaccctgatgcccccatccggcagaagatgcccctggatgacctggaccgggaggatgaggtgcggctgctgaagtacctgttcaccctcatccgggccggcatgacagaggaggcccagaggctgtgcaagagatgtggccaggcctggagggctgccaccctggagggctggaagctgtaccatgaccccaacgtgaatggaggaacagagctggagcctgtggagggcaacccctaccgccgcatctggaagatcagctgctggaggatggctgaagatgagctgttcaacagatatgaaagagccatctatgctgccctgagcggcaacctgaagcagctgctgcctgtgtgtgacacctgggaggacacagtgtgggcctacttccgggtgatggtggacagcctggtggagcaggagatccagacctctgtggccaccctggatgaaacagaggagctgccccgggagtacctgggcgccaactggaccctggagaaggtgtttgaggagctgcaggccacagacaagaagagggtgctggaggagaaccaggagcactaccacatcgtgcagaagttcctgatcctgggggacattgatggcctgatggatgagttcagcaagtggctgagcaagagcaggaacaacctgcccggccacctgctgcgcttcatgacccacctgatcctcttcttccgcaccctgggcctgcagaccaaggaggaggtgtccattgaggtgctgaagacctacatccaggaggaccggctgaagattgatgtgattgactggctggtgtttgatcctgcccagagagctgaggccctgaagcagggcaatgccatcatgaggaagttcctggccagcaagaagcatgaggccgccaaggaggtgtttgtgaagatcccccaggacagcattgctgagatctacaaccagtgtgaggagcagggcatggagagccccctgcctgcagaagatgacaatgccatccgggagcacctgtgcatccgggcctacctggaggcccacgagaccttcaatgagtggttcaagcacatgaacagcgtgccccagaagccagccctgatcccccagcccaccttcacagagaaggtggcccacgagcacaaggagaagaagtatgagatggactttggcatctggaagggccacctggatgccctgacagcagatgtgaaggagaagatgtacaacgtgctgctgtttgtggatggcggctggatggtggatgtgagagaagatgccaaggaggaccacgagaggacccaccagatggtgctgctgaggaagctgtgcctgcccatgctgtgcttcctgctgcacaccatcctgcacagcacaggccagtaccaggagtgcctgcagctggccgacatggtgagcagcgagcggcacaagctgtacctggtgttcagcaaggaggagctgaggaagctgctgcagaagctgcgggagagcagcctgatgctgctggaccagggcctggaccccctgggctatgagatccagctgtag

SEQ ID NO: 162502 - DNA, 2691 bp, synthetic construct
  misc_feature 1..2691: note = Description of Artificial Sequence: Synthetic coding sequence
  source 1..2691: mol_type = other DNA
atgaagatcctggtgatcctgcaccaggagacccggctgagcctggagctgctggcccactttgacagcctggtgctgagcaccaacctgctcttcatcgtgacccccaccagccgcagcctgctgcggcagcctgacatcagctgcatcctgggcactggaggcaagagcccccggctgacccagagcagcggcttctttggaaacctgtccatggtgaccaacctggatgacagcaactgggccgccgccttcagcagccagaggagcggcctcttcaccaacacagagccccacagcatcacagaagatgtgaccatctctgctgtgatgctgcgggaggatgatcctggagaggccgcctccatgtccatgttcagtgacttcctgcagagcttcctgaagcacagcagcagcacagtgtttgacctggtggaggagtatgagaacatctgtggcagccaggtgaacatcctgagcaagatcgtgtcccgggccaccccaggcctgcagaagttcagcaagacagcctccatgctgtggctgctgcagcaggagatggtgacctggaggctgctggccagcctgtacagagaccgcatccagagcgccctggaggaggagagcgtgtttgctgtgacagctgtgaatgccagcgagaagacagtggtggaggccctcttccagagggacagcctggtgcggcagagccagctggtggtggactggctggagagcatcgccaaggatgagatcggggagttcagtgacaacatcgagttctacgccaagtctgtgtactgggagaacaccctgcacaccctgaagcagaggcagctgaccagctatgtgggctctgtgcggcccctggtgacagagctggaccctgatgcccccatccggcagaagatgcccctggatgacctggaccgggaggatgaggtgcggctgctgaagtacctgttcaccctcatccgggccggcatgacagaggaggcccagaggctgtgcaagagatgtggccaggcctggagggctgccaccctggagggctggaagctgtaccatgaccccaacgtgaatggaggaacagagctggagcctgtggagggcaacccctaccgccgcatctggaagatcagctgctggaggatggctgaagatgagctgttcaacagatatgaaagagccatctatgctgccctgagcggcaacctgaagcagctgctgcctgtgtgtgacacctgggaggacacagtgtgggcctacttccgggtgatggtggacagcctggtggagcaggagatccagacctctgtggccaccctggatgaaacagaggagctgccccgggagtacctgggcgccaactggaccctggagaaggtgtttgaggagctgcaggccacagacaagaagagggtgctggaggagaaccaggagcactaccacatcgtgcagaagttcctgatcctgggggacattgatggcctgatggatgagttcagcaagtggctgagcaagagcaggaacaacctgcccggccacctgctgcgcttcatgacccacctgatcctcttcttccgcaccctgggcctgcagaccaaggaggaggtgtccattgaggtgctgaagacctacatccagctgctgatccgggagaagcacaccaacctgattgccttctacacctgccacctgccccaggacctggccgtggcccagtatgccctcttcctggagagcgtgacagaatttgagcagaggcaccactgcctggagctggccaaggaggccgacctggatgtggccaccatcaccaagacagtggtggagaacatcaggaagaaggacaatggagagttcagccaccacgacctggccccagccctggacaccggcaccacagaggaggaccggctgaagattgatgtgattgactggctggtgtttgatcctgcccagagagctgaggccctgaagcagggcaatgccatcatgaggaagttcctggccagcaagaagcatgaggccgccaaggaggtgtttgtgaagatcccccaggacagcattgctgagatctacaaccagtgtgaggagcagggcatggagagccccctgcctgcagaagatgacaatgccatccgggagcacctgtgcatccgggcctacctggaggcccacgagaccttcaatgagtggttcaagcacatgaacagcgtgccccagaagccagccctgatcccccagcccaccttcacagagaaggtggcccacgagcacaaggagaagaagtatgagatggactttggcatctggaagggccacctggatgccctgacagcagatgtgaaggagaagatgtacaacgtgctgctgtttgtggatggcggctggatggtggatgtgagagaagatgccaaggaggaccacgagaggacccaccagatggtgctgctgaggaagctgtgcctgcccatgctgtgcttcctgctgcacaccatcctgcacagcacaggccagtaccaggagtgcctgcagctggccgacatggtgagcagcgagcggcacaagctgtacctggtgttcagcaaggaggagctgaggaagctgctgcagaagctgcgggagagcagcctgatgctgctggaccagggcctggaccccctgggctatgagatccagctgtag

SEQ ID NO: 162503 - DNA, 3471 bp, synthetic construct
  misc_feature 1..3471: note = Description of Artificial Sequence: Synthetic coding sequence
  source 1..3471: mol_type = other DNA
atgtttcctgctgcccccagccccaggaccccaggcaccggcagccggcggggccccctggccggcctgggccctggcagcacccccaggacagccagcaggaagggcctgcccctgggcagcgctgtgagcagccctgtgctcttcagccctgtgggccgccgcagcagcctgagcagccggggcacccccaccaggatgttcccccaccacagcatcacagagagcgtgaactatgatgtgaagaccttcggcagcagcctgcctgtgaaggtgatggaggccctgaccctggccgaggtggatgaccagctgaccatcaacattgatgagggcggctgggcctgcctggtgtgcaaggagaagctgatcatctggaagatcgccctgagccccatcaccaagctgtctgtgtgcaaggagctgcagctgcccccaagtgacttccactggagcgctgacctggtggccctgagctacagcagccccagcggggaggcccacagcacccaggccgtggccgtgatggtggccacccgggagggcagcatccgctactggcccagcctggccggggaggacacctacacagaggcctttgtggacagcggcggggacaagacctacagcttcctgacagctgtgcagggcggcagcttcatcctgagcagcagcggcagccagctgatccgcctcatccctgagagcagcggcaagatccaccagcacatcctgccccagggccagggcatgctgtctggaattggaaggaaggtgagcagcctgtttggcatcctgagccccagcagtgacctgaccctgagctctgtgctgtgggaccgggagaggagcagcttctacagcctgaccagcagcaacatcagcaagtgggagctggatgacagcagcgagaagcacgcctacagctgggacatcaacagagccctgaaggagaacatcacagatgccatctggggcagcgagagcaactatgaggccatcaaggagggcgtgaacatccgctacctggacctgaagcagaactgtgatggcctggtgatcctggccgccgcctggcacagcgctgacaacccctgcctgatctactacagcctcatcaccatcgaggacaatggctgccagatgtctgatgctgtgacagtggaggtgacccagtacaacccccccttccagagcgaggacctgatcctgtgccagctgactgtgcccaacttcagcaaccagacagcctacctgtacaatgaatctgctgtgtatgtgtgcagcacaggcaccgggaagttcagcctgccccaggagaagatcgtgttcaatgcccagggcgacagcgtgctgggcgctggggcctgtggcggcgtgcccatcatcttcagcaggaacagcggcctggtgtccatcaccagcagagaaaatgtgtccatcctggccgaggacctggagggcagcctggccagctctgtggccggccccaacagcgagagcatgatctttgagaccaccaccaagaatgagaccatcgcccaggaggacaagatcaagctgctgaaggccgccttcctgcagtactgcaggaaggacctgggccacgcccagatggtggtggatgagctgttcagcagccacagcgacctggacagcgacagcgagctggacagagctgtgacccagatctctgtggacctgatggatgactacccagccagtgacccccgctgggccgagagcgtgcctgaggaggcccctggcttcagcaacaccagcctcatcatcctgcaccagctggaggacaagatgaaggcccacagcttcctgatggacttcatccaccaggtgggcctgtttggccgcctgggcagcttccctgtgcggggcacccccatggccacccggctgctgctgtgtgaacatgctgagaagctgtctgctgccatcgtgctgaagaaccaccacagccggctgagtgacctggtgaacacagccatcctgattgccctgaacaagcgggagtatgagatccccagcaacctgaccccagcagatgtgttcttccgggaggtgtcccaggtggacaccatctgtgaatgtctgctggagcacgaggagcaggtgctgagagatgcccccatggacagcattgagtgggccgaggtggtgatcaacgtgaacaacatcctgaaggacatgctgcaggccgccagccactaccggcagaacagaaacagcctgtacagaagagaggagagcctggagaaggagccagaatatgtgccctggacagccaccagcggccctgggggcatccgcaccgtcatcatccggcagcacgagatcgtgctgaaggtggcctacccccaggccgacagcaacctgaggaacatcgtgacagagcagctggtggccctgattgactgcttcctggatggctacgtgtcccagctgaagtctgtggacaagagcagcaaccgggagagatatgacaacctggagatggagtacctgcagaagagaagtgacctgctgagccccctgctgagcctgggccagtacctgtgggccgccagcctggccgagaagtactgtgactttgacatcctggtgcagatgtgtgagcagacagacaaccagagccggctgcagcgctacatgacccagtttgctgaccagaacttcagtgacttcctgttccgctggtacctggagaagggcaagaggggcaagctgctgagccagcccatcagccagcacggccagctggccaacttcctgcaggcccacgagcacctgtcctggctgcacgagatcaacagccaggagctggagaaggcccacgccaccctgctgggcctggccaacatggagacccgctactttgccaagaagaagaccctgctgggcctgagcaagctggccgccctggccagtgacttcagcgaggacatgctgcaggagaagattgaggagatggccgagcaggagcgcttcctgctgcaccaggagaccctgcctgagcagctgctggccgagaagcagctgaacctgagcgccatgcctgtgctgacagccccccagctgattggcctgtacatctgtgaagaaaatagaagagccaatgaatatgacttcaagaaggccctggacctgctggagtacattgatgaggaggaggacatcaacatcaatgacctgaagctggagatcctgtgcaaggccctgcagagggacaactggagcagcagtgatggcaaggatgaccccatcgaggtgtccaaggacagcatctttgtgaagatcctgcagaagctgctgaaggatggcatccagctgtctgagtacctgcctgaggtgaaggacctgctgcaggccgaccagctgggcagcctgaagagcaacccctactttgaatttgtgctgaaggccaactatgagtactacgtgcagggccagatctag

SEQ ID NO: 162504 - DNA, 675 bp, synthetic construct
  misc_feature 1..675: note = Description of Artificial Sequence: Synthetic coding sequence
  source 1..675: mol_type = other DNA
atgtttcctgctgcccccagccccaggaccccaggcaccggcagccggcggggccccctggccggcctgggccctggcagcacccccaggacagccagcaggaagggcctgcccctgggcagcgctgtgagcagccctgtgctcttcagccctgtgggccgccgcagcagcctgagcagccggggcacccccaccaggatgttcccccaccacagcatcacagagagcgtgaactatgatgtgaagaccttcggcagcagcctgcctgtgaaggtgatggaggccctgaccctggccgaggtggatgaccagctgaccatcaacattgatgagggcggctgggcctgcctggtgtgcaaggagaagctgatcatctggaagatcgccctgagccccatcaccaagctgtctgtgtgcaaggagctgcagctgcccccaagtgacttccactggagcgctgacctggtggccctgagctacagcagccccagcggggaggcccacagcacccaggccgtggccgtgatggtggccacccgggagggcagcatccgctactggcccagcctggccggggaggacacctacacagaggcctttgtggacagcggcggggacaagacctacagcttcctgacagctgtgcaggtgcacaaggagaccaagtctggatag

SEQ ID NO: 162505 - DNA, 3207 bp, synthetic construct
  misc_feature 1..3207: note = Description of Artificial Sequence: Synthetic coding sequence
  source 1..3207: mol_type = other DNA
atgtttcctgctgcccccagccccaggaccccaggcaccggcagccggcggggccccctggccggcctgggccctggcagcacccccaggacagccagcaggaagggcctgcccctgggcagcgctgtgagcagccctgtgctcttcagccctgtgggccgccgcagcagcctgagcagccggggcacccccaccaggatgttcccccaccacagcatcacagagagcgtgaactatgatgtgaagaccttcggcagcagcctgcctgtgaaggtgatggaggccctgaccctggccgaggtggatgaccagctgaccatcaacattgatgagggcggctgggcctgcctggtgtgcaaggagaagctgatcatctggaagatcgccctgagccccatcaccaagctgtctgtgtgcaaggagctgcagctgcccccaagtgacttccactggagcgctgacctggtggccctgagctacagcagccccagcggggaggcccacagcacccaggccgtggccgtgatggtggccacccgggagggcagcatccgctactggcccagcctggccggggaggacacctacacagaggcctttgtggacagcggcggggacaagacctacagcttcctgacagctgtgcagggcggcagcttcatcctgagcagcagcggcagccagctgatccgcctcatccctgagagcagcggcaagatccaccagcacatcctgccccagggccagggcatgctgtctggaattggaaggaaggtgagcagcctgtttggcatcctgagccccagcagtgacctgaccctgagctctgtgctgtgggaccgggagaggagcagcttctacagcctgaccagcagcaacatcagcaagtgggagctggatgacagcagcgagaagcacgcctacagctgggacatcaacagagccctgaaggagaacatcacagatgccatctggggcagcgagagcaactatgaggccatcaaggagggcgtgaacatccgctacctggacctgaagcagaactgtgatggcctggtgatcctggccgccgcctggcacagcgctgacaacccctgcctgatctactacagcctcatcaccatcgaggacaatggctgccagatgtctgatgctgtgacagtggaggtgacccagtacaacccccccttccagagcgaggacctgatcctgtgccagctgactgtgcccaacttcagcaaccagacagcctacctgtacaatgaatctgctgtgtatgtgtgcagcacaggcaccgggaagttcagcctgccccaggagaagatcgtgttcaatgcccagggcgacagcgtgctgggcgctggggcctgtggcggcgtgcccatcatcttcagcaggaacagcggcctggtgtccatcaccagcagagaaaatgtgtccatcctggccgaggacctggagggcagcctggccagctctgtggccggccccaacagcgagagcatgatctttgagaccaccaccaagaatgagaccatcgcccaggaggacaagatcaagctgctgaaggccgccttcctgcagtactgcaggaaggacctgggccacgcccagatggtggtggatgagctgttcagcagccacagcgacctggacagcgacagcgagctggacagagctgtgacccagatctctgtggacctgatggatgactacccagccagtgacccccgctgggccgagagcgtgcctgaggaggcccctggcttcagcaacaccagcctcatcatcctgcaccagctggaggacaagatgaaggcccacagcttcctgatggacttcatccaccaggtgggcctgtttggccgcctgggcagcttccctgtgcggggcacccccatggccacccggctgctgctgtgtgaacatgctgagaagctgtctgctgccatcgtgctgaagaaccaccacagccggctgagtgacctggtgaacacagccatcctgattgccctgaacaagcgggagtatgagatccccagcaacctgaccccagcagatgtgttcttccgggaggtgtcccaggtggacaccatctgtgaatgtctgctggagcacgaggagcaggtgctgagagatgcccccatggacagcattgagtgggccgaggtggtgatcaacgtgaacaacatcctgaaggacatgctgcaggccgccagccactaccggcagaacagaaacagcctgtacagaagagaggagagcctggagaaggagccagaatatgtgccctggacagccaccagcggccctgggggcatccgcaccgtcatcatccggcagcacgagatcgtgctgaaggtggcctacccccaggccgacagcaacctgaggaacatcgtgacagagcagctggtggccctgattgactgcttcctggatggctacgtgtcccagctgaagtctgtggacaagagcagcaaccgggagagatatgacaacctggagaagggcaagaggggcaagctgctgagccagcccatcagccagcacggccagctggccaacttcctgcaggcccacgagcacctgtcctggctgcacgagatcaacagccaggagctggagaaggcccacgccaccctgctgggcctggccaacatggagacccgctactttgccaagaagaagaccctgctgggcctgagcaagctggccgccctggccagtgacttcagcgaggacatgctgcaggagaagattgaggagatggccgagcaggagcgcttcctgctgcaccaggagaccctgcctgagcagctgctggccgagaagcagctgaacctgagcgccatgcctgtgctgacagccccccagctgattggcctgtacatctgtgaggagaacagaagagccaatgaatatgacttcaagaaggccctggacctgctggagtacattgatgaggaggaggacatcaacatcaatgacctgaagctggagatcctgtgcaaggccctgcagagggacaactggagcagcagtgatggcaaggatgaccccatcgaggtgtccaaggacagcatctttgtgaagatcctgcagaagctgctgaaggatggcatccagctgtctgagtacctgcctgaggtgaaggacctgctgcaggccgaccagctgggcagcatcaacgtgaacttctgctag

SEQ ID NO: 162506 - DNA, 3258 bp, synthetic construct
  misc_feature 1..3258: note = Description of Artificial Sequence: Synthetic coding sequence
  source 1..3258: mol_type = other DNA
atgtttcctgctgcccccagccccaggaccccaggcaccggcagccggcggggccccctggccggcctgggccctggcagcacccccaggacagccagcaggaagggcctgcccctgggcagcgctgtgagcagccctgtgctcttcagccctgtgggccgccgcagcagcctgagcagccggggcacccccaccaggatgttcccccaccacagcatcacagagagcgtgaactatgatgtgaagaccttcggcagcagcctgcctgtgaaggtgatggaggccctgaccctggccgaggtggatgaccagctgaccatcaacattgatgagggcggctgggcctgcctggtgtgcaaggagaagctgatcatctggaagatcgccctgagccccatcaccaagctgtctgtgtgcaaggagctgcagctgcccccaagtgacttccactggagcgctgacctggtggccctgagctacagcagccccagcggggaggcccacagcacccaggccgtggccgtgatggtggccacccgggagggcagcatccgctactggcccagcctggccggggaggacacctacacagaggcctttgtggacagcggcggggacaagacctacagcttcctgacagctgtgcagggcggcagcttcatcctgagcagcagcggcagccagctgatccgcctcatccctgagagcagcggcaagatccaccagcacatcctgccccagggccagggcatgctgtctggaattggaaggaaggtgagcagcctgtttggcatcctgagccccagcagtgacctgaccctgagctctgtgctgtgggaccgggagaggagcagcttctacagcctgaccagcagcaacatcagcaagtgggagctggatgacagcagcgagaagcacgcctacagctgggacatcaacagagccctgaaggagaacatcacagatgccatctggggcagcgagagcaactatgaggccatcaaggagggcgtgaacatccgctacctggacctgaagcagaactgtgatggcctggtgatcctggccgccgcctggcacagcgctgacaacccctgcctgatctactacagcctcatcaccatcgaggacaatggctgccagatgtctgatgctgtgacagtggaggtgacccagtacaacccccccttccagagcgaggacctgatcctgtgccagctgactgtgcccaacttcagcaaccagacagcctacctgtacaatgaatctgctgtgtatgtgtgcagcacaggcaccgggaagttcagcctgccccaggagaagatcgtgttcaatgcccagggcgacagcgtgctgggcgctggggcctgtggcggcgtgcccatcatcttcagcaggaacagcggcctggtgtccatcaccagcagagaaaatgtgtccatcctggccgaggacctggagggcagcctggccagctctgtggccggccccaacagcgagagcatgatctttgagaccaccaccaagaatgagaccatcgcccaggaggacaagatcaagctgctgaaggccgccttcctgcagtactgcaggaaggacctgggccacgcccagatggtggtggatgagctgttcagcagccacagcgacctggacagcgacagcgagctggacagagctgtgacccagatctctgtggacctgatggatgactacccagccagtgacccccgctgggccgagagcgtgcctgaggaggcccctggcttcagcaacaccagcctcatcatcctgcaccagctggaggacaagatgaaggcccacagcttcctgatggacttcatccaccaggtgggcctgtttggccgcctgggcagcttccctgtgcggggcacccccatggccacccggctgctgctgtgtgaacatgctgagaagctgtctgctgccatcgtgctgaagaaccaccacagccggctgagtgacctggtgaacacagccatcctgattgccctgaacaagcgggagtatgagatccccagcaacctgaccccagcagatgtgttcttccgggaggtgtcccaggtggacaccatctgtgaatgtctgctggagcacgaggagcaggtgctgagagatgcccccatggacagcattgagtgggccgaggtggtgatcaacgtgaacaacatcctgaaggacatgctgcaggccgccagccactaccggcagaacagaaacagcctgtacagaagagaggagagcctggagaaggagccagaatatgtgccctggacagccaccagcggccctgggggcatccgcaccgtcatcatccggcagcacgagatcgtgctgaaggtggcctacccccaggccgacagcaacctgaggaacatcgtgacagagcagctggtggccctgattgactgcttcctggatggctacgtgtcccagctgaagtctgtggacaagagcagcaaccgggagagatatgacaacctggagaagggcaagaggggcaagctgctgagccagcccatcagccagcacggccagctggccaacttcctgcaggcccacgagcacctgtcctggctgcacgagatcaacagccaggagctggagaaggcccacgccaccctgctgggcctggccaacatggagacccgctactttgccaagaagaagaccctgctgggcctgagcaagctggccgccctggccagtgacttcagcgaggacatgctgcaggagaagattgaggagatggccgagcaggagcgcttcctgctgcaccaggagaccctgcctgagcagctgctggccgagaagcagctgaacctgagcgccatgcctgtgctgacagccccccagctgattggcctgtacatctgtgaggagaacagaagagccaatgaatatgacttcaagaaggccctggacctgctggagtacattgatgaggaggaggacatcaacatcaatgacctgaagctggagatcctgtgcaaggccctgcagagggacaactggagcagcagtgatggcaaggatgaccccatcgaggtgtccaaggacagcatctttgtgaagatcctgcagaagctgctgaaggatggcatccagctgtctgagtacctgcctgaggtgaaggacctgctgcaggccgaccagctgggcagcctgaagagcaacccctactttgaatttgtgctgaaggccaactatgagtactacgtgcagggccagatctag

SEQ ID NO: 162507 - DNA, 3423 bp, synthetic construct
  misc_feature 1..3423: note = Description of Artificial Sequence: Synthetic coding sequence
  source 1..3423: mol_type = other DNA
atgggccccctggccggcctgggccctggcagcacccccaggacagccagcaggaagggcctgcccctgggcagcgctgtgagcagccctgtgctcttcagccctgtgggccgccgcagcagcctgagcagccggggcacccccaccaggatgttcccccaccacagcatcacagagagcgtgaactatgatgtgaagaccttcggcagcagcctgcctgtgaaggtgatggaggccctgaccctggccgaggtggatgaccagctgaccatcaacattgatgagggcggctgggcctgcctggtgtgcaaggagaagctgatcatctggaagatcgccctgagccccatcaccaagctgtctgtgtgcaaggagctgcagctgcccccaagtgacttccactggagcgctgacctggtggccctgagctacagcagccccagcggggaggcccacagcacccaggccgtggccgtgatggtggccacccgggagggcagcatccgctactggcccagcctggccggggaggacacctacacagaggcctttgtggacagcggcggggacaagacctacagcttcctgacagctgtgcagggcggcagcttcatcctgagcagcagcggcagccagctgatccgcctcatccctgagagcagcggcaagatccaccagcacatcctgccccagggccagggcatgctgtctggaattggaaggaaggtgagcagcctgtttggcatcctgagccccagcagtgacctgaccctgagctctgtgctgtgggaccgggagaggagcagcttctacagcctgaccagcagcaacatcagcaagtgggagctggatgacagcagcgagaagcacgcctacagctgggacatcaacagagccctgaaggagaacatcacagatgccatctggggcagcgagagcaactatgaggccatcaaggagggcgtgaacatccgctacctggacctgaagcagaactgtgatggcctggtgatcctggccgccgcctggcacagcgctgacaacccctgcctgatctactacagcctcatcaccatcgaggacaatggctgccagatgtctgatgctgtgacagtggaggtgacccagtacaacccccccttccagagcgaggacctgatcctgtgccagctgactgtgcccaacttcagcaaccagacagcctacctgtacaatgaatctgctgtgtatgtgtgcagcacaggcaccgggaagttcagcctgccccaggagaagatcgtgttcaatgcccagggcgacagcgtgctgggcgctggggcctgtggcggcgtgcccatcatcttcagcaggaacagcggcctggtgtccatcaccagcagagaaaatgtgtccatcctggccgaggacctggagggcagcctggccagctctgtggccggccccaacagcgagagcatgatctttgagaccaccaccaagaatgagaccatcgcccaggaggacaagatcaagctgctgaaggccgccttcctgcagtactgcaggaaggacctgggccacgcccagatggtggtggatgagctgttcagcagccacagcgacctggacagcgacagcgagctggacagagctgtgacccagatctctgtggacctgatggatgactacccagccagtgacccccgctgggccgagagcgtgcctgaggaggcccctggcttcagcaacaccagcctcatcatcctgcaccagctggaggacaagatgaaggcccacagcttcctgatggacttcatccaccaggtgggcctgtttggccgcctgggcagcttccctgtgcggggcacccccatggccacccggctgctgctgtgtgaacatgctgagaagctgtctgctgccatcgtgctgaagaaccaccacagccggctgagtgacctggtgaacacagccatcctgattgccctgaacaagcgggagtatgagatccccagcaacctgaccccagcagatgtgttcttccgggaggtgtcccaggtggacaccatctgtgaatgtctgctggagcacgaggagcaggtgctgagagatgcccccatggacagcattgagtgggccgaggtggtgatcaacgtgaacaacatcctgaaggacatgctgcaggccgccagccactaccggcagaacagaaacagcctgtacagaagagaggagagcctggagaaggagccagaatatgtgccctggacagccaccagcggccctgggggcatccgcaccgtcatcatccggcagcacgagatcgtgctgaaggtggcctacccccaggccgacagcaacctgaggaacatcgtgacagagcagctggtggccctgattgactgcttcctggatggctacgtgtcccagctgaagtctgtggacaagagcagcaaccgggagagatatgacaacctggagatggagtacctgcagaagagaagtgacctgctgagccccctgctgagcctgggccagtacctgtgggccgccagcctggccgagaagtactgtgactttgacatcctggtgcagatgtgtgagcagacagacaaccagagccggctgcagcgctacatgacccagtttgctgaccagaacttcagtgacttcctgttccgctggtacctggagaagggcaagaggggcaagctgctgagccagcccatcagccagcacggccagctggccaacttcctgcaggcccacgagcacctgtcctggctgcacgagatcaacagccaggagctggagaaggcccacgccaccctgctgggcctggccaacatggagacccgctactttgccaagaagaagaccctgctgggcctgagcaagctggccgccctggccagtgacttcagcgaggacatgctgcaggagaagattgaggagatggccgagcaggagcgcttcctgctgcaccaggagaccctgcctgagcagctgctggccgagaagcagctgaacctgagcgccatgcctgtgctgacagccccccagctgattggcctgtacatctgtgaagaaaatagaagagccaatgaatatgacttcaagaaggccctggacctgctggagtacattgatgaggaggaggacatcaacatcaatgacctgaagctggagatcctgtgcaaggccctgcagagggacaactggagcagcagtgatggcaaggatgaccccatcgaggtgtccaaggacagcatctttgtgaagatcctgcagaagctgctgaaggatggcatccagctgtctgagtacctgcctgaggtgaaggacctgctgcaggccgaccagctgggcagcctgaagagcaacccctactttgaatttgtgctgaaggccaactatgagtactacgtgcagggccagatctag

SEQ ID NO: 162508 - DNA, 4428 bp, synthetic construct
  misc_feature 1..4428: note = Description of Artificial Sequence: Synthetic coding sequence
  source 1..4428: mol_type = other DNA
atggccagcggggccggcggcgtgggcggcggcggcggcggcaagatccgcacccggcgctgccaccagggccccatcaagccctaccagcagggccggcagcagcaccagggcatcctgagccgggtgacagagagcgtgaagaacatcgtgcccggctggctgcagcgctacttcaacaagaatgaagatgtgtgcagctgcagcacagacaccagcgaggtgccccgctggccagagaacaaggaggaccacctggtgtatgcagatgaggagagcagcaacatcacagatggccgcatcaccccagagcctgctgtgagcaacacagaggagcccagcaccaccagcacagccagcaactacccagatgtgctgacccggcccagcctgcacaggagccacctgaacttctccatgctggagagccctgccctgcactgccagcccagcaccagcagcgccttccccatcggcagcagcggcttcagcctggtgaaggagatcaaggacagcaccagccagcatgatgatgacaacatcagcaccaccagcggcttcagcagccgggccagtgacaaggacatcaccgtgtccaagaacaccagcctgccccccctgtggagccctgaggccgagaggagccacagcctgagccagcacacagccaccagcagcaagaagccagccttcaacctgagcgccttcggcaccctgagccccagcctgggcaacagcagcatcctgaagaccagccagctgggggacagccccttctacccaggcaagaccacctacggcggcgctgctgctgctgtgcggcagagcaagctgaggaacaccccctaccaggcccctgtgcggcggcagatgaaggccaagcagctgagcgcccagagctatggagtgaccagcagcacagcccggcgcatcctgcagagcctggagaagatgagcagccccctggctgatgccaagaggatccccagcatcgtgagcagccccctgaacagccccctggacagaagtggcatcgacatcacagacttccaggccaagcgggagaaggtggacagccagtacccacctgtgcagaggctgatgacccccaagcctgtgtccatcgccaccaacagatctgtgtacttcaagcccagcctgacccccagcggggagttcaggaagaccaaccagagaattgacaacaagtgcagcacaggctatgagaagaacatgaccccaggccagaaccgggagcagcgggagagcggcttctcctaccccaacttcagcctgcctgctgccaacggcctgagcagcggcgtgggcggcggcggcggcaagatgaggcgggagaggaccaggtttgtggccagcaagcccctggaggaggaggagatggaggtgcctgtgctgcccaagatcagcctgcccatcaccagcagcagcctgcccaccttcaacttcagcagccctgagatcaccaccagcagccccagccccatcaacagcagccaggccctgaccaacaaggtgcagatgaccagccccagcagcacaggcagccccatgttcaagttcagcagccccatcgtgaagagcacagaggccaacgtgctgccccccagcagcatcggcttcaccttctctgtgcctgtggccaagacagctgagctgagcggcagcagcagcaccctggagcccatcatcagcagcagcgcccaccacgtgaccaccgtgaacagcaccaactgcaagaagaccccacctgaggactgtgagggccccttccggcctgctgagatcctgaaggagggctctgtgctggacatcctgaagagccctggctttgccagccccaagattgacagcgtggccgcccagcccacagccaccagccctgtggtgtacaccaggcctgccatcagcagcttcagcagcagcggcatcggctttggagagagcctgaaggccggcagctcctggcagtgtgacacctgcctgctgcagaacaaggtgacagacaacaagtgcatcgcctgccaggccgccaagctgagcccccgggacacagccaagcagacaggaattgagacccccaacaagagcggcaagaccaccctgagcgccagcggcactggatttggagacaagttcaagcctgtgattggcacctgggactgtgacacctgcctggtgcagaacaagccagaggccatcaagtgtgtggcctgtgagacccccaagccaggcacctgtgtgaagagggccctgaccctgactgtggtgtctgagagcgctgagaccatgacagccagcagcagcagctgcaccgtgaccaccggcaccctgggctttggagacaagttcaagaggcccatcggctcctgggagtgcagcgtgtgctgcgtgagcaacaatgctgaggacaacaagtgtgtgtcctgcatgtctgagaagccaggcagctctgtgcctgccagcagcagcagcacagtgcctgtgtccctgcccagcggcggcagcctgggcctggagaagttcaagaagccagagggctcctgggactgtgagctgtgcctggtgcagaacaaggctgacagcaccaagtgcctggcctgtgagagcgccaagccaggcaccaagagcggcttcaagggctttgacaccagcagcagcagcagcaacagcgctgccagcagcagcttcaagtttggagtgagcagcagcagcagcggccccagccagaccctgaccagcactggaaacttcaagtttggagaccagggcggcttcaagattggagtgtccagtgacagcggcagcatcaaccccatgtctgagggcttcaagttcagcaagcccatcggggacttcaagtttggagtgtcctctgagagcaagccagaggaggtgaagaaggacagcaagaatgacaacttcaagtttggcctgagcagcggcctgagcaaccctgtgtccctgacccccttccagtttggagtgagcaacctgggccaggaggagaagaaggaggagctgcccaagagcagcagcgctggcttctcctttggcaccggggtcatcaacagcaccccagccccagccaacaccatcgtgaccagcgagaacaagagcagcttcaacctgggcaccatcgagaccaagagcgcctctgtggcccccttcacctgcaagaccagcgaggccaagaaggaggagatgcctgccaccaagggcggcttctcctttggaaatgtggagcccgccagcctgcccagcgcctctgtgtttgtgctgggccgcacagaggagaagcagcaggagcctgtgaccagcaccagcctggtgtttgggaagaaggctgacaatgaggagcccaagtgccagcctgtgttctcctttggaaacagcgagcagaccaaggatgagaacagcagcaagagcaccttctccttctccatgaccaagcccagcgagaaggagagcgagcagcctgccaaggccacctttgcctttggagcccagaccagcaccacagctgaccagggcgccgccaagcctgtgttctccttcctgaacaacagcagcagcagcagcagcaccccagccaccagcgctgggggcggcatcttcggcagcagcaccagcagcagcaacccccctgtggccacctttgtgtttggccagagcagcaaccctgtgagcagcagcgccttcggcaacacagctgagagcagcaccagccagagcctgctcttcagccaggacagcaagctggccaccaccagcagcactggaacagctgtgaccccatttgtgtttggacctggggccagcagcaacaacaccaccaccagcggctttggatttggagccaccaccaccagcagcagcgctggcagcagctttgtgtttggcaccggccccagcgcccccagcgccagccctgcctttggagccaaccagacccccaccttcggccagagccagggcgccagccagcccaaccccccaggcttcggcagcatcagcagcagcacagccctcttccccaccggcagccagcctgccccacccaccttcggcaccgtgagcagcagcagccagccccctgtgtttggccagcagcccagccagagcgcctttggaagtggcaccacccccaacagcagcagcgccttccagtttggcagcagcaccaccaacttcaacttcaccaacaacagccccagcggggtcttcacctttggagccaacagcagcaccccagctgccagcgcccagcccagcggcagcggcggcttccccttcaaccagagccctgctgccttcaccgtgggcagcaatggcaagaatgtgttcagcagcagcggcaccagcttcagcggcaggaagatcaagacagctgtgagaagaaggaagtag

SEQ ID NO: 162509 - DNA, 4368 bp, synthetic construct
  misc_feature 1..4368: note = Description of Artificial Sequence: Synthetic coding sequence
  source 1..4368: mol_type = other DNA
ggcctgcggctgtgcctgagccggcccctgaccaggcctggagctggcagcggcggcggcagcgccatggccagcggggccggcggcgtgggcggcggcggcggcggcaagatccgcacccggcgctgccaccagggccccatcaagccctaccagcagggccggcagcagcaccagggcatcctgagccgggtgacagagagcgtgaagaacatcgtgcccggctggctgcagcgctacttcaacaagaatgaagatgtgtgcagctgcagcacagacaccagcgaggtgccccgctggccagagaacaaggaggaccacctggtgtatgcagatgaggagagcagcaacatcacagatggccgcatcaccccagagcctgctgtgagcaacacagaggagcccagcaccaccagcacagccagcaactacccagatgtgctgacccggcccagcctgcacaggagccacctgaacttctccatgctggagagccctgccctgcactgccagcccagcaccagcagcgccttccccatcggcagcagcggcttcagcctggtgaaggagatcaaggacagcaccagccagcatgatgatgacaacatcagcaccaccagcggcttcagcagccgggccagtgacaaggacatcaccgtgtccaagaacaccagcctgccccccctgtggagccctgaggccgagaggagccacagcctgagccagcacacagccaccagcagcaagaagccagccttcaacctgagcgccttcggcaccctgagccccagcctgggcaacagcagcatcctgaagaccagccagctgggggacagccccttctacccaggcaagaccacctacggcggcgctgctgctgctgtgcggcagagcaagctgaggaacaccccctaccaggcccctgtgcggcggcagatgaaggccaagcagctgagcgcccagagctatggagtgaccagcagcacagcccggcgcatcctgcagagcctggagaagatgagcagccccctggctgatgccaagaggatccccagcatcgtgagcagccccctgaacagccccctggacagaagtggcatcgacatcacagacttccaggccaagcgggagaaggtggacagccagtacccacctgtgcagaggctgatgacccccaagcctgtgtccatcgccaccaacagatctgtgtacttcaagcccagcctgacccccagcggggagttcaggaagaccaaccagagaattgacaacaagtgcagcacaggctatgagaagaacatgaccccaggccagaaccgggagcagcgggagagcggcttctcctaccccaacttcagcctgcctgctgccaacggcctgagcagcggcgtgggcggcggcggcggcaagatgaggcgggagaggaccaggtttgtggccagcaagcccctggaggaggaggagatggaggtgcctgtgctgcccaagatcagcctgcccatcaccagcagcagcctgcccaccttcaacttcagcagccctgagatcaccaccagcagccccagccccatcaacagcagccaggccctgaccaacaaggtgcagatgaccagccccagcagcacaggcagccccatgttcaagttcagcagccccatcgtgaagagcacagaggccaacgtgctgccccccagcagcatcggcttcaccttctctgtgcctgtggccaagacagctgagctgagcggcagcagcagcaccctggagcccatcatcagcagcagcggctttgccagccccaagattgacagcgtggccgcccagcccacagccaccagccctgtggtgtacaccaggcctgccatcagcagcttcagcagcagcggcatcggctttggagagagcctgaaggccggcagctcctggcagtgtgacacctgcctgctgcagaacaaggtgacagacaacaagtgcatcgcctgccaggccgccaagctgagcccccgggacacagccaagcagacaggaattgagacccccaacaagagcggcaagaccaccctgagcgccagcggcactggatttggagacaagttcaagcctgtgattggcacctgggactgtgacacctgcctggtgcagaacaagccagaggccatcaagtgtgtggcctgtgagacccccaagccaggcacctgtgtgaagagggccctgaccctgactgtggtgtctgagagcgctgagaccatgacagccagcagcagcagctgcaccgtgaccaccggcaccctgggctttggagacaagttcaagaggcccatcggctcctgggagtgcagcgtgtgctgcgtgagcaacaatgctgaggacaacaagtgtgtgtcctgcatgtctgagaagccaggcagctctgtgcctgccagcagcagcagcacagtgcctgtgtccctgcccagcggcggcagcctgggcctggagaagttcaagaagccagagggctcctgggactgtgagctgtgcctggtgcagaacaaggctgacagcaccaagtgcctggcctgtgagagcgccaagccaggcaccaagagcggcttcaagggctttgacaccagcagcagcagcagcaacagcgctgccagcagcagcttcaagtttggagtgagcagcagcagcagcggccccagccagaccctgaccagcactggaaacttcaagtttggagaccagggcggcttcaagattggagtgtccagtgacagcggcagcatcaaccccatgtctgagggcttcaagttcagcaagcccatcggggacttcaagtttggagtgtcctctgagagcaagccagaggaggtgaagaaggacagcaagaatgacaacttcaagtttggcctgagcagcggcctgagcaaccctgtgtccctgacccccttccagtttggagtgagcaacctgggccaggaggagaagaaggaggagctgcccaagagcagcagcgctggcttctcctttggcaccggggtcatcaacagcaccccagccccagccaacaccatcgtgaccagcgagaacaagagcagcttcaacctgggcaccatcgagaccaagagcgcctctgtggcccccttcacctgcaagaccagcgaggccaagaaggaggagatgcctgccaccaagggcggcttctcctttggaaatgtggagcccgccagcctgcccagcgcctctgtgtttgtgctgggccgcacagaggagaagcagcaggagcctgtgaccagcaccagcctggtgtttgggaagaaggctgacaatgaggagcccaagtgccagcctgtgttctcctttggaaacagcgagcagaccaaggatgagaacagcagcaagagcaccttctccttctccatgaccaagcccagcgagaaggagagcgagcagcctgccaaggccacctttgcctttggagcccagaccagcaccacagctgaccagggcgccgccaagcctgtgttctccttcctgaacaacagcagcagcagcagcagcaccccagccaccagcgctgggggcggcatcttcggcagcagcaccagcagcagcaacccccctgtggccacctttgtgtttggccagagcagcaaccctgtgagcagcagcgccttcggcaacacagctgagagcagcaccagccagagcctgctcttcagccaggacagcaagctggccaccaccagcagcactggaacagctgtgaccccatttgtgtttggacctggggccagcagcaacaacaccaccaccagcggctttggatttggagccaccaccaccagcagcagcgctggcagcagctttgtgtttggcaccggccccagcgcccccagcgccagccctgcctttggagccaaccagacccccaccttcggccagagccagggcgccagccagcccaaccccccaggcttcggcagcatcagcagcagcacagccctcttccccaccggcagccagcctgccccacccaccttcggcaccgtgagcagcagcagccagccccctgtgtttggccagcagcccagccagagcgcctttggaagtggcaccacccccaacagcagcagcgccttccagtttggcagcagcaccaccaacttcaacttcaccaacaacagccccagcggggtcttcacctttggagccaacagcagcaccccagctgccagcgcccagcccagcggcagcggcggcttccccttcaaccagagccctgctgccttcaccgtgggcagcaatggcaagaatgtgttcagcagcagcggcaccagcttcagcggcaggaagatcaagacagctgtgagaagaaggaagtag

SEQ ID NO: 162510 - DNA, 4521 bp, synthetic construct
  misc_feature 1..4521: note = Description of Artificial Sequence: Synthetic coding sequence
  source 1..4521: mol_type = other DNA
atggccagcggggccggcggcgtgggcggcggcggcggcggcaagatccgcacccggcgctgccaccagggccccatcaagccctaccagcagggccggcagcagcaccagggcatcctgagccgggtgacagagagcgtgaagaacatcgtgcccggctggctgcagcgctacttcaacaagaatgaagatgtgtgcagctgcagcacagacaccagcgaggtgccccgctggccagagaacaaggaggaccacctggtgtatgcagatgaggagagcagcaacatcacagatggccgcatcaccccagagcctgctgtgagcaacacagaggagcccagcaccaccagcacagccagcaactacccagatgtgctgacccggcccagcctgcacaggagccacctgaacttctccatgctggagagccctgccctgcactgccagcccagcaccagcagcgccttccccatcggcagcagcggcttcagcctggtgaaggagatcaaggacagcaccagccagcatgatgatgacaacatcagcaccaccagcggcttcagcagccgggccagtgacaaggacatcaccgtgtccaagaacaccagcctgccccccctgtggagccctgaggccgagaggagccacagcctgagccagcacacagccaccagcagcaagaagccagccttcaacctgagcgccttcggcaccctgagccccagcctgggcaacagcagcatcctgaagaccagccagctgggggacagccccttctacccaggcaagaccacctacggcggcgctgctgctgctgtgcggcagagcaagctgaggaacaccccctaccaggcccctgtgcggcggcagatgaaggccaagcagctgagcgcccagagctatggagtgaccagcagcacagcccggcgcatcctgcagagcctggagaagatgagcagccccctggctgatgccaagaggatccccagcatcgtgagcagccccctgaacagccccctggacagaagtggcatcgacatcacagacttccaggccaagcgggagaaggtggacagccagtacccacctgtgcagaggctgatgacccccaagcctgtgtccatcgccaccaacagatctgtgtacttcaagcccagcctgacccccagcggggagttcaggaagaccaaccagagaattgacaacaagtgcagcacaggctatgagaagaacatgaccccaggccagaaccgggagcagcgggagagcggcttctcctaccccaacttcagcctgcctgctgccaacggcctgagcagcggcgtgggcggcggcggcggcaagatgaggcgggagaggaccaggtttgtggccagcaagcccctggaggaggagcggcagggcctgactgtgctgcccaagctgatcagcagcagctgtgcccaggccatcatccccagctggcccctgaaggtgctgcggctgcaggagatggaggtgcctgtgctgcccaagatcagcctgcccatcaccagcagcagcctgcccaccttcaacttcagcagccctgagatcaccaccagcagccccagccccatcaacagcagccaggccctgaccaacaaggtgcagatgaccagccccagcagcacaggcagccccatgttcaagttcagcagccccatcgtgaagagcacagaggccaacgtgctgccccccagcagcatcggcttcaccttctctgtgcctgtggccaagacagctgagctgagcggcagcagcagcaccctggagcccatcatcagcagcagcgcccaccacgtgaccaccgtgaacagcaccaactgcaagaagaccccacctgaggactgtgagggccccttccggcctgctgagatcctgaaggagggctctgtgctggacatcctgaagagccctggctttgccagccccaagattgattctgtggccgcccagcccacagccaccagccctgtggtgtacaccaggcctgccatcagcagcttcagcagcagcggcattggatttggagagagcctgaaggccggcagctcctggcagtgtgacacctgcctgctgcagaacaaggtgacagacaacaagtgcatcgcctgccaggccgccaagctgagcccccgggacacagccaagcagacaggcatcgagacccccaacaagagcggcaagaccaccctgagcgccagcggcaccggctttggagacaagttcaagcctgtgattggcacctgggactgtgacacctgcctggtgcagaacaagccagaggccatcaagtgtgtggcctgtgagacccccaagccaggcacctgtgtgaagagggccctgaccctgactgtggtgtctgagagcgctgagaccatgacagccagcagcagcagctgcaccgtgaccaccggcaccctgggctttggagacaagttcaagaggcccatcggctcctgggagtgcagcgtgtgctgcgtgagcaacaatgctgaggacaacaagtgtgtgtcctgcatgtctgagaagccaggcagctctgtgcctgccagcagcagcagcacagtgcctgtgtccctgcccagcggcggcagcctgggcctggagaagttcaagaagccagagggctcctgggactgtgagctgtgcctggtgcagaacaaggctgacagcaccaagtgcctggcctgtgagagcgccaagccaggcaccaagagcggcttcaagggctttgacaccagcagcagcagcagcaacagcgctgccagcagcagcttcaagtttggagtgagcagcagcagcagcggccccagccagaccctgaccagcacaggcaacttcaagtttggagaccagggcggcttcaagattggagtgtccagtgacagcggcagcatcaaccccatgtctgagggcttcaagttcagcaagcccatcggggacttcaagtttggagtgagcagcgagagcaagccagaggaggtgaagaaggacagcaagaatgacaacttcaagtttggcctgagcagcggcctgagcaaccctgtgtccctgacccccttccagtttggagtgagcaacctgggccaggaggagaagaaggaggagctgcccaagagcagcagcgctggcttctcctttggaactggagtcatcaacagcaccccagccccagccaacaccatcgtgaccagcgagaacaagagcagcttcaacctgggcaccatcgagaccaagagcgcctctgtggcccccttcacctgcaagaccagcgaggccaagaaggaggagatgcctgccaccaagggcggcttctcctttggaaatgtggagcccgccagcctgcccagcgcctctgtgtttgtgctgggccgcacagaggagaagcagcaggagcctgtgaccagcaccagcctggtgtttgggaagaaggctgacaatgaggagcccaagtgccagcccgtcttctcctttggaaattctgagcagaccaaggatgagaacagcagcaagagcaccttctccttctccatgaccaagcccagcgagaaggagagcgagcagcctgccaaggccacctttgccttcggggcccagaccagcaccacagctgaccagggcgccgccaagcctgtgttctccttcctgaacaacagcagcagcagcagcagcaccccagccaccagcgctgggggcggcatcttcggcagcagcaccagcagcagcaacccccctgtggccacctttgtgtttggccagagcagcaaccctgtgagcagcagcgcctttggaaacacagctgagagcagcaccagccagagcctgctcttcagccaggacagcaagctggccaccaccagcagcactggaacagctgtgaccccatttgtgtttggacctggggccagcagcaacaacaccaccaccagcggcttcggctttggagccaccaccaccagcagcagcgctggcagcagctttgtgtttggaacaggccccagcgcccccagcgccagccctgccttcggggccaaccagacccccaccttcggccagagccagggcgccagccagcccaaccccccaggcttcggcagcatcagcagcagcacagccctcttccccaccggcagccagcctgccccacccacctttggaacagtgagcagcagcagccagccccctgtgtttggccagcagcccagccagagcgccttcggcagcggcaccacccccaacagcagcagcgccttccagtttggcagcagcaccaccaacttcaacttcaccaacaacagccccagcggggtcttcaccttcggggccaacagcagcaccccagctgccagcgcccagcccagcggcagcggcggcttccccttcaaccagagccctgctgccttcaccgtgggcagcaatggcaagaatgtgttcagcagcagcggcaccagcttcagcggcaggaagatcaagacagctgtgagaagaaggaagtag

SEQ ID NO: 162511 - DNA, 3555 bp, synthetic construct
  misc_feature 1..3555: note = Description of Artificial Sequence: Synthetic coding sequence
  source 1..3555: mol_type = other DNA
atgatgcagctgctgcagctgctgctgggcctgctgggccctgggggctacctgttcctgctgggggactgccaggaggtgaccaccctgactgtgaagtaccaggtgtctgaggaggtgcccagcggcaccgtcatcggcaagctgagccaggagctgggccgggaggagcggcggcggcaggccggggccgccttccaggtgctgcagctgccccaggccctgcccatccaggtggacagcgaggagggcctgctgagcacaggccggcggctggaccgggagcagctgtgccggcagtgggacccctgcctggtgtcctttgatgtgctggccactggagacctggccctgatccacgtggagatccaggtgctggacatcaatgaccaccagccccgcttccccaagggggagcaggagctggagatcagcgagagcgccagcctgcggacccgcatccccctggaccgggccctggaccctgacaccggccccaacaccctgcacacctacaccctgagccccagcgagcactttgccctggatgtgattgtgggcccagatgagaccaagcacgccgagctgattgtggtgaaggagctggaccgggagatccacagcttctttgacctggtgctgacagcctatgacaatggaaacccccccaagagcggcaccagcctggtgaaggtgaatgtgctggacagcaatgacaacagccctgcctttgctgagagcagcctggccctggagatccaggaggatgctgcccctggcaccctgctgatcaagctgacagccacagatcctgaccagggccccaacggggaggtggagttcttcctgagcaagcacatgcctcctgaggtgctggacaccttcagcattgatgccaagacaggccaggtgatcctgcggcggcccctggactatgagaagaacccagcctatgaggtggatgtgcaggcccgggacctgggccccaaccccatcccagcccactgcaaggtgctgatcaaggtgctggatgtgaatgacaacatccccagcatccacgtgacctgggccagccagcccagcctggtgtctgaggccctgcccaaggacagcttcatcgccctggtgatggctgatgacctggacagcggccacaacggcctggtgcactgctggctgagccaggagctgggccacttccggctgaagaggaccaacggcaacacctacatgctgctgaccaatgccaccctggaccgggagcagtggcccaagtacaccctgaccctgctggcccaggaccagggcctgcagcccctgagcgccaagaagcagctgagcatccagatcagtgacatcaatgacaatgcccctgtgtttgagaagagccgctatgaggtgtccacccgggagaacaacctgcccagcctgcacctgatcaccatcaaggcccatgatgctgacctgggcatcaacgggaaggtgtcctaccgcatccaggacagccctgtggcccacctggtggccatcgacagcaacacaggagaggtgacagcccagaggagcctgaactatgaggagatggccggctttgagttccaggtgattgctgaggacagcggccagcccatgctggccagctctgtgtctgtgtgggtgtccctgctggatgccaatgacaatgcccctgaggtggtgcagcctgtgctgagtgatggcaaggccagcctgtctgtgctggtgaatgccagcacaggccacctgctggtgcccatcgagacccccaacggcctgggccctgctggaacagacaccccacccctggccacccacagcagccggcccttcctgctgaccaccatcgtggccagagatgctgacagcggggccaatggagagcccctgtacagcatccgctctggaaatgaggcccacctgttcatcctgaacccccacacaggccagctgtttgtgaatgtgaccaatgccagcagcctgattggcagcgagtgggagctggagatcgtggtggaggaccagggcagcccccccctgcagacccgggccctgctgcgggtgatgtttgtgacctctgtggaccacctgcgggacagcgccaggaagccaggggccctgtccatgtccatgctgaccgtcatctgcctggccgtgctgctgggcatcttcggcctcatcctggccctcttcatgagcatctgcaggacagagaagaaggacaacagagcctacaactgccgggaggccgagagcacctaccggcagcagcccaagaggccccagaagcacatccagaaggctgacatccacctggtgcctgtgctgcggggccaggccggggagccctgtgaggtgggccagagccacaaggatgtggacaaggaggccatgatggaggccggctgggacccctgcctgcaggcccccttccacctgacccccaccctgtaccgcaccctgaggaaccagggcaaccagggcgccccagctgagagccgggaggtgctgcaggacacagtgaacctgctcttcaaccacccccggcagagaaatgccagccgggagaacctgaacctgcctgagccccagcctgccaccggccagcccaggagccggcccctgaaggtggccggcagccccaccggccgcctggccggggaccagggcagcgaggaggccccccagaggcccccagccagcagcgccaccctgcggcggcagaggcacctgaatggcaaggtgtccccagagaaggagagcggcccccggcagatcctgcggagcctggtgcggctgtctgtggccgcctttgctgagaggaaccctgtggaggagctgactgtggacagcccccctgtgcagcagatcagccagctgctgagcctgctgcaccagggccagttccagcccaagcccaaccaccggggcaacaagtacctggccaagccaggcggcagccgcagcgccatcccagacacagatggccccagcgcccgggccggcggccagacagatcctgagcaggaggagggccccctggaccctgaggaggacctgtctgtgaagcagctgctggaggaggagctgagcagcctgctggaccccagcacaggcctggccctggaccggctgagcgccccagaccctgcctggatggcccggctgagcctgcccctgaccaccaactacagagacaacgtcatcagcccagatgctgctgccacagaggagcccaggaccttccagaccttcggcaaggccgaggcccctgagctgagccccaccggcacccggctggccagcacctttgtgtctgagatgagcagcctgctggagatgctgctggagcagaggagctccatgcctgtggaggccgccagcgaggccctgcggcggctgtctgtgtgtggccgcaccctgagcctggacctggccaccagcgctgccagcggcatgaaggtgcagggcgaccccggcggcaagacaggaacagagggcaagagccggggcagcagcagcagcagccgctgcctgtag

SEQ ID NO: 162512 - DNA, 3999 bp, synthetic construct
  misc_feature 1..3999: note = Description of Artificial Sequence: Synthetic coding sequence
  source 1..3999: mol_type = other DNA
atgtctgacatggactaccccctgcagggccctggcctgctgtctgtgcccaacctgcctgagatcagcagcatccggcgggtgcccctgcccccagagctggtggagcagtttggccacatgcagtgcaactgcatgatgggcgtcttcccccccatcagccgggcctggctgaccatcgacagcgacatcttcatgtggaactatgaagatggaggagacctggcctactttgatggcctgtctgagaccatcctggccgtgggcctggtgaagcccaaggccggcatcttccagccccacgtgcgccacctgctggtgctggccacccctgtggacatcgtcatcctgggcctgtcctatgccaacctgcagacaggcagcggcgtgctgaatgacagcctgagcggcggcatgcagctgctgcctgaccccctgtacagcctgcccacagacaacacctacctgctgaccatcaccagcacagacaatggccgcatcttcctggccggcaaggatggctgcctgtatgaggtggcctaccaggccgaggccggctggttcagccagcgctgcaggaagatcaaccacagcaagagcagcctgtccttcctggtgcccagcctgctgcagttcaccttctctgaagatgaccccatcctgcagatcgccatcgacaacagcaggaacatcctgtacaccaggtctgagaagggcgtcatccaggtgtatgacctgggccaggacggccagggcatgagccgggtggcctctgtgtcccagaatgccatcgtgtctgctgctggcaacatcgcccggaccatcgacaggagcgtcttcaagcccatcgtgcagattgctgtgattgagaacagcgagagcctggactgccagctgctggccgtgacccatgctggggtgcggctgtacttcagcacctgccccttccggcagcccctggcccggcccaacaccctgaccctggtgcacgtgcggctgcccccaggcttcagcgccagcagcacagtggagaagcccagcaaggtgcaccgggccctgtacagcaagggcatcctgctgatggccgcctctgaaaatgaagataatgacatcctgtggtgtgtgaaccacgacaccttccccttccagaagcccatgatggagacccagatgacagctggggtggatggccacagctgggccctgagcgccattgatgagctgaaggtggacaagatcatcacccccctgaacaaggaccacatccccatcacagacagccctgtggtggtgcagcagcacatgctgccccccaagaagtttgtgctgctgagcgcccagggcagcctgatgttccacaagctgcggcctgtggaccagctgcggcacctgctggtgtccaatgtgggcggagatggagaggagattgagcgcttcttcaagctgcaccaggaggaccaggcctgtgccacctgcctgatcctggcctgcagcacagctgcctgtgaccgggaggtgtctgcctgggccacccgggccttcttccgctatggaggagaggcccagatgaggttccccaccaccctgcccccacccagcaatgtgggccccatcctgggcagccctgtgtacagcagcagccctgtgcccagcggcagcccctaccccaaccccagcttcctgggcacccccagccacggcatccagcccccagccatgagcacccctgtgtgtgccctgggcaacccagccacccaggccaccaacatgagctgtgtgacaggccctgagatcgtgtacagcggcaagcacaacggcatctgcatctacttcagccgcatcatgggcaacatctgggatgccagcctggtggtggagcgcatcttcaagagcggcaaccgggagatcacagccatcgagagctctgtgccctgccagctgctggagagcgtgctgcaggagctgaagggcctgcaggagttcctggacaggaacagccagtttgctgggggccccctgggcaaccccaacaccacagccaaggtgcagcagaggctgattggcttcatgaggccagaaaatggaaacccccagcagatgcagcaggagctgcagaggaagttccacgaggcccagctgtctgagaagatcagcctgcaggccatccagcagctggtgaggaagagctaccaggccctggccctgtggaagctgctgtgtgagcaccagttcaccatcatcgtggccgagctgcagaaggagctgcaggagcagctgaagatcaccaccttcaaggacctggtgatccgggacaaggagctgactggagccctgattgccagcctcatcaactgctacatccgggacaatgctgctgtggatggcatcagcctgcacctgcaggacatctgccccctgctgtacagcacagatgatgccatctgcagcaaggccaatgagctgctgcagaggagccggcaggtgcagaacaagacagagaaggagaggatgctgcgggagagcctgaaggagtaccagaagatcagcaaccaggtggacctgagcaatgtgtgtgcccagtaccggcaggtgcgcttctatgaaggagtggtggagctgagcctgacagctgctgagaagaaggacccccagggcctgggcctgcacttctacaagcatggagagcctgaggaggacatcgtgggcctgcaggccttccaggagcggctgaacagctacaagtgcatcacagacaccctgcaggagctggtgaaccagagcaaggccgccccccagagccccagcgtgcccaagaagccaggcccccctgtgctgagcagtgaccccaacatgctgagcaatgaggaggccggccaccactttgagcagatgctgaagctgagccagaggagcaaggatgagctgttcagcatcgccctgtacaactggctgatccaggtggacctggccgacaagctgctgcaggtggccagccccttcctggagccccacctggtgaggatggccaaggtggaccagaacagagtgcgctacatggacctgctgtggagatactatgagaagaacagaagcttcagcaatgctgcccgggtgctgagccggctggccgacatgcacagcacagagatcagcctgcagcagaggctggagtacatcgcccgggccatcctgagcgccaagagcagcacagccatcagcagcattgctgctgatggagagttcctgcacgagctggaggagaagatggaggtggcccgcatccagctgcagatccaggagaccctgcagaggcagtacagccaccacagctctgtgcaggatgctgtgtcccagctggacagcgagctgatggacatcaccaagctgtatggagaatttgctgaccccttcaagctggccgagtgcaagctggccatcatccactgtgccggctacagcgaccccatcctggtgcagaccctgtggcaggacatcatcgagaaggagctgagtgacagcgtgaccctgagcagcagtgacaggatgcacgccctgagcctgaagatcgtgctgctgggcaagatctatgccggcaccccccgcttcttccccctggacttcatcgtgcagttcctggagcagcaggtgtgcaccctgaactgggatgtgggctttgtgatccagaccatgaatgaaattggagtgcccctgccccggctgctggaggtgtatgaccagctgttcaagagccgggaccccttctggaacaggatgaagaagcccctgcacctgctggactgcatccacgtgctgctgatccgctacgtggagaaccccagccaggtgctgaactgtgaaagaagacgcttcaccaacctgtgcctggatgctgtgtgtggctacctggtggagctgcagagcatgagcagctctgtggccgtgcaggccatcaccggcaacttcaagagcctgcaggccaagctggagcggctgcactag

SEQ ID NO: 162513 - DNA, 4062 bp, synthetic construct
  misc_feature 1..4062: note = Description of Artificial Sequence: Synthetic coding sequence
  source 1..4062: mol_type = other DNA
atgtacccagacctgtctgagctgctgatggtgtctgcccccaacaaccccaccgtgtctggcatgtctgacatggactaccccctgcagggccctggcctgctgtctgtgcccaacctgcctgagatcagcagcatcagaagagtgcccctgcccccagagctggtggagcagtttggccacatgcagtgcaactgcatgatgggcgtcttcccccccatcagccgggcctggctgaccatcgacagcgacatcttcatgtggaactatgaagatggaggagacctggcctactttgatggcctgtctgagaccatcctggccgtgggcctggtgaagcccaaggccggcatcttccagccccacgtgcgccacctgctggtgctggccacccctgtggacatcgtcatcctgggcctgtcctatgccaacctgcagacaggcagcggcgtgctgaatgacagcctgagcggcggcatgcagctgctgcctgaccccctgtacagcctgcccacagacaacacctacctgctgaccatcaccagcacagacaatggccgcatcttcctggccggcaaggatggctgcctgtatgaggtggcctaccaggccgaggccggctggttcagccagcgctgcaggaagatcaaccacagcaagagcagcctgtccttcctggtgcccagcctgctgcagttcaccttctctgaagatgaccccatcctgcagatcgccatcgacaacagcaggaacatcctgtacaccaggtctgagaagggcgtcatccaggtgtatgacctgggccaggacggccagggcatgagccgggtggcctctgtgtcccagaatgccatcgtgtctgctgctggcaacatcgcccggaccatcgacagatctgtgttcaagcccatcgtgcagattgctgtgattgaaaattctgagagcctggactgccagctgctggccgtgacccacgccggcgtgcggctgtacttcagcacctgccccttccggcagcccctggcccggcccaacaccctgaccctggtgcacgtgcggctgcccccaggcttcagcgccagcagcacagtggagaagcccagcaaggtgcaccgggccctgtacagcaagggcatcctgctgatggccgcctctgaaaatgaagataatgacatcctgtggtgtgtgaaccacgacaccttccccttccagaagcccatgatggagacccagatgacagctggggtggatggccacagctgggccctgagcgccattgatgagctgaaggtggacaagatcatcacccccctgaacaaggaccacatccccatcacagacagccctgtggtggtgcagcagcacatgctgccccccaagaagtttgtgctgctgagcgcccagggcagcctgatgttccacaagctgcggcctgtggaccagctgcggcacctgctggtgtccaatgtgggcggagatggagaggagattgagcgcttcttcaagctgcaccaggaggaccaggcctgtgccacctgcctgatcctggcctgcagcacagctgcctgtgaccgggaggtgtctgcctgggccacccgggccttcttccgctatggaggagaggcccagatgaggttccccaccaccctgcccccacccagcaatgtgggccccatcctgggcagccctgtgtacagcagcagccctgtgcccagcggcagcccctaccccaaccccagcttcctgggcacccccagccacggcatccagcccccagccatgagcacccctgtgtgtgccctgggcaacccagccacccaggccaccaacatgagctgtgtgactggacctgagatcgtgtacagcggcaagcacaacggcatctgcatctacttcagccgcatcatgggcaacatctgggatgccagcctggtggtggagcgcatcttcaagagcggcaaccgggagatcacagccatcgagagctctgtgccctgccagctgctggagagcgtgctgcaggagctgaagggcctgcaggagttcctggacaggaacagccagtttgctgggggccccctgggcaaccccaacaccacagccaaggtgcagcagaggctcatcggcttcatgaggccagaaaatggaaacccccagcagatgcagcaggagctgcagaggaagttccacgaggcccagctgtctgagaagatcagcctgcaggccatccagcagctggtgaggaagagctaccaggccctggccctgtggaagctgctgtgtgagcaccagttcaccatcatcgtggccgagctgcagaaggagctgcaggagcagctgaagatcaccaccttcaaggacctggtgatccgggacaaggagctgaccggggccctgattgccagcctcatcaactgctacatccgggacaatgctgctgtggatggcatcagcctgcacctgcaggacatctgccccctgctgtacagcacagatgatgccatctgcagcaaggccaatgagctgctgcagaggagccggcaggtgcagaacaagacagagaaggagaggatgctgcgggagagcctgaaggagtaccagaagatcagcaaccaggtggacctgagcaatgtgtgtgcccagtaccggcaggtgcgcttctatgagggcgtggtggagctgagcctgacagctgctgagaagaaggacccccagggcctgggcctgcacttctacaagcacggggagccagaagaagatattgtgggcctgcaggccttccaggagcggctgaacagctacaagtgcatcacagacaccctgcaggagctggtgaaccagagcaaggccgccccccagagccccagcgtgcccaagaagccaggcccccctgtgctgagcagtgaccccaacatgctgagcaatgaggaggccggccaccactttgagcagatgctgaagctgagccagaggagcaaggatgagctgttcagcatcgccctgtacaactggctgatccaggtggacctggccgacaagctgctgcaggtggccagccccttcctggagccccacctggtgaggatggccaaggtggaccagaacagagtgcgctacatggacctgctgtggagatactatgagaagaacagaagcttcagcaatgctgcccgggtgctgagccggctggccgacatgcacagcacagagatcagcctgcagcagaggctggagtacatcgcccgggccatcctgagcgccaagagcagcacagccatcagcagcattgctgctgatggagagttcctgcacgagctggaggagaagatggaggtggcccgcatccagctgcagatccaggagaccctgcagaggcagtacagccaccacagctctgtgcaggatgctgtgtcccagctggacagcgagctgatggacatcaccaagctgtatggagaatttgctgaccccttcaagctggccgagtgcaagctggccatcatccactgtgccggctacagcgaccccatcctggtgcagaccctgtggcaggacatcatcgagaaggagctgagtgacagcgtgaccctgagcagcagtgacaggatgcacgccctgagcctgaagatcgtgctgctgggcaagatctatgccggcaccccccgcttcttccccctggacttcatcgtgcagttcctggagcagcaggtgtgcaccctgaactgggatgtgggcttcgtcatccagaccatgaatgaaattggagtgcccctgccccggctgctggaggtgtatgaccagctgttcaagagccgggaccccttctggaacaggatgaagaagcccctgcacctgctggactgcatccacgtgctgctgatccgctacgtggagaaccccagccaggtgctgaactgtgagcggcggcgcttcaccaacctgtgcctggatgctgtgtgtggctacctggtggagctgcagagcatgagcagctctgtggccgtgcaggccatcactggaaacttcaagagcctgcaggccaagctggagcggctgcactag

SEQ ID NO: 162514 - DNA, 3984 bp, synthetic construct
  misc_feature 1..3984: note = Description of Artificial Sequence: Synthetic coding sequence
  source 1..3984: mol_type = other DNA
atgcccagcagcctgctgggcgccgccatgcctgccagcaccagcgctgctgccctgcaggaggccctggagaatgccggccgcctgattgaccggcagctgcaggaggacaggatgtacccagacctgtctgagctgctgatggtgtctgcccccaacaaccccaccgtgtctggcatgtctgacatggactaccccctgcagggccctggcctgctgtctgtgcccaacctgcctgagatcagcagcatcagaagagtgcccctgcccccagagctggtggagcagtttggccacatgcagtgcaactgcatgatgggcgtcttcccccccatcagccgggcctggctgaccatcgacagcgacatcttcatgtggaactatgaagatggaggagacctggcctactttgatggcctgtctgagaccatcctggccgtgggcctggtgaagcccaaggccggcatcttccagccccacgtgcgccacctgctggtgctggccacccctgtggacatcgtcatcctgggcctgtcctatgccaacctgcagacaggcagcggcgtgctgaatgacagcctgagcggcggcatgcagctgctgcctgaccccctgtacagcctgcccacagacaacacctacctgctgaccatcaccagcacagacaatggccgcatcttcctggccggcaaggatggctgcctgtatgaggtggcctaccaggccgaggccggctggttcagccagcgctgcaggaagatcaaccacagcaagagcagcctgtccttcctggtgcccagcctgctgcagttcaccttctctgaagatgaccccatcctgcagatcgccatcgacaacagcaggaacatcctgtacaccaggtctgagaagggcgtcatccaggtgtatgacctgggccaggacggccagggcatgagccgggtggcctctgtgtcccagaatgccatcgtgtctgctgctggcaacatcgcccggaccatcgacagatctgtgttcaagcccatcgtgcagattgctgtgattgaaaattctgagagcctggactgccagctgctggccgtgacccacgccggcgtgcggctgtacttcagcacctgccccttccggcagcccctggcccggcccaacaccctgaccctggtgcacgtgcggctgcccccaggcttcagcgccagcagcacagtggagaagcccagcaaggtgcaccgggccctgtacagcaagggcatcctgctgatggccgcctctgaaaatgaagataatgacatcctgtggtgtgtgaaccacgacaccttccccttccagaagcccatgatggagacccagatgacagctggggtggatggccacagctgggccctgagcgccattgatgagctgaaggtggacaagatcatcacccccctgaacaaggaccacatccccatcacagacagccctgtggtggtgcagcagcacatgctgccccccaagaagtttgtgctgctgagcgcccagggcagcctgatgttccacaagctgcggcctgtggaccagctgcggcacctgctggtgtccaatgtgggcggagatggagaggagattgagcgcttcttcaagctgcaccaggaggaccaggcctgtgccacctgcctgatcctggcctgcagcacagctgcctgtgaccgggaggtgtctgcctgggccacccgggccttcttccgctatggaggagaggcccagatgaggttccccaccaccctgcccccacccagcaatgtgggccccatcctgggcagccctgtgtacagcagcagccctgtgcccagcggcagcccctaccccaaccccagcttcctgggcacccccagccacggcatccagcccccagccatgagcacccctgtgtgtgccctgggcaacccagccacccaggccaccaacatgagctgtgtgactggacctgagatcgtgtacagcggcaagcacaacggcatctgcatctacttcagccgcatcatgggcaacatctgggatgccagcctggtggtggagcgcatcttcaagagcggcaaccgggagatcacagccatcgagagctctgtgccctgccagctgctggagagcgtgctgcaggagctgaagggcctgcaggagttcctggacaggaacagccagtttgctgggggccccctgggcaaccccaacaccacagccaaggtgcagcagaggctcatcggcttcatgaggccagaaaatggaaacccccagcagatgcagcaggagctgcagaggaagttccacgaggcccagctgtctgagaagatcagcctgcaggccatccagcagctggtgaggaagagctaccaggccctggccctgtggaagctgctgtgtgagcaccagttcaccatcatcgtggccgagctgcagaaggccaatgagctgctgcagaggagccggcaggtgcagaacaagacagagaaggagaggatgctgcgggagagcctgaaggagtaccagaagatcagcaaccaggtggacctgagcaatgtgtgtgcccagtaccggcaggtgcgcttctatgagggcgtggtggagctgagcctgacagctgctgagaagaaggacccccagggcctgggcctgcacttctacaagcacggggagccagaagaagatattgtgggcctgcaggccttccaggagcggctgaacagctacaagtgcatcacagacaccctgcaggagctggtgaaccagagcaaggccgccccccagagccccagcgtgcccaagaagccaggcccccctgtgctgagcagtgaccccaacatgctgagcaatgaggaggccggccaccactttgagcagatgctgaagctgagccagaggagcaaggatgagctgttcagcatcgccctgtacaactggctgatccaggtggacctggccgacaagctgctgcaggtggccagccccttcctggagccccacctggtgaggatggccaaggtggaccagaacagagtgcgctacatggacctgctgtggagatactatgagaagaacagaagcttcagcaatgctgcccgggtgctgagccggctggccgacatgcacagcacagagatcagcctgcagcagaggctggagtacatcgcccgggccatcctgagcgccaagagcagcacagccatcagcagcattgctgctgatggagagttcctgcacgagctggaggagaagatggaggtggcccgcatccagctgcagatccaggagaccctgcagaggcagtacagccaccacagctctgtgcaggatgctgtgtcccagctggacagcgagctgatggacatcaccaagctgtatggagaatttgctgaccccttcaagctggccgagtgcaagctggccatcatccactgtgccggctacagcgaccccatcctggtgcagaccctgtggcaggacatcatcgagaaggagctgagtgacagcgtgaccctgagcagcagtgacaggatgcacgccctgagcctgaagatcgtgctgctgggcaagatctatgccggcaccccccgcttcttccccctggacttcatcgtgcagttcctggagcagcaggtgtgcaccctgaactgggatgtgggcttcgtcatccagaccatgaatgaaattggagtgcccctgccccggctgctggaggtgtatgaccagctgttcaagagccgggaccccttctggaacaggatgaagaagcccctgcacctgctggactgcatccacgtgctgctgatccgctacgtggagaaccccagccaggtgctgaactgtgagcggcggcgcttcaccaacctgtgcctggatgctgtgtgtggctacctggtggagctgcagagcatgagcagctctgtggccgtgcaggccatcactggaaacttcaagagcctgcaggccaagctggagcggctgcactag

SEQ ID NO: 162515 - DNA, 4311 bp, synthetic construct
  misc_feature 1..4311: note = Description of Artificial Sequence: Synthetic coding sequence
  source 1..4311: mol_type = other DNA
atgctgcacctgtctgctgcccccccagcccctcctcctgaggtgacagccacagcccggccctgcctgtgcagcgtgggcagaagaggagatggcggcaagatggctgctgctggggccctggagaggagctttgtggagctgtctggagctgagcgggagcggcccaggcacttccgggagttcaccgtgtgcagcattggaacagccaatgctgtggccggggctgtgaagtacagcgagagcgctgggggcttctactacgtggagagcggcaagctgttctctgtgaccaggaaccgcttcatccactggaagaccagcggggacaccctggagctgatggaggagagcctggacatcaacctgctgaacaatgccatccggctgaagttccagaactgcagcgtgctgcctggaggagtgtatgtgtctgagacccagaacagagtcatcatcctgatgctgaccaaccagacagtgcaccggctgctgctgccccaccccagcaggatgtacagaagtgagctggtggtggacagccagatgcagagcatcttcacagacatcggcaaggtggacttcacagacccctgcaactaccagctgatcccagctgtgcccggcatcagccccaacagcacagccagcacagcctggctgagcagtgatggagaggccctgtttgccctgccctgtgccagcggcggcatctttgtgctgaagctgcccccctatgacatccctggcatggtgtctgtggtggagctgaagcagagctctgtgatgcagaggctgctgaccggctggatgcccacagccatccggggggaccagagccccagcgaccggcccctgagcctggccgtgcactgtgtggagcatgatgccttcatctttgccctgtgccaggaccacaagctgaggatgtggagctacaaggagcagatgtgcctgatggtggccgacatgctggagtatgtgcctgtgaagaaggacctgcggctgacagctggcaccggccacaagctgcggctggcctacagccccaccatgggcctgtacctgggcatctacatgcacgcccccaagaggggccagttctgcatcttccagctggtgtccacagagagcaaccgctacagcctggaccacatcagcagcctcttcaccagccaggagaccctgattgactttgccctgaccagcacagacatctgggccctgtggcatgatgctgagaaccagacagtggtgaagtacatcaactttgagcacaacgtggccggccagtggaaccctgtgttcatgcagcccctgcctgaggaggagatcgtcatcagagatgaccaggacccccgggagatgtacctgcagagcctcttcaccccaggccagttcaccaatgaggccctgtgcaaggccctgcagatcttctgccggggcacagaaagaaacctggacctgtcctggagcgagctgaagaaggaggtgaccctggccgtggagaatgagctgcagggctctgtgacagaatatgagttcagccaggaggagttcaggaacctgcagcaggagttctggtgcaagttctacgcctgctgcctgcagtaccaggaggccctgagccaccccctggccctgcacctgaacccccacaccaacatggtgtgcctgctgaagaagggctacctgtccttcctgatccccagcagcctggtggaccacctgtacctgctgccctatgagaacctgctgacagaagatgagaccaccatcagtgatgatgtggacatcgccagagatgtgatctgcctgatcaagtgcctgcggctgattgaggagagcgtgacagtggacatgtctgtcatcatggagatgagctgctacaacctgcagagccctgagaaggctgctgagcagatcctggaggacatgatcaccattgatgtggagaatgtgatggaggacatctgcagcaagctgcaggagatccggaaccccatccacgccatcggcctgctgatccgggagatggactatgaaacagaggtggagatggagaagggcttcaacccagcccagcccctgaacatccgcatgaacctgacccagctgtatggcagcaacacagctggctacatcgtgtgccggggcgtgcacaagatcgccagcacccgcttcctgatctgccgggacctgctgatcctgcagcagctgctgatgaggctgggagatgctgtgatctggggcaccggccagctgttccaggcccagcaggacctgctgcacaggacagcccccctgctgctgagctactacctgatcaagtggggctctgaatgtctggccacagatgtgcccctggacaccctggagagcaacctgcagcacctgtctgtgctggagctgacagattctggggccctgatggccaacagatttgtgagcagcccccagaccatcgtggagctgttcttccaggaggtggccaggaagcacatcatcagccacctgttcagccagcccaaggcccccctgagccagacaggcctgaactggccagagatgatcacagccatcaccagctacctgctgcagctgctgtggcccagcaaccctggctgcctcttcctggagtgcctgatgggcaactgccagtatgtgcagctgcaggactacatccagctgctgcacccctggtgccaggtgaatgtgggcagctgccgcttcatgctgggccgctgctacctggtgactggagagggccagaaggccctggagtgcttctgccaggccgccagcgaggtgggcaaggaggagttcctggacaggctcatccgctcagaagatggagagatcgtgtccaccccccggctgcagtactatgacaaggtgctgcggctgctggatgtgattggcctgcctgagctggtgatccagctggccaccagcgccatcacagaggccggagatgactggaagagccaggccaccctgcggacctgcatcttcaagcaccacctggacctgggccacaacagccaggcctatgaggccctgacccagatcccagacagcagccggcagctggactgcctgcggcagctggtggtggtgctgtgtgagaggagccagctgcaggacctggtggagttcccctacgtgaacctgcacaatgaggtggtgggcatcatcgagagccgggcccgggctgtggacctgatgacccacaactactatgagctgctgtatgccttccacatctaccgccacaactacaggaaggccggcaccgtgatgtttgaatatggcatgaggctgggccgggaggtgaggaccctgcggggcctggagaagcagggcaactgctacctggccgccctgaactgcctgcggctcatccggccagaatatgcctggatcgtgcagcctgtgtctggagctgtgtatgacaggcctggggccagccccaagaggaaccatgatggagaatgtacagctgcccccaccaaccggcagatcgagatcctggagctggaggacctggagaaggagtgcagcctggcccgcatccggctgaccctggcccagcacgaccccagcgctgtggccgtggccggcagcagcagcgctgaggagatggtgaccctgctggtgcaggccggcctgtttgacacagccatcagcctgtgccagaccttcaagctgcccctgacccctgtgtttgagggcctggccttcaagtgcatcaagctgcagtttggaggagaggccgcccaggccgaggcctgggcctggctggccgccaaccagctgagcagcgtcatcaccaccaaggagagcagcgccacagatgaggcctggaggctgctgagcacctacctggagcgctacaaggtgcagaacaacctgtaccaccactgtgtgatcaacaagctgctgagccatggagtgcccctgcccaactggctgatcaacagctacaagaaggtggatgctgctgagctgctgcggctgtacctgaactatgacctgctggaggaggccgtggacctggtgtctgaatatgtggatgctgtgctgggcaagggccaccagtactttggaattgagttccccctgagcgccacagcccccatggtgtggctgccctacagcagcattgaccagctgctgcaggccctgggggagaacagcgccaacagccacaacatcgccctgagccagaagatcctggacaagctggaggactaccagcagaaggtggacaaggccacccgggacctgctgtacagaaggaccctgtag

SEQ ID NO: 162516 - DNA, 1452 bp, synthetic construct
  misc_feature 1..1452: note = Description of Artificial Sequence: Synthetic coding sequence
  source 1..1452: mol_type = other DNA
atggtgtctgtggtggagctgaagcagagctctgtgatgcagaggctgctgaccggctggatgcccacagccatccggggggaccagagccccagcgaccggcccctgagcctggccgtgcactgtgtggagcatgatgccttcatctttgccctgtgccaggaccacaagctgaggatgtggagctacaaggagcagatgtgcctgatggtggccgacatgctggagtatgtgcctgtgaagaaggacctgcggctgacagctggcaccggccacaagctgcggctggcctacagccccaccatgggcctgtacctgggcatctacatgcacgcccccaagaggggccagaggcggggctttgccatgctgcccggcctgaagctgctgagcagcagcagcccccccaccagcgccagccagtgtgccggcatcacctctgtgaaccacagcacccagcctgagttcttcttctgcatcttccagctggtgtccacagagagcaaccgctacagcctggaccacatcagcagcctcttcaccagccaggagaccctgattgactttgccctgaccagcacagacatctgggccctgtggcatgatgctgagaaccagacagtggtgaagtacatcaactttgagcacaacgtggccggccagtggaaccctgtgttcatgcagcccctgcctgaggaggagatcgtcatcagagatgaccaggacccccgggagatgtacctgcagagcctcttcaccccaggccagttcaccaatgaggccctgtgcaaggccctgcagatcttctgccggggcacagaaagaaacctggacctgtcctggagcgagctgaagaaggaggtgaccctggccgtggagaatgagctgcagggctctgtgacagaatatgagttcagccaggaggagttcaggaacctgcagcaggagttctggtgcaagttctacgcctgctgcctgcagtaccaggaggccctgagccaccccctggccctgcacctgaacccccacaccaacatggtgtgcctgctgaagaagggctacctgtccttcctgatccccagcagcctggtggaccacctgtacctgctgccctatgagaacctgctgacagaagatgagaccaccatcagtgatgatgtggacatcgccagagatgtgatctgcctgatcaagtgcctgcggctgattgaggagagcgtgacagtggacatgtctgtcatcatggagatgagctgctacaacctgcagagccctgagaaggctgctgagcagatcctggaggacatgatcaccattgatgtggagaatgtgatggaggacatctgcagcaagctgcaggagatccggaaccccatccacgccatcggcctgctgatccgggagatggactatgaaacagaggtggagatggagaagggcttcaacccctag

SEQ ID NO: 162517 - DNA, 675 bp, synthetic construct
  misc_feature 1..675: note = Description of Artificial Sequence: Synthetic coding sequence
  source 1..675: mol_type = other DNA
atgctgcacctgtctgctgcccccccagcccctcctcctgaggtgacagccacagcccggccctgcctgtgcagcgtgggcagaagaggagatggcggcaagatggctgctgctggggccctggagaggagctttgtggagctgtctggagctgagcgggagcggcccaggcacttccgggagttcaccgtgtgcagcattggaacagccaatgctgtggccggggctgtgaagtacagcgagagcgctgggggcttctactacgtggagagcggcaagctgttctctgtgaccaggaaccgcttcatccactggaagaccagcggggacaccctggagctgatggaggagagcctggacatcaacctgctgaacaatgccatccggctgaagttccagaactgcagcgtgctgcctggaggagtgtatgtgtctgagacccagaacagagtcatcatcctgatgctgaccaaccagacagtgcaccggctgctgctgccccaccccagcaggatgtacagatctgtgtcctggctgagcgccatctccttcatcagccagatcaccctgggcgtgaccaacgtggtgctggagcgctgcctgctggagctgaaggagatctggatcctggtgatcccccaccaggcctactttgacagctaccgcctgaagtag

SEQ ID NO: 162518 - DNA, 6039 bp, synthetic construct
  misc_feature 1..6039: note = Description of Artificial Sequence: Synthetic coding sequence
  source 1..6039: mol_type = other DNA
atggccacccccctggccgtgaacagcgctgccagcctgtggggcccctacaaggacatctggcacaaggtgggcaatgccctgtggaggcggcagcctgaggccgtgcacctgctggacaagatcctgaagaagcacaagccagacttcatcagcctcttcaagaacccccccaagaatgtgcagcagcacgagaaggtgcagaaggccagcacagagggcgtggccatccagggccagcagggcacccggctgctgcctgagcagctgatcaaggaggccttcatcctgagtgacctgtttgatattggagagctggccgctgtggagctgctgctggccggggagcaccagcagccccacttccctggcctgacccggggcctggtggccgtgctgctgtactgggatggcaagcgctgcatcgccaacagcctgaaggccctgatccagagcagaagaggcaagacctggaccctggagctgagccctgagctggcctccatgaccacccgcttcacagatgagctgatggagcagggcctgacctacaaggtgctgaccctggtgtcccagattgatgtgaacaatgaatttgagaagctgcagcgggagcggggcctgggcagcgagaagcacaggaaggaggtgtctgacctgatcaaggaatgtcggcagagcctggccgagagcctgtttgcctgggcctgccagagccccctgggcaaggaggacaccctgctgctgattggccacctggagcgggtgacagtggaggccaacggcagcctggatgctgtgaacctggccctgctgatggccctgctgtactgctttgacatctccttcatcgagcagagcacagaggagagagatgacatgatccaccagctgcccctgctgacagagaagcagtacatcgccaccatccacagccggctgcaggacagccagctgtggaagctgcccggcctgcaggccaccgtgcggctggcctgggccctggccctgcggggcatcagccagctgcctgatgtgacagccctggccgagttcacagaagcagatgaggccatggccgagctggccatcgctgacaacgtgttcctgttcctgatggagagcgtggtggtgtctgagtacttctaccaggaggagttctacatccggcgggtgcacaacctgatcacagacttcctggccctgatgcccatgaaggtgaagcagctgaggaacagagcagatgaagatgccaggatgatccacatgtccatgcagatgggaaatgaaccacccatcagcctgcggcgggacctggagcacctgatgctgctgattggagagctgtacaagaagaaccccttccacctggagctggccctggagtactggtgccccacagagcccctgcagacccccaccatcatgggcagctacctgggcgtggcccaccagaggcctccccagaggcaggtggtgctgagcaagtttgtgcggcagatgggagacctgctgccccccaccatctacatcccctacctgaagatgctgcagggcctggccaacggcccccagtgtgcccactactgcttcagcctgctgaaggtgaatggcagcagccacgtggagaacatccagggcgctgggggcagccctgtgtcctgggagcacttcttccacagcctgatgctgtaccacgagcacctgaggaaggacctgcccagcgctgacagcgtgcagtaccgccacctgcccagccggggcatcacccagaaggagcaggacggcctcatcgccttcctgcagctgaccagcaccatcatcacctggagcgaaaatgcccggctggccctgtgtgagcacccccagtggacccctgtggtggtgatcctgggcctgctgcagtgcagcatcccccctgtgctgaaggccgagctgctgaagaccctggccgccttcggcaagagccctgagattgctgccagcctgtggcagagcctggagtacacccagatcctgcagacagtgcgcatccccagccagaggcaggccatcggcatcgaggtggagctgaatgaaattgagagccgctgtgaggagtaccccctgacccgggccttctgccagctgatcagcaccctggtggagagcagcttccccagcaacctgggcgccggcctgcggcccccaggctttgacccctacctgcagttcctgcgggacagcgtcttcctgcgcttccgcacccgggcctacagaagagctgctgagaagtgggaggtggccgaggtggtgctggaggtgttctacaagctgctgcgggactatgagccccagctggaggactttgtggaccagtttgtggagctgcagggcgaggagatcatcgcctacaagcccccaggcttcagcctgatgtaccacctgctgaatgaaagccccatgctggagctggccctgagcctgctggaggagggcgtgaagcagctggacacctacgcccccttccctgggaagaagcacctggagaaggctgtgcagcactgcctggccctgctgaacctgaccctgcagaaggagaacctcttcatggacctgctgcgggagagccagctggccctgattgtgtgccccctggagcagctgctgcagggcatcaaccccaggaccaagaaggctgacaacgtggtgaacatcgcccgctacctgtaccacggcaacaccaaccctgagctggcctttgagagcgccaagatcctgtgctgcatcagctgcaacagcaacatccagatcaagctggtgggggacttcacccatgaccagagcatcagccagaagctgatggccggctttgtggagtgcctggactgtgaagatgctgaggagtttgtgcggctggaggagggcagcgagctggagaagaagctggtggccatcagacatgagacccgcatccacatcctgaacctgctgatcaccagcctggagtgcaacccccccaacctggccctgtacctgctgggctttgagctgaagaagcctgtgtccaccaccaacctgcaggaccccggggtgctgggctgccccaggacctgcctgcacgccatcctgaacatcctggagaagggcacagagggccgcacaggccctgtggccgtgcgggagagcccccagctggccgagctgtgctaccaggtgatctaccagctgtgtgcctgcagcgacaccagcggccccaccatgagatacctgcggaccagccaggacttcctgttcagccagctgcagtacctgcccttcagcaacaaggagtatgagatctccatgctgaaccagatgtcctggctgatgaagacagccagcattgagctgcgggtgaccagcctgaaccggcagaggagccacacccagaggctgctgcacctgctgctggatgacatgcctgtgaagccctacagtgatggagagggcggcattgaagatgagaacagatctgtgtctggcttcctgcactttgacacagccaccaaggtgcggaggaagatcctgaacatcctggacagcattgacttcagccaggagatccctgagcccctgcagctggacttctttgaccgggcccagatcgagcaggtgattgccaactgtgagcacaagaacctgcggggccagacagtgtgcaatgtgaagctgctgcaccgggtgctggtggccgaggtgaatgccctgcagggcatggccgccatcggccagaggcccctgctgatggaggagatcagcacagtgctgcagtatgtggtgggcaggaacaagctgctgcagtgcctgcacgccaagagacatgccctggagagctggaggcagctggtggagatcatcctgacagcctgcccccaggacctgatccaggctgaagatcggcagctgatcatccgggacatcctgcaggatgtgcatgacaagatcctggatgatgaagctgcccaggagctgatgcctgtggtggccggggctgtgttcaccctgacagcccacctgagccaggccgtgctgacagagcagaaggagacctctgtgctgggccctgctgaggcccactacgccttcatgctggacagctgcttcaccagccccccacctgaggagaaccccctggtgggctttgccagcattggagacagcagcctgtacatcatcctgaagaagctgctggacttcatcctgaagacaggaggcggcttccagagggtgaggacccacctgtatggcagcctgctgtactacctgcagatcgcccagaggccagatgagccagacaccctggaggccgccaagaagaccatgtgggagcggctgacagccccagaagatgtgttcagcaagctgcagagagaaaatattgccatcatcgagagctatggagctgccctgatggaggtggtgtgcagagatgcctgtgatggccatgaaattggaaggatgctggccctggccctgctggacagaattgtgtctgtggacaagcagcagcagtggctgctgtacctgagcaacagcggctacctgaaggtgctggtggacagcctggtggaggatgacaggaccctgcagagcctgctgaccccccagccccccctgctgaaggccctgtacacctatgagagcaagatggccttcctgaccagggtggccaagatccagcagggcgccctggagctgctgcggtctggagtgattgtgcggctggcccagtgccaggtgtatgacatgaggcctgagacagacccccagagcatgtttggcatgagggacccccccatgttcatccccacccctgtggaccgctaccggcagatcctgctgcctgccctgcagctgtgccaggtgatcctgaccagctccatggcccagcacctgcaggccgccggccaggtgctgcagttcctgatcagccacagcgacaccatccaggccatcctgcgctgccaggatgtgtctgctggcagcctgcaggagctggccctgctgaccggcatcatcagcaaggccgccctgcccggcatcctgtctgagctggatgtggatgtgaatgaaggcagcctgatggagctgcagggccacatcggccgcttccagaggcagtgcctgggcctgctgagcagatttggaggcagtgaccggctgcggcagttcaagttccaggatgacaacgtggagggggacaaggtgtccaagaaggatgaaattgagctggccatgcagcagatctgtgccaacgtgatggagtactgccagagcctgatgctgcagagcagccccaccttccagcacgctgtgtgcctcttcacccccagcctgtctgaaacagtgaacagagatggcccccggcaggacacccaggcccctgtggtgccctactggaggctgcccggcctgggcatcatcatctacctgctgaagcagagcgccaatgacttcttctcctactatgacagccaccggcagagcgtgtccaagctgcagaatgtggagcagctgcccccagatgagatcaaggagctgtgccagagcgtgatgcctgctggggtggacaagatcagcacagcccagaagtatgtgctggcccggcggcggctggtgaaggtgatcaacaacagagccaagctgctgagcctgtgcagcttcatcatcgagacctgcctcttcatcctgtggaggcacctggagtactacctgctgcactgcatgcccacagacagccaggacagcctgtttgccagcaggaccctcttcaagagccggcggctgcaggacagctttgccagcgagaccaacctggacttccgcagcggcctggccatcgtgtcccagcacgacctggaccagctgcaggctgatgccatcaatgcctttggagagagcctgcagaagaagctgctggacatcgagggcctgtacagcaaggtgcgcagccgctacagcttcatccaggccctggtgcggcgcatccggggcctgctgcgcatcagcagaaattag

SEQ ID NO: 162519 - DNA, 750 bp, synthetic construct
  misc_feature 1..750: note = Description of Artificial Sequence: Synthetic coding sequence
  source 1..750: mol_type = other DNA
atgagcctgaggaactacagcgagcgggaggtgtctgacctgatcaaggaatgtcggcagagcctggccgagagcctgtttgcctgggcctgccagagccccctgggcaaggaggacaccctgctgctgattggccacctggagcgggtgacagtggaggccaacggcagcctggatgctgtgaacctggccctgctgatggccctgctgtactgctttgacatctccttcatcgagcagagcacagaggagagagatgacatgatccaccagctgcccctgctgacagagaagcagtacatcgccaccatccacagccggctgcaggacagccagctgtggaagctgcccggcctgcaggccaccgtgcggctggcctgggccctggccctgcggggcatcagccagctgcctgatgtgacagccctggccgagttcacagaagcagatgaggccatggccgagctggccatcgctgacaacgtgttcctgttcctgatggagagcgtggtggtgtctgagtacttctaccaggaggagttctacatccggcgggtgcacaacctgatcacagacttcctggccctgatgcccatgaaggtgaagcagctgaggaacagagcagatgaagatgccaggatgatccacatgtccatgcagatgggaaatgaaccacccatcagcctgcggcgggacctggagcacctgatgctgctggtgtccaagctgctggtgctgcggctgaactag

SEQ ID NO: 162520 - DNA, 5664 bp, synthetic construct
  misc_feature 1..5664: note = Description of Artificial Sequence: Synthetic coding sequence
  source 1..5664: mol_type = other DNA
atggccgcccggggccggggcctgctgctgctgaccctgtctgtgctgctggccgccggccccagcgctgctgctgccaagctgaacatccccaaggtgctgctgcccttcacccgggccaccagggtgaacttcaccctggaggccagcgagggctgctaccgctggctgagcaccaggcctgaggtggccagcattgagcccctgggcctggatgagcagcagtgcagccagaaggctgtggtgcaggcccggctgacccagcctgcccggctgaccagcatcatctttgctgaggacatcaccaccggccaggtgctgcgctgtgatgccatcgtggacctgattcatgacatccagatcgtgtccaccacccgggagctgtacctggaggacagccccctggagctgaagatccaggccctggacagcgagggcaacaccttcagcaccctggccggcctggtgtttgagtggaccatcgtgaaggacagcgaggccgaccgcttcagtgacagccacaatgccctgcgcatcctgaccttcctggagagcacctacatccccccatcctacatcagcgagatggagaaggccgccaagcagggcgacaccatcctggtgtctggcatgaagacaggcagcagcaagctgaaggcccgcatccaggaggccgtgtacaagaatgtgcggcctgctgaggtgcggctgctgatcctggagaacatcctgctgaacccagcctatgatgtgtacctgatggtgggcaccagcatccactacaaggtgcagaagatccggcagggcaagatcacagagctgtccatgcccagcgaccagtatgagctgcagctgcagaacagcatccctggccctgagggggaccctgcccggcctgtggccgtgctggcccaggacacctccatggtgacagccctgcagctgggccagagcagcctggtgctgggccacaggagcatccgcatgcagggcgccagccggctgcccaacagcaccatctacgtggtggagcccggctacctgggcttcaccgtgcaccctggggaccgctgggtgctggagaccggccgcctgtatgagatcaccatcgaggtgtttgacaagttcagcaacaaggtgtatgtgtctgacaacatccgcatcgagaccgtgctgcctgctgagttctttgaggtgctgagcagcagccagaatggcagctaccaccgcatccgggccctgaagaggggccagacagccattgatgctgccctgacctctgtggtggaccaggacggcggcgtgcacatcctgcaggtgcctgtgtggaaccagcaggaggtggagatccacatccccatcaccctgtaccccagcatcctgaccttcccctggcagcccaagacaggagcctaccagtacaccatccgggcccatggaggcagcggcaacttctcctggagcagcagcagccacctggtggccaccgtgacagtgaagggcgtgatgaccactggaagtgacatcggcttcagcgtcatccaggcccatgatgtgcagaaccccctgcactttggagagatgaaggtgtatgtgattgagccccacagcatggagtttgccccctgccaggtggaggcccgggtgggccaggccctggagctgcccctgcgcatcagcggcctgatgcctgggggcgccagcgaggtggtgaccctgagtgactgcagccactttgacctggccgtggaggtggagaaccagggcgtcttccagcccctgcccggccgcctgcccccaggcagcgagcactgcagcggcatccgggtgaaggccgaggcccagggcagcaccaccctgctggtgtcctaccgccacggccacgtgcacctgagcgccaagatcaccatcgccgcctacctgcccctgaaggctgtggaccccagctctgtggccctggtgaccctgggcagcagcaaggagatgctgtttgagggcggcccccggccctggatcctggagcccagcaagttcttccagaatgtgacagctgaggacacagacagcatcggcctggccctgtttgccccccacagcagcaggaactaccagcagcactggatcctggtgacctgccaggccctgggggagcaggtgattgccctgtctgtgggcaacaagcccagcctgaccaaccccttccctgctgtggagcctgctgtggtgaagtttgtgtgtgccccacccagccggctgaccctggcccctgtgtacaccagcccccagctggacatgagctgccccctgctgcagcagaacaagcaggtggtgcctgtgagcagccacaggaacccccggctggacctggccgcctatgaccaggagggcagaagatttgacaacttcagcagcctgagcatccagtgggagagcaccaggcctgtgctggccagcattgagcctgagctgcccatgcagctggtgtcccaggatgatgagagcggccagaagaagctgcacggcctgcaggccatcctggtgcatgaggccagcggcaccacagccatcacagccacagccaccggctaccaggagagccacctgagcagcgcccggaccaagcagccccatgaccccctggtgcccctgagcgccagcattgagctgatcctggtggaggatgtgcgggtgtccccagaggaggtgaccatctacaaccaccctggcatccaggccgagctgcgcatccgggagggcagcggctacttcttcctgaacaccagcacagcagatgtggtgaaggtggcctaccaggaggcccggggcgtggccatggtgcaccccctgctgcccggcagcagcaccatcatgattcatgacctgtgcctggtgtttcctgccccagccaaggctgtggtgtatgtgtctgacatccaggagctgtacatccgggtggtggacaaggtggagatcggcaagacagtgaaggcctacgtgcgggtgctggacctgcacaagaagcccttcctggccaagtacttccccttcatggacctgaagctgcgggccgccagccccatcatcaccctggtggccctggatgaggccctggacaactacaccatcaccttcctgatccggggcgtggccatcggccagaccagcctgacagcctctgtgaccaacaaggccggccagaggatcaacagcgccccccagcagatcgaggtgtttcctcccttccggctgatgcccaggaaggtgaccctgctgattggagccaccatgcaggtgaccagcgagggcggcccccagccccagagcaacatcctcttcagcatcagcaatgaatctgtggccctggtgtctgctgctggcctggtgcagggcctggccatcggaaatggaacagtgtctggcctggtgcaggccgtggatgctgagaccgggaaggtggtgatcatcagccaggacctggtgcaggtggaggtgctgctgctgcgggctgtgcgcatccgggcccccatcatgaggatgaggacaggcacccagatgcccatctacgtgacaggcatcaccaaccaccagaaccccttctcctttggaaatgctgtgcccggcctgaccttccactggagcgtgaccaagagagatgtgctggacctgcggggccgccaccacgaggccagcatccggctgcccagccagtacaactttgccatgaatgtgctgggccgggtgaagggccgcacaggcctgcgggtggtggtgaaggctgtggaccccaccagcggccagctgtatggcctggcccgggagctgagtgatgagatccaggtgcaggtgtttgagaagctgcagctgctgaaccctgagattgaagctgagcagatcctgatgagccccaacagctacatcaagctgcagaccaacagagatggagctgccagcctgagctacagagtgctggatggccctgagaaggtgcctgtggtgcacgtggatgagaagggcttcctggccagcggctccatgattggcaccagcaccattgaagtcatcgcccaggagccctttggagccaaccagaccatcatcgtggccgtgaaggtgtcccctgtgtcctacctgcgggtgtccatgagccctgtgctgcacacccagaacaaggaggccctggtggccgtgcccctgggcatgacagtgaccttcaccgtgcacttccatgacaacagcggagatgtgttccacgcccacagctctgtgctgaactttgccaccaacagagatgactttgtgcagatcggcaagggccccaccaacaacacctgtgtggtgaggacagtgtctgtgggcctgaccctgctgcgggtgtgggatgctgagcaccctggcctgagtgacttcatgcccctgcctgtgctgcaggccatcagccctgagctgagcggggccatggtggtgggagatgtgctgtgcctggccaccgtgctgaccagcctggagggcctgagcggcacctggagcagcagcgccaacagcatcctgcacatcgaccccaagacaggagtggccgtggcccgggctgtgggctctgtgacagtgtactatgaggtggccggccacctgcggacctacaaggaggtggtggtgtctgtgccccagaggatcatggcccggcacctgcaccccatccagaccagcttccaggaggccacagccagcaaggtgattgtggccgtgggggacaggagcagcaacctgcggggagaatgtacccccacccagcgggaggtgatccaggccctgcaccctgagaccctcatcagctgccagagccagttcaagccagctgtgtttgacttccccagccaggatgtgttcaccgtggagccccagtttgacacagccctgggccagtacttctgcagcatcaccatgcaccggctgacagacaagcagaggaagcacctgtccatgaagaagacagccctggtggtgtctgccagcctgagcagcagccacttcagcacagagcaggtgggcgctgaggtgcccttcagccctggcctgtttgctgaccaggccgagatcctgctgagcaaccactacaccagcagcgagatccgggtgtttggagcccctgaggtgctggagaacctggaggtgaagagcggcagccctgctgtgctggcctttgccaaggagaagagctttggctggcccagcttcatcacctacacagtgggcgtgctggaccctgctgctggcagccagggccccctgagcaccaccctgaccttcagcagccctgtgaccaaccaggccatcgccatccctgtgacagtggcctttgtggtggacagaagaggccctggcccctatggagccagcctcttccagcacttcctggacagctaccaggtgatgttcttcaccctgtttgccctgctggccggcacagctgtgatgatcatcgcctaccacacagtgtgcaccccccgggacctggccgtgcctgctgccctgaccccccgggccagccctggccacagcccccactactttgctgccagcagccccaccagccccaatgccctgcccccagccaggaaggccagccccccatctggcctgtggagccctgcctatgccagccactag

SEQ ID NO: 162521 - DNA, 6273 bp, synthetic construct
  misc_feature 1..6273: note = Description of Artificial Sequence: Synthetic coding sequence
  source 1..6273: mol_type = other DNA
atgggagatgagatggatgccatgatccctgagcgggagatgaaggacttccagttccgggccctgaagaaggtgcgcatctttgacagccctgaggagctgcccaaggagaggagcagcctgctggccgtgagcaacaagtatggcctggtgtttgctggaggagccagcggcctgcagatcttccccaccaagaacctgctgatccagaacaagccaggagatgaccccaacaagatcgtggacaaggtgcagggcctgctggtgcccatgaagttccccatccaccacctggccctgagctgtgacaacctgaccctgagcgcctgcatgatgagcagtgaatatggcagcatcatcgccttctttgatgtgaggaccttcagcaatgaggccaagcagcagaagaggccctttgcctaccacaagctgctgaaggatgctgggggcatggtgattgacatgaagtggaaccccaccgtgcccagcatggtggccgtgtgcctggctgatggcagcattgctgtgctgcaggtgacagagaccgtgaaggtgtgtgccaccctgcccagcacagtggccgtgacctctgtgtgctggagccccaagggcaagcagctggccgtgggcaagcagaatggaacagtggtgcagtacctgcccaccctgcaggagaagaaggtgatcccctgcccccccttctatgaaagtgaccaccctgtgcgggtgctggatgtgctgtggattggcacctacgtgtttgccatcgtgtatgctgctgctgatggcaccctggagaccagcccagatgtggtgatggccctgctgcccaagaaggaggagaagcaccctgagatctttgtgaacttcatggagccctgctacggcagctgcacagagcggcagcaccactactacctgagctacatcgaggagtgggacctggtgctggccgccagcgctgccagcacagaggtgtccatcctggcccggcagagcgaccagatcaactgggagagctggctgctggaggacagcagcagagctgagctgcctgtgacagacaagagtgatgacagcctgcccatgggcgtggtggtggactacaccaaccaggtggagatcaccatcagtgatgagaagaccctgcccccagcccctgtgctgatgctgctgagcacagatggagtgctgtgccccttctacatgatcaaccagaaccctggggtgaagagcctcatcaagaccccagagcggctgagcctggagggggagcggcagcccaagagccctggcagcacccccaccacccccaccagcagccaggccccccagaagctggatgccagcgctgctgctgccccagccagcctgccccccagcagccctgctgcccccatcgccaccttcagcctgctgcctgctggaggagcccccaccgtcttctcctttggcagcagcagcctgaagagcagcgccaccgtgactggagagcccccatcctacagcagcggcagtgacagcagcaaggccgcccctggccctggccccagcaccttctcctttgtgccccccagcaaggccagcctggcccccaccccagctgccagccctgtggcccccagcgctgccagcttctcctttggcagcagcggcttcaagcccaccctggagagcacccctgtgcccagcgtgtctgcccccaacatcgccatgaagcccagcttcccccccagcaccagcgctgtgaaggtgaacctgtctgagaagttcaccgctgctgccaccagcacccctgtgagcagcagccagagcgccccacccatgagccccttcagcagcgccagcaagccagctgccagcggccccctgagccaccccacccccctgagcgccccacccagctctgtgcccctgaagagctctgtgctgcccagccccagcggccgcagcgcccagggcagcagcagccctgtgcccagcatggtgcagaagagcccccgcatcaccccacctgctgccaagccaggcagcccccaggccaagagcctgcagcctgctgtggccgagaagcagggccaccagtggaaggacagcgaccctgtgatggccggcatcggggaggagatcgcccacttccagaaggagctggaggagctgaaggcccggaccagcaaggcctgcttccaggtgggcaccagcgaggagatgaagatgctgaggacagaaagtgatgacctgcacaccttcctgctggagatcaaggagaccacagagagcctgcacggggacatcagcagcctgaagaccaccctgctggagggctttgctggggtggaggaggcccgggagcagaatgaaagaaacagagacagcggctacctgcacctgctgtacaagaggcccctggaccccaagtctgaggcccagctgcaggagatccggcggctgcaccagtatgtgaagtttgctgtgcaggatgtgaatgatgtgctggacctggagtgggaccagcacctggagcagaagaagaagcagaggcacctgctggtgcctgagcgggagaccctcttcaacaccctggccaacaaccgggagatcatcaaccagcagaggaagaggctgaaccacctggtggacagcctgcagcagctgcggctgtacaagcagaccagcctgtggagcctgagcagcgctgtgcccagccagagcagcatccacagctttgacagcgacctggagagcctgtgcaatgccctgctgaagaccaccatcgagagccacaccaagagcctgcccaaggtgcctgccaagctgagccccatgaagcaggcccagctgaggaacttcctggccaagaggaagaccccacctgtgcgcagcacagccccagccagcctgagccgcagcgccttcctgagccagcgctactatgaggacctggatgaggtgagcagcaccagctctgtgtcccagagcctggagagtgaagatgcccggaccagctgcaaggatgatgaggccgtggtgcaggcccccaggcatgcccctgtggtgaggacccccagcatccagcccagcctgctgccccacgccgccccctttgccaagagccacctggtgcacggcagcagccctggggtgatgggcacctctgtggccaccagcgccagcaagatcatcccccagggcgctgacagcaccatgctggccaccaagacagtgaagcatggagcccccagccccagccaccccatcagcgccccccaggccgctgctgctgctgccctgcggcggcagatggccagccaggccccagctgtgaacaccctgacagagagcaccctgaagaatgtgccccaggtggtgaatgtgcaggagctgaagaacaacccagccacccccagcacagccatgggcagctctgtgccctacagcacagccaagaccccccaccctgtgctgacccctgtggccgccaaccaggccaagcagggcagcctcatcaacagcctgaagcccagcggccccaccccagccagcggccagctgagcagcggggacaaggccagcggcacagccaagattgaaacagctgtgaccagcaccccatctgccagcggccagttcagcaagcccttctccttcagccccagcggcaccggcttcaactttggcatcatcacccccacccccagcagcaacttcaccgctgcccagggcgccacccccagcaccaaggagagcagccagccagatgccttcagcagcggcggcggcagcaagcccagctatgaggccatccctgagagcagccccccatctggcatcaccagcgccagcaacaccaccccaggagagcctgctgccagcagcagcaggcctgtggcccccagcggcacagccctgagcaccaccagcagcaagctggagaccccacccagcaagctgggggagctgctcttccccagcagcctggccggggagaccctgggcagcttcagcggcctgcgggtgggccaggctgatgacagcaccaagcccaccaacaaggccagcagcaccagcctgaccagcacccagcccaccaagaccagcggcgtgcccagcggcttcaacttcaccgcccctcctgtgctgggcaagcacacagagccccctgtgaccagcagcgccaccaccacctctgtggcccctcctgctgccaccagcaccagcagcacagctgtgtttggcagcctgcctgtgaccagcgctggcagcagcggggtcatcagctttggaggcaccagcctgtctgctgggaagaccagcttctcctttggcagccagcagaccaacagcacagtgcccccatctgcccccccacccaccacagctgccacccccctgcccaccagcttccccaccctgagctttggcagcctgctgagcagcgccaccacccccagcctgcccatgtctgctggccgcagcacagaggaggccaccagcagcgccctgcctgagaagccaggggacagcgaggtgtctgccagcgctgccagcctgctggaggagcagcagagcgcccagctgccccaggccccaccccagaccagtgacagcgtgaagaaggagcctgtgctggcccagcctgctgtgagcaacagcggcacagctgccagcagcaccagcctggtggccctgtctgctgaggccaccccagccaccaccggggtgcctgatgccaggacagaagctgtgcccccagccagcagcttctctgtgcccggccagacagctgtgacagctgctgccatcagcagcgctggccctgtggccgtggagaccagcagcacccccatcgccagcagcaccaccagcatcgtggcccctggccccagcgctgaggccgccgcctttggaacagtgaccagcggcagctctgtgtttgcccagcccccagctgccagcagcagcagcgccttcaaccagctgaccaacaacacagccacagcccccagcgccacccctgtgtttggccaggtggccgccagcacagcccccagcctgtttggccagcagacaggcagcacagccagcacagctgctgccaccccccaggtgagcagcagcggcttcagcagccctgccttcggcaccacagcccctggggtgtttggccagaccaccttcggccaggcctctgtgtttggccagagcgccagcagcgctgcctctgtgttctccttcagccagcccggcttcagctctgtgcctgccttcggccagcctgccagcagcacccccaccagcaccagcggctctgtgtttggagctgccagcagcaccagcagcagcagcagcttctcctttggccagagcagccccaacacaggaggcggcctgtttggccagagcaatgccccagccttcggccagagccctggcttcggccagggcggctctgtgtttggaggcaccagcgctgccaccaccacagctgccaccagcggcttctccttctgccaggccagcggcttcggcagcagcaacacaggctctgtgtttggccaggccgccagcactggaggcatcgtgtttggccagcagagcagcagcagcagcggctctgtgtttggcagcggcaacacaggccggggcggcggcttcttcagcggcctgggcggcaagcccagccaggatgctgccaacaagaaccccttcagcagcgccagcggcggcttcggcagcacagccaccagcaacaccagcaacctgtttggaaattctggggccaagaccttcggcggctttgccagcagcagctttggagagcagaagcccaccggcaccttcagcagcggcggcggctctgtggccagccagggcttcggcttcagcagccccaacaagacaggaggctttggagctgcccctgtgtttggcagcccccccaccttcggcggcagccctggctttggaggagtgcctgccttcggcagcgccccagccttcaccagccccctgggcagcactggaggcaaggtgtttggagagggcacagctgctgccagcgctgggggcttcggcttcggcagcagcagcaacaccaccagctttggcaccctggccagccagaatgcccccaccttcggcagcctgagccagcagaccagcggcttcggcacccagagcagcggcttcagcggcttcggcagcggcaccggcggcttctcctttggcagcaacaacagctctgtgcagggctttggaggctggaggagctag

SEQ ID NO: 162522 - DNA, 6243 bp, synthetic construct
  misc_feature 1..6243: note = Description of Artificial Sequence: Synthetic coding sequence
  source 1..6243: mol_type = other DNA
atgggagatgagatggatgccatgatccctgagcgggagatgaaggacttccagttccgggccctgaagaaggtgcgcatctttgacagccctgaggagctgcccaaggagaggagcagcctgctggccgtgagcaacaagtatggcctggtgtttgctggaggagccagcggcctgcagatcttccccaccaagaacctgctgatccagaacaagccaggagatgaccccaacaagatcgtggacaaggtgcagggcctgctggtgcccatgaagttccccatccaccacctggccctgagctgtgacaacctgaccctgagcgcctgcatgatgagcagtgaatatggcagcatcatcgccttctttgatgtgaggaccttcagcaatgaggccaagcagcagaagaggccctttgcctaccacaagctgctgaaggatgctgggggcatggtgattgacatgaagtggaaccccaccgtgcccagcatggtggccgtgtgcctggctgatggcagcattgctgtgctgcaggtgacagagaccgtgaaggtgtgtgccaccctgcccagcacagtggccgtgacctctgtgtgctggagccccaagggcaagcagctggccgtgggcaagcagaatggaacagtggtgcagtacctgcccaccctgcaggagaagaaggtgatcccctgcccccccttctatgaaagtgaccaccctgtgcgggtgctggatgtgctgtggattggcacctacgtgtttgccatcgtgtatgctgctgctgatggcaccctggagaccagcccagatgtggtgatggccctgctgcccaagaaggaggagaagcaccctgagatctttgtgaacttcatggagccctgctacggcagctgcacagagcggcagcaccactactacctgagctacatcgaggagtgggacctggtgctggccgccagcgctgccagcacagaggtgtccatcctggcccggcagagcgaccagatcaactgggagagctggctgctggaggacagcagcagagctgagctgcctgtgacagacaagagtgatgacagcctgcccatgggcgtggtggtggactacaccaaccaggtggagatcaccatcagtgatgagaagaccctgcccccagcccctgtgctgatgctgctgagcacagatggagtgctgtgccccttctacatgatcaaccagaaccctggggtgaagagcctcatcaagaccccagagcggctgagcctggagggggagcggcagcccaagagccctggcagcacccccaccacccccaccagcagccaggccccccagaagctggatgccagcgctgctgctgccccagccagcctgccccccagcagccctgctgcccccatcgccaccttcagcctgctgcctgctggaggagcccccaccgtcttctcctttggcagcagcagcctgaagagcagcgccaccgtgactggagagcccccatcctacagcagcggcagtgacagcagcaaggccgcccctggccctggccccagcaccttctcctttgtgccccccagcaaggccagcctggcccccaccccagctgccagccctgtggcccccagcgctgccagcttctcctttggcagcagcggcttcaagcccaccctggagagcacccctgtgcccagcgtgtctgcccccaacatcgccatgaagcccagcttcccccccagcaccagcgctgtgaaggtgaacctgtctgagaacagcagccagagcgccccacccatgagccccttcagcagcgccagcaagccagctgccagcggccccctgagccaccccacccccctgagcgccccacccagctctgtgcccctgaagagctctgtgctgcccagccccagcgctggccgcagcgcccagggcagcagcagccctgtgcccagcatggtgcagaagagcccccgcatcaccccacctgctgccaagccaggcagcccccaggccaagagcctgcagcctgctgtggccgagaagcagggccaccagtggaaggacagcgaccctgtgatggccggcatcggggaggagatcgcccacttccagaaggagctggaggagctgaaggcccggaccagcaaggcctgcttccaggtgggcaccagcgaggagatgaagatgctgaggacagaaagtgatgacctgcacaccttcctgctggagatcaaggagaccacagagagcctgcacggggacatcagcagcctgaagaccaccctgctggagggctttgctggggtggaggaggcccgggagcagaatgaaagaaacagagacagcggctacctgcacctgctgtacaagaggcccctggaccccaagtctgaggcccagctgcaggagatccggcggctgcaccagtatgtgaagtttgctgtgcaggatgtgaatgatgtgctggacctggagtgggaccagcacctggagcagaagaagaagcagaggcacctgctggtgcctgagcgggagaccctcttcaacaccctggccaacaaccgggagatcatcaaccagcagaggaagaggctgaaccacctggtggacagcctgcagcagctgcggctgtacaagcagaccagcctgtggagcctgagcagcgctgtgcccagccagagcagcatccacagctttgacagcgacctggagagcctgtgcaatgccctgctgaagaccaccatcgagagccacaccaagagcctgcccaaggtgcctgccaagctgagccccatgaagcaggcccagctgaggaacttcctggccaagaggaagaccccacctgtgcgcagcacagccccagccagcctgagccgcagcgccttcctgagccagcgctactatgaggacctggatgaggtgagcagcaccagctctgtgtcccagagcctggagagtgaagatgcccggaccagctgcaaggatgatgaggccgtggtgcaggcccccaggcatgcccctgtggtgaggacccccagcatccagcccagcctgctgccccacgccgccccctttgccaagagccacctggtgcacggcagcagccctggggtgatgggcacctctgtggccaccagcgccagcaagatcatcccccagggcgctgacagcaccatgctggccaccaagacagtgaagcatggagcccccagccccagccaccccatcagcgccccccaggccgctgctgctgctgccctgcggcggcagatggccagccaggccccagctgtgaacaccctgacagagagcaccctgaagaatgtgccccaggtggtgaatgtgcaggagctgaagaacaacccagccacccccagcacagccatgggcagctctgtgccctacagcacagccaagaccccccaccctgtgctgacccctgtggccgccaaccaggccaagcagggcagcctcatcaacagcctgaagcccagcggccccaccccagccagcggccagctgagcagcggggacaaggccagcggcacagccaagattgaaacagctgtgaccagcaccccatctgccagcggccagttcagcaagcccttctccttcagccccagcggcaccggcttcaactttggcatcatcacccccacccccagcagcaacttcaccgctgcccagggcgccacccccagcaccaaggagagcagccagccagatgccttcagcagcggcggcggcagcaagcccagctatgaggccatccctgagagcagccccccatctggcatcaccagcgccagcaacaccaccccaggagagcctgctgccagcagcagcaggcctgtggcccccagcggcacagccctgagcaccaccagcagcaagctggagaccccacccagcaagctgggggagctgctcttccccagcagcctggccggggagaccctgggcagcttcagcggcctgcgggtgggccaggctgatgacagcaccaagcccaccaacaaggccagcagcaccagcctgaccagcacccagcccaccaagaccagcggcgtgcccagcggcttcaacttcaccgcccctcctgtgctgggcaagcacacagagccccctgtgaccagcagcgccaccaccacctctgtggcccctcctgctgccaccagcaccagcagcacagctgtgtttggcagcctgcctgtgaccagcgctggcagcagcggggtcatcagctttggaggcaccagcctgtctgctgggaagaccagcttctcctttggcagccagcagaccaacagcacagtgcccccatctgcccccccacccaccacagctgccacccccctgcccaccagcttccccaccctgagctttggcagcctgctgagcagcgccaccacccccagcctgcccatgtctgctggccgcagcacagaggaggccaccagcagcgccctgcctgagaagccaggggacagcgaggtgtctgccagcgctgccagcctgctggaggagcagcagagcgcccagctgccccaggccccaccccagaccagtgacagcgtgaagaaggagcctgtgctggcccagcctgctgtgagcaacagcggcacagctgccagcagcaccagcctggtggccctgtctgctgaggccaccccagccaccaccggggtgcctgatgccaggacagaagctgtgcccccagccagcagcttctctgtgcccggccagacagctgtgacagctgctgccatcagcagcgctggccctgtggccgtggagaccagcagcacccccatcgccagcagcaccaccagcatcgtggcccctggccccagcgctgaggccgccgcctttggaacagtgaccagcggcagctctgtgtttgcccagcccccagctgccagcagcagcagcgccttcaaccagctgaccaacaacacagccacagcccccagcgccacccctgtgtttggccaggtggccgccagcacagcccccagcctgtttggccagcagacaggcagcacagccagcacagctgctgccaccccccaggtgagcagcagcggcttcagcagccctgccttcggcaccacagcccctggggtgtttggccagaccaccttcggccaggcctctgtgtttggccagagcgccagcagcgctgcctctgtgttctccttcagccagcccggcttcagctctgtgcctgccttcggccagcctgccagcagcacccccaccagcaccagcggctctgtgtttggagctgccagcagcaccagcagcagcagcagcttctcctttggccagagcagccccaacacaggaggcggcctgtttggccagagcaatgccccagccttcggccagagccctggcttcggccagggcggctctgtgtttggaggcaccagcgctgccaccaccacagctgccaccagcggcttctccttctgccaggccagcggcttcggcagcagcaacacaggctctgtgtttggccaggccgccagcactggaggcatcgtgtttggccagcagagcagcagcagcagcggctctgtgtttggcagcggcaacacaggccggggcggcggcttcttcagcggcctgggcggcaagcccagccaggatgctgccaacaagaaccccttcagcagcgccagcggcggcttcggcagcacagccaccagcaacaccagcaacctgtttggaaattctggggccaagaccttcggcggctttgccagcagcagctttggagagcagaagcccaccggcaccttcagcagcggcggcggctctgtggccagccagggcttcggcttcagcagccccaacaagacaggaggctttggagctgcccctgtgtttggcagcccccccaccttcggcggcagccctggctttggaggagtgcctgccttcggcagcgccccagccttcaccagccccctgggcagcactggaggcaaggtgtttggagagggcacagctgctgccagcgctgggggcttcggcttcggcagcagcagcaacaccaccagctttggcaccctggccagccagaatgcccccaccttcggcagcctgagccagcagaccagcggcttcggcacccagagcagcggcttcagcggcttcggcagcggcaccggcggcttctcctttggcagcaacaacagctctgtgcagggctttggaggctggaggagctag

SEQ ID NO: 162523 - DNA, 4560 bp, synthetic construct
  misc_feature 1..4560: note = Description of Artificial Sequence: Synthetic coding sequence
  source 1..4560: mol_type = other DNA
atgaagcccagcttcccccccagcaccagcgctgtgaaggtgaacctgtctgagaagttcaccgctgctgccaccagcacccctgtgagcagcagccagagcgccccacccatgagccccttcagcagcgccagcaagccagctgccagcggccccctgagccaccccacccccctgagcgccccacccagctctgtgcccctgaagagctctgtgctgcccagccccagcggccgcagcgcccagggcagcagcagccctgtgcccagcatggtgcagaagagcccccgcatcaccccacctgctgccaagccaggcagcccccaggccaagagcctgcagcctgctgtggccgagaagcagggccaccagtggaaggacagcgaccctgtgatggccggcattggagaggagatcgcccacttccagaaggagctggaggagctgaaggcccggaccagcaaggcctgcttccaggtgggcaccagcgaggagatgaagatgctgaggacagaaagtgatgacctgcacaccttcctgctggagatcaaggagaccacagagagcctgcatggagacatcagcagcctgaagaccaccctgctggagggctttgctggggtggaggaggcccgggagcagaatgaaagaaacagagattctggctacctgcacctgctgtacaagaggcccctggaccccaagtctgaggcccagctgcaggagatccggcggctgcaccagtatgtgaagtttgctgtgcaggatgtgaatgatgtgctggacctggagtgggaccagcacctggagcagaagaagaagcagaggcacctgctggtgcctgagcgggagaccctcttcaacaccctggccaacaaccgggagatcatcaaccagcagaggaagaggctgaaccacctggtggacagcctgcagcagctgcggctgtacaagcagaccagcctgtggagcctgagcagcgctgtgcccagccagagcagcatccacagctttgacagcgacctggagagcctgtgcaatgccctgctgaagaccaccatcgagagccacaccaagagcctgcccaaggtgcctgccaagctgagccccatgaagcaggcccagctgaggaacttcctggccaagaggaagaccccacctgtgcgcagcacagccccagccagcctgagccgcagcgccttcctgagccagcgctactatgaggacctggatgaggtgagcagcaccagctctgtgtcccagagcctggagagtgaagatgcccggaccagctgcaaggatgatgaagctgtggtgcaggcccccaggcatgcccctgtggtgaggacccccagcatccagcccagcctgctgccccatgctgccccctttgccaagagccacctggtgcacggcagcagccctggggtgatgggcacctctgtggccaccagcgccagcaagatcatcccccagggcgctgacagcaccatgctggccaccaagacagtgaagcacggggcccccagccccagccaccccatcagcgccccccaggccgctgctgctgctgccctgcggcggcagatggccagccaggccccagctgtgaacaccctgacagagagcaccctgaagaatgtgccccaggtggtgaatgtgcaggagctgaagaacaacccagccacccccagcacagccatgggcagctctgtgccctacagcacagccaagaccccccaccctgtgctgacccctgtggccgccaaccaggccaagcagggcagcctcatcaacagcctgaagcccagcggccccaccccagccagcggccagctgagcagcggggacaaggccagcggcacagccaagattgaaacagctgtgaccagcacccccagcgccagcggccagttcagcaagcccttctccttcagccccagcggcaccggcttcaactttggcatcatcacccccacccccagcagcaacttcaccgctgcccagggcgccacccccagcaccaaggagagcagccagccagatgccttcagcagcggcggcggcagcaagcccagctatgaggccatccctgagagcagcccccccagcggcatcaccagcgccagcaacaccaccccaggagagcctgctgccagcagcagcaggcctgtggcccccagcggcacagccctgagcaccaccagcagcaagctggagaccccacccagcaagctgggggagctgctcttccccagcagcctggccggggagaccctgggcagcttcagcggcctgcgggtgggccaggctgatgacagcaccaagcccaccaacaaggccagcagcaccagcctgaccagcacccagcccaccaagaccagcggcgtgcccagcggcttcaacttcaccgcccctcctgtgctgggcaagcacacagagccccctgtgaccagcagcgccaccaccacctctgtggcccccccagctgccaccagcaccagcagcacagctgtgtttggcagcctgcctgtgaccagcgctggcagcagtggagtcatcagctttggaggcaccagcctgtctgctgggaagaccagcttctcctttggcagccagcagaccaacagcacagtgccccccagcgcccccccacccaccacagctgccacccccctgcccaccagcttccccaccctgagctttggcagcctgctgagcagcgccaccacccccagcctgcccatgtctgctggccgcagcacagaggaggccaccagcagcgccctgcctgagaagccaggggacagcgaggtgtctgccagcgctgccagcctgctggaggagcagcagagcgcccagctgccccaggccccaccccagaccagtgacagcgtgaagaaggagcctgtgctggcccagcctgctgtgagcaacagcggcacagctgccagcagcaccagcctggtggccctgtctgctgaggccaccccagccaccactggagtgcctgatgccaggacagaggccgtgcccccagccagcagcttctctgtgcccggccagacagctgtgacagctgctgccatcagcagcgctggccctgtggccgtggagaccagcagcacccccatcgccagcagcaccaccagcatcgtggcccctggccccagcgctgaggccgccgccttcggcaccgtgaccagcggcagctctgtgtttgcccagcccccagctgccagcagcagcagcgccttcaaccagctgaccaacaacacagccacagcccccagcgccacccctgtgtttggccaggtggccgccagcacagcccccagcctgtttggccagcagacaggcagcacagccagcacagctgctgccaccccccaggtgagcagcagcggcttcagcagccctgccttcggcaccacagcccctggggtgtttggccagaccaccttcggccaggcctctgtgtttggccagagcgccagcagcgctgccagcgtcttctccttcagccagcccggcttcagctctgtgcctgccttcggccagcctgccagcagcacccccaccagcaccagcggctctgtgtttggagctgccagcagcaccagcagcagcagcagcttctcctttggccagagcagccccaacacaggaggcggcctgtttggccagagcaatgccccagccttcggccagagccctggcttcggccagggcggctctgtgtttggaggcaccagcgctgccaccaccacagctgccaccagcggcttctccttctgccaggccagcggcttcggcagcagcaacacaggctctgtgtttggccaggccgccagcactggaggcatcgtgtttggccagcagagcagcagcagcagcggctctgtgtttggaagtggcaacacaggccggggcggcggcttcttcagcggcctgggcggcaagcccagccaggatgctgccaacaagaaccccttcagcagcgccagcggcggcttcggcagcacagccaccagcaacaccagcaacctgtttggaaacagcggggccaagacctttggaggctttgccagcagcagctttggagagcagaagcccaccggcaccttcagcagcggcggcggctctgtggccagccagggcttcggcttcagcagccccaacaagacaggaggctttggagctgcccctgtgtttggcagcccccccacctttggaggcagccctggctttggaggagtgcctgcctttggaagtgccccagccttcaccagccccctgggcagcactggaggcaaggtgtttggagagggcacagctgctgccagcgctgggggctttggatttggcagcagcagcaacaccaccagctttggcaccctggccagccagaatgcccccaccttcggcagcctgagccagcagaccagcggcttcggcacccagagcagcggcttcagcggctttggaagtggcactggaggcttctcctttggcagcaacaacagctctgtgcagggctttggaggctggaggagctag

SEQ ID NO: 162524 - DNA, 6276 bp, synthetic construct
  misc_feature 1..6276: note = Description of Artificial Sequence: Synthetic coding sequence
  source 1..6276: mol_type = other DNA
atgggagatgagatggatgccatgatccctgagcgggagatgaaggacttccagttccgggccctgaagaaggtgcgcatctttgacagccctgaggagctgcccaaggagaggagcagcctgctggccgtgagcaacaagtatggcctggtgtttgctggaggagccagcggcctgcagatcttccccaccaagaacctgctgatccagaacaagccaggagatgaccccaacaagatcgtggacaaggtgcagggcctgctggtgcccatgaagttccccatccaccacctggccctgagctgtgacaacctgaccctgagcgcctgcatgatgagcagtgaatatggcagcatcatcgccttctttgatgtgaggaccttcagcaatgaggccaagcagcagaagaggccctttgcctaccacaagctgctgaaggatgctgggggcatggtgattgacatgaagtggaaccccaccgtgcccagcatggtggccgtgtgcctggctgatggcagcattgctgtgctgcaggtgacagagaccgtgaaggtgtgtgccaccctgcccagcacagtggccgtgacctctgtgtgctggagccccaagggcaagcagctggccgtgggcaagcagaatggaacagtggtgcagtacctgcccaccctgcaggagaagaaggtgatcccctgcccccccttctatgaaagtgaccaccctgtgcgggtgctggatgtgctgtggattggcacctacgtgtttgccatcgtgtatgctgctgctgatggcaccctggagaccagcccagatgtggtgatggccctgctgcccaagaaggaggagaagcaccctgagatctttgtgaacttcatggagccctgctacggcagctgcacagagcggcagcaccactactacctgagctacatcgaggagtgggacctggtgctggccgccagcgctgccagcacagaggtgtccatcctggcccggcagagcgaccagatcaactgggagagctggctgctggaggacagcagcagagctgagctgcctgtgacagacaagagtgatgacagcctgcccatgggcgtggtggtggactacaccaaccaggtggagatcaccatcagtgatgagaagaccctgcccccagcccctgtgctgatgctgctgagcacagatggagtgctgtgccccttctacatgatcaaccagaaccctggggtgaagagcctcatcaagaccccagagcggctgagcctggagggggagcggcagcccaagagccctggcagcacccccaccacccccaccagcagccaggccccccagaagctggatgccagcgctgctgctgccccagccagcctgccccccagcagccctgctgcccccatcgccaccttcagcctgctgcctgctggaggagcccccaccgtcttctcctttggcagcagcagcctgaagagcagcgccaccgtgactggagagcccccatcctacagcagcggcagtgacagcagcaaggccgcccctggccctggccccagcaccttctcctttgtgccccccagcaaggccagcctggcccccaccccagctgccagccctgtggcccccagcgctgccagcttctcctttggcagcagcggcttcaagcccaccctggagagcacccctgtgcccagcgtgtctgcccccaacatcgccatgaagcccagcttcccccccagcaccagcgctgtgaaggtgaacctgtctgagaagttcaccgctgctgccaccagcacccctgtgagcagcagccagagcgccccacccatgagccccttcagcagcgccagcaagccagctgccagcggccccctgagccaccccacccccctgagcgccccacccagctctgtgcccctgaagagctctgtgctgcccagccccagcgctggccgcagcgcccagggcagcagcagccctgtgcccagcatggtgcagaagagcccccgcatcaccccacctgctgccaagccaggcagcccccaggccaagagcctgcagcctgctgtggccgagaagcagggccaccagtggaaggacagcgaccctgtgatggccggcattggagaggagatcgcccacttccagaaggagctggaggagctgaaggcccggaccagcaaggcctgcttccaggtgggcaccagcgaggagatgaagatgctgaggacagaaagtgatgacctgcacaccttcctgctggagatcaaggagaccacagagagcctgcatggagacatcagcagcctgaagaccaccctgctggagggctttgctggggtggaggaggcccgggagcagaatgaaagaaacagagattctggctacctgcacctgctgtacaagaggcccctggaccccaagtctgaggcccagctgcaggagatccggcggctgcaccagtatgtgaagtttgctgtgcaggatgtgaatgatgtgctggacctggagtgggaccagcacctggagcagaagaagaagcagaggcacctgctggtgcctgagcgggagaccctcttcaacaccctggccaacaaccgggagatcatcaaccagcagaggaagaggctgaaccacctggtggacagcctgcagcagctgcggctgtacaagcagaccagcctgtggagcctgagcagcgctgtgcccagccagagcagcatccacagctttgacagcgacctggagagcctgtgcaatgccctgctgaagaccaccatcgagagccacaccaagagcctgcccaaggtgcctgccaagctgagccccatgaagcaggcccagctgaggaacttcctggccaagaggaagaccccacctgtgcgcagcacagccccagccagcctgagccgcagcgccttcctgagccagcgctactatgaggacctggatgaggtgagcagcaccagctctgtgtcccagagcctggagagtgaagatgcccggaccagctgcaaggatgatgaagctgtggtgcaggcccccaggcatgcccctgtggtgaggacccccagcatccagcccagcctgctgccccatgctgccccctttgccaagagccacctggtgcacggcagcagccctggggtgatgggcacctctgtggccaccagcgccagcaagatcatcccccagggcgctgacagcaccatgctggccaccaagacagtgaagcacggggcccccagccccagccaccccatcagcgccccccaggccgctgctgctgctgccctgcggcggcagatggccagccaggccccagctgtgaacaccctgacagagagcaccctgaagaatgtgccccaggtggtgaatgtgcaggagctgaagaacaacccagccacccccagcacagccatgggcagctctgtgccctacagcacagccaagaccccccaccctgtgctgacccctgtggccgccaaccaggccaagcagggcagcctcatcaacagcctgaagcccagcggccccaccccagccagcggccagctgagcagcggggacaaggccagcggcacagccaagattgaaacagctgtgaccagcacccccagcgccagcggccagttcagcaagcccttctccttcagccccagcggcaccggcttcaactttggcatcatcacccccacccccagcagcaacttcaccgctgcccagggcgccacccccagcaccaaggagagcagccagccagatgccttcagcagcggcggcggcagcaagcccagctatgaggccatccctgagagcagcccccccagcggcatcaccagcgccagcaacaccaccccaggagagcctgctgccagcagcagcaggcctgtggcccccagcggcacagccctgagcaccaccagcagcaagctggagaccccacccagcaagctgggggagctgctcttccccagcagcctggccggggagaccctgggcagcttcagcggcctgcgggtgggccaggctgatgacagcaccaagcccaccaacaaggccagcagcaccagcctgaccagcacccagcccaccaagaccagcggcgtgcccagcggcttcaacttcaccgcccctcctgtgctgggcaagcacacagagccccctgtgaccagcagcgccaccaccacctctgtggcccccccagctgccaccagcaccagcagcacagctgtgtttggcagcctgcctgtgaccagcgctggcagcagtggagtcatcagctttggaggcaccagcctgtctgctgggaagaccagcttctcctttggcagccagcagaccaacagcacagtgccccccagcgcccccccacccaccacagctgccacccccctgcccaccagcttccccaccctgagctttggcagcctgctgagcagcgccaccacccccagcctgcccatgtctgctggccgcagcacagaggaggccaccagcagcgccctgcctgagaagccaggggacagcgaggtgtctgccagcgctgccagcctgctggaggagcagcagagcgcccagctgccccaggccccaccccagaccagtgacagcgtgaagaaggagcctgtgctggcccagcctgctgtgagcaacagcggcacagctgccagcagcaccagcctggtggccctgtctgctgaggccaccccagccaccactggagtgcctgatgccaggacagaggccgtgcccccagccagcagcttctctgtgcccggccagacagctgtgacagctgctgccatcagcagcgctggccctgtggccgtggagaccagcagcacccccatcgccagcagcaccaccagcatcgtggcccctggccccagcgctgaggccgccgccttcggcaccgtgaccagcggcagctctgtgtttgcccagcccccagctgccagcagcagcagcgccttcaaccagctgaccaacaacacagccacagcccccagcgccacccctgtgtttggccaggtggccgccagcacagcccccagcctgtttggccagcagacaggcagcacagccagcacagctgctgccaccccccaggtgagcagcagcggcttcagcagccctgccttcggcaccacagcccctggggtgtttggccagaccaccttcggccaggcctctgtgtttggccagagcgccagcagcgctgccagcgtcttctccttcagccagcccggcttcagctctgtgcctgccttcggccagcctgccagcagcacccccaccagcaccagcggctctgtgtttggagctgccagcagcaccagcagcagcagcagcttctcctttggccagagcagccccaacacaggaggcggcctgtttggccagagcaatgccccagccttcggccagagccctggcttcggccagggcggctctgtgtttggaggcaccagcgctgccaccaccacagctgccaccagcggcttctccttctgccaggccagcggcttcggcagcagcaacacaggctctgtgtttggccaggccgccagcactggaggcatcgtgtttggccagcagagcagcagcagcagcggctctgtgtttggaagtggcaacacaggccggggcggcggcttcttcagcggcctgggcggcaagcccagccaggatgctgccaacaagaaccccttcagcagcgccagcggcggcttcggcagcacagccaccagcaacaccagcaacctgtttggaaacagcggggccaagacctttggaggctttgccagcagcagctttggagagcagaagcccaccggcaccttcagcagcggcggcggctctgtggccagccagggcttcggcttcagcagccccaacaagacaggaggctttggagctgcccctgtgtttggcagcccccccacctttggaggcagccctggctttggaggagtgcctgcctttggaagtgccccagccttcaccagccccctgggcagcactggaggcaaggtgtttggagagggcacagctgctgccagcgctgggggctttggatttggcagcagcagcaacaccaccagctttggcaccctggccagccagaatgcccccaccttcggcagcctgagccagcagaccagcggcttcggcacccagagcagcggcttcagcggctttggaagtggcactggaggcttctcctttggcagcaacaacagctctgtgcagggctttggaggctggaggagctag

SEQ ID NO: 162525 - DNA, 237 bp, synthetic construct
  misc_feature 1..237: note = Description of Artificial Sequence: Synthetic coding sequence
  source 1..237: mol_type = other DNA
ggggagggcacagctgctgccagcgctgggggcttcggcttcggcagcagcagcaacaccaccagctttggcaccctggccagccagaatgcccccaccttcggcagcctgagccagcagaccagcggcttcggcacccagagcagcggcttcagcggcttcggcagcggcaccggcggcttctcctttggcagcaacaacagctctgtgcagggctttggaggctggaggagctag

SEQ ID NO: 162526 - DNA, 5055 bp, synthetic construct
  misc_feature 1..5055: note = Description of Artificial Sequence: Synthetic coding sequence
  source 1..5055: mol_type = other DNA
ggggctgagggcaggaagtttgctgtggagcggcccggcttccggggccagggccggggccggcagcgctggctgctgcggcacaccacccccaccagcagccaggccccccagaagctggatgccagcgctgctgctgccccagccagcctgccccccagcagccctgctgcccccatcgccaccttcagcctgctgcctgctgggggcgcccccaccgtcttctcctttggcagcagcagcctgaagagcagcgccaccgtgactggagagccccccagctacagcagcggcagtgacagcagcaaggccgcccctggccctggccccagcaccttctcctttgtgccccccagcaaggccagcctggcccccaccccagctgccagccctgtggcccccagcgctgccagcttctcctttggcagcagcggcttcaagcccaccctggagagcacccctgtgcccagcgtgtctgcccccaacatcgccatgaagcccagcttcccccccagcaccagcgctgtgaaggtgaacctgtctgagaagttcaccgctgctgccaccagcacccctgtgagcagcagccagagcgccccacccatgagccccttcagcagcgccagcaagccagctgccagcggccccctgagccaccccacccccctgagcgccccacccagctctgtgcccctgaagagctctgtgctgcccagccccagcgctggccgcagcgcccagggcagcagcagccctgtgcccagcatggtgcagaagagcccccgcatcaccccacctgctgccaagccaggcagcccccaggccaagagcctgcagcctgctgtggccgagaagcagggccaccagtggaaggacagcgaccctgtgatggccggcatcggggaggagatcgcccacttccagaaggagctggaggagctgaaggcccggaccagcaaggcctgcttccaggtgggcaccagcgaggagatgaagatgctgaggacagaaagtgatgacctgcacaccttcctgctggagatcaaggagaccacagagagcctgcacggggacatcagcagcctgaagaccaccctgctggagggctttgctggggtggaggaggcccgggagcagaatgaaagaaacagagacagcggctacctgcacctgctgtacaagaggcccctggaccccaagtctgaggcccagctgcaggagatccggcggctgcaccagtatgtgaagtttgctgtgcaggatgtgaatgatgtgctggacctggagtgggaccagcacctggagcagaagaagaagcagaggcacctgctggtgcctgagcgggagaccctcttcaacaccctggccaacaaccgggagatcatcaaccagcagaggaagaggctgaaccacctggtggacagcctgcagcagctgcggctgtacaagcagaccagcctgtggagcctgagcagcgctgtgcccagccagagcagcatccacagctttgacagcgacctggagagcctgtgcaatgccctgctgaagaccaccatcgagagccacaccaagagcctgcccaaggtgcctgccaagctgagccccatgaagcaggcccagctgaggaacttcctggccaagaggaagaccccacctgtgcgcagcacagccccagccagcctgagccgcagcgccttcctgagccagcgctactatgaggacctggatgaggtgagcagcaccagctctgtgtcccagagcctggagagtgaagatgcccggaccagctgcaaggatgatgaggccgtggtgcaggcccccaggcatgcccctgtggtgaggacccccagcatccagcccagcctgctgccccacgccgccccctttgccaagagccacctggtgcacggcagcagccctggggtgatgggcacctctgtggccaccagcgccagcaagatcatcccccagggcgctgacagcaccatgctggccaccaagacagtgaagcatggagcccccagccccagccaccccatcagcgccccccaggccgctgctgctgctgccctgcggcggcagatggccagccaggccccagctgtgaacaccctgacagagagcaccctgaagaatgtgccccaggtggtgaatgtgcaggagctgaagaacaacccagccacccccagcacagccatgggcagctctgtgccctacagcacagccaagaccccccaccctgtgctgacccctgtggccgccaaccaggccaagcagggcagcctcatcaacagcctgaagcccagcggccccaccccagccagcggccagctgagcagcggggacaaggccagcggcacagccaagattgaaacagctgtgaccagcaccccatctgccagcggccagttcagcaagcccttctccttcagccccagcggcaccggcttcaactttggcatcatcacccccacccccagcagcaacttcaccgctgcccagggcgccacccccagcaccaaggagagcagccagccagatgccttcagcagcggcggcggcagcaagcccagctatgaggccatccctgagagcagccccccatctggcatcaccagcgccagcaacaccaccccaggagagcctgctgccagcagcagcaggcctgtggcccccagcggcacagccctgagcaccaccagcagcaagctggagaccccacccagcaagctgggggagctgctcttccccagcagcctggccggggagaccctgggcagcttcagcggcctgcgggtgggccaggctgatgacagcaccaagcccaccaacaaggccagcagcaccagcctgaccagcacccagcccaccaagaccagcggcgtgcccagcggcttcaacttcaccgcccctcctgtgctgggcaagcacacagagccccctgtgaccagcagcgccaccaccacctctgtggcccctcctgctgccaccagcaccagcagcacagctgtgtttggcagcctgcctgtgaccagcgctggcagcagcggggtcatcagctttggaggcaccagcctgtctgctgggaagaccagcttctcctttggcagccagcagaccaacagcacagtgcccccatctgcccccccacccaccacagctgccacccccctgcccaccagcttccccaccctgagctttggcagcctgctgagcagcgccaccacccccagcctgcccatgtctgctggccgcagcacagaggaggccaccagcagcgccctgcctgagaagccaggggacagcgaggtgtctgccagcgctgccagcctgctggaggagcagcagagcgcccagctgccccaggccccaccccagaccagtgacagcgtgaagaaggagcctgtgctggcccagcctgctgtgagcaacagcggcacagctgccagcagcaccagcctggtggccctgtctgctgaggccaccccagccaccaccggggtgcctgatgccaggacagaagctgtgcccccagccagcagcttctctgtgcccggccagacagctgtgacagctgctgccatcagcagcgctggccctgtggccgtggagaccagcagcacccccatcgccagcagcaccaccagcatcgtggcccctggccccagcgctgaggccgccgcctttggaacagtgaccagcggcagctctgtgtttgcccagcccccagctgccagcagcagcagcgccttcaaccagctgaccaacaacacagccacagcccccagcgccacccctgtgtttggccaggtggccgccagcacagcccccagcctgtttggccagcagacaggcagcacagccagcacagctgctgccaccccccaggtgagcagcagcggcttcagcagccctgccttcggcaccacagcccctggggtgtttggccagaccaccttcggccaggcctctgtgtttggccagagcgccagcagcgctgcctctgtgttctccttcagccagcccggcttcagctctgtgcctgccttcggccagcctgccagcagcacccccaccagcaccagcggctctgtgtttggagctgccagcagcaccagcagcagcagcagcttctcctttggccagagcagccccaacacaggaggcggcctgtttggccagagcaatgccccagccttcggccagagccctggcttcggccagggcggctctgtgtttggaggcaccagcgctgccaccaccacagctgccaccagcggcttctccttctgccaggccagcggcttcggcagcagcaacacaggctctgtgtttggccaggccgccagcactggaggcatcgtgtttggccagcagagcagcagcagcagcggctctgtgtttggcagcggcaacacaggccggggcggcggcttcttcagcggcctgggcggcaagcccagccaggatgctgccaacaagaaccccttcagcagcgccagcggcggcttcggcagcacagccaccagcaacaccagcaacctgtttggaaattctggggccaagaccttcggcggctttgccagcagcagctttggagagcagaagcccaccggcaccttcagcagcggcggcggctctgtggccagccagggcttcggcttcagcagccccaacaagacaggaggctttggagctgcccctgtgtttggcagcccccccaccttcggcggcagccctggctttggaggagtgcctgccttcggcagcgccccagccttcaccagccccctgggcagcactggaggcaaggtgtttggagagggcacagctgctgccagcgctgggggcttcggcttcggcagcagcagcaacaccaccagctttggcaccctggccagccagaatgcccccaccttcggcagcctgagccagcagaccagcggcttcggcacccagagcagcggcttcagcggcttcggcagcggcaccggcggcttctcctttggcagcaacaacagctctgtgcagggctttggaggctggaggagctag

SEQ ID NO: 162527 - DNA, 6282 bp, synthetic construct
  misc_feature 1..6282: note = Description of Artificial Sequence: Synthetic coding sequence
  source 1..6282: mol_type = other DNA
atgggagatgagatggatgccatgatccctgagcgggagatgaaggacttccagttccgggccctgaagaaggtgcgcatctttgacagccctgaggagctgcccaaggagaggagcagcctgctggccgtgagcaacaagtatggcctggtgtttgctggaggagccagcggcctgcagatcttccccaccaagaacctgctgatccagaacaagccaggagatgaccccaacaagatcgtggacaaggtgcagggcctgctggtgcccatgaagttccccatccaccacctggccctgagctgtgacaacctgaccctgagcgcctgcatgatgagcagtgaatatggcagcatcatcgccttctttgatgtgaggaccttcagcaatgaggccaagcagcagaagaggccctttgcctaccacaagctgctgaaggatgctgggggcatggtgattgacatgaagtggaaccccaccgtgcccagcatggtggccgtgtgcctggctgatggcagcattgctgtgctgcaggtgacagagaccgtgaaggtgtgtgccaccctgcccagcacagtggccgtgacctctgtgtgctggagccccaagggcaagcagctggccgtgggcaagcagaatggaacagtggtgcagtacctgcccaccctgcaggagaagaaggtgatcccctgcccccccttctatgaaagtgaccaccctgtgcgggtgctggatgtgctgtggattggcacctacgtgtttgccatcgtgtatgctgctgctgatggcaccctggagaccagcccagatgtggtgatggccctgctgcccaagaaggaggagaagcaccctgagatctttgtgaacttcatggagccctgctacggcagctgcacagagcggcagcaccactactacctgagctacatcgaggagtgggacctggtgctggccgccagcgctgccagcacagaggtgtccatcctggcccggcagagcgaccagatcaactgggagagctggctgctggaggacagcagcagagctgagctgcctgtgacagacaagagtgatgacagcctgcccatgggcgtggtggtggactacaccaaccaggtggagatcaccatcagtgatgagaagaccctgcccccagcccctgtgctgatgctgctgagcacagatggagtgctgtgccccttctacatgatcaaccagaaccctggggtgaagagcctcatcaagaccccagagcggctgagcctggagggggagcggcagcccaagagccctggcagcacccccaccacccccaccagcagccaggccccccagaagctggatgccagcgctgctgctgccccagccagcctgccccccagcagccctgctgcccccatcgccaccttcagcctgctgcctgctggaggagcccccaccgtcttctcctttggcagcagcagcctgaagagcagcgccaccgtgactggagagcccccatcctacagcagcggcagtgacagcagcaaggccgcccctggccctggccccagcaccttctcctttgtgccccccagcaaggccagcctggcccccaccccagctgccagccctgtggcccccagcgctgccagcttctcctttggcagcagcggcttcaagcccaccctggagagcacccctgtgcccagcgtgtctgcccccaacatcgccatgaagcccagcttcccccccagcaccagcgctgtgaaggtgaacctgtctgagaacagcagccagagcgccccacccatgagccccttcagcagcgccagcaagccagctgccagcggccccctgagccaccccacccccctgagcgccccacccagctctgtgcccctgaagagctctgtgctgcccagccccagcggccgcagcgcccagggcagcagcagccctgtgcccagcatggtgcagaagagcccccgcatcaccccacctgctgccaagccaggcagcccccaggccaagagcctgcagcctgctgtggccgagaagcagggccaccagtggaaggacagcgaccctgtgatggccggcattggagaggagatcgcccacttccagaaggagctggaggagctgaaggcccggaccagcaaggcctgcttccaggtgggcaccagcgaggagatgaagatgctgaggacagaaagtgatgacctgcacaccttcctgctggagatcaaggagaccacagagagcctgcatggagacatcagcagcctgaagaccaccctgctggagggctttgctggggtggaggaggcccgggagcagaatgaaagaaacagagattctggctacctgcacctgctgtacaagaggcccctggaccccaagtctgaggcccagctgcaggagatccggcggctgcaccagtatgtgaagtttgctgtgcaggatgtgaatgatgtgctggacctggagtgggaccagcacctggagcagaagaagaagcagaggcacctgctggtgcctgagcgggagaccctcttcaacaccctggccaacaaccgggagatcatcaaccagcagaggaagaggctgaaccacctggtggacagcctgcagcagctgcggctgtacaagcagaccagcctgtggagcctgagcagcgctgtgcccagccagagcagcatccacagctttgacagcgacctggagagcctgtgcaatgccctgctgaagaccaccatcgagagccacaccaagagcctgcccaaggtgcctgccaagctgagccccatgaagcaggcccagctgaggaacttcctggccaagaggaagaccccacctgtgcgcagcacagccccagccagcctgagccgcagcgccttcctgagccagcgctactatgaggacctggatgaggtgagcagcaccagctctgtgtcccagagcctggagagtgaagatgcccggaccagctgcaaggatgatgaagctgtggtgcaggcccccaggcatgcccctgtggtgaggacccccagcatccagcccagcctgctgccccatgctgccccctttgccaagagccacctggtgcacggcagcagccctggggtgatgggcacctctgtggccaccagcgccagcaagatcatcccccagggcgctgacagcaccatgctggccaccaagacagtgaagcacggggcccccagccccagccaccccatcagcgccccccaggccgctgctgctgctgccctgcggcggcagatggccagccaggccccagctgtgaacaccctgacagagagcaccctgaagaatgtgccccaggtggtgaatgtgcaggagctgaagaacaacccagccacccccagcacagccaagaccccccaccctgtgctgacccctgtggccgccaaccaggccaagcagggcagcctcatcaacagcctgaagcccagcggccccaccccagccagcggccagctgagcagcggggacaaggccagcggcacagccaagattgaaacagctgtgaccagcacccccagcgccagcggccagttcagcaagcccttctccttcagccccagcggcaccggcttcaactttggcatcatcacccccacccccagcagcaacttcaccgctgcccagggcgccacccccagcaccaaggagagcagccagccagatgccttcagcagcggcggcggcagcaagcccagctatgaggccatccctgagagcagcccccccagcggcatcaccagcgccagcaacaccaccccaggagagcctgctgccagcagcagcaggcctgtggcccccagcggcacagccctgagcaccaccagcagcaagctggagaccccacccagcaagctgggggagctgctcttccccagcagcctggccggggagaccctgggcagcttcagcggcctgcgggtgggccaggctgatgacagcaccaagcccaccaacaaggccagcagcaccagcctgaccagcacccagcccaccaagaccagcggcgtgcccagcggcttcaacttcaccgcccctcctgtgctgggcaagcacacagagccccctgtgaccagcagcgccaccaccacctctgtggcccccccagctgccaccagcaccagcagcacagctgtgtttggcagcctgcctgtgaccagcgctggcagcagtggagtcatcagctttggaggcaccagcctgtctgctgggaagaccagcttctcctttggcagccagcagaccaacagcacagtgccccccagcgcccccccacccaccacagctgccacccccctgcccaccagcttccccaccctgagctttggcagcctgctgagcagcgccaccacccccagcctgcccatgtctgctggccgcagcacagaggaggccaccagcagcgccctgcctgagaagccaggggacagcgaggtgtctgccagcgctgccagcctgctggaggagcagcagagcgcccagctgccccaggccccaccccagaccagtgacagcgtgaagaaggagcctgtgctggcccagcctgctgtgagcaacagcggcacagctgccagcagcaccagcctggtggccctgtctgctgaggccaccccagccaccactggagtgcctgatgccaggacagaggccgtgcccccagccagcagcttctctgtgcccggccagacagctgtgacagctgctgccatcagcagcgctggccctgtggccgtggagaccagcagcacccccatcgccagcagcaccaccagcatcgtggcccctggccccagcgctgaggccgccgccttcggcaccgtgaccagcggcagctctgtgtttgcccagcccccagctgccagcagcagcagcgccttcaaccagctgaccaacaacacagccacagcccccagcgccacccctgtgtttggccaggtggccgccagcacagcccccagcctgtttggccagcagacaggcagcacagccagcacagctgctgccaccccccaggtgagcagcagcggcttcagcagccctgccttcggcaccacagcccctggggtgtttggccagaccaccttcggccaggcctctgtgtttggccagagcgccagcagcgctgccagcgtcttctccttcagccagcccggcttcagctctgtgcctgccttcggccagcctgccagcagcacccccaccagcaccagcggctctgtgtttggagctgccagcagcaccagcagcagcagcagcttctcctttggccagagcagccccaacacaggaggcggcctgtttggccagagcaatgccccagccttcggccagagccctggcttcggccagggcggctctgtgtttggaggcaccagcgctgccaccaccacagctgccaccagcggcttctccttctgccaggccagcggcttcggcagcagcaacacaggctctgtgtttggccaggccgccagcactggaggcatcgtgtttggccagcagagcagcagcagcagcggctctgtgtttggaagtggcaacacaggccggggcggcggcttcttcagcggcctgggcggcaagcccagccaggatgctgccaacaagaaccccttcagcagcgccagcggcggcttcggcagcacagccaccagcaacaccagcaacctgtttggaaacagcggggccaagacctttggaggctttgccagcagcagctttggagagcagaagcccaccggcaccttcagcagcggcggcggctctgtggccagccagggcttcggcttcagcagccccaacaagacaggaggctttggagctgcccctgtgtttggcagcccccccacctttggaggcagccctggctttggaggagtgcctgcctttggaagtgccccagccttcaccagccccctgggcagcactggaggcaaggtgtttggagagggcacagctgctgccagcgctgggggcttcggcagcctggccatgagcctgagccccaccctgaagggccgcctgctgctgatgaggcccaaggccggcggcggccgggagcaggccgcccctggcaggaagagcaatgaaagccgcagcctgggccacctgtgcatggagcgggccctgaccagccccctgaaggtgtgggagcagcagcagcaccacatcctgcggcatgcccgggagagtgaatgtccccacttccgcatcaccgtgcccacagacttctggttctgggaccctgagtag

SEQ ID NO: 162528 - DNA, 1308 bp, synthetic construct
  misc_feature 1..1308: note = Description of Artificial Sequence: Synthetic coding sequence
  source 1..1308: mol_type = other DNA
atgaagagcagcctgctgctgcggggcgtgcacttctgcttccacctgcccggggccacccccagcaccaaggagagcagccagccagatgccttcagcagcggcggcggcagcaagcccagctatgaggccatccctgagagcagcccccccagcggcatcaccagcgccagcaacaccaccccaggagagcctgctgccagcagcagcaggcctgtggcccccagcggcacagccctgagcaccaccagcagcaagctggagaccccacccagcaagctgggggagctgctcttccccagcagcctggccggggagaccctgggcagcttcagcggcctgcgggtgggccaggctgatgacagcaccaagcccaccaacaaggccagcagcaccagcctgaccagcacccagcccaccaagaccagcggcgtgcccagcggcttcaacttcaccgcccctcctgtgctgggcaagcacacagagccccctgtgaccagcagcgccaccaccacctctgtggcccccccagctgccaccagcaccagcagcacagctgtgtttggcagcctgcctgtgaccagcgctggcagcagtggagtcatcagctttggaggcaccagcctgtctgctgggaagaccagcttctcctttggcagccagcagaccaacagcacagtgccccccagcgcccccccacccaccacagctgccacccccctgcccaccagcttccccaccctgagctttggcagcctgctgagcagcgccaccacccccagcctgcccatgtctgctggccgcagcacagaggaggccaccagcagcgccctgcctgagaagccaggggacagcgaggtgtctgccagcgctgccagcctgctggaggagcagcagagcgcccagctgccccaggccccaccccagaccagtgacagcgtgaagaaggagcctgtgctggcccagcctgctgtgagcaacagcggcacagctgccagcagcaccagcctggtggccctgtctgctgaggccaccccagccaccactggagtgcctgatgccaggacagaggccgtgcccccagccagcagcttctctgtgcccggccagacagctgtgacagctgctgccatcagcagcgctggccctgtggccgtggagaccagcagcacccccatcgccagcagcaccaccagcatcgtggcccctggccccagcgctgaggccgccgccttcggcaccgtgaccagcggcagctctgtgtttgcccagcccccagctgccagcagcagcagcgccttcaactag

SEQ ID NO: 162529 - DNA, 981 bp, synthetic construct
  misc_feature 1..981: note = Description of Artificial Sequence: Synthetic coding sequence
  source 1..981: mol_type = other DNA
atggccgcctttgctgtggagccccagggccctgccctgggcagcgagcccatgatgctgggcagccccaccagccccaagccaggagtgaatgcccagttcctgcccggcttcctgatgggagacctgcctgcccctgtgaccccccagcccaggagcatcagcggccccagcgtgggcgtgatggagatgaggagccccctgctggccggcggcagccccccccagcctgtggtgcctgcccacaaggacaagagcggggcccctcctgtgcgcagcatctatgatgacatcagcagccctggcctgggcagcacccccctgaccagccggcggcagcccaacatctctgtgatgcagagccccctggtgggcgtgaccagcaccccaggcaccggccagagcatgttctccccagccagcatcggccagcccaggaagaccaccctgagccctgcccagctggaccccttctacacccagggcgacagcctgaccagcgaggaccacctggatgacagctgggtgacagtgtttggcttcccccaggccagcgccagctacatcctgctgcagtttgcccagtatggcaacatcctgaagcacgtgatgagcaacacaggcaactggatgcacatccgctaccagagcaagctgcaggccaggaaggccctgagcaaggatggccgcatctttggagagagcatcatgattggagtgaagccctgcatcgacaagtctgtgatggagagcagtgacagatgtgccctgagcagccccagcctggccttcaccccacccatcaagaccctgggcacccccacccagcccggcagcaccccccgcatcagcaccatgaggcccctggccacagcctacaaggccagcaccagtgactaccaggtgatcagtgaccggcagacccccaagaaggatgagagcctggtgtccaaggccatggagtacatgtttggctggtag

SEQ ID NO: 162530 - DNA, 930 bp, synthetic construct
  misc_feature 1..930: note = Description of Artificial Sequence: Synthetic coding sequence
  source 1..930: mol_type = other DNA
atgatgctgggcagccccaccagccccaagccaggagtgaatgcccagttcctgcccggcttcctgatgggagacctgcctgcccctgtgaccccccagcccaggagcatcagcggccccagcgtgggcgtgatggagatgaggagccccctgctggccggcggcagccccccccagcctgtggtgcctgcccacaaggacaagagcggggcccctcctgtgcgcagcatctatgatgacatcagcagccctggcctgggcagcacccccctgaccagccggcggcagcccaacatctctgtgatgcagagccccctggtgggcgtgaccagcaccccaggcaccggccagagcatgttcagccctgccagcatcggccagcccaggaagaccaccctgagccctgcccagctggaccccttctacacccagggcgacagcctgaccagcgaggaccacctggatgacagctgggtgacagtgtttggcttcccccaggccagcgccagctacatcctgctgcagtttgcccagtatggcaacatcctgaagcacgtgatgagcaacacaggcaactggatgcacatccgctaccagagcaagctgcaggccaggaaggccctgagcaaggatggccgcatctttggagagagcatcatgattggagtgaagccctgcatcgacaagtctgtgatggagagcagtgacagatgtgccctgagcagccccagcctggccttcaccccacccatcaagaccctgggcacccccacccagcccggcagcaccccccgcatcagcaccatgaggcccctggccacagcctacaaggccagcaccagtgactaccaggtgatcagtgaccggcagacccccaagaaggatgagagcctggtgtccaaggccatggagtacatgtttggctggtag

SEQ ID NO: 162531 - DNA, 576 bp, synthetic construct
  misc_feature 1..576: note = Description of Artificial Sequence: Synthetic coding sequence
  source 1..576: mol_type = other DNA
atgttcagccctgccagcatcggccagcccaggaagaccaccctgagccctgcccagctggaccccttctacacccagggcgacagcctgaccagcgaggaccacctggatgacagctgggtgacagtgtttggcttcccccaggccagcgccagctacatcctgctgcagtttgcccagtatggcaacatcctgaagcacgtgatgagcaacacaggcaactggatgcacatccgctaccagagcaagctgcaggccaggaaggccctgagcaaggatggccgcatctttggagagagcatcatgattggagtgaagccctgcatcgacaagtctgtgatggagagcagtgacagatgtgccctgagcagccccagcctggccttcaccccacccatcaagaccctgggcacccccacccagcccggcagcaccccccgcatcagcaccatgaggcccctggccacagcctacaaggccagcaccagtgactaccaggtgatcagtgaccggcagacccccaagaaggatgagagcctggtgtccaaggccatggagtacatgtttggctggtag

SEQ ID NO: 162532 - DNA, 981 bp, synthetic construct
  misc_feature 1..981: note = Description of Artificial Sequence: Synthetic coding sequence
  source 1..981: mol_type = other DNA
atgaagcaggatgccagcagaaatgctgcctacacagtggactgtgaggactatgtgcacgtggtggagttcaacccctttgaaaatggagacagcggcaacctgattgcctacggcggcaacaactacgtggtgattggcacctgcaccttccaggaggaggaggctgatgtggagggcatccagtacaagaccctgcggaccttccaccacggcgtgcgggtggatggcatcgcctggagccctgagacccggctggacagcctgccccctgtgatcaagttctgcaccagcgctgctgacatgaagatccgcctcttcaccagtgacctgcaggacaagaatgagtacaaggtgctggagggccacacagacttcatcaatggcctggtgtttgaccccaaggagggccaggagatcgcctctgtgtctgatgaccacacctgccgcatctggaacctggagggcgtgcagacagcccactttgtgctgcacagccctggcatgtctgtgtgctggcaccctgaggagaccttcaagctgatggtggccgagaagaatggcaccatccgcttctatgacctgctggcccagcaggccatcctgagcctggagagcgagcaggtgcccctgatgtctgcccactggtgcctgaagaacaccttcaaggtgggcgctgtggccggaaatgactggctgatctgggacatcaccaggagcagctacccccagaacaagaggcctgtgcacatggaccgggcctgcctcttccgctggagcaccatcagcgagaacctgtttgccaccaccggctacccaggcaagatggccagccagttccagatccaccacctgggccacccccagcccatcctgatgggctctgtggccgtgggcagcggcctgtcctggcacaggaccctgcccctgtgtgtgattggaggagaccacaagctgctcttctgggtgacagaggtgtag

SEQ ID NO: 162533 - DNA, 156 bp, synthetic construct
  misc_feature 1..156: note = Description of Artificial Sequence: Synthetic coding sequence
  source 1..156: mol_type = other DNA
atgaagcaggatgccagcagaaatgctgcctacacagtggactgtgaggactatgtgcacgtggtggagttcaacccctttgaaaatggagacagcggcaacctgattgcctacggcggcaacaactacgtggtgattggcacctgcaccttctag

SEQ ID NO: 162534 - DNA, 981 bp, synthetic construct; identical to SEQ ID NO: 162532
  misc_feature 1..981: note = Description of Artificial Sequence: Synthetic coding sequence
  source 1..981: mol_type = other DNA

SEQ ID NO: 162535 - DNA, 1143 bp, synthetic construct
  misc_feature 1..1143: note = Description of Artificial Sequence: Synthetic coding sequence
  source 1..1143: mol_type = other DNA
atggaggagatctatgccaagtttgtgtcccagaagatcagcaagacccgctggaggcccctgcccccaggcagcctgcagacagctgagacctttgccaccggctcctgggacaatgaggagaactacatcagcctgtggagcattggagactttggaaacctggacagtgatggcggctttgaaggagaccaccagctgctgtgtgacatccgccaccacggagatgtgatggacctgcagttctttgaccaggagcgcatcgtggccgccagcagcacaggctgtgtgaccgtcttcctgcaccaccccaacaaccagaccctgtctgtgaaccagcagtggaccacagcccactaccacacaggccctggcagccccagctacagcagcgccccctgcacaggagtggtgtgcaacaaccctgagatcgtgacagtgggagaagatggccgcatcaacctcttccgggctgaccacaaggaggccgtgaggaccatcgacaatgctgacagcagcaccctgcatgctgtgaccttcctgcggaccccagagatcctgactgtgaacagcatcggccagctgaagatctgggacttccggcagcagggcaatgagcccagccagatcctgagcctgaccggggacagagtgcccctgcactgtgtggacagacaccccaaccagcagcacgtggtggccactggaggccaggacggcatgctgagcatctgggatgtgcggcagggcaccatgcctgtgtccctgctgaaggcccacgaggccgagatgtgggaggtgcacttccaccccagcaaccctgagcacctgttcacctgcagtgaagatggcagcctgtggcactgggatgccagcacagatgtgcctgagaagagcagcctcttccaccagggcggccgcagcagcaccttcctgagccacagcatcagcaaccaggccaacgtgcaccagagcgtcatcagctcctggctgagcacagatcctgccaaggaccgcatcgagatcaccagcctgctgcccagccgcagcctgtctgtgaacaccctggatgtgctgggcccctgcctggtgtgtggcacagatgctgaggccatctacgtgaccaggcacctgttctcctag

SEQ ID NO: 162536 - DNA, 747 bp, synthetic construct
  misc_feature 1..747: note = Description of Artificial Sequence: Synthetic coding sequence
  source 1..747: mol_type = other DNA
atgggcggccccctgagcctgggcacagactgtgcccacacaggctacagaagagagctgaccctgtgcagccaccggctgcggcccaaggtgcccagcaaccagggcagcgctggccggggcggcgctgagaggagagtgctgtgcctgctgtttgctgtgcctgctgctgctgccttcggcatggaggagatctatgccaagtttgtgtcccagaagatcagcaagacccgctggaggcccctgcccccaggcagcctgcagacagctgagacctttgccaccggctcctgggacaatgaggagaactacatcagcctgtggagcatcggggactttggaaacctggacagtgatggcggctttgaaggagaccaccagctgctgtgtgacatccgccaccacggagatgtgatggacctgcagttctttgaccaggagagaattgtggccgccagcagcacaggctgtgtgacagtgttcctgcaccaccccaacaaccagaccctgtctgtgaaccagcagtggaccacagcccactaccacactggacctggcagccccagctacagcagcgccccctgcaccggggtggtgtgcaacaaccctgagatcgtgacagtgggggaggatggccgcatcaacctcttccgggctgaccacaaggaggccgtgaggaccatcggcctggtgacagagtgccacagcacagtgctgattgacatccccaccaacagcatgctgtag

SEQ ID NO: 162537 - DNA, 1143 bp, synthetic construct; identical to SEQ ID NO: 162535
  misc_feature 1..1143: note = Description of Artificial Sequence: Synthetic coding sequence
  source 1..1143: mol_type = other DNA

SEQ ID NO: 162538 - DNA, 1407 bp, synthetic construct
  misc_feature 1..1407: note = Description of Artificial Sequence: Synthetic coding sequence
  source 1..1407: mol_type = other DNA
atggccaagagaaatgctgagaaggagctgacagacaggaactgggaccaggaggatgaagctgaggaggtgggcaccttctccatggccagcgaggaggtgctgaagaacagagccatcaagaaggccaagagaagaaatgtgggctttgaaagtgacaccggcggggccttcaagggcttcaagggcctggtggtgcccagcggcggcggccgcttcagcggcttcggcagcggggccggcggcaagcccctggagggcctgagcaatggaaacaacatcaccagcgcccccccatttgccagcgccaaggctgctgctgaccccaaggtggccttcggcagcctggccgccaacggccccaccaccctggtggacaaggtgagcaaccccaagaccaacggggacagccagcagcccagcagcagcggcctggccagcagcaaggcctgtgtgggcaatgcctaccacaagcagctggccgccctgaactgcagcgtgcgggactggatcgtgaagcacgtgaacaccaaccccctgtgtgacctgacccccatcttcaaggactatgagaagtacctggccaacatcgagcagcagcacggcaacagcggcaggaacagcgagagcgagagcaacaaggtggccgctgagacccagagccccagcctgtttggcagcaccaagctgcagcaggagagcaccttcctgttccacggcaacaagacagaggacaccccagacaagaagatggaggtggccagcgagaagaagacagaccccagcagcctgggcgccaccagcgccagcttcaactttgggaagaaggtggacagctctgtgctgggcagcctgagctctgtgcccctgaccggcttctccttcagccctggcaacagcagcctgtttgggaaggacaccacccagagcaagcctgtgagcagccccttccccaccaagcccctggagggccaggccgagggggacagcggggagtgcaagggaggagatgaggaggagaatgatgagccccccaaggtggtggtgacagaggtgaaggaggaggatgccttctacagcaagaagtgcaagctgttctacaagaaggacaatgagttcaaggagaagggcatcggcaccctgcacctgaagcccacagccaaccagaagacccagctgctggtgcgggctgacaccaacctgggcaacatcctgctgaatgtgctgatcccccccaacatgccctgcaccaggacaggcaagaacaacgtgctgattgtgtgtgtgcccaacccccccattgatgagaagaatgccaccatgcctgtgaccatgctgatccgggtgaagaccagtgaagatgctgatgagctgcacaagatcctgctggagaagaaggatgcctag

SEQ ID NO: 162539 - DNA, 1323 bp, synthetic construct
  misc_feature 1..1323: note = Description of Artificial Sequence: Synthetic coding sequence
  source 1..1323: mol_type = other DNA
atggccagcgaggaggtgctgaagaacagagccatcaagaaggccaagagaagaaatgtgggctttgaaagtgacaccggcggggccttcaagggcttcaagggcctggtggtgcccagcggcggcggccgcttcagcggcttcggcagcggggccggcggcaagcccctggagggcctgagcaatggaaacaacatcaccagcgcccccccatttgccagcgccaaggctgctgctgaccccaaggtggccttcggcagcctggccgccaacggccccaccaccctggtggacaaggtgagcaaccccaagaccaacggggacagccagcagcccagcagcagcggcctggccagcagcaaggcctgtgtgggcaatgcctaccacaagcagctggccgccctgaactgcagcgtgcgggactggatcgtgaagcacgtgaacaccaaccccctgtgtgacctgacccccatcttcaaggactatgagaagtacctggccaacatcgagcagcagcacggcaacagcggcaggaacagcgagagcgagagcaacaaggtggccgctgagacccagagccccagcctgtttggcagcaccaagctgcagcaggagagcaccttcctgttccacggcaacaagacagaggacaccccagacaagaagatggaggtggccagcgagaagaagacagaccccagcagcctgggcgccaccagcgccagcttcaactttgggaagaaggtggacagctctgtgctgggcagcctgagctctgtgcccctgaccggcttctccttcagccctggcaacagcagcctgtttgggaaggacaccacccagagcaagcctgtgagcagccccttccccaccaagcccctggagggccaggccgagggggacagcggggagtgcaagggaggagatgaggaggagaatgatgagccccccaaggtggtggtgacagaggtgaaggaggaggatgccttctacagcaagaagtgcaagctgttctacaagaaggacaatgagttcaaggagaagggcatcggcaccctgcacctgaagcccacagccaaccagaagacccagctgctggtgcgggctgacaccaacctgggcaacatcctgctgaatgtgctgatcccccccaacatgccctgcaccaggacaggcaagaacaacgtgctgattgtgtgtgtgcccaacccccccattgatgagaagaatgccaccatgcctgtgaccatgctgatccgggtgaagaccagtgaagatgctgatgagctgcacaagatcctgctggagaagaaggatgcctag

SEQ ID NO: 162540 - DNA, 1323 bp, synthetic construct; identical to SEQ ID NO: 162539
  misc_feature 1..1323: note = Description of Artificial Sequence: Synthetic coding sequence
  source 1..1323: mol_type = other DNA

SEQ ID NO: 162541 - DNA, 27 bp, synthetic construct
  misc_feature 1..27: note = Description of Artificial Sequence: Synthetic coding sequence
  source 1..27: mol_type = other DNA
atggccagcgaggaggtgctgaagtag

SEQ ID NO: 162542 - DNA, 537 bp, synthetic construct
  misc_feature 1..537: note = Description of Artificial Sequence: Synthetic coding sequence
  source 1..537: mol_type = other DNA
atggccaagagaaatgctgagaaggagctgacagacaggaactgggaccaggaggatgaagctgaggaggtgggcaccttctccatggccagcgaggaggtgctgaagaacagagccatcaagaaggccaagagaagaaatgtgggctttgaaagtgacaccggcggggccttcaagggcttcaagggcctggtggtgcccagcggcggcggccgcttcagcggcttcggcagcggggccggcggcaagcccctggagggcctgagcaatggaaacaacatcaccagcgcccccccatttgccagcgccaaggctgctgctgaccccaaggtggcctttggaggagatgaggaggagaatgatgagccccccaaggtggtggtgacagaggtgaaggaggaggatgccttctacagcaagaagtgcaagctgttctacaagaaggacaatgagttcaaggagaagggcatcggcaccctgcacctgaagcccacagccaaccagaagacccagctgctggtgcgggctgacacctag

SEQ ID NO: 162543 - DNA, 138 bp, synthetic construct
  misc_feature 1..138: note = Description of Artificial Sequence: Synthetic coding sequence
  source 1..138: mol_type = other DNA
atggccaagagaaatgctgagaaggagctgacagacaggaactgggaccaggaggatgaagctgaggaggtgggcaccttctccatggccagcgaggaggtgctgaagaacagagccatcaagaaggccaagaggtag

SEQ ID NO: 162544 - DNA, 657 bp, synthetic construct
  misc_feature 1..657: note = Description of Artificial Sequence: Synthetic coding sequence
  source 1..657: mol_type = other DNA
atggaggtggccagcgagaagaagacagaccccagcagcctgggcgccaccagcgccagcttcaactttgggaagaaggtggacagctctgtgctgggcagcctgagctctgtgcccctgaccggcttctccttcagccctggcaacagcagcctgtttgggaaggacaccacccagagcaagcctgtgagcagccccttccccaccaagcccctggagggccaggccgagggggacagcggggagtgcaagggaggagatgaggaggagaatgatgagccccccaaggtggtggtgacagaggtgaaggaggaggatgccttctacagcaagaagtgcaagctgttctacaagaaggacaatgagttcaaggagaagggcatcggcaccctgcacctgaagcccacagccaaccagaagacccagctgctggtgcgggctgacaccaacctgggcaacatcctgctgaatgtgctgatcccccccaacatgccctgcaccaggacaggcaagaacaacgtgctgattgtgtgtgtgcccaacccccccattgatgagaagaatgccaccatgcctgtgaccatgctgatccgggtgaagaccagtgaagatgctgatgagctgcacaagatcctgctggagaagaaggatgcctag

SEQ ID NO: 162545 - DNA, 231 bp, synthetic construct
  misc_feature 1..231: note = Description of Artificial Sequence: Synthetic coding sequence
  source 1..231: mol_type = other DNA
atggccaagagaaatgctgagaaggagctgacagacaggaactgggaccaggaggatgaagctgaggaggtgggcaccttctccatggccagcgaggaggtgctgaagaacagagccatcaagaaggccaagagaagaaatgtgggctttgaggtgctgctgctgcagatggccctgcccccctggctgatcaagttccagatccccaagctgatgggcaccgtgtcctag

SEQ ID NO: 162546 - DNA, 15 bp, synthetic construct
  misc_feature 1..15: note = Description of Artificial Sequence: Synthetic coding sequence
  source 1..15: mol_type = other DNA
atggccaagaggtag

SEQ ID NO: 162547 - DNA, 33 bp, synthetic construct
  misc_feature 1..33: note = Description of Artificial Sequence: Synthetic coding sequence
  source 1..33: mol_type = other DNA
atggccaagagaaatgctgagaaggagctgtag

SEQ ID NO: 162548 - DNA, 1524 bp, synthetic construct
  misc_feature 1..1524: note = Description of Artificial Sequence: Synthetic coding sequence
  source 1..1524: mol_type = other DNA
atggccttcaactttggagcccccagcggcaccagcggcacagctgctgccacagctgccccagctgggggctttggaggcttcggcaccaccagcaccacagctggcagcgccttctccttcagcgcccccaccaacacaggcaccaccggcctgtttggaggcacccagaacaagggctttggatttggaactggatttggcaccaccaccggcaccagcacaggcctgggcaccggcctgggcaccggcctgggctttggaggcttcaacacccagcagcagcagcagaccaccctgggcggcctcttcagccagcccacccaggcccccacccagagcaaccagctgatcaacacagccagcgccctgagcgcccccaccctgctgggagatgaaagagatgccatcctggccaagtggaaccagctgcaggccttctggggcaccgggaagggctacttcaacaacaacatcccccctgtggagttcacccaggagaaccccttctgccgcttcaaggctgtgggctacagctgcatgcccagcaacaaggatgaagatggcctggtggtgctggtgttcaacaagaaggagacagagatccgcagccagcagcagcagctggtggagagcctgcacaaggtgctgggcggcaaccagaccctgactgtgaatgtggagggcaccaagaccctgcctgatgaccagacagaggtggtgatctacgtggtggagaggagccccaacggcaccagccggcgggtgcctgccaccaccctgtatgcccactttgagcaggccaacatcaagacccagctgcagcagctgggcgtgaccctgtccatgaccaggacagagctgagccctgcccagatcaagcagctgctgcagaaccccccagctggggtggaccccatcatctgggagcaggccaaggtggacaacccagattctgagaagctgatccctgtgcccatggtgggcttcaaggagctgctgcggcggctgaaggtgcaggaccagatgaccaagcagcaccagacccggctggacatcatcagcgaggacatcagcgagctgcagaagaaccagaccacctctgtggccaagatcgcccagtacaagaggaagctgatggacctgagccacaggaccctgcaggtgctgatcaagcaggagatccagaggaagagcggctacgccatccaggctgatgaggagcagctgcgggtgcagctggacaccatccagggcgagctgaatgcccccacccagttcaagggccgcctgaatgagctgatgagccagatccgcatgcagaaccactttggagctgtgcgctctgaggagcgctactacattgatgctgacctgctgcgggagatcaagcagcacctgaagcagcagcaggagggcctgagccacctgatcagcatcatcaaggatgacctggaggacatcaagctggtggagcacggcctgaatgagaccatccacatccggggcggcgtcttctcctag

SEQ ID NO: 162549 - DNA, 876 bp, synthetic construct
  misc_feature 1..876: note = Description of Artificial Sequence: Synthetic coding sequence
  source 1..876: mol_type = other DNA
atgcccagcaacaaggatgaagatggcctggtggtgctggtgttcaacaagaaggagacagagatccgcagccagcagcagcagctggtggagagcctgcacaaggtgctgggcggcaaccagaccctgactgtgaatgtggagggcaccaagaccctgcctgatgaccagacagaggtggtgatctacgtggtggagaggagccccaacggcaccagccggcgggtgcctgccaccaccctgtatgcccactttgagcaggccaacatcaagacccagctgcagcagctgggcgtgaccctgtccatgaccaggacagagctgagccctgcccagatcaagcagctgctgcagaaccccccagctggggtggaccccatcatctgggagcaggccaaggtggacaacccagattctgagaagctgatccctgtgcccatggtgggcttcaaggagctgctgcggcggctgaaggtgcaggaccagatgaccaagcagcaccagacccggctggatgtgctgatcaagcaggagatccagaggaagagcggctacgccatccaggctgatgaggagcagctgcgggtgcagctggacaccatccagggcgagctgaatgcccccacccagttcaagggccgcctgaatgagctgatgagccagatccgcatgcagaaccactttggagctgtgcgctctgaggagcgctactacattgatgctgacctgctgcgggagatcaagcagcacctgaagcagcagcaggagggcctgagccacctgatcagcatcatcaaggatgacctggaggacatcaagctggtggagcacggcctgaatgagaccatccacatccggggcggcgtcttctcctag

SEQ ID NO: 162550 - DNA, 984 bp, synthetic construct
  misc_feature 1..984: note = Description of Artificial Sequence: Synthetic coding sequence
  source 1..984: mol_type = other DNA
atgcccagcaacaaggatgaagatggcctggtggtgctggtgttcaacaagaaggagacagagatccgcagccagcagcagcagctggtggagagcctgcacaaggtgctgggcggcaaccagaccctgactgtgaatgtggagggcaccaagaccctgcctgatgaccagacagaggtggtgatctacgtggtggagaggagccccaacggcaccagccggcgggtgcctgccaccaccctgtatgcccactttgagcaggccaacatcaagacccagctgcagcagctgggcgtgaccctgtccatgaccaggacagagctgagccctgcccagatcaagcagctgctgcagaaccccccagctggggtggaccccatcatctgggagcaggccaaggtggacaacccagattctgagaagctgatccctgtgcccatggtgggcttcaaggagctgctgcggcggctgaaggtgcaggaccagatgaccaagcagcaccagacccggctggacatcatcagcgaggacatcagcgagctgcagaagaaccagaccacctctgtggccaagatcgcccagtacaagaggaagctgatggacctgagccacaggaccctgcaggtgctgatcaagcaggagatccagaggaagagcggctacgccatccaggctgatgaggagcagctgcgggtgcagctggacaccatccagggcgagctgaatgcccccacccagttcaagggccgcctgaatgagctgatgagccagatccgcatgcagaaccactttggagctgtgcgctctgaggagcgctactacattgatgctgacctgctgcgggagatcaagcagcacctgaagcagcagcaggagggcctgagccacctgatcagcatcatcaaggatgacctggaggacatcaagctggtggagcacggcctgaatgagaccatccacatccggggcggcgtcttctcctag

SEQ ID NO: 162551 - DNA, 1380 bp, synthetic construct
  misc_feature 1..1380: note = Description of Artificial Sequence: Synthetic coding sequence
  source 1..1380: mol_type = other DNA
atggccttcaactttggagcccccagcggcaccagcggcacagctgctgccacagctgccccagctgggggctttggaggcttcggcaccaccagcaccacagctggcagcgccttctccttcagcgcccccaccaacacaggcaccacagccctgggcggcctcttcagccagcccacccaggcccccacccagagcaaccagctgatcaacacagccagcgccctgagcgcccccaccctgctgggagatgaaagagatgccatcctggccaagtggaaccagctgcaggccttctggggcaccgggaagggctacttcaacaacaacatcccccctgtggagttcacccaggagaaccccttctgccgcttcaaggctgtgggctacagctgcatgcccagcaacaaggatgaagatggcctggtggtgctggtgttcaacaagaaggagacagagatccgcagccagcagcagcagctggtggagagcctgcacaaggtgctgggcggcaaccagaccctgactgtgaatgtggagggcaccaagaccctgcctgatgaccagacagaggtggtgatctacgtggtggagaggagccccaacggcaccagccggcgggtgcctgccaccaccctgtatgcccactttgagcaggccaacatcaagacccagctgcagcagctgggcgtgaccctgtccatgaccaggacagagctgagccctgcccagatcaagcagctgctgcagaaccccccagctggggtggaccccatcatctgggagcaggccaaggtggacaacccagattctgagaagctgatccctgtgcccatggtgggcttcaaggagctgctgcggcggctgaaggtgcaggaccagatgaccaagcagcaccagacccggctggacatcatcagcgaggacatcagcgagctgcagaagaaccagaccacctctgtggccaagatcgcccagtacaagaggaagctgatggacctgagccacaggaccctgcaggtgctgatcaagcaggagatccagaggaagagcggctacgccatccaggctgatgaggagcagctgcgggtgcagctggacaccatccagggcgagctgaatgcccccacccagttcaagggccgcctgaatgagctgatgagccagatccgcatgcagaaccactttggagctgtgcgctctgaggagcgctactacattgatgctgacctgctgcgggagatcaagcagcacctgaagcagcagcaggagggcctgagccacctgatcagcatcatcaaggatgacctggaggacatcaagctggtggagcacggcctgaatgagaccatccacatccggggcggcgtcttctcctag

SEQ ID NO: 162552 - DNA, 582 bp, synthetic construct
  misc_feature 1..582: note = Description of Artificial Sequence: Synthetic coding sequence
  source 1..582: mol_type = other DNA
atgagcggcttcaactttggaggcactggagcccccactggaggcttcaccttcggcacagccaagacagccaccaccaccccagccaccggcttctccttcagcaccagcggcactggaggcttcaactttggagcccccttccagcctgccaccagcacccccagcacaggcctcttcagcctggccacccagaccccagccacccagaccaccggcttcaccttcggcacagccaccctggccagcggcggcaccggcttcagcctgggcatcggggccagcaagctgaacctgagcaacacagctgccaccccagccatggccaaccccagcggcttcggcctgggcagcagcaacctgaccaatgccatcagcagcacagtgaccagcagccagggcacagcccccaccggctttgtgtttggccccagcaccacctctgtggccccagccaccaccagcggcggcttctccttcaccggcggcagcacagcccagcccagcggcttcaacatcggcagcgctggcaacagcgcccagcccacagccccagccaccctgcccttcaccccagcctag

SEQ ID NO: 162553 - DNA, 1569 bp, synthetic construct
  misc_feature 1..1569: note = Description of Artificial Sequence: Synthetic coding sequence
  source 1..1569: mol_type = other DNA
atgagcggcttcaactttggaggcactggagcccccactggaggcttcaccttcggcacagccaagacagccaccaccaccccagccaccggcttctccttcagcaccagcggcactggaggcttcaactttggagcccccttccagcctgccaccagcacccccagcacaggcctcttcagcctggccacccagaccccagccacccagaccaccggcttcaccttcggcacagccaccctggccagcggcggcaccggcttcagcctgggcatcggggccagcaagctgaacctgagcaacacagctgccaccccagccatggccaaccccagcggcttcggcctgggcagcagcaacctgaccaatgccatcagcagcacagtgaccagcagccagggcacagcccccaccggctttgtgtttggccccagcaccacctctgtggccccagccaccaccagcggcggcttctccttcaccggcggcagcacagcccagcccagcggcttcaacatcggcagcgctggcaacagcgcccagcccacagccccagccaccctgcccttcaccccagccaccccagctgccaccacagctggggccacccagcctgctgcccccacccccacagccaccatcaccagcacaggccccagcctgtttgccagcatcgccacagcccccaccagcagcgccaccaccggcctgagcctgtgcacccctgtgaccacagctggggcccccacagctggcacccagggcttcagcctgaaggcccctggagctgccagcggcaccagcaccaccaccagcacagctgccacagccacagccaccaccaccagcagcagcagcaccaccggctttgccctgaacctgaagcccctggccccagctggcatccccagcaacacagctgctgctgtgacagcccctcctggccctggagctgctgctggagctgctgccagcagcgccatgacctacgcccagctggagagcctcatcaacaagtggagcctggagctggaggaccaggagcggcacttcctgcagcaggccacccaggtgaatgcctgggacaggaccctgattgaaaatggagagaagatcaccagcctgcaccgggaggtggagaaggtgaagctggaccagaagaggctggaccaggagctggacttcatcctgagccagcagaaggagctggaggacctgctgagccccctggaggagctggtgaaggagcagagcggcaccatctacctgcagcacgcagatgaggagcgggagaagacctacaagctggccgagaacattgatgcccagctgaagaggatggcccaggacctgaaggacatcatcgagcacctgaacaccagcggggccccagctgacaccagtgaccccctgcagcagatctgcaagatcctgaatgcccacatggacagcctgcagtggattgaccagaacagcgccctgctgcagaggaaggtggaggaggtgaccaaggtgtgtgagggccgcaggaaggagcaggagaggagcttccgcatcacctttgattag

SEQ ID NO: 162554 - DNA, 1569 bp, synthetic construct; identical to SEQ ID NO: 162553
  misc_feature 1..1569: note = Description of Artificial Sequence: Synthetic coding sequence
  source 1..1569: mol_type = other DNA

SEQ ID NO: 162555 - DNA, 1569 bp, synthetic construct; identical to SEQ ID NO: 162553
  misc_feature 1..1569: note = Description of Artificial Sequence: Synthetic coding sequence
  source 1..1569: mol_type = other DNA

SEQ ID NO: 162556 - DNA, 1971 bp, synthetic construct
  misc_feature 1..1971: note = Description of Artificial Sequence: Synthetic coding sequence
  source 1..1971: mol_type = other DNA
atggaggagctggatggagagcccaccgtgaccctcatccctggggtgaacagcaagaagaaccagatgtactttgactggggccctggagagatgctggtgtgtgagaccagcttcaacaagaaggagaagtctgagatggtgcccagctgccccttcatctacatcatcaggaaggatgtggatgtgtacagccagatcctgaggaagctgttcaatgaaagccacggcatcttcctgggcctgcagagaattgatgaggagctgaccgggaagagcaggaagagccagctggtgcgggtgtccaagaactacagaagtgtcatccgggcctgcatggaggagatgcaccaggtggccatcgccgccaaggaccctgccaacggccggcagttcagcagccaggtgtccatcctgagcgccatggagctgatctggaacctgtgtgagatcctcttcatcgaggtggccccagctggccccctgctgctgcacctgctggactgggtgcggctgcacgtgtgtgaggtggacagcctgtctgcagatgtgctgggcagcgagaaccccagcaagcatgacagcttctggaacctggtgaccatcctggtgctgcagggccgcctggatgaggcccggcagatgctgagcaaggaggctgatgccagccctgccagcgctggcatctgccgcatcatgggagacctgatgaggaccatgcccatcctgagccctggcaacacccagaccctgacagagctggagctgaagtggcagcactggcatgaggagtgtgagcgctacctgcaggacagcacctttgccaccagcccccacctggagagcctgctgaagatcatgctgggagatgaggccgccctgctggagcagaaggagctgctgagcaactggtaccacttcctggtgacccggctgctgtacagcaaccccaccgtgaagcccatcgacctgcactactatgcccagagcagcctggacctcttcctgggcggggagagcagccctgagcccctggacaacatcctgctggccgcctttgaatttgacatccaccaggtgatcaaggaatgttccatcgccctgagcaactggtggtttgtggcccacctgacagacctgctggaccactgcaagctgctgcagagccacaacctgtacttcggcagcaacatgagggagttcctgctgctggagtatgccagcggcctgtttgcccaccccagcctgtggcagctgggcgtggactactttgactactgcccagagctgggccgggtgtccctggagctgcacatcgagcgcatccccctgaacacagagcagaaggccctgaaggtgctgcgcatctgtgagcagaggcagatgacagagcaggtgcgcagcatctgcaagatcctggccatgaaggctgtgaggaacaaccggctgggcagcgccctgtcctggagcatccgggccaaggatgctgcctttgccaccctggtgtctgaccgcttcctgcgggactactgtgagcggggctgcttcagtgacctggacctgattgacaacctgggccctgccatgatgctgagtgaccggctgaccttcctgggcaagtaccgggagttccacaggatgtacggggagaagagatttgctgatgctgccagcctgctgctgagcctgatgaccagccgcatcgcccccaggagcttctggatgaccctgctgacagatgccctgcccctgctggagcagaagcaggtgatcttctctgctgagcagacctatgagctgatgcgctgcctggaggacctgaccagccggcggcctgtgcacggggagagtgacacagagcagctgcaggatgatgacatcgagaccaccaaggtggagatgctgcggctgagcctggccaggaacctggcccgggccatcatccgggagggcagcctggagggcagctag

SEQ ID NO: 162557 - DNA, 1389 bp, synthetic construct
  misc_feature 1..1389: note = Description of Artificial Sequence: Synthetic coding sequence
  source 1..1389: mol_type = other DNA
atggccgccagcagcgctgcccggagccccttctgccagcagtggagcagcagcggcacctgtgtgcgcttcttcctgctgaagtggccccaggtgaccatcctggtgctgcagggccgcctggatgaggcccggcagatgctgagcaaggaggctgatgccagccctgccagcgctggcatctgccgcatcatgggagacctgatgaggaccatgcccatcctgagccctggcaacacccagaccctgacagagctggagctgaagtggcagcactggcatgaggagtgtgagcgctacctgcaggacagcacctttgccaccagcccccacctggagagcctgctgaagatcatgctgggagatgaggccgccctgctggagcagaaggagctgctgagcaactggtaccacttcctggtgacccggctgctgtacagcaaccccaccgtgaagcccatcgacctgcactactatgcccagagcagcctggacctcttcctgggcggggagagcagccctgagcccctggacaacatcctgctggccgcctttgaatttgacatccaccaggtgatcaaggaatgttccatcgccctgagcaactggtggtttgtggcccacctgacagacctgctggaccactgcaagctgctgcagagccacaacctgtacttcggcagcaacatgagggagttcctgctgctggagtatgccagcggcctgtttgcccaccccagcctgtggcagctgggcgtggactactttgactactgcccagagctgggccgggtgtccctggagctgcacatcgagcgcatccccctgaacacagagcagaaggccctgaaggtgctgcgcatctgtgagcagaggcagatgacagagcaggtgcgcagcatctgcaagatcctggccatgaaggctgtgaggaacaaccggctgggcagcgccctgtcctggagcatccgggccaaggatgctgcctttgccaccctggtgtctgaccgcttcctgcgggactactgtgagcggggctgcttcagtgacctggacctgattgacaacctgggccctgccatgatgctgagtgaccggctgaccttcctgggcaagtaccgggagttccacaggatgtacggggagaagagatttgctgatgctgccagcctgctgctgagcctgatgaccagccgcatcgcccccaggagcttctggatgaccctgctgacagatgccctgcccctgctggagcagaagcaggtgaaggtggccgctgctgtggtgttctttgcctgccagagcctgctggagctgagctgcatcgctgtggctgatgtgcgggtgtcctcctttgtggtgctgcctgtgcgggtgtacagcccctag

SEQ ID NO: 162558 - DNA, 975 bp, synthetic construct
  misc_feature 1..975: note = Description of Artificial Sequence: Synthetic coding sequence
  source 1..975: mol_type = other DNA
atggtgcccagctgccccttcatctacatcatcaggaaggatgtggatgtgtacagccagatcctgaggaagctgttcaatgaaagccacggcatcttcctgggcctgcagagaattgatgaggagctgaccgggaagagcaggaagagccagctggtgcgggtgtccaagaactacagaagtgtcatccgggcctgcatggaggagatgcaccaggtggccatcgccgccaaggaccctgccaacggccggcagttcagcagccaggtgtccatcctgagcgccatggagctgatctggaacctgtgtgagatcctcttcatcgaggtggccccagctggccccctgctgctgcacctgctggactgggtgcggctgcacgtgtgtgaggtggacagcctgtctgcagatgtgctgggcagcgagaaccccagcaagcatgacagcttctggaacctggtgaccatcctggtgctgcagggccgcctggatgaggcccggcagatgctgagcaaggaggctgatgccagccctgccagcgctggcatctgccgcatcatgggagacctgatgaggaccatgcccatcctgagccctggcaacacccagaccctgacagagctggagctgaagtggcagcactggcatgaggagtgtgagcgctacctgcaggacagcacctttgccaccagcccccacctggagagcctgctgaagatcatgctgggagatgaggccgccctgctggagcagaaggagctgctgagcaactggtaccacttcctggtgacccggctgctgtacagcaaccccaccgtgaagcccatcgacctgcactactatgcccagagcagcctggacctcttcctgggcggggagagcagccctgagcccctggacaacatcctgctggccgcctttgaatttgacatccaccaggtgatcaaggaatgtagagatgtgcacctgaagtag

SEQ ID NO: 162559 - DNA, 780 bp, synthetic construct
  misc_feature 1..780: note = Description of Artificial Sequence: Synthetic coding sequence
  source 1..780: mol_type = other DNA
atgagggagttcctgctgctggagtatgccagcggcctgtttgcccaccccagcctgtggcagctgggcgtggactactttgactactgcccagagctgggccgggtgtccctggagctgcacatcgagcgcatccccctgaacacagagcagaaggccctgaaggtgctgcgcatctgtgagcagaggcagatgacagagcaggtgcgcagcatctgcaagatcctggccatgaaggctgtgaggaacaaccggctgggcagcgccctgtcctggagcatccgggccaaggatgctgcctttgccaccctggtgtctgaccgcttcctgcgggactactgtgagcggggctgcttcagtgacctggacctgattgacaacctgggccctgccatgatgctgagtgaccggctgaccttcctgggcaagtaccgggagttccacaggatgtatggagagaagagatttgctgatgctgccagcctgctgctgagcctgatgaccagcagaattgcccccaggagcttctggatgaccctgctgacagatgccctgcccctgctggagcagaagcaggtgatcttctctgctgagcagacctatgagctgatgcgctgcctggaggacctgaccagcagaagacctgtgcatggagagagtgacacagagcagctgcaggatgatgacatcgagaccaccaaggtggagatgctgcggctgagcctggccaggaacctggcccgggccatcatccgggagggcagcctggagggcagctag

SEQ ID NO: 162560 - DNA, 1833 bp, synthetic construct
  misc_feature 1..1833: note = Description of Artificial Sequence: Synthetic coding sequence
  source 1..1833: mol_type = other DNA
atggtgcccagctgccccttcatctacatcatcaggaaggatgtggatgtgtacagccagatcctgaggaagctgttcaatgaaagccacggcatcttcctgggcctgcagagaattgatgaggagctgaccgggaagagcaggaagagccagctggtgcgggtgtccaagaactacagaagtgtcatccgggcctgcatggaggagatgcaccaggtggccatcgccgccaaggaccctgccaacggccggcagttcagcagccaggtgtccatcctgagcgccatggagctgatctggaacctgtgtgagatcctcttcatcgaggtggccccagctggccccctgctgctgcacctgctggactgggtgcggctgcacgtgtgtgaggtggacagcctgtctgcagatgtgctgggcagcgagaaccccagcaagcatgacagcttctggaacctggtgaccatcctggtgctgcagggccgcctggatgaggcccggcagatgctgagcaaggaggctgatgccagccctgccagcgctggcatctgccgcatcatgggagacctgatgaggaccatgcccatcctgagccctggcaacacccagaccctgacagagctggagctgaagtggcagcactggcatgaggagtgtgagcgctacctgcaggacagcacctttgccaccagcccccacctggagagcctgctgaagatcatgctgggagatgaggccgccctgctggagcagaaggagctgctgagcaactggtaccacttcctggtgacccggctgctgtacagcaaccccaccgtgaagcccatcgacctgcactactatgcccagagcagcctggacctcttcctgggcggggagagcagccctgagcccctggacaacatcctgctggccgcctttgaatttgacatccaccaggtgatcaaggaatgttccatcgccctgagcaactggtggtttgtggcccacctgacagacctgctggaccactgcaagctgctgcagagccacaacctgtacttcggcagcaacatgagggagttcctgctgctggagtatgccagcggcctgtttgcccaccccagcctgtggcagctgggcgtggactactttgactactgcccagagctgggccgggtgtccctggagctgcacatcgagcgcatccccctgaacacagagcagaaggccctgaaggtgctgcgcatctgtgagcagaggcagatgacagagcaggtgcgcagcatctgcaagatcctggccatgaaggctgtgaggaacaaccggctgggcagcgccctgtcctggagcatccgggccaaggatgctgcctttgccaccctggtgtctgaccgcttcctgcgggactactgtgagcggggctgcttcagtgacctggacctgattgacaacctgggccctgccatgatgctgagtgaccggctgaccttcctgggcaagtaccgggagttccacaggatgtacggggagaagagatttgctgatgctgccagcctgctgctgagcctgatgaccagccgcatcgcccccaggagcttctggatgaccctgctgacagatgccctgcccctgctggagcagaagcaggtgatcttctctgctgagcagacctatgagctgatgcgctgcctggaggacctgaccagccggcggcctgtgcacggggagagtgacacagagcagctgcaggatgatgacatcgagaccaccaaggtggagatgctgcggctgagcctggccaggaacctggcccgggccatcatccgggagggcagcctggagggcagctag

SEQ ID NO: 162561 - DNA, 846 bp, synthetic construct
  misc_feature 1..846: note = Description of Artificial Sequence: Synthetic coding sequence
  source 1..846: mol_type = other DNA
atgaagctggccgccatgatcaagaagatgtgccccagcgacagcgagctgagcatcccagccaagaactgctacaggatggtgatcctgggcagcagcaaggtgggcaagacagccatcgtgagccgcttcctgaccggccgctttgaagatgcctacacccccaccatcgaggacttccacaggaagttctacagcatccggggggaggtgtaccagctggacatcctggacaccagcggcaaccaccccttccctgccatgaggcggctgagcatcctgactggagatgtgttcatcctggtgttcagcctggacaacagagacagctttgaggaggtgcagaggctgcggcagcagatcctggacaccaagagctgcctgaagaacaagaccaaggaaaatgtggatgtgcccctggtgatctgtggcaacaagggggaccgggacttctaccgggaggtggaccagcgggagattgagcagctggtgggagatgacccccagagatgtgcctactttgagatcagcgccaagaagaacagcagcctggaccagatgttccgggccctgtttgccatggccaagctgcccagcgagatgagcccagacctgcacaggaaggtgtctgtgcagtactgtgatgtgctgcacaagaaggccctgaggaacaagaagctgctgcgggccggcagcggcggcggcggcggggaccctggagatgcctttggaattgtggccccctttgcccggcggcccagcgtgcacagcgacctgatgtacatccgggagaaggccagcgctggcagccaggccaaggacaaggagcgctgcgtcatctcctag

SEQ ID NO: 162562 - DNA, 1881 bp, synthetic construct
  misc_feature 1..1881: note = Description of Artificial Sequence: Synthetic coding sequence
  source 1..1881: mol_type = other DNA
atggtgctggagctgcccaagcgctggggcaagaacagcgagtttgaaggaggcaagagcacagtgaactgcagcaccacccctgtggccgagcgcttcttcaccagcagcaccagcctgaccctgaagcatgctgcctggtaccccagcgagatcctggacccccacgtggtgctgctgaccagtgacaacgtcatccgcatctacagcctgcgggagccccagacccccaccaacgtcatcatcctgtctgaggccgaggaggagagcctggtgctgaacaagggccgggcctacacagccagcctgggggagacagctgtggcctttgattttggccccctggccgctgtgcccaagaccctgtttggccagaatggcaaggatgaggtggtggcctaccccctgtacatcctgtatgaaaatggagagaccttcctgacctacatcagcctgctgcacagccctggcaacatcggcaagctgctgggccccctgcccatgcaccctgctgctgaggacaactacggctatgatgcctgtgctgtgctgtgcctgccctgtgtgcccaacatcctggtgattgccacagaaagtggcatgctgtaccactgtgtggtgctggagggggaggaggaggatgaccacaccagcgagaagtcctgggacagcagaattgacctgatccccagcctgtatgtgtttgaatgtgtggagctggagctggccctgaagctggccagcggggaggatgacccctttgacagcgacttcagctgccctgtgaagctgcaccgggaccccaagtgccccagccgctaccactgcacccatgaggccggcgtgcacagcgtgggcctgacctggatccacaagctgcacaagttcctgggcagtgatgaggaggacaaggacagcctgcaggagctgagcacagagcagaagtgctttgtggagcacatcctgtgcaccaagcccctgccctgccggcagcctgcccccatccggggcttctggatcgtgcctgacatcctgggccccaccatgatctgcatcaccagcacctatgaatgtctcatctggcccctgctgagcacagtgcacccagccagcccccccctgctgtgcaccagagaagatgtggaggtggccgagagccccctgcgggtgctggccgagaccccagacagctttgagaagcacatccgcagcatcctgcagaggtctgtggccaacccagccttcctgaactgcttcacccagctgaggaagatcaaggtggagaccctcttcctgcgggccagcgagaaggacatcgcccctcctccagaagaatgtctgcagctgctgagccgggccacccaggtgttccgggagcagtacatcctgaagcaggacctggccaaggaggagatccagaggagagtgaagctgctgtgtgaccagaagaagaagcagctggaggacctgagctactgccgggaggagaggaagagcctgcgggagatggccgagcggctggccgacaagtatgaggaggccaaggagaagcaggaggacatcatgaacaggatgaagaagctgctgcacagcttccacagcgagctgcctgtgctgagtgacagcgagcgggacatgaagaaggagctgcagctgatcccagaccagctgcggcacctgggcaatgccatcaagcaggtgaccatgaagaaggactaccagcagcagaagatggagaaggtgctgagcctgcccaagcccaccatcatcctgagcgcctaccagaggaagtgcatccagagcatcctgaaggaggagggggagcacatccgggagatggtgaagcagatcaatgacatcagaaatcatgtgaacttctag

SEQ ID NO: 162563 - DNA, 2226 bp, synthetic construct; identical to SEQ ID NO: 148155
  misc_feature 1..2226: note = Description of Artificial Sequence: Synthetic coding sequence
  source 1..2226: mol_type = other DNA

SEQ ID NO: 162564 - DNA, 2460 bp, synthetic construct
  misc_feature 1..2460: note = Description of Artificial Sequence: Synthetic coding sequence
  source 1..2460: mol_type = other DNA
atggacacagagggctttggagagctgctgcagcaggccgagcagctggccgctgagacagagggcatcagcgagctgccccacgtggagaggaacctgcaggagatccagcaggccggggagcggctgcggagcaggaccctgaccaggaccagccaggagacagcagatgtgaaggcctctgtgctgctgggcagccggggcctggacatcagccacatcagccagaggctggagagcctgtctgctgccaccacctttgagcccctggagcctgtgaaggacacagacatccagggcttcctgaagaatgagaaggacaatgccctgctgagcgccatcgaggagagcaggaagaggaccttcggcatggccgaggagtaccaccgggagagcatgctggtggagtgggagcaggtgaagcagaggatcctgcacaccctgctggccagcggagaagatgccctggacttcacccaggagagcgagcccagctacatcagtgatgtgggccccccaggccgcagcagcctggacaacatcgagatggcctatgcccggcagatctacatctacaatgagaagatcgtgaatggccacctgcagcccaacctggtggacctgtgtgcctctgtggccgagctggatgacaagagcatcagtgacatgtggaccatggtgaagcagatgacagatgtgctgctgaccccagccacagatgccctgaagaacagaagctctgtggaggtgaggatggagtttgtgcggcaggccctggcctacctggagcagagctacaagaactacaccctggtgacagtgtttggaaacctgcaccaggcccagctgggcggcgtgcccggcacctaccagctggtgcgctccttcctgaacatcaagctgcctgcccccctgcccggcctgcaggatggagaggtggagggccaccctgtgtgggccctgatctactactgcatgagatgtggggacctgctggccgccagccaggtggtgaacagagcccagcaccagctgggggagttcaagacctggttccaggagtacatgaacagcaaggaccggcggctgagccctgccacagagaacaagctgcggctgcactaccgccgggccctgaggaacaacacagacccctacaagagagctgtgtactgcatcatcggccgctgtgatgtgacagacaaccagagcgaggtggccgacaagacagaggactacctgtggctgaagctgaaccaggtgtgctttgatgatgatggcaccagcagcccccaggaccggctgaccctgagccagttccagaagcagctgctggaggactatggagagagccacttcaccgtgaaccagcagcccttcctgtacttccaggtgctcttcctgacagcccagtttgaggccgctgtggccttcctgttcaggatggagcggctgcgctgccacgctgtgcacgtggccctggtgctgtttgagctgaagctgctgctgaagagcagcggccagagcgcccagctgctgagccatgagcccggggaccccccctgcctgcggcggctgaactttgtgcggctgctgatgctgtacaccaggaagtttgagagcacagacccccgggaggccctgcagtacttctacttcctgagagatgagaaggacagccagggcgagaacatgttcctgcgctgtgtgtctgagctggtgattgagagccgggagtttgacatgatcctgggcaagctggagaatgatggcagcaggaagccaggagtcatcgacaagttcaccagtgacaccaagcccatcatcaacaaggtggcctctgtggctgaaaataaaggcctgtttgaggaggccgccaagctgtatgacctggccaagaatgctgacaaggtgctggagctgatgaacaagctgctgagccctgtggtgccccagatcagcgccccccagagcaacaaggagcggctgaagaacatggccctgagcattgctgagcgctaccgggcccagggcatcagcgccaacaagtttgtggacagcaccttctacctgctgctggacctgatcaccttctttgatgagtaccacagcggccacatcgaccgggcctttgacatcatcgagcggctgaagctggtgcccctgaaccaggagagcgtggaggagcgggtggccgccttcaggaacttcagtgatgagatccgccacaacctgtctgaggtgctgctggccaccatgaacatcctcttcacccagttcaagaggctgaagggcaccagccccagcagcagcagccggccccagagggtgattgaagatcgggacagccagctgcggagccaggcccggaccctcatcacctttgctggcatgatcccctaccgcaccagcggggacaccaatgcccggctggtgcagatggaggtgctgatgaactag

SEQ ID NO: 162565 - DNA, 2091 bp, synthetic construct
  misc_feature 1..2091: note = Description of Artificial Sequence: Synthetic coding sequence
  source 1..2091: mol_type = other DNA
atggccgaggagtaccaccgggagagcatgctggtggagtgggagcaggtgaagcagaggatcctgcacaccctgctggccagcggggaggatgccctggacttcacccaggagagcgagcccagctacatcagtgatgtgggccccccaggccgcagcagcctggacaacatcgagatggcctatgcccggcagatctacatctacaatgagaagatcgtgaatggccacctgcagcccaacctggtggacctgtgtgcctctgtggccgagctggatgacaagagcatcagtgacatgtggaccatggtgaagcagatgacagatgtgctgctgaccccagccacagatgccctgaagaacagaagctctgtggaggtgaggatggagtttgtgcggcaggccctggcctacctggagcagagctacaagaactacaccctggtgacagtgtttggaaacctgcaccaggcccagctgggcggcgtgcccggcacctaccagctggtgcgctccttcctgaacatcaagctgcctgcccccctgcccggcctgcaggatggagaggtggagggccaccctgtgtgggccctgatctactactgcatgagatgtggggacctgctggccgccagccaggtggtgaacagagcccagcaccagctgggggagttcaagacctggttccaggagtacatgaacagcaaggaccggcggctgagccctgccacagagaacaagctgcggctgcactacagaagagccctgaggaacaacacagacccctacaagagagctgtgtactgcatcatcggccgctgtgatgtgacagacaaccagagcgaggtggccgacaagacagaggactacctgtggctgaagctgaaccaggtgtgctttgatgatgatggcaccagcagcccccaggaccggctgaccctgagccagttccagaagcagctgctggaggactatggagagagccacttcaccgtgaaccagcagcccttcctgtacttccaggtgctcttcctgacagcccagtttgaagctgctgtggccttcctgttcaggatggagcggctgcgctgccacgctgtgcacgtggccctggtgctgtttgagctgaagctgctgctgaagagcagcggccagagcgcccagctgctgagccatgagcccggggaccccccctgcctgcggcggctgaactttgtgcggctgctgatgctgtacaccaggaagtttgagagcacagacccccgggaggccctgcagtacttctacttcctgagagatgagaaggacagccagggcgagaacatgttcctgcgctgtgtgtctgagctggtgattgagagccgggagtttgacatgatcctgggcaagctggagaatgatggcagcaggaagccaggagtgattgacaagttcaccagtgacaccaagcccatcatcaacaaggtggcctctgtggccgagaacaagggcctgtttgaggaggccgccaagctgtatgacctggccaagaatgctgacaaggtgctggagctgatgaacaagctgctgagccctgtggtgccccagatcagcgccccccagagcaacaaggagcggctgaagaacatggccctgagcattgctgagcgctaccgggcccagggcatcagcgccaacaagtttgtggacagcaccttctacctgctgctggacctgatcaccttctttgatgagtaccacagcggccacatcgaccgggcctttgacatcatcgagcggctgaagctggtgcccctgaaccaggagagcgtggaggagcgggtggccgccttcaggaacttcagtgatgagatccgccacaacctgtctgaggtgctgctggccaccatgaacatcctcttcacccagttcaagaggctgaagggcaccagccccagcagcagcagccggccccagagggtgattgaggaccgggacagccagctgcggagccaggcccggaccctcatcacctttgctggcatgatcccctaccgcaccagcggggacaccaatgcccggctggtgcagatggaggtgctgatgaactag

SEQ ID NO: 162566 - DNA, 2091 bp, synthetic construct; identical to SEQ ID NO: 162565
  misc_feature 1..2091: note = Description of Artificial Sequence: Synthetic coding sequence
  source 1..2091: mol_type = other DNA

SEQ ID NO: 162567 - DNA, 5403 bp, synthetic construct
  misc_feature 1..5403: note = Description of Artificial Sequence: Synthetic coding sequence
  source 1..5403: mol_type = other DNA
atgttcaacaagagctttggcaccccatttggaggcggcaccggcggcttcggcaccaccagcaccttcggccagaacacaggcttcggcaccaccagcggcggggccttcggcaccagcgccttcggcagcagcaacaacacaggaggcctgtttggaaacagccagaccaagccaggcggcctgtttggcaccagcagcttcagccagcctgccaccagcaccagcactggatttggatttggcaccagcactggaacagccaacaccctgtttggaacagccagcacaggcaccagcctcttcagcagccagaacaatgcctttgcccagaacaagcccactggatttggaaactttggcaccagcaccagcagcggcggcctgtttggcaccaccaacaccaccagcaaccccttcggcagcaccagcggcagcctgtttggccccagcagcttcaccgctgcccccaccggcaccaccatcaagttcaacccccccaccggcacagacaccatggtgaaggccggcgtgtccaccaacatcagcaccaagcaccagtgcatcacagccatgaaggagtatgagagcaagagcctggaggagctgcggctggaggactaccaggccaacaggaagggcccccagaaccaggtgggcgccggcaccaccaccggcctgtttggcagcagccctgccaccagcagcgccaccggcctcttcagcagcagcaccaccaacagcggctttgcctacggccagaacaagacagccttcggcaccagcaccaccggcttcggcaccaaccctgggggcctgtttggccagcagaaccagcagaccaccagcctcttcagcaagcccttcggccaggccaccaccacccagaacacaggcttctcctttggaaacaccagcaccatcggccagcccagcaccaacaccatgggcctgtttggagtgacccaggccagccagcccggcggcctgtttggaacagccaccaacaccagcactggaacagcctttggaactggaacaggcctgtttggccagaccaacacaggctttggagctgtgggcagcaccctgtttggaaacaacaagctgaccaccttcggcagcagcaccaccagcgcccccagctttggcaccaccagcggcggcctgtttggatttggcaccaacaccagcggcaacagcatcttcggcagcaagccagcccctggcaccctgggcaccggcctgggcgccggcttcggcacagccctgggcgccggccaggccagcctgtttggaaacaaccagcccaagattggaggccccctgggcactggagccttcggggcccctggcttcaacaccaccacagccaccctgggctttggagccccccaggcccctgtggccctgacagaccccaatgccagcgctgcccagcaggccgtgctgcagcagcacatcaacagcctgacctacagcccctttggagacagccccctcttcaggaaccccatgtctgaccccaagaagaaggaggagcggctgaagcccaccaacccagctgcccagaaggccctgaccacccccacccactacaagctgacccccaggcctgccaccagggtgcggcccaaggccctgcagaccactggaacagccaagagccacctgtttgatggcctggatgatgatgagcccagcctggccaatggagccttcatgcccaagaagagcatcaagaagctggtgctgaagaacctgaacaacagcaacctcttcagccctgtgaacagagattctgagaacctggccagccccagcgagtacccagaaaatggagagcgcttctccttcctgagcaagcctgtggatgagaaccaccagcaggatggagatgaggacagcctggtgagccacttctacaccaaccccatcgccaagcccatcccccagaccccagagagcgctggcaacaagcacagcaacagcaacagcgtggatgacaccatcgtggccctgaacatgagagctgccctgagaaatggcctggagggcagcagcgaggagaccagcttccatgatgagagcctgcaggatgaccgggaggagattgagaacaacagctaccacatgcaccctgctggcatcatcctgaccaaggtgggctactacaccatccccagcatggatgacctggccaagatcaccaatgagaagggggagtgcatcgtgtctgacttcaccatcggcaggaagggctacggcagcatctactttgaaggagatgtgaacctgaccaacctgaacctggatgacatcgtgcacatccggaggaaggaggtggtggtgtacctggatgacaaccagaagccccctgtgggggagggcctgaacaggaaggccgaggtgaccctggatggagtgtggcccacagacaagaccagccgctgcctgatcaagagcccagaccggctggccgacatcaactatgagggccgcctggaggccgtgtccaggaagcagggcgcccagttcaaggagtacagacctgagaccggctcctgggtgttcaaggtgagccacttcagcaaatatggcctgcaggacagtgatgaggaggaggaggagcaccccagcaagaccagcaccaagaagctgaagacagcccccctgcccccagccagccagaccacccccctgcagatggccctgaatggcaagccagcccccccaccccagagccagagccctgaggtggagcagctgggccgggtggtggagctggacagcgacatggtggacatcacccaggagcctgtgctggacaccatgctggaggagagcatgcctgaggaccaggagcctgtgtctgccagcacccacatcgccagcagcctgggcatcaacccccacgtgctgcagatcatgaaggccagcctgctgacagatgaggaggatgtggacatggccctggaccagcgcttcagccggctgcccagcaaggctgacaccagccaggagatctgcagcccccggctgcccatcagcgccagccacagcagcaagaccaggagcctggtgggcggcctgctgcagagcaagttcaccagcggggccttcctgagccccagcgtgtctgtgcaggagtgcaggaccccccgggccgccagcctgatgaacatccccagcaccagctcctggagcgtgcccccacccctgaccagcgtcttcaccatgcccagccctgcccctgaggtgcccctgaagacagtgggcacccggcggcagctgggcctggtgccccgggagaagtctgtgacctacggcaagggcaagctgctgatggacatggccctcttcatgggccgctccttccgggtgggctggggccccaactggaccctggccaacagcggggagcagctgaatggcagccatgagctggagaaccaccagattgctgacagcatggagtttggcttcctgcccaaccctgtggccgtgaagcccctgacagagagccccttcaaggtgcacctggagaagctgagcctgcggcagaggaagccagatgaggacatgaagctgtaccagacccccctggagctgaagctgaagcacagcacagtgcacgtggatgagctgtgccccctcatcgtgcccaacctgggcgtggccgtcatccatgactatgctgactgggtgaaggaggccagcggggacctgcctgaggcccagatcgtgaagcactggagcctgacctggaccctgtgtgaggccctgtggggccacctgaaggagctggacagccagctgaatgagccccgggagtacatccagatcctggagcggcggcgggccttcagccgctggctgagctgcacagccaccccccagatcgaggaggaggtgtccctgacccagaagaacagccctgtggaggccgtgttctcctacctgaccgggaagaggatcagcgaggcctgcagcctggcccagcagagcggggaccaccggctggccctgctgctgagccagtttgtgggcagccagagcgtgcgggagctgctgaccatgcagctggtggactggcaccagctgcaggccgacagcttcatccaggatgagcggctgcgcatctttgccctgctggccggcaagcctgtgtggcagctgtctgagaagaagcagatcaacgtgtgcagccagctggactggaagaggagcctggccatccacctgtggtacctgctgcccccaacagccagcatcagccgggccctgtccatgtatgaggaggccttccagaacaccagtgacagcgacagatatgcctgcagccccctgcccagctacctggagggcagcggctgtgtgattgctgaggagcagaacagccagacccccctgagagatgtgtgcttccacctgctgaagctgtacagcgacagacactatgacctgaaccagctgctggagcccaggagcatcacagctgaccccctggactaccgcctgtcctggcacctgtgggaggtgctgcgggccctgaactacacccacctgagcgcccagtgtgaaggagtgctgcaggccagctatgccggccagctggagagcgagggcctgtgggagtgggccatctttgtgctgctgcacatcgacaacagcggcatccgggagaaggctgtgcgggagctgctgaccaggcactgccagctgctggagaccccagagagctgggccaaggagaccttcctgacccagaagctgcgggtgcctgccaagtggatccacgaggccaaggctgtgcgggcccacatggagagtgacaagcacctggaggccctgtgcctcttcaaggccgagcactggaaccgctgccacaagctgatcatccgccacctggccagtgatgccatcatcaatgaaaattatgactacctgaagggcttcctggaggacctggcccctcctgagaggagcagcctcatccaggactgggagaccagcggcctggtgtacctggactacatccgggtgattgagatgctgcggcacatccagcaggtggactgcagcggaaatgacctggagcagctgcacatcaaggtgaccagcctgtgcagcagaattgagcagatccagtgctacagcgccaaggaccggctggcccagagcgacatggccaagagggtggccaacctgctgcgggtggtgctgagcctgcaccaccccccagacaggaccagtgacagcaccccagacccccagagggtgcccctgcggctgctggccccccacatcggccgcctgcccatgccagaagattatgccatggatgagctgcggagcctgacccagagctacctgcgggagctggccgtgggcagcctgtag

SEQ ID NO: 162568 - DNA, 5181 bp, synthetic construct
  misc_feature 1..5181: note = Description of Artificial Sequence: Synthetic coding sequence
  source 1..5181: mol_type = other DNA
atgttcaacaagagctttggcaccccatttggaggcggcaccggcggcttcggcaccaccagcaccttcggccagaacacaggcttcggcaccaccagcggcggggccttcggcaccagcgccttcggcagcagcaacaacacaggaggcctgtttggaaacagccagaccaagccaggcggcctgtttggcaccagcagcttcagccagcctgccaccagcaccagcactggatttggatttggcaccagcactggaacagccaacaccctgtttggaacagccagcacaggcaccagcctcttcagcagccagaacaatgcctttgcccagaacaagcccactggatttggaaactttggcaccagcaccagcagcggcggcctgtttggcaccaccaacaccaccagcaaccccttcggcagcaccagcggcagcctgtttggccccagcagcttcaccgctgcccccaccggcaccaccatcaagttcaacccccccaccggcacagacaccatggtgaaggccggcgtgtccaccaacatcagcaccaagcaccagtgcatcacagccatgaaggagtatgagagcaagagcctggaggagctgcggctggaggactaccaggccaacaggaagggcccccagaaccaggtgggcgccggcaccaccaccggcctgtttggcagcagccctgccaccagcagcgccaccggcctcttcagcagcagcaccaccaacagcggctttgcctacggccagaacaagacagccttcggcaccagcaccaccggcttcggcaccaaccctgggggcctgtttggccagcagaaccagcagaccaccagcctcttcagcaagcccttcggccaggccaccaccacccagaacacaggcttctcctttggaaacaccagcaccatcggccagcccagcaccaacaccatgggcctgtttggagtgacccaggccagccagcccggcggcctgtttggaacagccaccaacaccagcactggaacagcctttggaactggaacaggcctgtttggccagaccaacacaggctttggagctgtgggcagcaccctgtttggaaacaacaagctgaccaccttcggcagcagcaccaccagcgcccccagctttggcaccaccagcggcggcctgtttggatttggcaccaacaccagcggcaacagcatcttcggcagcaagccagcccctggcaccctgggcaccggcctgggcgccggcttcggcacagccctgggcgccggccaggccagcctgtttggaaacaaccagcccaagattggaggccccctgggcactggagccttcggggcccctggcttcaacaccaccacagccaccctgggctttggagccccccaggcccctgtggccctgacagaccccaatgccagcgctgcccagcaggccgtgctgcagcagcacatcaacagcctgacctacagcccctttggagacagccccctcttcaggaaccccatgtctgaccccaagaagaaggaggagcggctgaagcccaccaacccagctgcccagaaggccctgaccacccccacccactacaagctgacccccaggcctgccaccagggtgcggcccaaggccctgcagaccactggaacagccaagagccacctgtttgatggcctggatgatgatgagcccagcctggccaatggagccttcatgcccaagaagagcatcaagaagctggtgctgaagaacctgaacaacagcaacctcttcagccctgtgaacagagattctgagaacctggccagccccagcgagtacccagaaaatggagagcgcttctccttcctgagcaagcctgtggatgagaaccaccagcaggatggagatgaggacagcctggtgagccacttctacaccaaccccatcgccaagcccatcccccagaccccagagagcgctggcaacaagcacagcaacagcaacagcgtggatgacaccatcgtggccctgaacatgagagctgccctgagaaatggcctggagggcagcagcgaggagaccagcttccatgatgagagcctgcaggatgaccgggaggagattgagaacaacagctaccacatgcaccctgctggcatcatcctgaccaaggtgggctactacaccatccccagcatggatgacctggccaagatcaccaatgagaagggggagtgcatcgtgtctgacttcaccatcggcaggaagggctacggcagcatctactttgaaggagatgtgaacctgaccaacctgaacctggatgacatcgtgcacatccggaggaaggaggtggtggtgtacctggatgacaaccagaagccccctgtgggggagggcctgaacaggaaggccgaggtgaccctggatggagtgtggcccacagacaagaccagccgctgcctgatcaagagcccagaccggctggccgacatcaactatgagggccgcctggaggccgtgtccaggaagcagggcgcccagttcaaggagtacagacctgagaccggctcctgggtgttcaaggtgagccacttcagcaaatatggcctgcaggacagtgatgaggaggaggaggagcaccccagcaagaccagcaccaagaagctgaagacagcccccctgcccccagccagccagaccacccccctgcagatggccctgaatggcaagccagcccccccaccccagagccagagccctgaggtggagcagctgggccgggtggtggagctggacagcgacatggtggacatcacccaggagcctgtgctggacaccatgctggaggagagcatgcctgaggaccaggagcctgtgtctgccagcacccacatcgccagcagcctgggcatcaacccccacgtgctgcagatcatgaaggccagcctgctgacagatgaggaggatgtggacatggccctggaccagcgcttcagccggctgcccagcaaggctgacaccagccaggagatctgcagcccccggctgcccatcagcgccagccacagcagcaagaccaggagcctggtgggcggcctgctgcagagcaagttcaccagcggggccttcctgagccccagcgtgtctgtgcaggagtgcaggaccccccgggccgccagcctgatgaacatccccagcaccagctcctggagcgtgcccccacccctgaccagcgtcttcaccatgcccagccctgcccctgaggtgcccctgaagacagtgggcacccggcggcagctgggcctggtgccccgggagaagtctgtgacctacggcaagggcaagctgctgatggacatggccctcttcatgggccgctccttccgggtgggctggggccccaactggaccctggccaacagcggggagcagctgaatggcagccatgagctggagaaccaccagattgctgacagcatggagtttggcttcctgcccaaccctgtggccgtgaagcccctgacagagagccccttcaaggtgcacctggagaagctgagcctgcggcagaggaagccagatgaggacatgaagctgtaccagacccccctggagctgaagctgaagcacagcacagtgcacgtggatgagctgtgccccctcatcgtgcccaacctgggcgtggccgtcatccatgactatgctgactgggtgaaggaggccagcggggacctgcctgaggcccagatcgtgaagcactggagcctgacctggaccctgtgtgaggccctgtggggccacctgaaggagctggacagccagctgaatgagccccgggagtacatccagatcctggagcggcggcgggccttcagccgctggctgagctgcacagccaccccccagatcgaggaggaggtgtccctgacccagaagaacagccctgtggaggccgtgttctcctacctgaccgggaagaggatcagcgaggcctgcagcctggcccagcagagcggggaccaccggctggccctgctgctgagccagtttgtgggcagccagagcgtgcgggagctgctgaccatgcagctggtggactggcaccagctgcaggccgacagcttcatccaggatgagcggctgcgcatctttgccctgctggccggcaagcctgtgtggcagctgtctgagaagaagcagatcaacgtgtgcagccagctggactggaagaggagcctggccatccacctgtggtacctgctgcccccaacagccagcatcagccgggccctgtccatgtatgaggaggccttccagaacaccagtgacagcgacagatatgcctgcagccccctgcccagctacctggagggcagcggctgtgtgattgctgaggagcagaacagccagacccccctgagagatgtgtgcttccacctgctgaagctgtacagcgacagcatccgggagaaggctgtgcgggagctgctgaccaggcactgccagctgctggagaccccagagagctgggccaaggagaccttcctgacccagaagctgcgggtgcctgccaagtggatccacgaggccaaggctgtgcgggcccacatggagagtgacaagcacctggaggccctgtgcctcttcaaggccgagcactggaaccgctgccacaagctgatcatccgccacctggccagtgatgccatcatcaatgaaaattatgactacctgaagggcttcctggaggacctggcccctcctgagaggagcagcctcatccaggactgggagaccagcggcctggtgtacctggactacatccgggtgattgagatgctgcggcacatccagcaggtggactgcagcggaaatgacctggagcagctgcacatcaaggtgaccagcctgtgcagcagaattgagcagatccagtgctacagcgccaaggaccggctggcccagagcgacatggccaagagggtggccaacctgctgcgggtggtgctgagcctgcaccaccccccagacaggaccagtgacagcaccccagacccccagagggtgcccctgcggctgctggccccccacatcggccgcctgcccatgccagaagattatgccatggatgagctgcggagcctgacccagagctacctgcgggagctggccgtgggcagcctgtag

SEQ ID NO: 162569 - DNA, 4917 bp, synthetic construct
  misc_feature 1..4917: note = Description of Artificial Sequence: Synthetic coding sequence
  source 1..4917: mol_type = other DNA
atgttcaacaagagctttggcaccccatttggaggcggcaccggcggcttcggcaccaccagcaccttcggccagaacacaggcttcggcaccaccagcggcggggccttcggcaccagcgccttcggcagcagcaacaacacaggaggcctgtttggaaacagccagaccaagccaggcggcctgtttggcaccagcagcttcagccagcctgccaccagcaccagcactggatttggatttggcaccagcactggaacagccaacaccctgtttggaacagccagcacaggcaccagcctcttcagcagccagaacaatgcctttgcccagaacaagcccactggatttggaaactttggcaccagcaccagcagcggcggcctgtttggcaccaccaacaccaccagcaaccccttcggcagcaccagcggcagcctgtttggccccagcagcttcaccgctgcccccaccggcaccaccatcaagttcaacccccccaccggcacagacaccatggtgaaggccggcgtgtccaccaacatcagcaccaagcaccagtgcatcacagccatgaaggagtatgagagcaagagcctggaggagctgcggctggaggactaccaggccaacaggaagggcccccagaaccaggtgggcgccggcaccaccaccggcctgtttggcagcagccctgccaccagcagcgccaccggcctcttcagcagcagcaccaccaacagcggctttgcctacggccagaacaagacagccttcggcaccagcaccaccggcttcggcaccaaccctgggggcctgtttggccagcagaaccagcagaccaccagcctcttcagcaagcccttcggccaggccaccaccacccagaacacaggcttctcctttggaaacaccagcaccatcggccagcccagcaccaacaccatgggcctgtttggagtgacccaggccagccagcccggcggcctgtttggaacagccaccaacaccagcactggaacagcctttggaactggaacaggcctgtttggccagaccaacacaggctttggagctgtgggcagcaccctgtttggaaacaacaagctgaccaccttcggcagcagcaccaccagcgcccccagctttggcaccaccagcggcggcctgtttggatttggcaccaacaccagcggcaacagcatcttcggcagcaagccagcccctggcaccctgggcaccggcctgggcgccggcttcggcacagccctgggcgccggccaggccagcctgtttggaaacaaccagcccaagattggaggccccctgggcactggagccttcggggcccctggcttcaacaccaccacagccaccctgggctttggagccccccaggcccctgtggccctgacagaccccaatgccagcgctgcccagcaggccgtgctgcagcagcacatcaacagcctgacctacagcccctttggagacagccccctcttcaggaaccccatgtctgaccccaagaagaaggaggagcggctgaagcccaccaacccagctgcccagaaggccctgaccacccccacccactacaagctgacccccaggcctgccaccagggtgcggcccaaggccctgcagaccactggaacagccaagagccacctgtttgatggcctggatgatgatgagcccagcctggccaatggagccttcatgcccaagaagagcatcaagaagctggtgctgaagaacctgaacaacagcaacctcttcagccctgtgaacagagattctgagaacctggccagccccagcgagtacccagaaaatggagagcgcttctccttcctgagcaagcctgtggatgagaaccaccagcaggatggagatgaggacagcctggtgagccacttctacaccaaccccatcgccaagcccatcccccagaccccagagagcgctggcaacaagcacagcaacagcaacagcgtggatgacaccatcgtggccctgaacatgagagctgccctgagaaatggcctggagggcagcagcgaggagaccagcttccatgatgagagcctgcaggatgaccgggaggagattgagaacaacagctaccacatgcaccctgctggcatcatcctgaccaaggtgggctactacaccatccccagcatggatgacctggccaagatcaccaatgagaagggggagtgcatcgtgtctgacttcaccatcggcaggaagggctacggcagcatctactttgaaggagatgtgaacctgaccaacctgaacctggatgacatcgtgcacatccggaggaaggaggtggtggtgtacctggatgacaaccagaagccccctgtgggggagggcctgaacaggaaggccgaggtgaccctggatggagtgtggcccacagacaagaccagccgctgcctgatcaagagcccagaccggctggccgacatcaactatgagggccgcctggaggccgtgtccaggaagcagggcgcccagttcaaggagtacagacctgagaccggctcctgggtgttcaaggtgagccacttcagcaaatatggcctgcaggacagtgatgaggaggaggaggagcaccccagcaagaccagcaccaagaagctgaagacagcccccctgcccccagccagccagaccacccccctgcagatggccctgaatggcaagccagcccccccaccccagagccagagccctgaggtggagcagctgggccgggtggtggagctggacagcgacatggtggacatcacccaggagcctgtgctggacaccatgctggaggagagcatgcctgaggaccaggagcctgtgtctgccagcacccacatcgccagcagcctgggcatcaacccccacgtgctgcagatcatgaaggccagcctgctgacagatgaggaggatgtggacatggccctggaccagcgcttcagccggctgcccagcaaggctgacaccagccaggagatctgcagcccccggctgcccatcagcgccagccacagcagcaagaccaggagcctggtgggcggcctgctgcagagcaagttcaccagcggggccttcctgagccccagcgtgtctgtgcaggagtgcaggaccccccgggccgccagcctgatgaacatccccagcaccagctcctggagcgtgcccccacccctgaccagcgtcttcaccatgcccagccctgcccctgaggtgcccctgaagacagtgggcacccggcggcagctgggcctggtgccccgggagaagtctgtgacctacggcaagggcaagctgctgatggacatggccctcttcatgggccgctccttccgggtgggctggggccccaactggaccctggccaacagcggggagcagctgaatggcagccatgagctggagaaccaccagattgctgacagcatggagtttggcttcctgcccaaccctgtggccgtgaagcccctgacagagagccccttcaaggtgcacctggagaagctgagcctgcggcagaggaagccagatgaggacatgaagctgtaccagacccccctggagctgaagctgaagcacagcacagtgcacgtggatgagctgtgccccctcatcgtgcccaacctgggcgtggccgtcatccatgactatgctgactgggtgaaggaggccagcggggacctgcctgaggcccagatcgtgaagcactggagcctgacctggaccctgtgtgaggccctgtggggccacctgaaggagctggacagccagctgaatgagccccgggagtacatccagatcctggagcggcggcgggccttcagccgctggctgagctgcacagccaccccccagatcgaggaggaggtgtccctgacccagaagaacagccctgtggaggccgtgttctcctacctgaccgggaagaggatcagcgaggcctgcagcctggcccagcagagcggggaccaccggctggccctgctgctgagccagtttgtgggcagccagagcgtgcgggagctgctgaccatgcagctggtggactggcaccagctgcaggccgacagcttcatccaggatgagcggctgcgcatctttgccctgctggccggcaagcctgtgtggcagctgtctgagaagaagcagatcaacgtgtgcagccagctggactggaagaggagcctggccatccacctgtggtacctgctgcccccaacagccagcatcagccgggccctgtccatgtatgaggaggccttccagaacaccagtgacagcgacagatatgcctgcagccccctgcccagctacctggagggcagcggctgtgtgattgctgaggagcagaacagccagacccccctgagagatgtgtgcttccacctgctgaagctgtacagcgacagcatccgggagaaggctgtgcgggagctgctgaccaggcactgccagctgctggagaccccagagagctgggccaaggagaccttcctgacccagaagctgcgggtgcctgccaagtggatccacgaggccaaggctgtgcgggcccacatggagagtgacaagcacctggaggccctgtgcctcttcaaggccgagcactggaaccgctgccacaagctgatcatccgccacctggccagtgatgccatcatcaatgaaaattatgactacctgaagggcttcctggaggacctggcccctcctgagaggagcagcctcatccaggactgggagaccagcggcctggtgtacctggactacatccgggtgattgagatgctgcggcacatccagcagatcgccctcttctgtgtggagtggatcgcccaggtgatgacctggagcagctacaccagcaagtag

SEQ ID NO: 162570 - DNA, 2763 bp, synthetic construct
  misc_feature 1..2763: note = Description of Artificial Sequence: Synthetic coding sequence
  source 1..2763: mol_type = other DNA
atgttcaacaagagctttggcaccccatttggaggcggcaccggcggcttcggcaccaccagcaccttcggccagaacacaggcttcggcaccaccagcggcggggccttcggcaccagcgccttcggcagcagcaacaacacaggaggcctgtttggaaacagccagaccaagccaggcggcctgtttggcaccagcagcttcagccagcctgccaccagcaccagcactggatttggatttggcaccagcactggaacagccaacaccctgtttggaacagccagcacaggcaccagcctcttcagcagccagaacaatgcctttgcccagaacaagcccactggatttggaaactttggcaccagcaccagcagcggcggcctgtttggcaccaccaacaccaccagcaaccccttcggcagcaccagcggcagcctgtttggccccagcagcttcaccgctgcccccaccggcaccaccatcaagttcaacccccccaccggcacagacaccatggtgaaggccggcgtgtccaccaacatcagcaccaagcaccagtgcatcacagccatgaaggagtatgagagcaagagcctggaggagctgcggctggaggactaccaggccaacaggaagggcccccagaaccaggtgggcgccggcaccaccaccggcctgtttggcagcagccctgccaccagcagcgccaccggcctcttcagcagcagcaccaccaacagcggctttgcctacggccagaacaagacagccttcggcaccagcaccaccggcttcggcaccaaccctgggggcctgtttggccagcagaaccagcagaccaccagcctcttcagcaagcccttcggccaggccaccaccacccagaacacaggcttctcctttggaaacaccagcaccatcggccagcccagcaccaacaccatgggcctgtttggagtgacccaggccagccagcccggcggcctgtttggaacagccaccaacaccagcactggaacagcctttggaactggaacaggcctgtttggccagaccaacacaggctttggagctgtgggcagcaccctgtttggaaacaacaagctgaccaccttcggcagcagcaccaccagcgcccccagctttggcaccaccagcggcggcctgtttggatttggcaccaacaccagcggcaacagcatcttcggcagcaagccagcccctggcaccctgggcaccggcctgggcgccggcttcggcacagccctgggcgccggccaggccagcctgtttggaaacaaccagcccaagattggaggccccctgggcactggagccttcggggcccctggcttcaacaccaccacagccaccctgggctttggagccccccaggcccctgtggccctgacagaccccaatgccagcgctgcccagcaggccgtgctgcagcagcacatcaacagcctgacctacagcccctttggagacagccccctcttcaggaaccccatgtctgaccccaagaagaaggaggagcggctgaagcccaccaacccagctgcccagaaggccctgaccacccccacccactacaagctgacccccaggcctgccaccagggtgcggcccaaggccctgcagaccactggaacagccaagagccacctgtttgatggcctggatgatgatgagcccagcctggccaatggagccttcatgcccaagaagagcatcaagaagctggtgctgaagaacctgaacaacagcaacctcttcagccctgtgaacagagattctgagaacctggccagccccagcgagtacccagaaaatggagagcgcttctccttcctgagcaagcctgtggatgagaaccaccagcaggatggagatgaggacagcctggtgagccacttctacaccaaccccatcgccaagcccatcccccagaccccagagagcgctggcaacaagcacagcaacagcaacagcgtggatgacaccatcgtggccctgaacatgagagctgccctgagaaatggcctggagggcagcagcgaggagaccagcttccatgatgagagcctgcaggatgaccgggaggagattgagaacaacagctaccacatgcaccctgctggcatcatcctgaccaaggtgggctactacaccatccccagcatggatgacctggccaagatcaccaatgagaagggggagtgcatcgtgtctgacttcaccatcggcaggaagggctacggcagcatctactttgaaggagatgtgaacctgaccaacctgaacctggatgacatcgtgcacatccggaggaaggaggtggtggtgtacctggatgacaaccagaagccccctgtgggggagggcctgaacaggaaggccgaggtgaccctggatggagtgtggcccacagacaagaccagccgctgcctgatcaagagcccagaccggctggccgacatcaactatgagggccgcctggaggccgtgtccaggaagcagggcgcccagttcaaggagtacagacctgagaccggctcctgggtgttcaaggtgagccacttcagcaaatatggcctgcaggacagtgatgaggaggaggaggagcaccccagcaagaccagcaccaagaagctgaagacagcccccctgcccccagccagccagaccacccccctgcagatggccctgaatggcaagccagcccccccaccccaggtggagaagaagggccagtag

SEQ ID NO: 162571 - DNA, 2814 bp, synthetic construct
  misc_feature 1..2814: note = Description of Artificial Sequence: Synthetic coding sequence
  source 1..2814: mol_type = other DNA
atgttcaacaagagctttggcaccccatttggaggcggcaccggcggcttcggcaccaccagcaccttcggccagaacacaggcttcggcaccaccagcggcggggccttcggcaccagcgccttcggcagcagcaacaacacaggaggcctgtttggaaacagccagaccaagccaggcggcctgtttggcaccagcagcttcagccagcctgccaccagcaccagcactggatttggatttggcaccagcactggaacagccaacaccctgtttggaacagccagcacaggcaccagcctcttcagcagccagaacaatgcctttgcccagaacaagcccactggatttggaaactttggcaccagcaccagcagcggcggcctgtttggcaccaccaacaccaccagcaaccccttcggcagcaccagcggcagcctgtttggccccagcagcttcaccgctgcccccaccggcaccaccatcaagttcaacccccccaccggcacagacaccatggtgaaggccggcgtgtccaccaacatcagcaccaagcaccagtgcatcacagccatgaaggagtatgagagcaagagcctggaggagctgcggctggaggactaccaggccaacaggaagggcccccagaaccaggtgggcgccggcaccaccaccggcctgtttggcagcagccctgccaccagcagcgccaccggcctcttcagcagcagcaccaccaacagcggctttgcctacggccagaacaagacagccttcggcaccagcaccaccggcttcggcaccaaccctgggggcctgtttggccagcagaaccagcagaccaccagcctcttcagcaagcccttcggccaggccaccaccacccagaacacaggcttctcctttggaaacaccagcaccatcggccagcccagcaccaacaccatgggcctgtttggagtgacccaggccagccagcccggcggcctgtttggaacagccaccaacaccagcactggaacagcctttggaactggaacaggcctgtttggccagaccaacacaggctttggagctgtgggcagcaccctgtttggaaacaacaagctgaccaccttcggcagcagcaccaccagcgcccccagctttggcaccaccagcggcggcctgtttggaaacaagcccaccctgaccctgggcaccaacaccaacaccagcaactttggcttcggcaccaacaccagcggcaacagcatcttcggcagcaagccagcccctggcaccctgggcaccggcctgggcgccggctttggaacagccctgggcgccggccaggccagcctgtttggaaacaaccagcccaagattggaggccccctgggcaccggggcctttggagcccctggcttcaacaccaccacagccaccctgggctttggagccccccaggcccctgtggccctgacagaccccaatgccagcgctgcccagcaggccgtgctgcagcagcacatcaacagcctgacctacagcccctttggagacagccccctcttcaggaaccccatgtctgaccccaagaagaaggaggagcggctgaagcccaccaacccagctgcccagaaggccctgaccacccccacccactacaagctgacccccaggcctgccaccagggtgcggcccaaggccctgcagaccaccggcacagccaagagccacctgtttgatggcctggatgatgatgagcccagcctggccaacggggccttcatgcccaagaagagcatcaagaagctggtgctgaagaacctgaacaacagcaacctcttcagccctgtgaacagagacagcgagaacctggccagccccagcgagtacccagaaaatggagagcgcttctccttcctgagcaagcctgtggatgagaaccaccagcaggatggagatgaggacagcctggtgagccacttctacaccaaccccatcgccaagcccatcccccagaccccagagagcgctggcaacaagcacagcaacagcaacagcgtggatgacaccatcgtggccctgaacatgagagctgccctgagaaatggcctggagggcagcagcgaggagaccagcttccatgatgagagcctgcaggatgaccgggaggagattgagaacaacagctaccacatgcaccctgctggcatcatcctgaccaaggtgggctactacaccatccccagcatggatgacctggccaagatcaccaatgaaaaaggagaatgtattgtgtctgacttcaccatcggcaggaagggctacggcagcatctactttgaaggagatgtgaacctgaccaacctgaacctggatgacatcgtgcacatccggaggaaggaggtggtggtgtacctggatgacaaccagaagccccctgtgggggagggcctgaacaggaaggccgaggtgaccctggatggagtgtggcccacagacaagaccagccgctgcctgatcaagagcccagaccggctggccgacatcaactatgagggccgcctggaggccgtgtccaggaagcagggcgcccagttcaaggagtacagacctgagaccggctcctgggtgttcaaggtgagccacttcagcaaatatggcctgcaggacagtgatgaggaggaggaggagcaccccagcaagaccagcaccaagaagctgaagacagcccccctgcccccagccagccagaccacccccctgcagatggccctgaatggcaagccagcccccccaccccaggtggagaagaagggccagtag

SEQ ID NO: 162572 - DNA, 1731 bp, synthetic construct
  misc_feature 1..1731: note = Description of Artificial Sequence: Synthetic coding sequence
  source 1..1731: mol_type = other DNA
atgagcacaggcttctcctttggaactggagccagcagcaaccccagcgtgggcctgaactttggaaacctgggcagcaccagcaccccagccaccaccagcgcccccagcagcggcttcggcaccggcctgtttggcagcaagccagccaccggcttcaccctgggcggcaccaacacaggcatcgccaccaccatcaccaccggcctgaccctgggcaccccagccaccaccagcgctgccaccaccggcttcagcctgggcttcaacaagccagctgccagcgccaccccatttgccctgcccatcaccagcaccagcgccagcggcctgaccctgagcagcgccctgaccagcaccccagctgccagcacaggcttcaccctgaacaacctgggcggcaccacagccaccaccaccacagccagcacaggcctgagcctgggcggggccctggccggcctgggcggcagcctcttccagagcaccaacacaggcaccagcggcctgggccagaatgccctgggcctgaccctgggcaccacagctgccaccagcacagctggaaatgaaggcctgggcggcatcgacttcagcagcagcagtgacaagaagagtgacaagacaggcaccaggcctgaggacagcaaggccctgaaggatgagaacctgccccctgtgatctgccaggatgtggagaacctgcagaagtttgtgaaggagcagaagcaggtgcaggaggagatcagcaggatgagcagcaaggccatgctgaaggtgcaggaggacatcaaggccctgaagcagctgctgagcctggccgccaacggcatccagaggaacaccctgaacatcgacaagctgaagattgaaacagcccaggagctgaagaatgctgagatcgccctgcggacccagaagaccccacctggcctgcagcacgagtatgctgccccagctgactacttccgcatcctggtgcagcagtttgaggtgcagctgcagcagtaccggcagcagatcgaggagctggagaaccacctggccacccaggccaacaacagccacatcaccccccaggacctgtccatggccatgcagaagatctaccagacctttgtggccctggccgcccagctgcagagcatccatgaaaatgtgaaggtgctgaaggagcagtacctgggctacaggaagatgttcctgggagatgctgtggatgtgtttgagacccggcgggcagaggccaagaagtggcagaacaccccccgggtgaccaccggccccacccccttcagcaccatgcccaatgctgctgctgtggccatggccgccaccctgacccagcagcagcagcctgccaccggcccccagcccagcctgggcgtgtcctttggcaccccatttggaagtggcattggaacaggcctgcagagcagcggcctgggcagcagcaacctgggcggcttcggcaccagcagcggcttcggctgcagcaccactggagccagcaccttcggcttcggcaccaccaacaagcccagcggcagcctgtctgctggcttcggcagcagcagcaccagcggcttcaacttcagcaaccctggcatcacagccagcgctggcctgacctttggagtgagcaacccagccagcgctggctttggaactggaggccagctgctgcagctgaagaagcccccagctggcaacaagaggggcaagaggtag

SEQ ID NO: 162573 - DNA, 1764 bp, synthetic construct
  misc_feature 1..1764: note = Description of Artificial Sequence: Synthetic coding sequence
  source 1..1764: mol_type = other DNA
atgagcacaggcttctcctttggaagtggcaccctgggcagcaccaccgtggccgccggcggcaccagcactggaggagtcttctcctttggcaccggggccagcagcaaccccagcgtgggcctgaactttggaaacctgggcagcaccagcaccccagccaccaccagcgcccccagcagcggctttggaacaggcctgtttggcagcaagccagccaccggcttcaccctgggcggcaccaacacaggcaccccagccaccaccagcgctgccaccaccggcttcagcctgggcttcaacaagccagctgccagcgccaccccatttgccctgcccatcaccagcaccagcgccagcggcctgaccctgagcagcgccctgaccagcaccccagctgccagcacaggcttcaccctgaacaacctgggcggcaccacagccaccaccaccacagccagcacaggcctgagcctgggcggggccctggccggcctgggcggcagcctcttccagagcaccaacacaggcaccagcggcctgggccagaatgccctgggcctgaccctgggcaccacagctgccaccagcacagctggaaatgaaggcctgggcggcatcgacttcagcagcagcagtgacaagaagagtgacaagacaggcaccaggcctgaggacagcaaggccctgaaggatgagaacctgccccctgtgatctgccaggatgtggagaacctgcagaagtttgtgaaggagcagaagcaggtgcaggaggagatcagcaggatgagcagcaaggccatgctgaaggtgcaggaggacatcaaggccctgaagcagctgctgagcctggccgccaacggcatccagaggaacaccctgaacatcgacaagctgaagattgaaacagcccaggagctgaagaatgctgagatcgccctgcggacccagaagaccccacctggcctgcagcatgaatatgctgccccagctgactacttccgcatcctggtgcagcagtttgaggtgcagctgcagcagtaccggcagcagatcgaggagctggagaaccacctggccacccaggccaacaacagccacatcaccccccaggacctgtccatggccatgcagaagatctaccagacctttgtggccctggccgcccagctgcagagcatccatgaaaatgtgaaggtgctgaaggagcagtacctgggctacaggaagatgttcctgggagatgctgtggatgtgtttgagaccaggagagctgaggccaagaagtggcagaacaccccccgggtgaccaccggccccacccccttcagcaccatgcccaatgctgctgctgtggccatggccgccaccctgacccagcagcagcagcctgccaccggcccccagcccagcctgggcgtgtcctttggcacccccttcggcagcggcatcggcaccggcctgcagagcagcggcctgggcagcagcaacctgggcggcttcggcaccagcagcggcttcggctgcagcaccaccggggccagcacctttggatttggcaccaccaacaagcccagcggcagcctgtctgctggcttcggcagcagcagcaccagcggcttcaacttcagcaaccctggcatcacagccagcgctggcctgaccttcggcgtgagcaacccagccagcgctggcttcggcaccggcggccagctgctgcagctgaagaagcccccagctggcaacaagaggggcaagaggtag

SEQ ID NO: 162574 - DNA, 1800 bp, synthetic construct
  misc_feature 1..1800: note = Description of Artificial Sequence: Synthetic coding sequence
  source 1..1800: mol_type = other DNA
atgagcacaggcttctcctttggaagtggcaccctgggcagcaccaccgtggccgccggcggcaccagcactggaggagtcttctcctttggcaccggggccagcagcaaccccagcgtgggcctgaactttggaaacctgggcagcaccagcaccccagccaccaccagcgcccccagcagcggctttggaacaggcctgtttggcagcaagccagccaccggcttcaccctgggcggcaccaacacaggaattgccaccaccatcaccaccggcctgaccctgggcaccccagccaccaccagcgctgccaccaccggcttcagcctgggcttcaacaagccagctgccagcgccaccccatttgccctgcccatcaccagcaccagcgccagcggcctgaccctgagcagcgccctgaccagcaccccagctgccagcacaggcttcaccctgaacaacctgggcggcaccacagccaccaccaccacagccagcacaggcctgagcctgggcggggccctggccggcctgggcggcagcctcttccagagcaccaacacaggcaccagcggcctgggccagaatgccctgggcctgaccctgggcaccacagctgccaccagcacagctggaaatgaaggcctgggcggcatcgacttcagcagcagcagtgacaagaagagtgacaagacaggcaccaggcctgaggacagcaaggccctgaaggatgagaacctgccccctgtgatctgccaggatgtggagaacctgcagaagtttgtgaaggagcagaagcaggtgcaggaggagatcagcaggatgagcagcaaggccatgctgaaggtgcaggaggacatcaaggccctgaagcagctgctgagcctggccgccaacggcatccagaggaacaccctgaacatcgacaagctgaagattgaaacagcccaggagctgaagaatgctgagatcgccctgcggacccagaagaccccacctggcctgcagcatgaatatgctgccccagctgactacttccgcatcctggtgcagcagtttgaggtgcagctgcagcagtaccggcagcagatcgaggagctggagaaccacctggccacccaggccaacaacagccacatcaccccccaggacctgtccatggccatgcagaagatctaccagacctttgtggccctggccgcccagctgcagagcatccatgaaaatgtgaaggtgctgaaggagcagtacctgggctacaggaagatgttcctgggagatgctgtggatgtgtttgagaccaggagagctgaggccaagaagtggcagaacaccccccgggtgaccaccggccccacccccttcagcaccatgcccaatgctgctgctgtggccatggccgccaccctgacccagcagcagcagcctgccaccggcccccagcccagcctgggcgtgtcctttggcacccccttcggcagcggcatcggcaccggcctgcagagcagcggcctgggcagcagcaacctgggcggcttcggcaccagcagcggcttcggctgcagcaccaccggggccagcacctttggatttggcaccaccaacaagcccagcggcagcctgtctgctggcttcggcagcagcagcaccagcggcttcaacttcagcaaccctggcatcacagccagcgctggcctgaccttcggcgtgagcaacccagccagcgctggcttcggcaccggcggccagctgctgcagctgaagaagcccccagctggcaacaagaggggcaagaggtag

SEQ ID NO: 162575 - DNA, 1515 bp, synthetic construct
  misc_feature 1..1515: note = Description of Artificial Sequence: Synthetic coding sequence
  source 1..1515: mol_type = other DNA
atgagcacaggcttctcctttggaagtggcaccctgggcagcaccaccgtggccgccggcggcaccagcactggaggagtcttctcctttggcaccggggccagcagcaaccccagcgtgggcctgaactttggaaacctgggcagcaccagcaccccagccaccaccagcgcccccagcagcggctttggaacaggcctgtttggcagcaagccagccaccggcttcaccctgggcggcaccaacacaggcaccccagccaccaccagcgctgccaccaccggcttcagcctgggcttcaacaagccagctgccagcgccaccccatttgccctgcccatcaccagcaccagcgccagcggcctgaccctgagcagcgccctgaccagcaccccagctgccagcacaggcttcaccctgaacaacctgggcggcaccacagccaccaccaccacagccagcacaggcctgagcctgggcggggccctggccggcctgggcggcagcctcttccagagcaccaacacaggcaccagcggcctgggccagaatgccctgggcctgaccctgggcaccacagctgccaccagcacagctggaaatgaaggcctgggcggcatcgacttcagcagcagcagtgacaagaagagtgacaagacaggcaccaggcctgaggacagcaaggccctgaaggatgagaacctgccccctgtgatctgccaggatgtggagaacctgcagaagtttgtgaaggagcagaagcaggtgcaggaggagatcagcaggatgagcagcaaggccatgctgaaggtgcaggaggacatcaaggccctgaagcagctgctgagcctggccgccaacggcatccagaggaacaccctgaacatcgacaagctgaagattgaaacagcccaggagctgaagaatgctgagatcgccctgcggacccagaagaccccacctggcctgcagcatgaatatgctgccccagctgactacttccgcatcctggtgcagcagtttgaggtgcagctgcagcagtaccggcagcagatcgaggagctggagaaccacctggccacccaggccaacaacagccacatcaccccccaggacctgtccatggccatgcagaagatctaccagacctttgtggccctggccgcccagctgcagagcatccatgaaaatgtgaaggtgctgaaggagcagtacctgggctacaggaagatgttcctgggagatgctgtggatgtgtttgagaccaggagagctgaggccaagaagtggcagaacaccccccgggtgaccaccggccccacccccttcagcaccatgcccaatgctgctgctgtggccatggccgccaccctgacccagcagcagcagcctgccaccggggacaagtggtgcaatgtggccgagctgaagaacagaacccagctgagcctgtttgtgaacaagctggagctgagctgctactgtgtgattgacctgctgtacaatgagcagtag

SEQ ID NO: 162576 - DNA, 1458 bp, synthetic construct
  misc_feature 1..1458: note = Description of Artificial Sequence: Synthetic coding sequence
  source 1..1458: mol_type = other DNA
atgagcacaggcttctcctttggaagtggcaccctgggcagcaccaccgtggccgccggcggcaccagcactggaggagtcttctcctttggcaccggggccagcagcaaccccagcgtgggcctgaactttggaaacctgggcagcaccagcaccccagccaccaccagcgcccccagcagcggctttggaacaggcctgtttggcagcaagccagccaccggcttcaccctgggcggcaccaacacaggaattgccaccaccatcaccaccggcctgaccctgggcaccccagccaccaccagcgctgccaccaccggcttcagcctgggcttcaacaagccagctgccagcgccaccccatttgccctgcccatcaccagcaccagcgccagcggcctgaccctgagcagcgccctgaccagcaccccagctgccagcacaggcttcaccctgaacaacctgggcggcaccacagccaccaccaccacagccagcacaggcctgagcctgggcggggccctggccggcctgggcggcagcctcttccagagcaccaacacaggcaccagcggcctgggccagaatgccctgggcctgaccctgggcaccacagctgccaccagcacagctggaaatgaaggcctgggcggcatcgacttcagcagcagcagtgacaagaagagtgacaagacaggcaccaggcctgaggacagcaaggccctgaaggatgagaacctgccccctgtgatctgccaggatgtggagaacctgcagaagtttgtgaaggagcagaagcaggtgcaggaggagatcagcaggatgagcagcaaggccatgctgaaggtgcaggaggacatcaaggccctgaagcagctgctgagcctggccgccaacggcatccagaggaacaccctgaacatcgacaagctgaagattgaaacagcccaggagctgaagaatgctgagatcgccctgcggacccagaagaccccacctggcctgcagcatgaatatgctgccccagctgactacttccgcatcctggtgcagcagtttgaggtgcagctgcagcagtaccggcagcagatcgaggagctggagaaccacctggccacccaggccaacaacagccacatcaccccccaggacctgtccatggccatgcagaagatctaccagacctttgtggccctggccgcccagctgcagagcatccatgaaaatgtgaaggtgctgaaggagcagtacctgggctacaggaagatgttcctgggagatgctgtggatgtgtttgagaccaggagagctgaggccaagaagtggcagaacaccccccgggtgaccaccggccccacccccttcagcaccatgcccaatgctgctgctgtggccatggccgccaccctgacccagcagcagcagcctgccaccggcctgaatgccttcaagctgtag

SEQ ID NO: 162577 - DNA, 1308 bp, synthetic construct
  misc_feature 1..1308: note = Description of Artificial Sequence: Synthetic coding sequence
  source 1..1308: mol_type = other DNA
atgagcggcttcctggaggagctgctgggggagaagctggtgactggaggaggagaggaggtggatgtgcacagcctgggcgcccggggcatcagcctgctgggcctgtacttcggctgcagcctgagcgccccctgtgcccagctgagcgccagcctggccgccttctacggccgcctgcggggagatgctgctgctggccctggccctggggccggggccggggctgctgctgagcctgagccccggcggcggctggagatcgtgtttgtgtccagtgaccaggaccagaggcagtggcaggactttgtgcgggacatgccctggctggccctgccctacaaggagaagcacaggaagctgaagctgtggaacaagtaccgcatcagcaacatccccagcctcatcttcctggatgccaccaccgggaaggtggtgtgcagaaatggcctgctggtgatcagagatgatcctgagggcctggagttcccctggggccccaagcccttccgggaggtgattgctggccccctgctgaggaacaacggccagagcctggagagcagcagcctggagggcagccacgtgggcgtgtacttcagcgcccactggtgccccccctgccgcagcctgaccagggtgctggtggagagctacaggaagatcaaggaggccggccagaactttgagatcatctttgtgtctgctgacagaagtgaggagagcttcaagcagtacttcagcgagatgccctggctggccgtgccctacacagatgaggcccggcgcagccggctgaaccggctgtatggcatccagggcatccccaccctcatcatgctggacccccagggcgaggtgatcacccggcagggccgggtggaggtgctgaatgatgaggactgccgggagttcccctggcaccccaagcctgtgctggagctgagtgacagcaatgctgcccagctgaatgaaggcccctgcctggtgctgtttgtggacagtgaagatgatggagagagcgaggccgccaagcagctgatccagcccatcgccgagaagatcatcgccaagtacaaggccaaggaggaggaggcccccctgctcttctttgtggccggagaagatgacatgacagacagcctgcgggactacaccaacctgcctgaggccgcccccctgctgaccatcctggacatgtctgcccgggccaagtatgtgatggatgtggaggagatcaccccagccatcgtggaggcctttgtgaatgacttcctggccgagaagctgaagccagagcccatctag

SEQ ID NO: 162578 - DNA, 984 bp, synthetic construct
  misc_feature 1..984: note = Description of Artificial Sequence: Synthetic coding sequence
  source 1..984: mol_type = other DNA
atggctgatgtgtccctgcacaggaacccagccaccctgaagctgtggaacaagtaccgcatcagcaacatccccagcctcatcttcctggatgccaccaccgggaaggtggtgtgcagaaatggcctgctggtgatcagagatgatcctgagggcctggagttcccctggggccccaagcccttccgggaggtgattgctggccccctgctgaggaacaacggccagagcctggagagcagcagcctggagggcagccacgtgggcgtgtacttcagcgcccactggtgccccccctgccgcagcctgaccagggtgctggtggagagctacaggaagatcaaggaggccggccagaactttgagatcatctttgtgtctgctgacagaagtgaggagagcttcaagcagtacttcagcgagatgccctggctggccgtgccctacacagatgaggcccggcgcagccggctgaaccggctgtatggcatccagggcatccccaccctcatcatgctggacccccagggcgaggtgatcacccggcagggccgggtggaggtgctgaatgatgaggactgccgggagttcccctggcaccccaagcctgtgctggagctgagtgacagcaatgctgcccagctgaatgaaggcccctgcctggtgctgtttgtggacagtgaagatgatggagagagcgaggccgccaagcagctgatccagcccatcgccgagaagatcatcgccaagtacaaggccaaggaggaggaggcccccctgctcttctttgtggccggagaagatgacatgacagacagcctgcgggactacaccaacctgcctgaggccgcccccctgctgaccatcctggacatgtctgcccgggccaagtatgtgatggatgtggaggagatcaccccagccatcgtggaggcctttgtgaatgacttcctggccgagaagctgaagccagagcccatctag

SEQ ID NO: 162579 - DNA, 381 bp, synthetic construct
  misc_feature 1..381: note = Description of Artificial Sequence: Synthetic coding sequence
  source 1..381: mol_type = other DNA
atgccctggctggccgtgccctacacagatgaggcccggcgcagccggctgaaccggctgtatggcatccaggacagtgaagatgatggagagagcgaggccgccaagcagctgatccagcccatcgccgagaagatcatcgccaagtacaaggccaaggaggaggaggcccccctgctcttctttgtggccggggaggatgacatgacagacagcctgcgggactacaccaacctgcctgaggccgcccccctgctgaccatcctggacatgtctgcccgggccaagtatgtgatggatgtggaggagatcaccccagccatcgtggaggcctttgtgaatgacttcctggccgagaagctgaagccagagcccatctag

SEQ ID NO: 162580 - DNA, 984 bp, synthetic construct; identical to SEQ ID NO: 162578
  misc_feature 1..984: note = Description of Artificial Sequence: Synthetic coding sequence
  source 1..984: mol_type = other DNA

SEQ ID NO: 162581 - DNA, 1176 bp, synthetic construct
  misc_feature 1..1176: note = Description of Artificial Sequence: Synthetic coding sequence
  source 1..1176: mol_type = other DNA
atggctgacatcgacaacaaggagcagagcgagctggaccaggacctggatgatgtggaggaggtggaggaggaggagactggagaggagaccaagctgaaggcccggcagctgactgtgcagatgatgcagaacccccagatcctggccgccctgcaggagcggctggatggcctggtggagacccccaccggctacatcgagagcctgccccgggtggtgaagagaagagtgaatgccctgaagaacctgcaggtgaagtgtgcccagatcgaggccaagttctatgaggaggtgcatgacctggagaggaaatatgctgtgctgtaccagcccctgtttgacaagagatttgagatcatcaatgccatctatgagcccacagaggaggagtgtgagtggaagccagatgaagaagatgagatcagcgaggagctgaaggagaaggccaagattgaagatgagaagaaggatgaggagaaggaggaccccaagggcatccctgagttctggctgactgtgttcaagaatgtggacctgctgagtgacatggtgcaggagcatgatgagcccatcctgaagcacctgaaggacatcaaggtgaagttcagtgatgctggccagcccatgagctttgtgctggagttccactttgagcccaatgagtacttcaccaatgaggtgctgaccaagacctacaggatgaggtctgagccagatgacagcgaccccttctcctttgatggccctgagatcatgggctgcaccggctgccagattgactggaagaagggcaagaatgtgaccctgaagaccatcaagaagaagcagaagcacaagggccggggcaccgtgaggacagtgaccaagacagtgtccaatgacagcttcttcaacttctttgcccctcctgaggtgcctgagagcggggacctggatgatgatgctgaggccatcctggccgctgactttgagatcggccacttcctgcgggagcgcatcatccccaggtctgtgctgtacttcaccggggaggccattgaagatgatgatgatgattatgatgaggagggggaggaggctgatgaggagggggaggaggagggagatgaggagaatgaccctgactatgaccccaagaaggaccagaacccagctgagtgcaagcagcagtag

SEQ ID NO: 162582 - DNA, 1176 bp, synthetic construct; identical to SEQ ID NO: 162581
  misc_feature 1..1176: note = Description of Artificial Sequence: Synthetic coding sequence
  source 1..1176: mol_type = other DNA

SEQ ID NO: 162583 - DNA, 972 bp, synthetic construct
  misc_feature 1..972: note = Description of Artificial Sequence: Synthetic coding sequence
  source 1..972: mol_type = other DNA
atgatgcagaacccccagatcctggccgccctgcaggagcggctggatggcctggtggagacccccaccggctacatcgagagcctgccccgggtggtgaagagaagagtgaatgccctgaagaacctgcaggtgaagtgtgcccagatcgaggccaagttctatgaggaggtgcatgacctggagaggaaatatgctgtgctgtaccagcccctgtttgacaaggaggagctgaaggagaaggccaagattgaagatgagaagaaggatgaggagaaggaggaccccaagggcatccctgagttctggctgactgtgttcaagaatgtggacctgctgagtgacatggtgcaggagcatgatgagcccatcctgaagcacctgaaggacatcaaggtgaagttcagtgatgctggccagcccatgagctttgtgctggagttccactttgagcccaatgagtacttcaccaatgaggtgctgaccaagacctacaggatgaggtctgagccagatgacagcgaccccttctcctttgatggccctgagatcatgggctgcaccggctgccagattgactggaagaagggcaagaatgtgaccctgaagaccatcaagaagaagcagaagcacaagggccggggcaccgtgaggacagtgaccaagacagtgtccaatgacagcttcttcaacttctttgcccctcctgaggtgcctgagagcggggacctggatgatgatgctgaggccatcctggccgctgactttgagatcggccacttcctgcgggagcgcatcatccccaggtctgtgctgtacttcaccggggaggccattgaagatgatgatgatgattatgatgaggagggggaggaggctgatgaggagggggaggaggagggagatgaggagaatgaccctgactatgaccccaagaaggaccagaacccagctgagtgcaagcagcagtag

SEQ ID NO: 162584 - DNA, 1050 bp, synthetic construct
  misc_feature 1..1050: note = Description of Artificial Sequence: Synthetic coding sequence
  source 1..1050: mol_type = other DNA
atgatgcagaacccccagatcctggccgccctgcaggagcggctggatggcctggtggagacccccaccggctacatcgagagcctgccccgggtggtgaagagaagagtgaatgccctgaagaacctgcaggtgaagtgtgcccagatcgaggccaagttctatgaggaggtgcatgacctggagaggaaatatgctgtgctgtaccagcccctgtttgacaagagatttgagatcatcaatgccatctatgagcccacagaggaggagtgtgagtggaagccagatgaggaggatgagatcagcgagctgaaggagaaggccaagattgaagatgagaagaaggatgaggagaaggaggaccccaagggcatccctgagttctggctgactgtgttcaagaatgtggacctgctgagtgacatggtgcaggagcatgatgagcccatcctgaagcacctgaaggacatcaaggtgaagttcagtgatgctggccagcccatgagctttgtgctggagttccactttgagcccaatgagtacttcaccaatgaggtgctgaccaagacctacaggatgaggtctgagccagatgacagcgaccccttctcctttgatggccctgagatcatgggctgcaccggctgccagattgactggaagaagggcaagaatgtgaccctgaagaccatcaagaagaagcagaagcacaagggccggggcaccgtgaggacagtgaccaagacagtgtccaatgacagcttcttcaacttctttgcccctcctgaggtgcctgagagcggggacctggatgatgatgctgaggccatcctggccgctgactttgagatcggccacttcctgcgggagcgcatcatccccaggtctgtgctgtacttcaccggggaggccattgaagatgatgatgatgattatgatgaggagggggaggaggctgatgaggagggggaggaggagggagatgaggagaatgaccctgactatgaccccaagaaggaccagaacccagctgagtgcaagcagcagtag

SEQ ID NO: 162585 - DNA, 627 bp, synthetic construct
  misc_feature 1..627: note = Description of Artificial Sequence: Synthetic coding sequence
  source 1..627: mol_type = other DNA
atggtgcaggagcatgatgagcccatcctgaagcacctgaaggacatcaaggtgaagttcagtgatgctggccagcccatgagctttgtgctggagttccactttgagcccaatgagtacttcaccaatgaggtgctgaccaagacctacaggatgaggtctgagccagatgacagcgaccccttctcctttgatggccctgagatcatgggctgcaccggctgccagattgactggaagaagggcaagaatgtgaccctgaagaccatcaagaagaagcagaagcacaagggccggggcaccgtgaggacagtgaccaagacagtgtccaatgacagcttcttcaacttctttgcccctcctgaggtgcctgagagcggggacctggatgatgatgctgaggccatcctggccgctgactttgaaattggccacttcctgcgggagcgcatcatccccaggtctgtgctgtacttcaccggggaggccattgaagatgatgatgatgattatgatgaggagggggaggaggctgatgaggagggggaggaggagggagatgaagaaaatgaccctgactatgaccccaagaaggaccagaacccagctgagtgcaagcagcagtag

SEQ ID NO: 162586 - DNA, 987 bp, synthetic construct
  misc_feature 1..987: note = Description of Artificial Sequence: Synthetic coding sequence
  source 1..987: mol_type = other DNA
atggctgacatcgacaacctgccccgggtggtgaagagaagagtgaatgccctgaagaacctgcaggtgaagtgtgcccagatcgaggccaagttctatgaggaggtgcatgacctggagaggaaatatgctgtgctgtaccagcccctgtttgacaagagatttgagatcatcaatgccatctatgagcccacagaggaggagtgtgagtggaagccagatgaggaggatgagatcagcgaggagctgaaggagaaggccaagattgaagatgagaagaaggatgaggagaaggaggaccccaagggcatccctgagttctggctgaccgtcttcaagaatgtggacctgctgagtgacatggtgcaggagcatgatgagcccatcctgaagcacctgaaggacatcaaggtgaagttcagtgatgctggccagcccatgagctttgtgctggagttccactttgagcccaatgagtacttcaccaatgaggtgctgaccaagacctacaggatgaggtctgagccagatgacagcgaccccttctcctttgatggccctgagatcatgggctgcaccggctgccagattgactggaagaagggcaagaatgtgaccctgaagaccatcaagaagaagcagaagcacaagggccggggcaccgtgaggacagtgaccaagacagtgtccaatgacagcttcttcaacttctttgcccctcctgaggtgcctgagagcggggacctggatgatgatgctgaggccatcctggccgctgactttgaaattggccacttcctgcgggagcgcatcatccccaggtctgtgctgtacttcaccggggaggccattgaagatgatgatgatgattatgatgaggagggggaggaggctgatgaggagggggaggaggagggagatgaagaaaatgaccctgactatgaccccaagaaggaccagaacccagctgagtgcaagcagcagtag

SEQ ID NO: 162587 - DNA, 1107 bp, synthetic construct
  misc_feature 1..1107: note = Description of Artificial Sequence: Synthetic coding sequence
  source 1..1107: mol_type = other DNA
atggctgacatcgacaacaaggagcagagcgagctggaccaggacctggatgatgtggaggaggtggaggaggaggagactggagaggagaccaagctgaaggcccggcagctgactgtgcagatgatgcagaacccccagatcctggccgccctgcaggagcggctggatggcctggtggagacccccaccggctacatcgagagcctgccccgggtggtgaagagaagagtgaatgccctgaagaacctgcaggtgaagtgtgcccagatcgaggccaagttctatgaggaggtgcatgacctggagaggaaatatgctgtgctgtaccagcccctgtttgacaagagatttgagatcatcaatgccatctatgagcccacagaggaggagtgtgagtggaagccagatgaagaagatgagatcagcgaggagctgaaggagaaggccaagattgaagatgagaagaaggatgaggagaaggaggaccccaagggcatccctgagttctggctgactgtgttcaagaatgtggacctgctgagtgacatggtgcaggagcatgatgagcccatcctgaagcacctgaaggacatcaaggtgaagttcagtgatgctggccagcccatgagctttgtgctggagttccactttgagcccaatgagtacttcaccaatgaggtgctgaccaagacctacaggatgaggtctgagccagatgacagcgaccccttctcctttgatggccctgagatcatgggctgcaccggctgccagattgactggaagaagggcaagaatgtgaccctgaagaccatcaagaagaagcagaagcacaagggccggggcaccgtgaggacagtgaccaagacagtgtccaatgacagcttcttcaacttctttgcccctcctgaggtgcctgagagcggggacctggatgatgatgctgaggccatcctggccgctgactttgagatcggccacttcctgcgggagcgcatcatccccaggtctgtgctgtacttcaccggggaggccattgaagatgatgatgatgattatgatgaggagggggaggaggctgatgaggtgatgttcaccaagtag

SEQ ID NO: 162588 - DNA, 795 bp, synthetic construct
  misc_feature 1..795: note = Description of Artificial Sequence: Synthetic coding sequence
  source 1..795: mol_type = other DNA
atggctgacatcgacaacaaggagcagagcgagctggaccaggacctggatgatgtggaggaggtggaggaggaggagactggagaggagaccaagctgaaggcccggcagctgactgtgcagatgatgcagaacccccagatcctggccgccctgcaggagcggctggatggcctggtggagacccccaccggctacatcgagagcctgccccgggtggtgaagagaagagtgaatgccctgaagaacctgcaggtgaagtgtgcccagatcgaggccaagttctatgaggaggtgcatgacctggagaggaaatatgctgtgctgtaccagcccctgtttgacaagagatttgagatcatcaatgccatctatgagcccacagaggaggagtgtgagtggaagccagatgaagaagatgagatcagcgaggagctgaaggagaaggccaagattgaagatgagaagaaggatgaggagaaggaggaccccaagggcatccctgagttctggctgactgtgttcaagaatgtggacctgctgagtgacatggtgcaggagcatgatgagcccatcctgaagcacctgaaggacatcaaggtgaagttcagtgatgctggccagcccatgagctttgtgctggagttccactttgagcccaatgagtacttcaccaatgaggtgctgaccaagacctacaggatgaggtctgagccagatgacagcgaccccttctcctttgatggccctgagatcatgggctgcaccggctgccagattgactggaagaagtag

SEQ ID NO: 162589 - DNA, 1158 bp, synthetic construct
  misc_feature 1..1158: note = Description of Artificial Sequence: Synthetic coding sequence
  source 1..1158: mol_type = other DNA
aaggagcagagcgagctggaccaggacctggatgatgtggaggaggtggaggaggaggagactggagaggagaccaagctgaaggcccggcagctgactgtgcagatgatgcagaacccccagatcctggccgccctgcaggagcggctggatggcctggtggagacccccaccggctacatcgagagcctgccccgggtggtgaagagaagagtgaatgccctgaagaacctgcaggtgaagtgtgcccagatcgaggccaagttctatgaggaggtgcatgacctggagaggaaatatgctgtgctgtaccagcccctgtttgacaagagatttgagatcatcaatgccatctatgagcccacagaggaggagtgtgagtggaagccagatgaagaagatgagatcagcgaggagctgaaggagaaggccaagattgaagatgagaagaaggatgaggagaaggaggaccccaagggcatccctgagttctggctgactgtgttcaagaatgtggacctgctgagtgacatggtgcaggagcatgatgagcccatcctgaagcacctgaaggacatcaaggtgaagttcagtgatgctggccagcccatgagctttgtgctggagttccactttgagcccaatgagtacttcaccaatgaggtgctgaccaagacctacaggatgaggtctgagccagatgacagcgaccccttctcctttgatggccctgagatcatgggctgcaccggctgccagattgactggaagaagggcaagaatgtgaccctgaagaccatcaagaagaagcagaagcacaagggccggggcaccgtgaggacagtgaccaagacagtgtccaatgacagcttcttcaacttctttgcccctcctgaggtgcctgagagcggggacctggatgatgatgctgaggccatcctggccgctgactttgagatcggccacttcctgcgggagcgcatcatccccaggtctgtgctgtacttcaccggggaggccattgaagatgatgatgatgattatgatgaggagggggaggaggctgatgaggagggggaggaggagggagatgaggagaatgaccctgactatgaccccaagaaggaccagaacccagctgagtgcaagcagcagtag

SEQ ID NO: 162590 - DNA, 1521 bp, synthetic construct
  misc_feature 1..1521: note = Description of Artificial Sequence: Synthetic coding sequence
  source 1..1521: mol_type = other DNA
atggccgaggccgacttcaagatggtgtctgagcctgtggcccatggagtggccgaggaggagatggccagcagcaccagtgacagcggggaggagagtgacagcagcagcagcagcagcagcaccagtgacagcagcagcagcagcagcaccagcggcagcagcagcggcagcggcagcagcagcagcagcagcggcagcaccagcagccgcagccggctgtacaggaagaagagggtgcctgagcccagcagaagagcccggcgggcccccctgggcaccaactttgtggaccggctgccccaggccgtgaggaacagagtgcaggccctgaggaacatccaggatgaatgtgacaaggtggacaccctcttcctgaaggccatccatgacctggagaggaaatatgcagagctgaacaagcccctgtatgaccggcgcttccagatcatcaatgcagaatatgagcccacagaggaggagtgtgagtggaacagtgaagatgaggagttcagcagtgatgaggaggtgcaggacaacaccccatctgagatgccacccctggagggggaggaggaggagaaccccaaggagaaccctgaggtgaaggccgaggagaaggaggtgcccaaggagatccctgaggtgaaggatgaggagaaggaggtgcccaaggagatccctgaggtgaaggccgaggagaaggctgacagcaaggactgcatggaggccaccccagaggtgaaggaggaccccaaggaggtgccccaggtgaaggcagatgacaaggagcagcccaaggccacagaggccaaggcccgggctgctgtgcgggagacccacaagagggtgcctgaggagcggctgcaggacagcgtggacctgaagagggccaggaagggcaagcccaagcgggaggaccccaagggcatcccagactactggctgattgtgctgaagaatgtggacaagctgggccccatgatccagaagtatgatgagcccatcctgaagttcctgagtgatgtgtccctgaagttcagcaagccaggccagcctgtgtcctacacctttgagttccacttcctgcccaacccctacttcagaaatgaggtgctggtgaagacctacatcatcaaggccaagccagaccacaatgaccccttcttctcctggggctgggagattgaggactgcaagggctgcaagattgactggaggcggggcaaggatgtgacagtgaccaccacccagagcaggaccacagccaccggggagattgagatccagccccgggtggtgcccaatgccagcttcttcaacttcttcagccccccagagatccccatgattggcaagctggagccccgggaggatgccatcctggatgaggactttgagatcggccagatcctgcatgacaacgtcatcctgaagagcatctactactacacaggagaggtgaatggcacctactaccagtttgggaagcactacggcaacaagaagtacaggaagtag

SEQ ID NO: 162591 - DNA, 1500 bp, synthetic construct
  misc_feature 1..1500: note = Description of Artificial Sequence: Synthetic coding sequence
  source 1..1500: mol_type = other DNA
atggtgtctgagcctgtggcccacggcgtggccgaggaggagatggccagcagcaccagtgacagcggggaggagagtgacagcagcagcagcagcagcagcaccagtgacagcagcagcagcagcagcaccagcggcagcagcagcggcagcggcagcagcagcagcagcagcggcagcaccagcagccgcagccggctgtacaggaagaagagggtgcctgagcccagccggcgggcccggcgggcccccctgggcaccaactttgtggaccggctgccccaggccgtgaggaacagagtgcaggccctgaggaacatccaggatgaatgtgacaaggtggacaccctcttcctgaaggccatccatgacctggagaggaaatatgcagagctgaacaagcccctgtatgaccggcgcttccagatcatcaatgcagaatatgagcccacagaggaggagtgtgagtggaacagtgaagatgaggagttcagcagtgatgaggaggtgcaggacaacacccccagcgagatgccacccctggagggggaggaggaggagaaccccaaggaaaatcctgaggtgaaggccgaggagaaggaggtgcccaaggagatccctgaggtgaaggatgaggagaaggaggtgcccaaggagatccctgaggtgaaggccgaggagaaggctgacagcaaggactgcatggaggccaccccagaggtgaaggaggaccccaaggaggtgccccaggtgaaggcagatgacaaggagcagcccaaggccacagaggccaaggcccgggctgctgtgcgggagacccacaagagggtgcctgaggagcggctgcaggacagcgtggacctgaagagggccaggaagggcaagcccaagcgggaggaccccaagggcatcccagactactggctgattgtgctgaagaatgtggacaagctgggccccatgatccagaagtatgatgagcccatcctgaagttcctgagtgatgtgtccctgaagttcagcaagccaggccagcctgtgtcctacacctttgagttccacttcctgcccaacccctacttcagaaatgaggtgctggtgaagacctacatcatcaaggccaagccagaccacaatgaccccttcttctcctggggctgggagattgaggactgcaagggctgcaagattgactggaggcggggcaaggatgtgacagtgaccaccacccagagcaggaccacagccactggagaaattgagatccagccccgggtggtgcccaatgccagcttcttcaacttcttcagccccccagagatccccatgattggcaagctggagcccagagaagatgccatcctggatgaagattttgaaattggccagatcctgcatgacaacgtcatcctgaagagcatctactactacaccggggaggtgaatggcacctactaccagtttgggaagcactacggcaacaagaagtacaggaagtag

SEQ ID NO: 162592 - DNA, 1128 bp, synthetic construct
  misc_feature 1..1128: note = Description of Artificial Sequence: Synthetic coding sequence
  source 1..1128: mol_type = other DNA
atggctgaccacagcttcagtgatggagtgcccagcgacagcgtggaggccgccaagaatgccagcaacacagagaagctgacagaccaggtgatgcagaacccccgggtgctggccgccctgcaggagcggctggacaacgtgccccacacccccagcagctacatcgagaccctgcccaaggctgtgaagaggcgcatcaatgccctgaagcagctgcaggtgcgctgtgcccacatcgaggccaagttctatgaggaggtgcatgacctggagaggaaatatgctgccctgtaccagcccctgtttgacaagaggcgggagttcatcactggagatgtggagcccacagatgctgagagcgagtggcacagtgaaaatgaggaggaggagaagctggccggggacatgaagagcaaggtggtggtgacagagaaggccgccgccacagctgaggagccagaccccaagggcatccctgagttctggttcaccatcttcagaaatgtggacatgctgtctgagctggtgcaggagtatgatgagcccatcctgaagcacctgcaggacatcaaggtgaagttcagtgaccccggccagcccatgagctttgtgctggagttccactttgagcccaatgactacttcaccaacagcgtgctgaccaagacctacaagatgaagtctgagccagacaaggctgaccccttctcctttgagggccctgagatcgtggactgtgatggctgcaccatcgactggaagaagggcaagaatgtgacagtgaagaccatcaagaagaagcagaagcacaagggccggggcaccgtgaggaccatcaccaagcaggtgcccaatgaaagcttcttcaacttcttcaaccccctgaaggccagcggagatggagagagcctggatgaagattctgagttcaccctggccagtgactttgaaattggccacttcttccgggagagaattgtgcccagggctgtgctgtacttcaccggggaggccattgaagatgatgacaactttgaggagggggaggagggggaggaggaggagctggagggagatgaggagggggaggatgaagatgatgctgagatcaaccccaaggtgtag

SEQ ID NO: 162593 - DNA, 1161 bp, synthetic construct
  misc_feature 1..1161: note = Description of Artificial Sequence: Synthetic coding sequence
  source 1..1161: mol_type = other DNA
atggctgaccacagcttcagtgatggagtgcccagcgacagcgtggaggccgccaagaatgccagcaacacagagaagctgacagaccaggtgatgcagaacccccgggtgctggccgccctgcaggagcggctggacaacgtgccccacacccccagcagctacatcgagaccctgcccaaggctgtgaagaggcgcatcaatgccctgaagcagctgcaggtgcgctgtgcccacatcgaggccaagttctatgaggaggtgcatgacctggagaggaaatatgctgccctgtaccagcccctgtttgacaagaggcgggagttcatcactggagatgtggagcccacagatgctgagagcgagtggcacagtgaaaatgaggaggaggagaagctggccggggacatgaagagcaaggtggtggtgacagagaaggccgccgccacagctgaggagccagaccccaagggcatccctgagttctggttcaccatcttcagaaatgtggacatgctgtctgagctggtgcaggagtatgatgagcccatcctgaagcacctgcaggacatcaaggtgaagttcagtgaccccggccagcccatgagctttgtgctggagttccactttgagcccaatgactacttcaccaacagcgtgctgaccaagacctacaagatgaagtctgagccagacaaggctgaccccttctcctttgagggccctgagatcgtggactgtgatggctgcaccatcgactggaagaagggcaagaatgtgacagtgaagaccatcaagaagaagcagaagcacaagggccggggcaccgtgaggaccatcaccaagcaggtgcccaatgaaagcttcttcaacttcttcaaccccctgaagggcaagggccagagcaagagcaaggatgaagattctgagttcaccctggccagtgactttgaaattggccacttcttccgggagagaattgtgcccagggctgtgctgtacttcaccggggaggccattgaagatgatgacaactttgaggagggggaggagggggaggaggaggagctggagggagatgaggagggggaggatgaagatgatgctgagatcaaccccaagaaggagcccagccagcctgctgagtgcaagcagcagtag

SEQ ID NO: 162594 - DNA, 537 bp, synthetic construct
  misc_feature 1..537: note = Description of Artificial Sequence: Synthetic coding sequence
  source 1..537: mol_type = other DNA
atggctgaccacagcttcagtgatggagtgcccagcgacagcgtggaggccgccaagaatgccagcaacacagagaagctgacagaccaggtgatgcagaacccccgggtgctggccgccctgcaggagcggctggacaacgtgccccacacccccagcagctacatcgagaccctgcccaaggctgtgaagaggcgcatcaatgccctgaagcagctgcaggtgcgctgtgcccacatcgaggccaagttctatgaggaggtgcatgacctggagaggaaatatgctgccctgtaccagcccctgtttgacaagaggcgggagttcatcactggagatgtggagcccacagatgctgagagcgagtggcacagtgaaaatgaggaggaggagaagctggccggggacatgaagagcaaggtggtggtgacagagaaggccgccgccacagctgaggagccagaccccaagggcatccctgagttctggttcaccatcttcagaaatgtggacatgctgtctgagctggtgcagtag

SEQ ID NO: 162595 - DNA, 1161 bp, synthetic construct
  misc_feature 1..1161: note = Description of Artificial Sequence: Synthetic coding sequence
  source 1..1161: mol_type = other DNA
atggctgaccacagcttcagtgatggagtgcccagcgacagcgtggaggccgccaagaatgccagcaacacagagaagctgacagaccaggtgatgcagaacccccgggtgctggccgccctgcaggagcggctggacaacgtgccccacacccccagcagctacatcgagaccctgcccaaggctgtgaagaggcgcatcaatgccctgaagcagctgcaggtgcgctgtgcccacatcgaggccaagttctatgaggaggtgcatgacctggagaggaaatatgctgccctgtaccagcccctgtttgacaagaggcgggagttcatcactggagatgtggagcccacagatgctgagagcgagtggcacagtgaaaatgaggaggaggagaagctggccggggacatgaagagcaaggtggtggtgacagagaaggccgccgccacagctgaggagccagaccccaagggcatccctgagttctggttcaccatcttcagaaatgtggacatgctgtctgagctggtgcaggagtatgatgagcccatcctgaagcacctgcaggacatcaaggtgaagttcagtgaccccggccagcccatgagctttgtgctggagttccactttgagcccaatgactacttcaccaacagcgtgctgaccaagacctacaagatgaagtctgagccagacaaggctgaccccttctcctttgagggccctgagatcgtggactgtgatggctgcaccatcgactggaagaagggcaagaatgtgacagtgaagaccatcaagaagaagcagaagcacaagggccggggcaccgtgaggaccatcaccaagcaggtgcccaatgaaagcttcttcaacttcttcaaccccctgaaggccagcggagatggagagagcctggatgaagattctgagttcaccctggccagtgactttgaaattggccacttcttccgggagagaattgtgcccagggctgtgctgtacttcaccggggaggccattgaagatgatgacaactttgaggagggggaggagggggaggaggaggagctggagggagatgaggagggggaggatgaagatgatgctgagatcaaccccaagaaggagcccagccagcctgctgagtgcaagcagcagtag

SEQ ID NO: 162596 - DNA, 387 bp, synthetic construct
  misc_feature 1..387: note = Description of Artificial Sequence: Synthetic coding sequence
  source 1..387: mol_type = other DNA
atggctgaccacagcttcagtgatggagtgcccagcgacagcgtggaggccgccaagaatgccagcaacacagagaagctgacagaccaggtgatgcagaacccccgggtgctggccgccctgcaggagcggctggacaacgtgccccacacccccagcagctacatcgagaccctgcccaaggctgtgaagaggcgcatcaatgccctgaagcagctgcaggtgcgctgtgcccacatcgaggccaagttctatgaggaggtgcatgacctggagaggaaatatgctgccctgtaccagcccctgtttgacaagaggcgggagttcatcactggagatgtggagcccacagatgctgagagcgagtggcacagtgaaaatgaatag

SEQ ID NO: 162597 - DNA, 423 bp, synthetic construct
  misc_feature 1..423: note = Description of Artificial Sequence: Synthetic coding sequence
  source 1..423: mol_type = other DNA
atggctgaccacagcttcagtgatggagtgcccagcgacagcgtggaggccgccaagaatgccagcaacacagagaagctgacagaccaggtgatgcagaacccccgggtgctggccgccctgcaggagcggctggacaacgtgccccacacccccagcagctacatcgagaccctgcccaaggctgtgaagaggcgcatcaatgccctgaagcagctgcaggtgcgctgtgcccacatcgaggccaagttctatgaggaggtgcatgacctggagaggaaatatgctgccctgtaccagcccctgtttgacaagaggcgggagttcatcactggagatgtggagcccacagatgctgagagcgagtggcacagtgaaaatgaggaggaggagaagctggccggggacatgaagagcaagtag

SEQ ID NO: 162598 - DNA, 402 bp, synthetic construct
  misc_feature 1..402: note = Description of Artificial Sequence: Synthetic coding sequence
  source 1..402: mol_type = other DNA
atggctgaccacagcttcagtgatggagtgcccagcgacagcgtggaggccgccaagaatgccagcaacacagagaagctgacagaccaggtgatgcagaacccccgggtgctggccgccctgcaggagcggctggacaacgtgccccacacccccagcagctacatcgagaccctgcccaaggctgtgaagaggcgcatcaatgccctgaagcagctgcaggtgcgctgtgcccacatcgaggccaagttctatgaggaggtgcatgacctggagaggaaatatgctgccctgtaccagcccctgtttgacaagaggcgggagttcatcactggagatgtggagcccacagatgctgagagcgagtggcacagtgaaaatgaggaggaggagaagctgtag

SEQ ID NO: 162599 - DNA, 324 bp, synthetic construct
  misc_feature 1..324: note = Description of Artificial Sequence: Synthetic coding sequence
  source 1..324: mol_type = other DNA
atggctgaccacagcttcagtgatggagtgcccagcgacagcgtggaggccgccaagaatgccagcaacacagagaagctgacagaccaggtgatgcagaacccccgggtgctggccgccctgcaggagcggctggacaacgtgccccacacccccagcagctacatcgagaccctgcccaaggctgtgaagaggcgcatcaatgccctgaagcagctgcaggtgcgctgtgcccacatcgaggccaagttctatgaggaggtgcatgacctggagaggaaatatgctgccctgtaccagcccctgtttgacaagagaagatag

SEQ ID NO: 162600 - DNA, 237 bp, synthetic construct
  misc_feature 1..237: note = Description of Artificial Sequence: Synthetic coding sequence
  source 1..237: mol_type = other DNA
atggctgaccacagcttcagtgatggagtgcccagcgacagcgtggaggccgccaagaatgccagcaacacagagaagctgacagaccaggtgatgcagaacccccgggtgctggccgccctgcaggagcggctggacaacgtgccccacacccccagcagctacatcgagaccctgcccaaggctgtgaagaggcgcatcaatgccctgaagcagctgcaggtgcgctgtgcctag

SEQ ID NO: 162601 - DNA, 549 bp, synthetic construct
  misc_feature 1..549: note = Description of Artificial Sequence: Synthetic coding sequence
  source 1..549: mol_type = other DNA
atggctgacagcgagaaccagggccctgctgagcccagccaggccgctgctgctgctgaggccgctgctgaggaggtgatggccgagggcggggcccagggcggggactgtgacagcgctgctggggaccctgacagcgctgctggccagatggccgaggagccccagaccccagcagaaaatgcccccaagcccaagaatgacttcatcgagagcctgcccaacagcgtgaagtgccgggtgctggccctgaagaagctgcagaagagatgtgacaagattgaggccaagtttgacaaggagttccaggccctggagaagaagtacaatgacatctacaagcccctgctggccaagatccaggagctgaccggggagatggagggctgtgcctggaccctggagggggaggaggaggaggaggaggagtatgaagatgatgaggaggagggggaggatgaggaggaggaggaggccgctgctgaggccgctgctggggccaagcatgatgatgcccacgccgagatgccagatgatgccaagaagtag

SEQ ID NO: 162602 - DNA, 438 bp, synthetic construct
  misc_feature 1..438: note = Description of Artificial Sequence: Synthetic coding sequence
  source 1..438: mol_type = other DNA
atggctgacagcgagaaccagggccctgctgagcccagccaggccgctgctgctgctgaggccgctgctgaggaggtgatggccgagggcggggcccagggcggggactgtgacagcgctgctggggaccctgacagcgctgctggccagatggccgaggagccccagaccccagcagaaaatgcccccaagcccaagaatgacttcatcgagagcctgcccaacagcgtgaagtgccgggtgctggccctgaagaagctgcagaagagatgtgacaagattgaggccaagtttgacaaggagttccaggccctggagaagaagtacaatgacatctacaagcccctgctggccaagatccaggagctgaccggggagatggagggctgtgcctggaccctggagggggaggagaggaggaagagggtgcggggctag

SEQ ID NO: 162603 - DNA, 963 bp, synthetic construct
  misc_feature 1..963: note = Description of Artificial Sequence: Synthetic coding sequence
  source 1..963: mol_type = other DNA
atggaggaggtgccccatgactgccctggagctgacagcgcccaggccggccgcggggccagctgccagggctgccccaaccagaggctgtgtgccagcggggccggggccaccccagacacagccatcgaggagatcaaggagaagatgaagacagtgaagcacaagatcctggtgctgtctggaaaaggaggagtgggcaagagcaccttcagcgcccacctggcccacggcctggctgaagatgagaacacccagatcgccctgctggacatcgacatctgtggccccagcatccccaagatcatgggcctggagggggagcaggtgcaccagagcggcagcggctggagccctgtgtatgtggaggacaacctgggcgtgatgtctgtgggcttcctgctgagcagcccagatgatgctgtgatctggaggggccccaagaagaatggcatgatcaagcagttcctgagagatgtggactggggcgaggtggactacctgattgtggacaccccacctggcaccagtgatgagcacctgtctgtggtgcgctacctggccacagcccacattgatggagctgtgatcatcaccaccccccaggaggtgtccctgcaggatgtgaggaaggagatcaacttctgcaggaaggtgaagctgcccatcatcggcgtggtggagaacatgagcggcttcatctgccccaagtgcaagaaggagagccagatcttcccccccaccactggaggagctgagctgatgtgccaggacctggaggtgcccctgctgggccgggtgcccctggaccccctgattggcaagaactgtgacaagggccagagcttcttcattgatgccccagacagccctgccaccctggcctaccgcagcatcatccagaggatccaggagttctgcaacctgcaccagagcaaggaggagaacctgatcagcagctag

SEQ ID NO: 162604 - DNA, 930 bp, synthetic construct
  misc_feature 1..930: note = Description of Artificial Sequence: Synthetic coding sequence
  source 1..930: mol_type = other DNA
atggaggaggtgccccatgactgccctggagctgacagcgcccaggccggccgcggggccagctgccagggctgccccaaccagaggctgtgtgccagcggggccggggccaccccagacacagccatcgaggagatcaaggagaagatgaagacagtgaagcacaagatcctggtgctgtctggaaaaggaggagtgggcaagagcaccttcagcgcccacctggcccacggcctggctgaagatgagaacacccagatcgccctgctggacatcgacatctgtggccccagcatccccaagatcatgggcctggagggggagcagtatgtggaggacaacctgggcgtgatgtctgtgggcttcctgctgagcagcccagatgatgctgtgatctggaggggccccaagaagaatggcatgatcaagcagttcctgagagatgtggactggggcgaggtggactacctgattgtggacaccccacctggcaccagtgatgagcacctgtctgtggtgcgctacctggccacagcccacattgatggagctgtgatcatcaccaccccccaggaggtgtccctgcaggatgtgaggaaggagatcaacttctgcaggaaggtgaagctgcccatcattggagtggtggagaacatgagcggcttcatctgccccaagtgcaagaaggagagccagatcttcccccccaccaccggcggcgctgagctgatgtgccaggacctggaggtgcccctgctgggccgggtgcccctggaccccctcatcggcaagaactgtgacaagggccagagcttcttcattgatgccccagacagccctgccaccctggcctaccgcagcatcatccagaggatccaggagttctgcaacctgcaccagagcaaggaggagaacctgatcagcagctag

SEQ ID NO: 162605 - DNA, 816 bp, synthetic construct
  misc_feature 1..816: note = Description of Artificial Sequence: Synthetic coding sequence
  source 1..816: mol_type = other DNA
atggaggccgctgctgagcccggcaacctggccggcgtgcgccacatcatcctggtgctgtctggaaaaggaggagtgggcaagagcaccatcagcacagagctggccctggccctgcggcatgctgggaagaaggtgggcatcctggatgtggacctgtgtggccccagcatccccaggatgctgggcgcccagggccgggctgtgcaccagtgtgaccggggctgggcccctgtgttcctggaccgggagcagagcatcagcctgatgtctgtgggcttcctgctggagaagccagatgaggccgtggtgtggaggggccccaagaagaatgccctgatcaagcagtttgtgtctgatgtggcctggggcgagctggactacctggtggtggacaccccacctggcaccagtgatgagcacatggccaccatcgaggccctgcggccctaccagcccctgggcgccctggtggtgaccaccccccaggccgtgtctgtgggagatgtgagaagagagctgaccttctgcaggaagacaggcctgcgggtgatgggcatcgtggagaacatgagcggcttcacctgcccccactgcacagaatgtaccagcgtcttcagcagaggaggaggagaggagctggcccagctggccggcgtgcccttcctgggctctgtgcccctggaccctgccctgatgaggaccctggaggagggccatgacttcatccaggagttccctggcagccctgcctttgctgccctgaccagcatcgcccagaagatcctggatgccaccccagcctgcctgccctag

SEQ ID NO: 162606 - DNA, 393 bp, synthetic construct
  misc_feature 1..393: note = Description of Artificial Sequence: Synthetic coding sequence
  source 1..393: mol_type = other DNA
atggccaccatcgaggccctgcggccctaccagcccctgggcgccctggtggtgaccaccccccaggccgtgtctgtgggagatgtgcggcgggagctgaccttctgcaggaagacaggcctgcgggtgatgggcatcgtggagaacatgagcggcttcacctgcccccactgcacagagtgcacctctgtgttcagccggggcggcggggaggagctggcccagctggccggcgtgcccttcctgggctctgtgcccctggaccctgccctgatgaggaccctggaggagggccatgacttcatccaggagttccctggcagccctgcctttgctgccctgaccagcatcgcccagaagatcctggatgccaccccagcctgcctgccctag

SEQ ID NO: 162607 - DNA, 960 bp, synthetic construct
  misc_feature 1..960: note = Description of Artificial Sequence: Synthetic coding sequence
  source 1..960: mol_type = other DNA
atgggcatctggcagaggctgctgctgtttggaggagtgtccctgcgggccggcggcggggccacagcccccctgggcggcagccgggccatggtgtgtggccggcagctgagcggggccggcagcgagaccctgaagcagaggaggacccagatcatgagccggggcctgcccaagcagaagcccattgaaggagtgaagcaggtgattgtggtggccagcggcaagggcggcgtgggcaagagcaccacagctgtgaacctggccctggccctggccgccaatgacagcagcaaggccatcggcctgctggatgtggatgtgtatggccccagcgtgcccaagatgatgaacctgaagggcaaccctgagctgagccagagcaacctgatgaggcccctgctgaactatggaattgcctgcatgtccatgggcttcctggtggaggagagcgagcctgtggtgtggaggggcctgatggtgatgtctgccatcgagaagctgctgcggcaggtggactggggccagctggactacctggtggtggacatgcctcctggcactggagatgtgcagctgtctgtgtcccagaacatccccatcaccggggccgtcatcgtgtccaccccccaggacatcgccctgatggatgcccacaagggagctgagatgttccggcgggtgcacgtgcctgtgctgggcctggtgcagaacatgtctgtgttccagtgccccaagtgcaagcacaagacccacatctttggagcagatggagccaggaagctggcccagaccctgggcctggaggtgctgggggacatccccctgcacctgaacatccgggaggccagtgacaccggccagcccatcgtgttcagccagcctgagagtgatgaggccaaggcctacctgagaattgctgtggaggtggtgcggcggctgcccagccccagcgagtag

SEQ ID NO: 162608 - DNA, 672 bp, synthetic construct
  misc_feature 1..672: note = Description of Artificial Sequence: Synthetic coding sequence
  source 1..672: mol_type = other DNA
atgagcaaggccatcggcctgctggatgtggatgtgtatggccccagcgtgcccaagatgatgaacctgaagggcaaccctgagctgagccagagcaacctgatgaggcccctgctgaactatggaattgcctgcatgtccatgggcttcctggtggaggagagcgagcctgtggtgtggaggggcctgatggtgatgtctgccatcgagaagctgctgcggcaggtggactggggccagctggactacctggtggtggacatgcctcctggcactggagatgtgcagctgtctgtgtcccagaacatccccatcaccggggccgtcatcgtgtccaccccccaggacatcgccctgatggatgcccacaagggagctgagatgttccggcgggtgcacgtgcctgtgctgggcctggtgcagaacatgtctgtgttccagtgccccaagtgcaagcacaagacccacatctttggagcagatggagccaggaagctggcccagaccctgggcctggaggtgctgggggacatccccctgcacctgaacatccgggaggccagtgacaccggccagcccatcgtgttcagccagcctgagagtgatgaggccaaggcctacctgagaattgctgtggaggtggtgcggcggctgcccagccccagcgagtag
